United States Patent Application Publication US 2018/0126003 A1 - sequence listing, part 31

SEQ ID NO: 50632 - DNA, 4239 bp, Artificial Sequence
  derived and/or modified sequence
atggccgaggccaggaagagaagagagctgctgcccctcatctaccaccacctgctgcgggccggctacgtgcgggccgcccgggaggtgaaggagcagagcggccagaagtgcttcctggcccagcctgtgaccctgctggacatctacacccactggcagcagaccagcgagctgggcaggaagaggaaggccgaggaggatgctgccctgcaggccaagaagaccagggtgtctgaccccatcagcaccagcgagagcagcgaggaggaggaggaggccgaggccgagacagccaaggccaccccccggctggccagcaccaacagctctgtgctgggcgctgacctgcccagctccatgaaggagaaggccaaggccgagacagagaaggccggcaagacaggcaacagcatgccccacccagccaccgggaagacagtggccaacctgctgagcggcaagagccccaggaagtctgctgagcccagcgccaacaccaccctggtgtctgaaacagaggaggagggctctgtgcctgccttcggggctgctgccaagccaggcatggtgtctgctggccaggccgacagcagcagcgaggacaccagcagcagcagtgatgaaacagatgtggaggtgaaggccagcgagaagatcctgcaggtgcgggccgccagcgccccagccaagggcacccctgggaagggggccaccccagcccctcctgggaaggccggggctgtggccagccagaccaaggccggcaagccagaggaggacagcgagagcagcagcgaggagagcagtgacagcgaggaggagaccccagctgccaaggccctgctgcaggccaaggccagcggcaagaccagccaggtgggcgccgccagcgccccagccaaggagagccccaggaaaggagctgccccagcccctcctgggaagacaggccctgctgtggccaaggcccaggccggcaagcgggaggaggacagccagagcagcagcgaggagagtgacagcgaggaggaggccccagcccaggccaagcccagcggcaaggccccccaggtgcgggccgccagcgccccagccaaggagagccccaggaagggggccgccccagccccacccaggaagacaggccctgctgctgcccaggtgcaggtgggcaagcaggaggaggacagccgcagcagcagcgaggagagtgacagcgaccgggaggccctggccgccatgaatgctgcccaggtgaagcccctgggcaagagcccccaggtgaagccagccagcaccatgggcatgggccccctgggcaagggggccggccctgtgcccccaggcaaggtgggccctgccacccccagcgcccaggtgggcaagtgggaggaggacagcgagagcagcagcgaggagagcagtgacagcagtgatggagaggtgcccacagctgtggccccagcccaggagaagagcctgggcaacatcctgcaggccaagcccaccagcagccctgccaagggccccccccagaaggccggccctgtggccgtgcaggtgaaggccgagaagcccatggacaacagcgagagcagcgaggagagcagtgacagcgctgacagcgaggaggccccagctgccatgacagctgcccaggccaagccagccctgaagatcccccagaccaaggcctgccccaagaagaccaacaccacagccagcgccaaggtggcccctgtgcgggtgggcacccaggcccccaggaaggccggcacagccaccagccctgctggcagcagccctgctgtggccggcggcacccagaggcctgctgaggacagcagcagcagcgaggagagtgacagcgaggaggagaagacaggcctggccgtgacagtgggccaggccaagtctgtgggcaagggcctgcaggtgaaggccgcctctgtgcctgtgaagggcagcctgggccagggcacagcccctgtgctgcccgggaagacaggccccaccgtgacccaggtgaaggccgagaagcaggaggacagcgagagcagcgaggaggagagtgacagcgaggaggccgccgccagccctgcccaggtgaagacctctgtgaagaagacccaggccaaggccaacccagctgctgcccgggcccccagcgccaagggcaccatcagcgcccctgggaaggtggtgacagctgctgcccaggccaagcagaggagccccagcaaggtgaagccccctgtgaggaacccccagaacagcacagtgctggcccggggccctgcctctgtgcccagcgtgggcaaggctgtggccacagctgcccaggcccagacaggcccagaagaagattctggcagcagcgaggaggagagtgacagcgaggaggaggccgagaccctggcccaggtgaagcccagcggcaagacccaccagatccgggccgccctggccccagccaaggagagccccaggaagggggccgcccccaccccacctgggaagacaggccccagcgctgcccaggccggcaagcaggatgattctggcagcagcagcgaggagagtgacagtgatggagaggccccagctgctgtgaccagcgcccaggtgatcaagccacccctcatctttgtggaccccaacagaagccctgctggccctgctgccaccccagcccaggcccaggccgccagcacccccaggaaggcccgggccagcgagagcacagcccggagcagcagcagcgagagtgaagatgaagatgtgatcccagccacccagtgcctgaccccaggcatccgcaccaacgtggtgaccatgcccacagcccacccccgcatcgcccccaaggcctccatggccggggccagcagcagcaaggagagcagccgcatcagtgatggcaagaagcaggagggccctgccacccaggtgtccaagaagaacccagccagcctgcccctgacccaggccgccctgaaggtgctggcccagaaggccagcgaggcccagccccctgtggcccggacccagcccagcagtggagtggacagcgctgtgggcaccctgcctgccaccagcccccagagcacctctgtgcaggccaagggcaccaacaagctgaggaagcccaagctgcctgaggtgcagcaggccaccaaggcccctgagagcagtgatgattctgaggacagcagtgacagcagcagcggctctgaagaagatggagagggcccccagggcgccaagagcgcccacaccctggtgggccccacccccagcaggacagagaccctggtggaggagacagctgctgagagcagtgaagatgatgtggtggcccccagccagagcctgctgagcggctacatgaccccaggcctgaccccagccaacagccaggccagcaaggccacccccaagctggacagcagccccagcgtgagcagcaccctggccgccaaggatgatcctgatggcaagcaggaggccaagccccagcaggccgccggcatgctgagccccaagacaggaggcaaggaggccgccagcggcaccaccccccagaagagcaggaagcccaagaagggagctggcaacccccaggccagcaccctggccctgcagagcaacatcacccagtgcctgctgggccagccctggcccctgaatgaggcccaggtgcaggcctctgtggtgaaggtgctgacagagctgctggagcaggagaggaagaaggtggtggacaccaccaaggagagcagcaggaagggctgggagagcaggaagaggaagctgagcggggaccagcctgctgcccggacccccaggagcaagaagaagaagaagctgggcgctggggagggcggggaggcctctgtgtccccagagaagaccagcaccaccagcaagggcaaggccaagagggacaaggccagcggagatgtgaaggagaagaagggcaagggcagcctgggcagccagggcgccaaggatgagcctgaggaggagctgcagaagggcatgggcaccgtggagggcggggaccagagcaaccccaagagcaagaaggagaagaagaagagtgacaagaggaagaaggacaaggagaagaaggagaagaagaagaaggccaagaaggccagcaccaaggacagcgagagccccagccagaagaagaagaagaagaagaagaagacagctgagcagacagtgtag

SEQ ID NO: 50633 - DNA, 4239 bp, Artificial Sequence
  derived and/or modified sequence
atggccgaggcccggaagcggcgggagctgctgcccctgatctaccatcatcttcttcgcgccggatatgtgagggcagcccgggaggtgaaggaacagagtgggcaaaagtgttttttggctcagcctgtcactctgcttgatatctatacacactggcagcagacctctgagctgggccgcaaaaggaaagcagaagaggacgcggcccttcaagccaagaagacccgtgtcagcgaccctatcagcacgtcagagtcaagtgaagaggaggaagaggccgaagccgagacagctaaagcgacgccaaggctcgcctctactaactcttctgttctgggcgcggatttaccgagctcaatgaaggagaaggccaaggctgagacagagaaggccggcaaaaccggaaattccatgccacaccctgcgaccggaaaaacagtcgcaaacctcctcagtggcaagtcccccagaaagagtgccgagccatccgccaatactaccttagtcagcgagacggaagaagaaggcagcgtgcccgcattcggtgccgccgcaaaacccggcatggtaagcgccggtcaggcggattcctcatctgaagatacatcatctagttccgatgagaccgatgttgaagtaaaagcatccgaaaagattctgcaggtccgggcggcttcagcaccagctaagggaactccaggcaagggcgccacccctgctcctcctggcaaggccggcgccgtggctagccagactaaggcaggaaaacccgaggaagattcagaatcctctagtgaggagagtagcgatagcgaggaggagacaccagctgccaaggccctgcttcaggccaaggctagcggcaagacctcccaagtgggggccgcgagtgctcctgcgaaggagagccctcgaaaaggcgccgcaccagcccccccgggaaaaacaggtcctgctgtggcgaaagcgcaggccgggaagcgggaagaggactctcagtcaagcagcgaggaatccgattcagaagaagaggccccagctcaggccaaacccagcggtaaggctccccaggtgagggcagccagcgcccccgcgaaagaatcacctcgaaagggggcagcaccagcgcctccaagaaaaactggccctgccgccgcacaggtacaggtgggcaaacaagaggaggatagtagatcctcaagcgaggaatctgattctgaccgggaggcactcgcagcaatgaacgccgctcaggtgaaacccttaggaaaatccccccaggtcaaacctgcgagtaccatgggaatggggccgctcggtaagggcgcagggccagttccccctggcaaggtcggccctgcaactcctagtgcgcaggtcgggaagtgggaagaagatagtgaatcctcttccgaagagtcctccgacagtagtgacggcgaagtgcccaccgccgtagccccggcgcaggagaagtccttgggaaatatcttacaggccaagcctacgagtagcccagctaagggccctccccagaaagctggccctgttgctgtgcaggtgaaggctgagaaacctatggataatagcgagtctagtgaagaaagttcagactccgccgattcagaggaagccccagctgctatgactgcagcgcaagccaaacctgctttgaagatccctcagacaaaagcctgccctaaaaaaaccaataccactgcttcagctaaggttgcacctgttagggtaggcacgcaggcccccaggaaagccgggactgccactagccccgcaggatcaagtcccgcggtcgctgggggcactcagcggcccgccgaagattccagtagcagcgaggaaagcgatagcgaagaggagaaaacagggctagccgtcacagtcgggcaggcaaaaagcgtcggcaaaggattgcaagttaaagcagcgtcggtaccggtgaagggaagccttgggcagggcactgcacctgtcctgccaggtaagaccgggccaaccgttacccaagtgaaagctgagaaacaggaggacagtgagtcctctgaggaggagtcggactcggaagaggctgctgctagtcccgcgcaggtgaaaacaagtgttaagaagactcaggccaaggcgaatcccgcagccgccagggccccctccgccaagggtacaattagcgccccaggcaaggtggtgaccgccgccgcccaggccaagcagcgctcgccttctaaagtgaagcccccggtccggaatcctcaaaacagcacggtgctcgccagagggcctgccagtgtcccctccgtcggcaaagccgtggccacagccgcacaggctcaaaccggccccgaagaagacagcgggtcatccgaagaggagtctgactcagaagaggaggccgagacactcgcccaagtgaagccgtctggcaaaacacaccagatcagggctgccctcgcccctgcaaaagagtccccccgcaagggcgccgcgcccacccccccaggcaaaaccggcccctcagctgcccaggccgggaaacaggacgactcagggagttcatcagaagaatcggatagcgatggcgaggcacccgctgctgtaactagtgctcaggtaattaagcctcccttgatcttcgtggatcccaacagatcaccggctggacccgccgctactccagctcaggcccaggccgcttccacacccaggaaagcgagagcctctgaaagcacagctcgctcatcgagctcagagagcgaagacgaagacgttatccccgccacacagtgtctgactccgggaatccgtacgaacgtggtgactatgcctactgcacatcctagaatcgcccctaaggcatctatggctggtgcttcatcaagcaaggagagttctcgcatcagcgacggcaagaaacaggagggtcccgccacacaggtcagcaagaagaaccctgcctccctacctctgacacaggccgccttaaaggtgctggctcagaaggcgagcgaagcccagccacccgtcgcaaggactcagccatctagcggcgtagatagcgcagtcggaactctgccggcaacatcgccgcaaagcaccagcgtccaggctaaaggaaccaacaagctccggaagcccaaacttcctgaagtgcaacaggccaccaaggcccccgagtcgagcgatgacagcgaggacagctcggactcaagtagcggctcagaagaggacggcgagggtcctcagggtgccaagtcagcccacacgttagttgggccgacgccctcgcggacggagaccctggtggaggaaaccgccgcggagtcatctgaggatgacgtggtggccccgagccagtctcttttgagcggctacatgacgccagggttgactcccgcaaatagccaggctagtaaagcgactcctaaattagacagttctccaagcgtctctagcactctggcggccaaggacgatcctgacggcaaacaggaggctaaacctcagcaagctgccggaatgctgtcacctaaaaccggcggcaaagaggccgcaagtggtaccacccctcagaagagccggaagccgaagaagggggctgggaatcctcaggcgagtaccctggcactgcagagtaacataacccagtgcctcctggggcagccatggccactcaatgaagcacaggtgcaggccagcgttgtgaaggttctgacggagcttctcgaacaggaacggaaaaaagtcgtagacactactaaggaatccagccgaaaaggttgggaatcacgcaagcgaaagttatcaggggatcaaccagccgcgcgaacaccgcgcagcaaaaagaagaaaaagcttggcgccggagaaggaggcgaggcttccgtttcccccgagaaaacttctacaactagtaaggggaaggcaaagcgggacaaggcgagcggggacgtcaaagaaaaaaagggcaaagggtcccttggaagccagggagctaaagatgagccggaagaggagcttcagaaaggcatgggtaccgtggagggcggggaccagagtaacccaaagagcaagaaagagaagaagaagagtgataagaggaagaaggacaaagagaagaaggagaagaagaagaaggctaagaaagccagcaccaaggattcagagagtccttctcaaaaaaagaaaaagaagaaaaaaaagactgctgaacagactgtgtag

SEQ ID NO: 50634 - DNA, 4239 bp, Artificial Sequence
  derived and/or modified sequence
atggctgaagccagaaagagacgcgagctcctgcccctcatttaccaccacctgctaagggcaggctacgtaagagctgcccgagaagtaaaagagcagagcggccagaaatgcttcctggctcagcctgttactttactggacatttacactcattggcagcagaccagtgagctggggcgaaagaggaaagctgaggaggatgccgcacttcaggctaaaaaaacaagggtgagtgatcccatatccaccagcgagagctctgaggaggaagaggaggccgaggctgagacagctaaggccacccctcgcttggcgtcaacaaattccagtgtgttgggagccgatctcccctcctctatgaaggaaaaagctaaagcggagactgaaaaggctggaaagacgggaaactctatgccacatcccgctaccggcaagacagttgccaacctcctttcagggaagtcgccaagaaagtccgccgagccctcagcaaacactactctagtaagtgagaccgaggaggaaggttcagttccagccttcggggcagccgcaaaacccggtatggtgtccgctggtcaggcggatagctcctcagaggatacctccagctcatccgatgaaaccgatgttgaagtcaaagcatctgagaagattctgcaggtgcgagcggcatctgctccggctaaggggactcccggaaagggtgcgacgcccgctccgccaggaaaagccggagcagtcgcaagccaaaccaaggcgggtaagccagaagaagatagtgagtcttcctcagaagagtcatctgactcggaggaggaaacccctgccgcaaaggctctgctgcaagcaaaagccagtggcaagacctctcaggtcggggctgcatcagctccggcaaaggaatcacctcggaaaggggctgctccagctcctccgggaaagaccggcccagcagttgccaaggcccaggccggtaagcgcgaggaggactcccagtcgtcctcagaggagagcgactctgaggaggaggcgccagctcaagctaagccaagtggaaaagcccctcaggtgagagctgcctctgccccagccaaagagtcacctcggaagggagctgcgccagcacctcctaggaaaactggcccagcggcagcgcaggtccaggtgggcaaacaagaggaagattcgaggtcttccagtgaagaaagcgatagcgaccgggaagcattagcagccatgaatgccgctcaggtcaagcccctcggaaaaagcccccaggtgaagcccgcatccactatggggatgggacccctggggaaaggcgcaggtcccgtgccccctggtaaggtcgggcctgcaaccccctcagcccaggttgggaagtgggaggaagatagcgaatctagtagtgaggaatcctccgattcctcagatggcgaagttcccactgcagtcgctcccgctcaagaaaaaagcttgggtaacatcctacaggcaaagccaacatcaagcccggctaaggggccaccgcagaaggctggtcccgtcgcagtgcaggttaaggctgagaaacccatggacaactccgaatcttcagaagagtcttccgattccgcagactctgaggaagctcccgcagctatgacagctgcccaagctaagccagctttaaaaatcccgcagaccaaagcttgcccaaagaagaccaataccaccgcttcagctaaagtcgcacctgtgcgggttggcacccaagcacctaggaaagcaggcaccgctacaagtcccgcagggagtagccccgcagtggctggcggaacgcagagacctgcagaggattccagttcttcggaggaatccgattcggaggaggagaaaaccggactggcggtcaccgtgggacaggccaaaagtgtgggaaaagggttgcaagtcaaagctgcttcagtacccgttaaaggtagtttagggcaggggaccgcgcctgtgctgccagggaagacaggccctacagtcacccaagtaaaggctgagaagcaggaggactcagagagcagcgaagaggagagcgatagtgaagaggccgcagcctcgcctgcccaggtgaagacatcagtgaaaaaaacccaggctaaagccaatcccgctgcagctagagcaccaagcgctaaagggacaatcagtgcccctggcaaggtggtcactgccgctgctcaggcgaaacagcgcagccctagcaaggtgaagcctcctgtgcgcaacccacagaattccactgttctcgccagaggccctgcatctgtgcccagtgttggtaaggcagttgccaccgccgctcaggcccagaccgggccagaggaggactccggtagctctgaggaagaatctgatagcgaagaagaggcagagacgttggcccaggtgaaaccttccggaaagacacaccagattcgcgctgcactggctcccgcaaaagaatcacctcgcaagggagctgccccaacacctcctggcaagacggggccatctgccgctcaggctggtaagcaggacgacagcggctcatcatccgaagagagtgactcagacggagaagccccagcggcagtaacatccgcacaggttattaaacctccattaatttttgttgaccccaatagatcacctgctggaccagcagcaacaccagcacaggcacaggctgctagtactccaaggaaggccagggcctcggaaagtactgcgcgatcctcatcttcagagtccgaggatgaggatgtgataccggcaactcagtgcctgacccctgggatccgcactaacgtggtcactatgcccaccgcccaccctcggatcgccccaaaggcctccatggccggtgccagttcctccaaagagtcaagcaggatttctgatgggaagaagcaagaagggcctgcgacacaggtgtctaaaaaaaatcccgcaagcctgccactgactcaggcagcgctcaaggtcctggcacagaaagcttccgaagcccaaccaccagtggccaggacccagccctcctcgggagtggatagcgctgtcggcacattacctgccacttctccacagagcacgtctgtgcaggctaagggcacaaacaagctgaggaagcccaaactgccagaagtgcagcaggcgacaaaagcgccagagtcatctgatgatagcgaagactcatcagactcgagttcaggctctgaggaagatggtgaggggcctcaaggggcaaagtccgcccacacgctggtgggtccaactccttctcgtaccgagactctggtagaagaaacagccgctgagtcatctgaggacgatgttgtcgccccttctcagagcctcctgtccggctacatgactcctgggctgactcccgcaaacagccaggcgtctaaggcgacgcccaagcttgactcctccccttccgtcagcagtaccctggctgcaaaggacgatccggacgggaagcaggaagccaaacctcaacaggccgctggaatgttgtcaccgaaaacgggaggcaaggaggcagcctcaggaacgacgccccagaaaagtaggaaaccaaagaaaggcgctggcaatcctcaagctagcaccctcgctctccaaagtaatatcacacagtgtcttctgggtcaaccttggcccttgaatgaggctcaggtccaggcctctgtagttaaagtcctaacagagctgttagaacaggagcggaaaaaggtggtagacaccactaaggaatcctcgcggaaaggctgggagtccaggaagcgaaagctgtcgggggatcagcccgctgccaggaccccgcgatcaaaaaaaaaaaagaagctgggtgccggagagggcggagaggcgtccgtctcacccgaaaagacgtccaccacttcaaaaggcaaagccaaacgggacaaagcgagcggcgatgttaaagagaagaaaggtaaggggtctctgggtagccagggcgctaaagacgagccagaagaggagctgcagaaggggatgggaactgtggagggcggagaccagtccaatccaaagtctaaaaaggaaaagaaaaaatccgataaacggaagaaagacaaggaaaagaaggaaaagaaaaagaaggctaaaaaggcatctacaaaggatagcgagtccccctcgcagaaaaaaaaaaaaaagaaaaaaaagaccgccgaacagaccgtgtag

SEQ ID NO: 50635 - DNA, 4825 bp, Artificial Sequence
  derived and/or modified sequence
gaggtctaagggcgcgagggaagtggcgggcggggactaaggcggggcgtgcaggtagccggccggccgggggtcgcgggtatggccgaggccaggaagcggcgggagctacttcccctgatctaccaccatctgctgcgggctggctatgtgcgtgcggcgcgggaagtgaaggagcagagcggccagaagtgtttcctggctcagcccgtaacccttctggacatctatacacactggcaacaaacctcagagcttggtcggaagcggaaggcagaggaagatgcggcactgcaagctaagaaaacccgtgtgtcagaccccatcagcacctcggagagctcggaagaggaggaagaagcagaagccgaaaccgccaaagccaccccaagactagcatctaccaactcctcagtcctgggggcggacttgccatcaagcatgaaagaaaaagccaaggcagagacagagaaagctggcaagactgggaattccatgccacaccctgccactgggaagacggtggccaaccttctttctgggaagtctcccaggaagtcagcagagccctcagcaaatactacgttggtctcagaaactgaggaggagggcagcgtcccggcctttggagctgctgccaagcctgggatggtgtcagcgggccaggccgacagctccagcgaggacacctccagctccagtgatgagacagacgtggaggtaaaggcctctgaaaaaattctccaggtcagagctgcctcagcccctgccaaggggacccctgggaaaggggctaccccagcaccccctgggaaggcaggggctgtagcctcccagaccaaggcagggaagccagaggaggactcagagagcagcagcgaggagtcatctgacagtgaggaggagacgccagctgccaaggccctgcttcaggcgaaggcctcaggaaaaacctctcaggtcggagctgcctcagcccctgccaaggagtcccccaggaaaggagctgccccagcgccccctgggaagacagggcctgcagttgccaaggcccaggcggggaagcgggaggaggactcgcagagcagcagcgaggaatcggacagtgaggaggaggcgcctgctcaggcgaagccttcagggaaggccccccaggtcagagccgcctcggcccctgccaaggagtcccccaggaaaggggctgccccagcacctcctaggaaaacagggcctgcagccgcccaggtccaggtggggaagcaggaggaggactcaagaagcagcagcgaggagtcagacagtgacagagaggcactggcagccatgaatgcagctcaggtgaagcccttggggaaaagcccccaggtgaaacctgcctctaccatgggcatggggcccttggggaaaggcgccggcccagtgccacccgggaaggtggggcctgcaaccccctcagcccaggtggggaagtgggaggaggactcagagagcagtagtgaggagtcatcagacagcagtgatggagaggtgcccacagctgtggccccggctcaggaaaagtccttggggaacatcctccaggccaaacccacctccagtcctgccaaggggccccctcagaaggcagggcctgtagccgtccaggtcaaggctgaaaagcccatggacaactcggagagcagcgaggagtcatcggacagtgcggacagtgaggaggcaccagcagccatgactgcagctcaggcaaaaccagctctgaaaattcctcagaccaaggcctgcccaaagaaaaccaataccactgcatctgccaaggtcgcccctgtgcgagtgggcacccaagccccccggaaagcaggaactgcgacttctccagcaggctcatccccagctgtggctgggggcacccagagaccagcagaggattcttcaagcagtgaggaatcagatagtgaggaagagaagacaggtcttgcagtaaccgtgggacaggcaaagtctgtggggaaaggcctccaggtgaaagcagcctcagtgcctgtcaaggggtccttggggcaagggactgctccagtactccctgggaagacggggcctacagtcacccaggtgaaagctgaaaagcaggaagactctgagagcagtgaggaggaatcagacagtgaggaagcagctgcatctccagcacaggtgaaaacctcagtaaagaaaacccaggccaaagccaacccagctgccgccagagcaccttcagcaaaagggacaatttcagcccctggaaaagttgtcactgcagctgctcaagccaagcagaggtctccatccaaggtgaagccaccagtgagaaacccccagaacagtaccgtcttggcgaggggcccagcatctgtgccatctgtggggaaggccgtggctacagcagctcaggcccagacagggccagaggaggactcagggagcagtgaggaggagtcagacagtgaggaggaggcggagacgctggctcaggtgaagccttcagggaagacccaccagatcagagctgccttggctcctgccaaggagtcccccaggaaaggggctgccccaacacctcctgggaagacagggccttcggctgcccaggcagggaagcaggatgactcagggagcagcagcgaggaatcagacagtgatggggaggcaccggcagctgtgacctctgcccaggtgattaaaccccctctgatttttgtcgaccctaatcgtagtccagctggcccagctgctacacccgcacaagcccaggctgcaagcaccccgaggaaggcccgagcctcggagagcacagccaggagctcctcctccgagagcgaggatgaggacgtgatccccgctacacagtgcttgactcctggcatcagaaccaatgtggtgaccatgcccactgcccacccaagaatagcccccaaagccagcatggctggggccagcagcagcaaggagtccagtcggatatcagatggcaagaaacaggagggaccagccactcaggtgtcaaagaagaacccagcttccctcccactgacccaggctgccctgaaggtcctcgcccagaaagccagtgaggctcagcctcctgttgccaggacccagccttcaagtggggttgacagtgctgtgggaacactccctgcaacaagtccccagagcacctccgtccaggccaaagggaccaacaagctcagaaaacctaagcttcctgaggtccagcaggccaccaaagcccctgagagctcagatgacagtgaggacagcagcgacagttcttcagggagtgaggaagatggtgaagggccccagggggccaagtcagcccacacgctggtaggtcccaccccctccaggacagagaccctggtggaggagaccgcagcagagtccagcgaggatgatgtggtggcgccatcccagtctctcctctcaggttatatgacccctggactaaccccagccaattcccaggcctcaaaagccactcccaagctagactccagcccctcagtttcctctactctggccgccaaagatgacccagatggcaagcaggaggcaaagccccaacaggcagcaggcatgttgtcccctaaaacaggtggaaaagaggctgcttcaggcaccacacctcagaagtcccggaagcccaagaaaggggctgggaacccccaagcctcaaccctggcgctgcaaagcaacatcacccagtgcctcctgggccaaccctggcccctgaatgaggcccaggtgcaggcctcagtggtgaaggtcctgactgagctgctggaacaggaaagaaagaaggtggtggacaccaccaaggagagcagcaggaagggctgggagagccgcaagcggaagctatcgggagaccagccagctgccaggacccccaggagcaagaagaagaagaagctgggggccggggaaggtggggaggcctctgtttccccagaaaagacctccacgacttccaaggggaaagcaaagagagacaaagcaagtggtgatgtcaaggagaagaaagggaaggggtctcttggctcccaaggggccaaggacgagccagaagaggagcttcagaaggggatggggacggttgaaggtggagatcaaagcaacccaaagagcaagaaggagaagaagaaatccgacaagagaaaaaaagacaaagaaaaaaaagaaaagaagaagaaagcaaaaaaggcctcaaccaaagattctgagtcaccgtcccagaagaaaaagaagaaaaagaagaagacagcagagcagactgtatgacgagcaccagcaccaggcacagggatttcctagccgagcagtggccatccccatgcctctgacctccaccgacctctgcccaccatgggttggaactaaactgttaccttccctcgctccacagaagaagacagccagcttcaggggtccctgtgctggccaagccagtgagcctgcggggaggctggtccaaggagaaagtggaccagctcccatgacctcaccccactcccccaacacaggacgcttcatatagatgtgtacagtatatgtatttttttaagtgacctcctctccttccacagaccccacatgcccaaaggcctcgggacttcccaccaccttgctccacagatccagctaggcctgacctgtgcctcatcccgtgccgctcggtctctggctgatcccgaggctttgtcttcctctcgtcagttcttttggttgtgttttttgttttttttttaataactcaaaaaaaaaataaaagacttggaggaagggt

SEQ ID NO: 50636 - protein, 673 aa, Artificial Sequence
  derived and/or modified sequence
MTTEVGSVSEVKKDSSQLGTDATKEKPKEVAENQQNQSSDPEEEKGSQPPPAAESQSSLRRQKREKETSESRGISRFIPPWLKKQKSYTLVVAKDGGDKKEPTQAVVEEQVLDKEEPLPEEQRQAKGDAEEMAQKKQEIKVEVKEEKPSVSKEEKPSVSKVEMQPTELVSKEREEKVKETQEDKLEGGAAKRETKEVQTNELKAEKASQKVTKKTKTVQCKVTLLDGTEYSCDLEKHAKGQVLFDKVCEHLNLLEKDYFGLLFQESPEQKNWLDPAKEIKRQLRNLPWLFTFNVKFYPPDPSQLTEDITRYFLCLQLRQDIASGRLPCSFVTHALLGSYTLQAELGDYDPEEHGSIDLSEFQFAPTQTKELEEKVAELHKTHRGLSPAQADSQFLENAKRLSMYGVDLHHAKDSEGVDIKLGVCANGLLIYKDRLRINRFAWPKILKISYKRSNFYIKVRPAELEQFESTIGFKLPNHRAAKRLWKVCVEHHTFYRLVSPEQPPKAKFLTLGSKFRYSGRTQAQTRQASTLIDRPAPHFERTSSKRVSRSLDGAPIGVMDQSLMKDFPGAAGEISAYGPGLVSIAVVQDGDGRREVRSPTKAPHLQLIEGKTVKGGISETRIEKRIVITGDGDIDHDQALAQAIREAREQHPDMSVTRVVVHKETELAEEGED

SEQ ID NO: 50637 - DNA, 2022 bp, Artificial Sequence
  derived and/or modified sequence
atgaccaccgaggtgggaagcgtgagtgaagtcaaaaaagacagctctcagctaggaactgacgctacaaaggaaaagccaaaagaggtggccgagaaccagcaaaatcagagttccgatcctgaggaagagaaaggctcacaacccccccccgcagctgagagccagagttcattgagacgacagaaacgggagaaggagacatccgaatcccgaggaatatcacggttcattcccccctggctgaagaagcagaaatcctacacgctggtagtggcaaaagacgggggcgacaaaaaagaacccacacaggccgtggttgaggaacaggtgctcgataaggaggagcctcttcccgaagagcagaggcaggccaagggcgatgcagaggaaatggcccagaagaagcaggaaatcaaggtggaggtcaaggaggagaagccatcggttagcaaagaggagaagccttccgtgagcaaggtggagatgcagcccacggagcttgtgtccaaggagagagaagaaaaggtgaaagaaacacaggaagacaaactagaaggaggagcagccaaaagggagacaaaggaggttcagaccaacgaactaaaagccgagaaagcaagccagaaggttaccaagaagactaaaacagtccagtgcaaagtgacattattggacggaaccgaatactcctgtgatctcgagaaacacgctaagggccaggtgctctttgacaaggtctgtgaacacttgaacctcttggagaaggactattttggcctcctgtttcaggagtctccggagcagaagaactggttagatcccgccaaagagatcaaaaggcagttaaggaatctgccatggctttttaccttcaacgtgaaattttacccccccgatcctagtcagctgactgaggatattaccagatatttcttgtgtctgcagctgaggcaggatatagctagtgggcggctgccttgttccttcgtcacccatgctctgctgggatcctacacgctgcaggctgaactgggtgattacgatcccgaagaacatggctcaatcgatctgtctgagtttcagtttgcacctactcagaccaaagagctggaagagaaagtggctgaactgcacaaaactcaccgcggattaagccccgcccaggcagattcccagtttctcgagaacgctaaacgtctctccatgtatggcgtggatctgcaccatgccaaggatagcgagggagtagacattaaactgggcgtttgtgcaaatggactcttgatctacaaagatcgactcagaatcaatcgttttgcctggcctaaaattttgaaaatcagttataaacgctctaatttctatataaaggtgagaccagcagaactagagcagtttgagtcaactatcggattcaaacttccaaaccaccgcgccgccaaaaggttgtggaaagtatgcgtggagcatcatacattctatcggctggtgagccctgagcagccacctaaggctaaattcctaaccctgggaagcaagttccggtacagcggccgaacccaggctcagaccaggcaagcttcaactctgattgaccgaccagctccacacttcgaacggacttccagcaaacgcgtgagccgctccttggatggggcgcctattggtgtcatggatcaaagcctcatgaaggattttcctggtgccgctggggaaatttccgcttatggccctgggctcgtgtcaattgccgtggttcaagatggggacggacggcgggaggtccgctcacccaccaaagccccccacctgcagttgatcgagggcaaaaccgttaagggaggcatttctgaaaccaggattgaaaagcggattgtgattactggagatggggacatcgaccacgatcaagcgcttgcccaggcgattcgggaggcccgcgagcaacacccggacatgagtgtaactagggtggtggtgcacaaggagactgagcttgctgaagagggagaggattag

SEQ ID NO: 50638 - DNA, 2022 bp, Artificial Sequence
  derived and/or modified sequence
atgactacagaagttggctccgtgagcgaagtgaagaaagattctagtcaactgggtaccgacgctactaaagaaaaaccaaaggaggttgccgaaaaccagcagaatcagtcctccgatcctgaggaggagaaaggctcccaaccaccacccgccgcagaatcccaatcttctctccgccggcagaagcgagaaaaagagacatccgagagcagagggatttcgaggtttataccaccgtggctcaagaaacagaagtcttacaccttggtggtggcaaaggacgggggagataagaaggagccaacgcaggctgttgtggaagaacaagtgctggacaaagaggaaccgctgcctgaagaacaaaggcaggccaagggagacgcagaagagatggcccagaaaaaacaggagatcaaagtggaggtgaaagaagagaaaccaagcgtaagtaaggaagagaagccatctgtcagcaaggtggagatgcagcccacagaactggtctctaaagaaagagaggagaaagtcaaggagacacaagaggataaactggaagggggagcggcaaagagggagaccaaagaagtgcaaaccaatgaactcaaggccgagaaggccagccagaaagttactaaaaagaccaagactgtccagtgtaaggtcacattgctcgatggcactgagtactcgtgtgacttggagaagcacgctaaaggtcaggtgctgttcgacaaggtatgcgagcatctgaacttactcgaaaaggattacttcggtctactgtttcaggagtcccctgagcaaaaaaactggcttgatcccgcaaaggagataaagcgccagctccggaatctaccctggctgtttacattcaatgtaaagttttatcctcccgatcccagccagctcaccgaggacatcacccggtactttctgtgcctccaattacggcaggacattgcatcgggccgattgccatgtagctttgtgacacacgctctactgggctcctataccttgcaagccgagctaggggattacgaccctgaggaacatggctctattgacttatcagagtttcagttcgcccctacccagacgaaggagctggaggaaaaggtggccgagctgcacaagacccaccgtggtctgtccccagctcaggccgatagccagttcctggaaaatgccaaacggctgtcaatgtacggggtggacctgcaccatgcaaaggacagtgaaggtgtggatatcaagctgggcgtgtgcgccaatggtctgctcatctacaaagaccgactgcgaatcaaccggttcgcctggcccaaaatactcaagattagttataaacggtccaacttttatataaaagtgagaccagctgaactggagcagttcgaatcgacaatcggattcaaactccccaaccatcgtgcagctaaacgactttggaaagtatgcgtagaacaccacactttttatcgactggtttcccccgaacagccccccaaggcaaaatttcttaccctaggctccaagtttaggtattctggccgtacccaggcccagacgaggcaggcatctacacttattgatcggcccgctccccacttcgagcggacttcatccaagagggtctcccggtccctggacggggccccaattggcgtcatggaccaaagtctcatgaaggatttccctggcgcagctggggagataagcgcttatgggcctggccttgtgagcatcgccgtcgtccaagatggtgatggccgaagggaggtgaggtctccaaccaaagcccctcatctgcagctgatcgaggggaaaacagtgaagggaggaatctccgaaactcggatcgagaaaaggatcgtaatcactggcgatggagatattgaccatgaccaggcactagcccaggcaatccgagaggctagagagcaacatcccgatatgagtgtcactagggttgtggtccacaaggaaacggaacttgccgaggaaggcgaagattag

SEQ ID NO: 50639 - DNA, 462 bp, Artificial Sequence
  derived and/or modified sequence
atgacaacagaggtggggagtgtctcagaggtgaagaaggattcgagccagctgggaaccgatgccacgaaggagaagcctaaggaagtggcggaaaaccagcagaaccagagttcagaccctgaggaagagaaaggaagtcaacctccacccgccgcagagtcccagtcctctctgagacgccagaagcgggagaaagaaacatcggagagccgcggcatttcacgtttcatccctccctggctgaagaagcagaaatcttatacgctggtggtcgcaaaagacgggggagacaaaaaggagccaacacaggctgtggtggaggagcaagtgctggacaaagaggagccactcccggaagagcagcggcaggccaaaggtgatgcagaagagatggcacagaaaaaacaggagataaaagtcgaggtgaaggaagagaagccctccgtctcaaaagagtag

SEQ ID NO: 50640 - DNA, 540 bp, Artificial Sequence
  derived and/or modified sequence
atgacaactgaggtgggctccgtctctgaagtgaaaaaggacagtagccagctgggcacggacgctacaaaggaaaagcctaaggaggtggccgagaaccagcagaatcagtcttcagaccccgaggaggaaaagggaagccagcctccacctgccgctgaatctcagtcctctcttaggcgccagaaacgtgaaaaggagacctctgaaagcaggggcatcagtcgcttcatccctccatggttgaaaaaacagaaatcttacaccctagtggtcgctaaagacggaggcgacaagaaagagccaacccaggcagtagtcgaagaacaggtgttggataaggaggaaccgctccccgaggagcaacgccaggcgaagggagacgcagaagaaatggcacagaaaaagcaagaaattaaagtggaagtcaaggaggagaagccctccgtctccaaagaggagaagcccagtgtgtccaaagtggaaatgcagcctacagagcttgtatctaaagaacgtgaagagaaagtgaaggaatag

SEQ ID NO: 50641 - DNA, 357 bp, Artificial Sequence
  derived and/or modified sequence
atgaccacagaggtcgggtcagtgtctgaggtgaagaaggatagcagccagctggggaccgacgccactaaagaaaagcccaaagaggtggccgaaaaccaacagaaccaaagctccgaccccgaggaagagaagggaagtcagccgcctccggccgctgagtcccaatcgtcattacgtagacaaaaaagggaaaaggaaacttctgagagtcgtggcattagcagatttattcctccttggctgaaaaagcagaagagctacactttagtcgttgcgaaggatggaggcgacaaaaaagagcctacacaggccgtcgtcgaggaacaggtgctcgacaaggaggagccactctag

SEQ ID NO: 50642 - DNA, 384 bp, Artificial Sequence
  derived and/or modified sequence
atgacgaccgaggtgggatccgttagcgaggttaagaaggactcatcacagcttggaaccgacgcaactaaagagaagccaaaagaggtagccgaaaaccagcagaatcagagttcagatcccgaggaggaaaaaggatcgcagccacctcccgctgcagagtctcagtcttctttaagacgccaaaagcgcgagaaggagacttctgagtcccgcggaatttctaggtttatcccaccatggctcaaaaaacagaaaagctacaccttagtggtggcgaaggatggaggtgataagaaagaaccaacccaggctgtggtggaggagcaagtgctcgacaaagaggagcccctccctgaggaacaacgacaagcgaaggggtag

SEQ ID NO: 50643 - DNA, 489 bp, Artificial Sequence
  derived and/or modified sequence
atgacaaccgaagttggcagcgttagcgaggtcaagaaagattcatcccagctggggactgatgcaacaaaagaaaaacccaaagaggtggcagaaaatcaacagaatcaaagtagtgacccagaggaggagaaaggatcacagcccccaccggctgctgaatcccaatccagcctgcgccgtcagaaacgcgagaaagaaacctctgaatcgcggggcatctctcgttttatacccccctggctgaaaaaacagaagtcctacacactggtcgttgcaaaggatggaggagataaaaaagagcccactcaagcagtggtcgaagaacaagtgctggacaaagaggaaccattgccagaagagcagcgtcaggctaaaggcgacgcagaggagatggcccagaaaaagcaggagattaaggtcgaagtcaaggaagaaaaacccagcgtatccaaagaggaaaagccctctgtgtccaaagtggaatag

SEQ ID NO: 50644 - DNA, 2022 bp, Artificial Sequence
  derived and/or modified sequence
atgaccacagaggtgggctctgtgtctgaggtgaagaaggacagcagccagctgggcacagatgccaccaaggagaagcccaaggaggtggccgagaaccagcagaaccagagcagtgaccctgaggaggagaagggcagccagcccccacctgctgctgagagccagagcagcctgcggcggcagaagcgggagaaggagaccagcgagagccggggcatcagccgcttcatccccccctggctgaagaagcagaagagctacaccctggtggtggccaaggatggaggagacaagaaggagcccacccaggccgtggtggaggagcaggtgctggacaaggaggagcccctgcctgaggagcagaggcaggccaagggagatgctgaggagatggcccagaagaagcaggagatcaaggtggaggtgaaggaggagaagcccagcgtgtccaaggaggagaagcccagcgtgtccaaggtggagatgcagcccacagagctggtgtccaaggagcgggaggagaaggtgaaggagacccaggaggacaagctggagggcggggccgccaagcgggagaccaaggaggtgcagaccaatgagctgaaggccgagaaggccagccagaaggtgaccaagaagaccaagacagtgcagtgcaaggtgaccctgctggatggaacagagtacagctgtgacctggagaagcacgccaagggccaggtgctgtttgacaaggtgtgtgagcacctgaacctgctggagaaggactacttcggcctgctcttccaggagagccctgagcagaagaactggctggaccctgccaaggagatcaagaggcagctgaggaacctgccctggctgttcaccttcaacgtgaagttctaccccccagaccccagccagctgacagaggacatcacccgctacttcctgtgcctgcagctgcggcaggacatcgccagcggccgcctgccctgcagctttgtgacccacgccctgctgggcagctacaccctgcaggccgagctgggggactatgaccctgaggagcacggcagcattgacctgtctgagttccagtttgcccccacccagaccaaggagctggaggagaaggtggccgagctgcacaagacccaccggggcctgagccctgcccaggccgacagccagttcctggagaatgccaagaggctgtccatgtatggagtggacctgcaccacgccaaggacagcgagggcgtggacatcaagctgggcgtgtgtgccaacggcctgctgatctacaaggaccggctgcgcatcaacagatttgcctggcccaagatcctgaagatctcctacaagaggagcaacttctacatcaaggtgcggcctgctgagctggagcagtttgagagcaccatcggcttcaagctgcccaaccaccgggccgccaagaggctgtggaaggtgtgtgtggagcaccacaccttctaccgcctggtgtccccagagcagccccccaaggccaagttcctgaccctgggcagcaagttccgctacagcggccgcacccaggcccagacccggcaggccagcaccctgattgacaggcctgccccccactttgagaggaccagcagcaagagggtgagccgcagcctggatggagcccccatcggcgtgatggaccagagcctgatgaaggacttccctggagctgctggggagatcagcgcctacggccctggcctggtgtccattgctgtggtgcaggatggagatggaagaagagaggtgcgcagccccaccaaggccccccacctgcagctgattgagggcaagacagtgaagggcggcatcagcgagacccgcatcgagaagagaattgtcatcactggagatggagacatcgaccatgaccaggccctggcccaggccatccgggaggcccgggagcagcacccagacatgtctgtgaccagggtggtggtgcacaaggagacagagctggccgaggagggggaggactag

SEQ ID NO: 50645 - DNA, 462 bp, Artificial Sequence
  derived and/or modified sequence
atgaccacagaggtgggctctgtgtctgaggtgaagaaggacagcagccagctgggcacagatgccaccaaggagaagcccaaggaggtggccgagaaccagcagaaccagagcagtgaccctgaggaggagaagggcagccagcccccacctgctgctgagagccagagcagcctgcggcggcagaagcgggagaaggagaccagcgagagccggggcatcagccgcttcatccccccctggctgaagaagcagaagagctacaccctggtggtggccaaggatggaggagacaagaaggagcccacccaggccgtggtggaggagcaggtgctggacaaggaggagcccctgcctgaggagcagaggcaggccaagggagatgctgaggagatggcccagaagaagcaggagatcaaggtggaggtgaaggaggagaagcccagcgtgtccaaggagtag

SEQ ID NO: 50646 - DNA, 540 bp, Artificial Sequence
  derived and/or modified sequence
atgaccacagaggtgggctctgtgtctgaggtgaagaaggacagcagccagctgggcacagatgccaccaaggagaagcccaaggaggtggccgagaaccagcagaaccagagcagtgaccctgaggaggagaagggcagccagcccccacctgctgctgagagccagagcagcctgcggcggcagaagcgggagaaggagaccagcgagagccggggcatcagccgcttcatccccccctggctgaagaagcagaagagctacaccctggtggtggccaaggatggaggagacaagaaggagcccacccaggccgtggtggaggagcaggtgctggacaaggaggagcccctgcctgaggagcagaggcaggccaagggagatgctgaggagatggcccagaagaagcaggagatcaaggtggaggtgaaggaggagaagcccagcgtgtccaaggaggagaagcccagcgtgtccaaggtggagatgcagcccacagagctggtgtccaaggagcgggaggagaaggtgaaggagtag

SEQ ID NO: 50647 - DNA, 357 bp, Artificial Sequence
  derived and/or modified sequence
atgaccacagaggtgggctctgtgtctgaggtgaagaaggacagcagccagctgggcacagatgccaccaaggagaagcccaaggaggtggccgagaaccagcagaaccagagcagtgaccctgaggaggagaagggcagccagcccccacctgctgctgagagccagagcagcctgcggcggcagaagcgggagaaggagaccagcgagagccggggcatcagccgcttcatccccccctggctgaagaagcagaagagctacaccctggtggtggccaaggatggaggagacaagaaggagcccacccaggccgtggtggaggagcaggtgctggacaaggaggagcccctgtag

SEQ ID NO: 50648 - DNA, 384 bp, Artificial Sequence
  derived and/or modified sequence
atgaccacagaggtgggctctgtgtctgaggtgaagaaggacagcagccagctgggcacagatgccaccaaggagaagcccaaggaggtggccgagaaccagcagaaccagagcagtgaccctgaggaggagaagggcagccagcccccacctgctgctgagagccagagcagcctgcggcggcagaagcgggagaaggagaccagcgagagccggggcatcagccgcttcatccccccctggctgaagaagcagaagagctacaccctggtggtggccaaggatggaggagacaagaaggagcccacccaggccgtggtggaggagcaggtgctggacaaggaggagcccctgcctgaggagcagaggcaggccaagggctag

SEQ ID NO: 50649 - DNA, 489 bp, Artificial Sequence
  derived and/or modified sequence
atgaccacagaggtgggctctgtgtctgaggtgaagaaggacagcagccagctgggcacagatgccaccaaggagaagcccaaggaggtggccgagaaccagcagaaccagagcagtgaccctgaggaggagaagggcagccagcccccacctgctgctgagagccagagcagcctgcggcggcagaagcgggagaaggagaccagcgagagccggggcatcagccgcttcatccccccctggctgaagaagcagaagagctacaccctggtggtggccaaggatggaggagacaagaaggagcccacccaggccgtggtggaggagcaggtgctggacaaggaggagcccctgcctgaggagcagaggcaggccaagggagatgctgaggagatggcccagaagaagcaggagatcaaggtggaggtgaaggaggagaagcccagcgtgtccaaggaggagaagcccagcgtgtccaaggtggagtag

SEQ ID NO: 50650 - DNA, 2022 bp, Artificial Sequence
  derived and/or modified sequence
atgaccaccgaggtgggcagcgtgagcgaggtgaagaaggacagctcccagcttggcacagacgcaactaaggagaagccgaaagaggtggccgaaaatcagcagaaccagagcagcgatccagaggaggagaagggcagccagccccccccagccgccgagtcacagtcatctttaagacgacagaagcgggagaaggaaacgagcgagagcaggggcatctcccggtttattcctccttggctgaaaaaacagaagagctacaccctggtggtggcgaaagacggtggagacaaaaaagagccaactcaggccgtggtggaggagcaagtgctagacaaggaagaacccctcccagaagagcagagacaggctaaaggtgatgctgaagagatggctcagaaaaagcaagaaataaaagtggaagtcaaggaagaaaagccgtccgttagtaaggaggagaagccaagcgtatcaaaagtggagatgcagcccaccgagctggtgtcaaaggagagagaagagaaagtgaaagagacccaggaggacaagctagagggcggtgctgcaaagcgtgagacaaaagaggtgcaaacgaatgagttgaaagctgagaaagcaagccaaaaggtgacaaagaagacaaagaccgttcagtgcaaggttacgttgttggacggaaccgagtactcctgcgatctcgagaagcacgccaagggacaggtgctgttcgacaaggtttgtgaacacttgaatcttttagaaaaagactactttggactcctcttccaggagtcacctgagcagaaaaattggctggaccccgctaaggagataaagcgccaattgcggaacctgccatggttgtttaccttcaacgtgaaattttatccacccgacccttctcagctgaccgaggacattacccgctactttctctgcctccaactccgccaggacattgcttcaggacggttgccttgtagctttgttacacacgccttgctcggatcatacaccttgcaggcggaattgggagattatgaccccgaagagcatggctcaatcgatctctctgagttccagtttgccccaactcagacaaaggaactggaggaaaaagtggcagaactgcataagacacacaggggtctctccccggcacaggctgatagtcagttcttagaaaatgccaagaggttgtccatgtacggagtggacctgcaccatgccaaagattccgaaggagtcgatatcaaactgggagtgtgtgccaatggtttactgatttacaaggacaggctccggatcaaccgctttgcgtggccgaagattctgaagatttcttacaagaggagcaatttctacatcaaagtacgtcccgctgagctagagcagttcgaatctactataggctttaagcttccaaaccaccgagccgccaaacgcctgtggaaggtatgtgtggagcaccataccttctatcgcctggtgtctcctgagcagccccccaaggcaaagttcctgaccctgggctccaaattccgctacagcggacggacccaggcacagaccagacaggctagcactcttattgatcgaccggccccccacttcgagagaacgagtagcaaacgggtgagccggtcactggacggagcacccattggggtgatggaccagtctcttatgaaagactttcccggcgcagccggggagatttccgcatatggtcccggcctcgtcagcatcgcagttgtgcaagacggggacggtcggagagaagtgcggagcccgactaaggcacctcatctccaactaattgaggggaaaacagttaagggaggaatatcagaaactcgaatcgaaaagcgaattgttatcacaggggacggggacattgatcacgatcaggctctcgctcaagccatacgtgaggccagggagcagcacccagacatgtctgtcaccagagtggtagtccataaggaaaccgagctggcggaagagggagaggattag

SEQ ID NO: 50651 - DNA, 2022 bp, Artificial Sequence
  derived and/or modified sequence
atgaccaccgaggtgggcagcgtgagcgaggtgaagaaggacagctcacagctcgggacggatgcaaccaaagagaaacctaaagaagtggcggaaaaccaacaaaaccagtcaagtgacccggaggaagagaagggatcacagcctccacccgcagctgaaagtcaaagctctctgaggcggcaaaaacgagagaaggaaacaagcgaatccagaggcatctcgcgctttattccaccttggttgaagaaacagaagtcttacactctggtagtggctaaagacggtggcgataaaaaagaacccacacaagcagtggttgaagaacaggtgctcgataaggaggaacccctgcctgaagagcaacgccaagcgaagggagatgccgaggagatggcgcagaagaaacaggagatcaaggtggaagtgaaggaggaaaagccctcagtgagtaaggaagaaaaaccctctgtatccaaagttgaaatgcaaccgactgaacttgtgagcaaagaaagagaggagaaagtcaaggaaacccaggaggataaactggaggggggggcagccaagagggaaaccaaagaagtgcaaacaaatgaactcaaagctgagaaggccagtcagaaagttacgaagaaaactaagacagttcagtgcaaggtgacactgctggacggaaccgaatactcatgcgacctcgagaagcacgccaaaggccaggtgctgtttgataaggtttgtgagcatctcaacctgctagagaaggattacttcggactgttatttcaggaatcacccgagcagaaaaattggctcgatccagcaaaagaaatcaaacgccagctcaggaatcttccatggttgtttacattcaatgtaaaattttatccgcccgacccgtcacagctgacagaagacattactaggtattttttatgcctgcagttgaggcaggacatcgccagcggaagactcccttgctcatttgtgactcacgcgctcctggggagctacacattacaggctgagctcggcgattatgaccctgaggagcatggtagcatcgatctttctgagttccaattcgcccccacgcagactaaagagctagaggagaaggtggctgaactccataaaactcatagaggtctgtcaccagctcaagctgattcccagtttctggagaatgccaagaggctgagtatgtacggcgttgatctacaccacgcaaaggatagcgaaggggtggacattaaactgggggtgtgtgctaacgggctcctcatttacaaagaccgattacgcattaatcgctttgcatggccaaagattctgaaaattagctacaaaagaagcaacttctatattaaggtgaggcctgcggagcttgaacaatttgaaagtacaataggttttaagttgccaaatcatagagctgccaagaggctatggaaagtttgtgtagaacatcacaccttttaccgtcttgtctcacccgagcagccacccaaggctaaatttcttactcttggctccaagtttaggtatagcggccgcacacaggcacaaaccagacaagcttctaccctcatagatcggcccgctccgcactttgagagaaccagctcgaaaagagtgtcaagatcactggatggggccccgatcggcgttatggaccagtcattaatgaaagatttccccggggccgccggagagatcagcgcctacggaccgggcctggtgtccatcgcagttgtgcaggatggcgacggacgacgcgaggtcagatctcctacaaaggccccgcatctacaattgatcgagggaaaaacagtgaagggaggaatctctgaaacacgaattgagaaaaggattgtgataactggcgacggtgatattgaccacgaccaagccctggcccaggccattcgggaagctagagaacagcatccagatatgtccgttaccagagtcgtagtgcacaaggagacagagctggccgaagaaggggaagattag

SEQ ID NO: 50652 - DNA, 462 bp, Artificial Sequence
  derived and/or modified sequence
atgaccaccgaggtgggcagcgtgagcgaggtgaagaaggacagctctcagctggggaccgacgcaaccaaggagaaacccaaagaggtggcagagaaccagcagaaccagtcaagtgaccccgaagaagagaaaggatctcagcctccgccggctgcagaatcacagagtagcctgcgtagacaaaaaagagaaaaagaaactagtgagagcaggggaatctcacgatttatccccccctggctcaagaagcagaagagttatacgcttgtcgtcgcaaaagatgggggtgataaaaaggaacctactcaggctgtggtagaggagcaggttctagacaaagaggagcctctccccgaagaacagaggcaggcaaaaggggatgccgaggagatggcccaaaagaaacaggaaatcaaagtggaggtgaaagaggagaagccatctgtttcaaaggaatag

SEQ ID NO: 50653 - DNA, 540 bp, Artificial Sequence
  derived and/or modified sequence
atgaccaccgaggtgggcagcgtgagcgaggtgaagaaggacagcagccaactagggaccgatgccacaaaggaaaagccgaaggaagttgccgaaaatcagcagaaccaatcctcggacccagaggaagaaaagggaagccagcctccgccggccgccgagtcccagtcttctcttcgcagacagaagcgcgagaaggaaacctccgaaagccgcgggatcagtaggtttattccgccatggctgaagaaacaaaagtcttacaccctcgtggtcgctaaagacggcggagataagaaagagccgacccaggcagtggtggaggagcaagtccttgataaagaggaaccattgccagaggagcagagacaagctaaaggggatgccgaggagatggcgcaaaaaaagcaggagataaaagtagaagtgaaagaagaaaaacccagcgtgagcaaagaggaaaaaccttcggtgtccaaagtggagatgcagccgacggagctggtgtcaaaggagcgcgaagaaaaagtgaaggaatag

SEQ ID NO: 50654 - DNA, 357 bp, Artificial Sequence
  derived and/or modified sequence
atgaccaccgaggtgggcagcgtgagcgaggtgaagaaggacagctctcagttaggcacagatgccactaaggaaaagcccaaagaagtggcggagaatcagcaaaaccagtcatccgatcccgaggaggagaaaggcagccagccacctcctgcggcagaatcgcaatcatcactcaggagacagaaaagagagaaggaaaccagtgaatcccgtggtatctcacgcttcatcccaccatggctgaaaaagcaaaaatcatatacccttgtggtggcgaaagatggaggagataagaaagagccgacccaggcggtcgtcgaagagcaggttctggacaaggaggagccgctatag

SEQ ID NO: 50655 - DNA, 384 bp, Artificial Sequence
  derived and/or modified sequence
atgaccaccgaggtgggcagcgtgagcgaggtgaagaaggacagcagccagctgggcaccgacgccaccaaagaaaagccaaaggaggtggccgagaatcagcagaatcagtccagcgaccctgaggaggagaagggcagccagcccccaccggcagctgaatctcagagcagtcttcgccgacagaaaagagaaaaggagacttctgagtctcgtggcatcagtagattcattcctccttggctgaagaaacagaagagttacactctggtagtcgctaaggacggcggtgacaaaaaggaaccaacacaagcagtggtagaagagcaagtgctagacaaggaagagccactgcccgaggagcagagacaagctaaaggatag

SEQ ID NO: 50656 - DNA, 489 bp, Artificial Sequence
  derived and/or modified sequence
atgaccaccgaggtgggcagcgtgagcgaggtgaagaaggacagcagccagcttggcacagatgctaccaaggagaaaccaaaggaggtcgcggagaatcagcagaaccagagttctgatcccgaagaggaaaagggttcacagccccccccagcagccgagtctcagtccagtttacggcgtcagaaaagggaaaaggaaacaagcgaaagcagaggaatcagtagattcatccccccttggctcaaaaaacaaaaaagttatacacttgtggtggccaaagatgggggcgataagaaagagcctacccaggccgtggtagaagaacaggtgctcgataaagaagaaccattacccgaggagcagagacaggccaaaggtgacgccgaggaaatggcacagaaaaaacaggaaattaaagtagaggtgaaagaggaaaagcctagcgtgtcaaaggaggagaaaccttcagttagcaaagtggaatag

SEQ ID NO: 50657 - DNA, 2022 bp, Artificial Sequence
  derived and/or modified sequence
atgactaccgaagtgggtagcgtctcagaagtgaagaaagactcctcccaactggggacggatgccaccaaggagaagcccaaagaggtggcggagaatcagcaaaatcagagttcggacccagaagaggagaaaggctcccagcccccacccgcagctgagagccagagttctcttcgcaggcaaaaaagagaaaaggaaactagtgagagtagaggaattagtagatttattccgccttggctgaaaaaacaaaaatcctatactctggtggtagccaaagacggtggagacaaaaaagagcccacccaggccgtcgtcgaagaacaagtccttgataaggaggagccccttcctgaggagcagcgtcaagcaaagggagacgccgaggaaatggcacagaaaaagcaagagattaaggttgaagtgaaggaggaaaagccctctgtgagcaaagaggagaaaccaagtgtgagcaaggtggagatgcagccaacagaattggtctccaaggagagggaggagaaggtgaaggaaacacaggaagataagctcgaaggcggagctgcaaaaagggagactaaagaggttcaaaccaacgaactcaaagccgagaaagcgagccagaaagtaacgaaaaagacaaagaccgtgcaatgtaaggtcacccttcttgatgggactgagtattcttgtgatctggagaagcacgctaagggccaggtcttgttcgataaagtttgtgaacacctgaatctcctggagaaggactactttggactcttgttccaagaatctcccgagcagaaaaactggctggaccctgcaaaagagatcaaacgacagctccgaaacctgccctggctgtttactttcaacgtgaagttttaccctccagatcctagccagctcacagaagatatcactcggtacttcctgtgcctgcaacttaggcaggatattgccagtggccgacttccatgttccttcgtgacacatgctctcctcggcagctacacactccaggcggaacttggggactacgatccagaggaacacggatccattgatctctcagagttccaatttgcacccacacagacgaaagaacttgaggagaaagtggctgaactccacaaaacacatcgcggactgagccccgcacaggccgactcccagttccttgagaacgctaaacgtctcagtatgtatggagtcgatttacaccacgcgaaggactcagaaggggtggacataaaacttggcgtgtgcgcaaatggcctgttaatctacaaagacaggctgcgcattaaccgatttgcatggccaaagatcctaaagatctcctacaaacgatctaatttttatatcaaagttcggcctgccgaacttgaacagtttgagagcacaattggttttaagttacccaaccaccgagctgctaaaagactgtggaaagtgtgcgtcgagcatcacaccttttacagactggtgagtcccgaacagcccccaaaggcgaaatttttgacactggggagcaaattccggtacagtggacgcactcaggcacagacaaggcaagcgagcactcttatcgatcgtcccgcacctcacttcgaacggacatcttccaagagagtgtctagaagcttggacggagcaccaataggggtgatggatcaatctcttatgaaagactttcccggagcagctggggagatcagtgcctatggacccggtttagtcagcatcgctgtagtgcaggacggggacggcaggcgggaagtgagaagccccactaaggccccacaccttcagctaatcgaaggaaaaactgtcaagggtggcataagtgaaaccaggattgagaagaggattgttatcaccggcgacggtgacattgatcatgatcaggccctggcacaggctataagggaagcccgagaacagcaccctgacatgtcagtgactcgagtagtggtgcacaaagagacagagctggcagaggaaggggaggattag

SEQ ID NO: 50658 - DNA, 2022 bp, Artificial Sequence
  derived and/or modified sequence
atgaccacggaagtcggctccgtctcggaggtcaagaaagacagctcacaactcggcaccgatgcaaccaaggagaagccaaaagaagttgccgagaaccagcagaaccagtcttcagaccctgaagaagagaagggttcacagcccccacctgccgcagagagccagtcttctcttaggaggcagaagcgtgagaaagaaacatcagagagccgcggaatctcaagatttatcccaccttggctaaagaaacagaaatcctacaccttggtggtagctaaggacggtggtgacaagaaggagcctacccaggctgtcgtagaggaacaggtcctggacaaagaggaaccattgcccgaagaacagaggcaggctaagggagatgcagaagaaatggctcagaaaaaacaggagatcaaagttgaggttaaggaggaaaaacctagcgtaagtaaggaagaaaagccctccgtcagcaaggtggagatgcagcctacagaacttgttagcaaagagcgggaggaaaaagtaaaggaaacccaagaggataaacttgaagggggagcggcaaaacgcgagactaaagaagtacagactaatgagctgaaagcagagaaagcctcacagaaggtgacgaagaagaccaagaccgtccaatgtaaggtgacgctgctcgatgggaccgagtactcctgcgacttggaaaagcacgccaaagggcaggttctgttcgataaggtgtgcgagcatctgaatctcctggagaaagactatttcggcttactttttcaggagtctcctgagcagaaaaactggctcgatcccgcaaaagagattaaacgccaactgcgtaatctgccctggctgttcacattcaatgtgaagttctatcctcccgatccaagccaactgacagaagatattactcggtactttctctgcctccagctcagacaagatattgccagcggacggctgccatgttctttcgtcacccacgctctcctcggctcttatacacttcaggctgagctaggtgactacgatccagaggagcacggctccatcgatctgtccgaattccagtttgccccaacccagacaaaggaactggaagagaaagtggctgagctgcataagacccacagaggcttaagccccgcacaggccgatagccaattcctagaaaatgcaaagcggctctcaatgtacggtgttgatctacaccatgccaaggatagtgagggggtcgatataaaattgggggtgtgtgcaaacggcctgctgatctataaggaccgcctgagaatcaatcgcttcgcgtggccaaaaatccttaaaattagttacaaacggtcgaacttctatatcaaagttcgcccagcggagttggagcaatttgagtccacaatcggatttaaattgcccaatcatagggctgcgaagcgcctttggaaggtctgcgtggaacaccataccttttaccggcttgtgagcccggagcaacctcccaaagctaaattcttgacactggggtccaagttccgctatagtggcaggacacaggcgcagaccaggcaggccagcaccttgattgatcggcctgctccacactttgaaaggacttctagcaaacgggtgtcaagaagccttgacggggcacccattggcgttatggatcaaagtctgatgaaagactttcctggggctgccggagagatcagcgcctacggtcccggactcgttagcatagcagtggttcaggacggggacgggcgacgtgaagtcagatccccaactaaagcccctcacctgcaactgattgaaggcaagaccgttaaagggggaatatcagaaactaggatagagaaacgcatcgtgatcactggagatggggatattgatcacgaccaggctctggcacaagcaatcagagaagccagggagcagcaccccgatatgtccgttactcgggtagtggtccataaagagacagagttagcggaggaaggcgaggattag

SEQ ID NO: 50659 - DNA, 462 bp, Artificial Sequence
  derived and/or modified sequence
atgactacagaggtcggaagtgtgtccgaagtcaaaaaggatagctcccagctcggaacagacgcaaccaaggagaaacctaaggaggtcgcggagaaccaacagaaccagtcctccgatcccgaagaggagaagggcagtcaaccccctccggcagctgagtctcagtcttctttaaggagacagaagcgagaaaaagagacgtctgagagccgtgggatctcgcgatttatcccaccctggcttaaaaaacagaaatcttatacacttgtggtcgccaaagacggcggagacaagaaggaacccacccaggcagtggttgaggagcaggtattggacaaggaagagcccctgcccgaggagcagaggcaagccaagggagacgcggaagagatggctcaaaaaaagcaggaaattaaagtcgaggtcaaagaggagaagccctccgttagcaaagagtag

SEQ ID NO: 50660 - DNA, 540 bp, Artificial Sequence
  derived and/or modified sequence
atgacaaccgaggtaggcagcgttagcgaagtcaaaaaagacagtagtcagctgggaactgacgccaccaaggaaaagccaaaagaggtggccgaaaaccaacagaaccagtccagcgacccagaggaggaaaagggctcacaacctccacctgcggctgagtcacagtcaagtctgcggagacagaagcgggagaaagaaacgtccgaatccaggggcatctcacgcttcatcccgccttggctgaaaaagcaaaagtcctatacccttgtcgtcgctaaggacggcggagacaagaaagaaccaacacaagccgtagtggaggaacaagtgcttgacaaggaggaaccgctacccgaggagcagcgacaagctaagggggatgctgaagaaatggcccagaagaagcaggagattaaagtggaagttaaagaggagaagccctccgtatccaaagaagaaaaaccgtctgtcagcaaggtggaaatgcagcctactgaactcgtctcaaaagaacgggaagagaaggttaaagagtag

SEQ ID NO: 50661 - DNA, 357 bp, Artificial Sequence
  derived and/or modified sequence
atgaccactgaagtgggaagcgtatctgaagttaaaaaggattcctcacagctgggcacggacgccaccaaggaaaaacccaaggaggttgcagaaaatcagcaaaatcagagctctgatccagaagaggagaagggaagtcaacctcctcctgccgctgagagccagtcatccctgaggagacagaaaagggaaaaggagacctctgagtctcggggtatttcaagatttatacccccttggctaaagaagcaaaagtcatacacactcgtggtcgcaaaagacggcggtgacaaaaaagagccgacgcaggcagtagtggaggagcaagtgttggataaagaagaacccctttag

SEQ ID NO: 50662 - DNA, 384 bp, Artificial Sequence
  derived and/or modified sequence
atgacgacggaggtcgggtctgtgtctgaggtaaaaaaggattcatcgcaactcggaactgacgctacaaaggagaaacctaaagaggttgccgaaaaccaacagaatcaaagctctgatccagaggaggagaaaggatcgcagcccccacccgcagcggaatcccagtcttctctccgtaggcagaagagagaaaaggagacatctgagtccagggggatctccagatttattcctccgtggctaaagaaacaaaaaagttacaccctagtagtggcgaaggatggcggagataagaaggaaccgacgcaggcggttgtcgaggagcaggtgctagataaagaggaaccattgcccgaagagcagaggcaggccaaaggatag

SEQ ID NO: 50663 - DNA, 489 bp, Artificial Sequence
  derived and/or modified sequence
atgactacggaagtgggcagcgtttccgaagttaagaaggactccagccagctcggcacggacgcaacaaaggaaaagccgaaggaggtggccgagaatcagcagaaccaaagcagtgaccccgaggaagagaaggggagccagccccctccggcagctgagtctcaaagcagtctgcggcgacagaaaagagaaaaagagacaagtgaaagccgcggaatcagccgatttatccctccgtggctgaaaaaacagaagtcctacacattggtggtcgccaaggacggtggagacaaaaaggaaccaacacaggcagtcgtggaggaacaggtgctggataaggaagaacccttgccagaggaacagcgccaggcgaagggcgatgccgaagagatggctcagaagaagcaggagatcaaggtggaggtgaaggaagagaagccctccgtgtcaaaagaggaaaagccgagcgtcagcaaggtagaatag

SEQ ID NO: 50664 - DNA, 2022 bp, Artificial Sequence
  derived and/or modified sequence
atgaccaccgaggtgggcagcgtgagcgaggtgaagaaggacagcagccagctgggcaccgacgccaccaaggagaagcccaaggaggtggccgagaaccagcagaaccagagcagcgaccccgaggaggagaagggcagccagcccccccccgccgccgagagccagagcagcctgagaagacagaagagagagaaggagaccagcgagagcagaggcatcagcagattcatccccccctggctgaagaagcagaagagctacaccctggtggtggccaaggacggcggcgacaagaaggagcccacccaggccgtggtggaggagcaggtgctggacaaggaggagcccctgcccgaggagcagagacaggccaagggcgacgccgaggagatggcccagaagaagcaggagatcaaggtggaggtgaaggaggagaagcccagcgtgagcaaggaggagaagcccagcgtgagcaaggtggagatgcagcccaccgagctggtgagcaaggagagagaggagaaggtgaaggagacccaggaggacaagctggagggcggcgccgccaagagagagaccaaggaggtgcagaccaacgagctgaaggccgagaaggccagccagaaggtgaccaagaagaccaagaccgtgcagtgcaaggtgaccctgctggacggcaccgagtacagctgcgacctggagaagcacgccaagggccaggtgctgttcgacaaggtgtgcgagcacctgaacctgctggagaaggactacttcggcctgctgttccaggagagccccgagcagaagaactggctggaccccgccaaggagatcaagagacagctgagaaacctgccctggctgttcaccttcaacgtgaagttctacccccccgaccccagccagctgaccgaggacatcaccagatacttcctgtgcctgcagctgagacaggacatcgccagcggcagactgccctgcagcttcgtgacccacgccctgctgggcagctacaccctgcaggccgagctgggcgactacgaccccgaggagcacggcagcatcgacctgagcgagttccagttcgcccccacccagaccaaggagctggaggagaaggtggccgagctgcacaagacccacagaggcctgagccccgcccaggccgacagccagttcctggagaacgccaagagactgagcatgtacggcgtggacctgcaccacgccaaggacagcgagggcgtggacatcaagctgggcgtgtgcgccaacggcctgctgatctacaaggacagactgagaatcaacagattcgcctggcccaagatcctgaagatcagctacaagagaagcaacttctacatcaaggtgagacccgccgagctggagcagttcgagagcaccatcggcttcaagctgcccaaccacagagccgccaagagactgtggaaggtgtgcgtggagcaccacaccttctacagactggtgagccccgagcagccccccaaggccaagttcctgaccctgggcagcaagttcagatacagcggcagaacccaggcccagaccagacaggccagcaccctgatcgacagacccgccccccacttcgagagaaccagcagcaagagagtgagcagaagcctggacggcgcccccatcggcgtgatggaccagagcctgatgaaggacttccccggcgccgccggcgagatcagcgcctacggccccggcctggtgagcatcgccgtggtgcaggacggcgacggcagaagagaggtgagaagccccaccaaggccccccacctgcagctgatcgagggcaagaccgtgaagggcggcatcagcgagaccagaatcgagaagagaatcgtgatcaccggcgacggcgacatcgaccacgaccaggccctggcccaggccatcagagaggccagagagcagcaccccgacatgagcgtgaccagagtggtggtgcacaaggagaccgagctggccgaggagggcgaggactag

SEQ ID NO: 50665 - DNA, 462 bp, Artificial Sequence
  derived and/or modified sequence
atgaccaccgaggtgggcagcgtgagcgaggtgaagaaggacagcagccagctgggcaccgacgccaccaaggagaagcccaaggaggtggccgagaaccagcagaaccagagcagcgaccccgaggaggagaagggcagccagcccccccccgccgccgagagccagagcagcctgagaagacagaagagagagaaggagaccagcgagagcagaggcatcagcagattcatccccccctggctgaagaagcagaagagctacaccctggtggtggccaaggacggcggcgacaagaaggagcccacccaggccgtggtggaggagcaggtgctggacaaggaggagcccctgcccgaggagcagagacaggccaagggcgacgccgaggagatggcccagaagaagcaggagatcaaggtggaggtgaaggaggagaagcccagcgtgagcaaggagtag

SEQ ID NO: 50666 - DNA, 540 bp, Artificial Sequence
  derived and/or modified sequence
atgaccaccgaggtgggcagcgtgagcgaggtgaagaaggacagcagccagctgggcaccgacgccaccaaggagaagcccaaggaggtggccgagaaccagcagaaccagagcagcgaccccgaggaggagaagggcagccagcccccccccgccgccgagagccagagcagcctgagaagacagaagagagagaaggagaccagcgagagcagaggcatcagcagattcatccccccctggctgaagaagcagaagagctacaccctggtggtggccaaggacggcggcgacaagaaggagcccacccaggccgtggtggaggagcaggtgctggacaaggaggagcccctgcccgaggagcagagacaggccaagggcgacgccgaggagatggcccagaagaagcaggagatcaaggtggaggtgaaggaggagaagcccagcgtgagcaaggaggagaagcccagcgtgagcaaggtggagatgcagcccaccgagctggtgagcaaggagagagaggagaaggtgaaggagtag

SEQ ID NO: 50667 - DNA, 357 bp, Artificial Sequence
  derived and/or modified sequence
atgaccaccgaggtgggcagcgtgagcgaggtgaagaaggacagcagccagctgggcaccgacgccaccaaggagaagcccaaggaggtggccgagaaccagcagaaccagagcagcgaccccgaggaggagaagggcagccagcccccccccgccgccgagagccagagcagcctgagaagacagaagagagagaaggagaccagcgagagcagaggcatcagcagattcatccccccctggctgaagaagcagaagagctacaccctggtggtggccaaggacggcggcgacaagaaggagcccacccaggccgtggtggaggagcaggtgctggacaaggaggagcccctgtag

SEQ ID NO: 50668 - DNA, 384 bp, Artificial Sequence
  derived and/or modified sequence
atgaccaccgaggtgggcagcgtgagcgaggtgaagaaggacagcagccagctgggcaccgacgccaccaaggagaagcccaaggaggtggccgagaaccagcagaaccagagcagcgaccccgaggaggagaagggcagccagcccccccccgccgccgagagccagagcagcctgagaagacagaagagagagaaggagaccagcgagagcagaggcatcagcagattcatccccccctggctgaagaagcagaagagctacaccctggtggtggccaaggacggcggcgacaagaaggagcccacccaggccgtggtggaggagcaggtgctggacaaggaggagcccctgcccgaggagcagagacaggccaagggctag

SEQ ID NO: 50669 - DNA, 489 bp, Artificial Sequence
  derived and/or modified sequence
atgaccaccgaggtgggcagcgtgagcgaggtgaagaaggacagcagccagctgggcaccgacgccaccaaggagaagcccaaggaggtggccgagaaccagcagaaccagagcagcgaccccgaggaggagaagggcagccagcccccccccgccgccgagagccagagcagcctgagaagacagaagagagagaaggagaccagcgagagcagaggcatcagcagattcatccccccctggctgaagaagcagaagagctacaccctggtggtggccaaggacggcggcgacaagaaggagcccacccaggccgtggtggaggagcaggtgctggacaaggaggagcccctgcccgaggagcagagacaggccaagggcgacgccgaggagatggcccagaagaagcaggagatcaaggtggaggtgaaggaggagaagcccagcgtgagcaaggaggagaagcccagcgtgagcaaggtggagtag

SEQ ID NO: 50670 - DNA, 3369 bp, Artificial Sequence
  derived and/or modified sequence
agcggagggaggaggcaggcgcggctgccggcggctgggactgaagagggacgggtcccgcggcgagcgagctcctgagcataagctgtggccatgactactgaagtaggctctgtgtctgaagtgaagaaggactctagccagttaggaacagatgcaaccaaggaaaaacctaaagaagtagcagaaaatcagcagaatcagtcttccgatccagaggaggaaaaaggttcccagccacctcctgcagctgaaagccaaagtagtctacgccgccagaagagagagaaggaaacatcggagagcaggggtatttctcggttcataccgccatggcttaagaagcaaaagtcatataccttagtagtggccaaagatggaggagataaaaaagagcctacccaagctgttgttgaagaacaggtcttagataaagaggaaccccttccagaagaacagagacaggctaagggtgatgctgaagaaatggctcagaagaaacaagagattaaagttgaagtcaaggaagaaaaaccctcagtgagcaaggaagaaaaaccctcagtgagcaaagtggagatgcagcctactgaattagtaagtaaggagagagaagagaaggtaaaagaaacacaggaagacaaattagaaggaggagcagcaaaaagggagaccaaggaagtgcagaccaatgagctgaaagcagagaaggcatctcaaaaagtcaccaagaagaccaaaactgtccagtgtaaagtgaccctcttagatggcaccgaatacagctgtgacctggagaaacatgccaagggacaagtgttatttgacaaagtgtgtgaacacctcaatctcttggagaaagactactttggacttttgtttcaggaaagccctgagcagaaaaactggttagatcctgctaaagaaataaagagacaactgagaaaccttccatggctattcacttttaatgtgaagttttatcctcctgatccttctcaattgactgaagatatcaccagatacttcttgtgccttcagctccggcaggacattgcctctggccgcctgccctgctcttttgtgactcatgctctcctgggatcctacaccctgcaggctgaacttggtgactatgacccagaagaacatggcagcatcgacctcagtgaattccagtttgcccctactcagactaaggagctggaagagaaggtggcagagctgcacaaaacccacaggggcttatcgccagcacaagctgattcccagttcttagaaaatgcaaagaggctttccatgtatggtgttgacctacatcatgccaaggactcagaaggtgtggacatcaagctgggcgtgtgtgctaatggacttctcatttacaaagacagactgcgaatcaatcgttttgcttggccgaaaatcttaaaaatttcctataaacgcagtaacttctacattaaagtcagaccggcagagctggaacagtttgagagtaccattggattcaaactgccaaaccaccgggcagcgaaaagactatggaaagtgtgcgtggagcatcatactttctacaggcttgtttctccagagcagccaccaaaagccaagttcctgaccttggggtccaaatttcgctatagtggccgcacccaagcacagacccgccaggccagcaccctcatagataggccagcaccacactttgagcgcacttctagtaaacgggtctccaggagtctagatggagctccgattggtgtcatggaccaaagtcttatgaaggattttcctggcgctgctggggagatttcagcctatggacctggacttgtcagcattgccgtggtacaagatggggacggcaggagggaagtgagaagcccaactaaagccccacatttgcagctcattgaaggaaagactgtaaaaggtggaatttctgaaacaagaattgagaaacgcattgtgatcacaggagatggagatattgatcatgaccaggcactggctcaggcgatcagggaagccagagagcagcaccctgacatgtcggtcacaagagtggtggtacacaaagaaacagagttggctgaggaaggggaagattaagtaagaaagtcattttttaaacaacactcaactttgtgaacccctgaagattttttgaccgttccaagtcttaatgccacaccactattccagcgaatttatgctacaactggtaacaatgaccagaagcctgaagaattaaaatgccaacaccaaacctttccttaccagctctggtctatattgctcccatgcatttaatatattattttgttttataaccacttctaaatattctcagttctttctttttgttgttgttaattaaggggttttggttttgttttctgtttactttgtgtgcaactacctgcttttaatgactcactttgatcaaatgacagtgaacaaagccagcccaagctggtaaggtgctgttcacttgaacaggtgctgttgcgcagaaaggaaactctgtgactaatttagatagtggctttccttcttctggattcttttcattgaattctcacagtaaatatttacggagttttcaaattgcagcaaatatactgtatgagaaaatattaatacagattaaaagcctttcttacatcttgaaaattttctaatatttgagaatttcacagggatgttttttatattggacccttttgactttccagtcctgtgactttctacttttagtagagagtcagaatctctggactggagaataatgaagaagttcactgactgtgcactgtgcttagagaccctgccgcaccacagtgccaatgcttgtcagacacatgcccttcggcagcattccagaacaggagggaagagaaagagaaaactttcttcccttctactaaaagattcaggcagcttaaaaccttagtgctttctttcttaacatacccacatttcaattctttccattatttgaacacttgggtagaactcttgctttgtattaaacctctttgtctacacatgtaaaacttaccttttgttattgagcaggcctatctctttcagatagttttatgattcacacaggtttgaggatgctggggagagggggagggggctgtggtggtgttctgttggttacaagaaagttataccatttaaagctggcaccagagacccgatagggacttattaactatattgaacattttttcctttgcctttgaccctatgtatagttacgatgccagattagatttatagcagcctcaagttgtattaaatgatattttgcttcctgtaatactattataaaataaagtttgtttattctct

SEQ ID NO: 50671 - DNA, 2568 bp, Artificial Sequence
  derived and/or modified sequence
aatttcaatttgaaacctagcggagggaggaggcaggcgcggctgccggcggctgggactgaagagggacgggtcccgcggcgagcgagctcctgaggtacggcgtcgggcataagctgtggccatgactactgaagtaggctctgtgtctgaagtgaagaaggactctagccagttaggaacagatgcaaccaaggaaaaacctaaagaagtagcagaaaatcagcagaatcagtcttccgatccagaggaggaaaaaggttcccagccacctcctgcagctgaaagccaaagtagtctacgccgccagaagagagagaaggaaacatcggagagcaggggtatttctcggttcataccgccatggcttaagaagcaaaagtcatataccttagtagtggccaaagatggaggagataaaaaagagcctacccaagctgttgttgaagaacaggtcttagataaagaggaaccccttccagaagaacagagacaggctaagggtgatgctgaagaaatggctcagaagaaacaagagattaaagttgaagtcaaggaagaaaaaccctcagtgagcaaggaagaaaaaccctcagtgagcaaagtggagatgcagcctactgaattagtaagtaaggagagagaagagaaggtaaaagaaacacaggaagacaaattagaaggaggagcagcaaaaagggagaccaaggaagtgcagaccaatgagctgaaagcagagaaggcatctcaaaaagtcaccaagaagaccaaaactgtccagtgtaaagtgaccctcttagatggcaccgaatacagctgtgacctggagaaacatgccaagggacaagtgttatttgacaaagtgtgtgaacacctcaatctcttggagaaagactactttggacttttgtttcaggaaagccctgagcagaaaaactggttagatcctgctaaagaaataaagagacaactgagaaaccttccatggctattcacttttaatgtgaagttttatcctcctgatccttctcaattgactgaagatatcaccagatacttcttgtgccttcagctccggcaggacattgcctctggccgcctgccctgctcttttgtgactcatgctctcctgggatcctacaccctgcaggctgaacttggtgactatgacccagaagaacatggcagcatcgacctcagtgaattccagtttgcccctactcagactaaggagctggaagagaaggtggcagagctgcacaaaacccacaggggcttatcgccagcacaagctgattcccagttcttagaaaatgcaaagaggctttccatgtatggtgttgacctacatcatgccaaggactcagaaggtgtggacatcaagctgggcgtgtgtgctaatggacttctcatttacaaagacagactgcgaatcaatcgttttgcttggccgaaaatcttaaaaatttcctataaacgcagtaacttctacattaaagtcagaccggcagagctggaacagtttgagagtaccattggattcaaactgccaaaccaccgggcagcgaaaagactatggaaagtgtgcgtggagcatcatactttctacaggcttgtttctccagagcagccaccaaaagccaagttcctgaccttggggtccaaatttcgctatagtggccgcacccaagcacagacccgccaggccagcaccctcatagataggccagcaccacactttgagcgcacttctagtaaacgggtctccaggagtctagatggagctccgattggtgtcatggaccaaagtcttatgaaggattttcctggcgctgctggggagatttcagcctatggacctggacttgtcagcattgccgtggtacaagatggggacggcaggagggaagtgagaagcccaactaaagccccacatttgcagctcattgaaggaaagactgtaaaaggtggaatttctgaaacaagaattgagaaacgcattgtgatcacaggagatggagatattgatcatgaccaggcactggctcaggcgatcagggaagccagagagcagcaccctgacatgtcggtcacaagagtggtggtacacaaagaaacagagttggctgaggaaggggaagattaagtaagaaagtcattttttaaacaacactcaactttgtgaacccctgaagattttttgaccgttccaagtcttaatgccacaccactattccagcgaatttatgctacaactggtaacaatgaccagaagcctgaagaattaaaatgccaacaccaaacctttccttaccagctctggtctatattgctcccatgcatttaatatattattttgttttataaccacttctaaatattctcagttctttctttttgttgttgttaattaaggggttttggttttgttttctgtttactttgtgtgcaactacctgcttttaatgactcactttgatcaaatgacagtgaacaaagccagcccaagctggtaaggtgctgttcacttgaacaggtgctgttgcgcagaaaggaaactctgtgact

SEQ ID NO: 50672 - DNA, 552 bp, Artificial Sequence
  derived and/or modified sequence
gatgcagacatagcctatttggcagctattttatgatagtggtgaacagcacacaaaactccttcagaccctcccaacataagctgtggccatgactactgaagtaggctctgtgtctgaagtgaagaaggactctagccagttaggaacagatgcaaccaaggaaaaacctaaagaagtagcagaaaatcagcagaatcagtcttccgatccagaggaggaaaaaggttcccagccacctcctgcagctgaaagccaaagtagtctacgccgccagaagagagagaaggaaacatcggagagcaggggtatttctcggttcataccgccatggcttaagaagcaaaagtcatataccttagtagtggccaaagatggaggagataaaaaagagcctacccaagctgttgttgaagaacaggtcttagataaagaggaaccccttccagaagaacagagacaggctaagggtgatgctgaagaaatggctcagaagaaacaagagattaaagttgaagtcaaggaagaaaaaccctcagtgagcaaggaaga

SEQ ID NO: 50673 - DNA, 585 bp, Artificial Sequence
  derived and/or modified sequence
aaaaacagcaactctaaactggctctggatatgtcataagctgtggccatgactactgaagtaggctctgtgtctgaagtgaagaaggactctagccagttaggaacagatgcaaccaaggaaaaacctaaagaagtagcagaaaatcagcagaatcagtcttccgatccagaggaggaaaaaggttcccagccacctcctgcagctgaaagccaaagtagtctacgccgccagaagagagagaaggaaacatcggagagcaggggtatttctcggttcataccgccatggcttaagaagcaaaagtcatataccttagtagtggccaaagatggaggagataaaaaagagcctacccaagctgttgttgaagaacaggtcttagataaagaggaaccccttccagaagaacagagacaggctaagggtgatgctgaagaaatggctcagaagaaacaagagattaaagttgaagtcaaggaagaaaaaccctcagtgagcaaggaagaaaaaccctcagtgagcaaagtggagatgcagcctactgaattagtaagtaaggagagagaagagaaggtaaaagaa

SEQ ID NO: 50674 - DNA, 565 bp, Artificial Sequence
  derived and/or modified sequence
acgcgcggtgcgggtcgggcccgctgtaggctcgcgtccgcgcccccagctgccgcctgcgccgtctgggagctgcggagagggacgcgtgtttcgtgctccgatccttacaattcccacacccaggccatctcaccacagatggcttgttttttctcctcctgcgcctgggggccgagggttgggagcatttttagcataagctgtggccatgactactgaagtaggctctgtgtctgaagtgaagaaggactctagccagttaggaacagatgcaaccaaggaaaaacctaaagaagtagcagaaaatcagcagaatcagtcttccgatccagaggaggaaaaaggttcccagccacctcctgcagctgaaagccaaagtagtctacgccgccagaagagagagaaggaaacatcggagagcaggggtatttctcggttcataccgccatggcttaagaagcaaaagtcatataccttagtagtggccaaagatggaggagataaaaaagagcctacccaagctgttgttgaagaacaggtcttagataaagaggaacccctt

SEQ ID NO: 50675 - DNA, 588 bp, Artificial Sequence
  derived and/or modified sequence
ttatagctcttattccctttgtagttagctatttaaatgccctgctctcacactgctggagccacattttatacaggtctgtgtcctcagcagctatcagcaagcacaaagcaattcctcatggaatgaatggatctttacaaaacccaaaagtacagtattaaaatcaagatttcatgggcagaggtaatgcataagctgtggccatgactactgaagtaggctctgtgtctgaagtgaagaaggactctagccagttaggaacagatgcaaccaaggaaaaacctaaagaagtagcagaaaatcagcagaatcagtcttccgatccagaggaggaaaaaggttcccagccacctcctgcagctgaaagccaaagtagtctacgccgccagaagagagagaaggaaacatcggagagcaggggtatttctcggttcataccgccatggcttaagaagcaaaagtcatataccttagtagtggccaaagatggaggagataaaaaagagcctacccaagctgttgttgaagaacaggtcttagataaagaggaaccccttccagaagaacagagacaggctaagggtg

SEQ ID NO: 50676 - DNA, 591 bp, Artificial Sequence
  derived and/or modified sequence
gaacttcggcttcatcctgtgacttgctcagatgtctttatgtgatccatagtattgtagaaaaacctcagattcaaatgaaagatatgcataagctgtggccatgactactgaagtaggctctgtgtctgaagtgaagaaggactctagccagttaggaacagatgcaaccaaggaaaaacctaaagaagtagcagaaaatcagcagaatcagtcttccgatccagaggaggaaaaaggttcccagccacctcctgcagctgaaagccaaagtagtctacgccgccagaagagagagaaggaaacatcggagagcaggggtatttctcggttcataccgccatggcttaagaagcaaaagtcatataccttagtagtggccaaagatggaggagataaaaaagagcctacccaagctgttgttgaagaacaggtcttagataaagaggaaccccttccagaagaacagagacaggctaagggtgatgctgaagaaatggctcagaagaaacaagagattaaagttgaagtcaaggaagaaaaaccctcagtgagcaaggaagaaaaaccctcagtgagcaaagtggagat

SEQ ID NO: 50677 - protein, 608 aa, Artificial Sequence
  derived and/or modified sequence
MSDKSDLKAELERKKQRLAQIREEKKRKEEERKKKEADMQQKKEPVQDDSDLDRKRRETEALLQSIGISPEPPLVPTPMSPSSKSVSTPSEAGSQDSGDLGPLTRRRLHKLGVSKVTQVDFLPREVVSYSKETQTPLATHQSEEDEEDEEMVESKVGQDSELENQDKKQEVKEAPPRELTEEEKQQILHSEEFLIFFDRTIRVIERALAEDSDIFFDYSGRELEEKDGDVQAGANLSFNRQFYDEHWSKHRVVTCMDWSLQYPELMVASYNNNEDAPHEPDGVALVWNMKFKKTTPEYVFHCQSSVMSVCFARFHPNLVVGGTYSGQIVLWDNRSHRRTPVQRTPLSAAAHTHPVYCVNVVGTQNAHNLITVSTDGKMCSWSLDMLSTPQESMELVYNKSKPVAVTGMAFPTGDVNNFVVGSEEGTVYTACRHGSKAGIGEVFEGHQGPVTGINCHMAVGPIDFSHLFVTSSFDWTVKLWTTKHNKPLYSFEDNADYVYDVMWSPVHPALFACVDGMGRLDLWNLNNDTEVPTASVAIEGASALNRVRWAQAGKEVAVGDSEGRIWVYDVGELAVPHNDEWTRFARTLVEIRANRADSEEEGTVELSA

SEQ ID NO: 50678 - DNA, 1827 bp, Artificial Sequence
  derived and/or modified sequence
atgagcgacaagagcgacctgaaggccgagctggagagaaagaagcagagactggcccagatcagagaggagaagaagagaaaggaggaggagagaaagaagaaggaggccgacatgcagcagaagaaggagcccgtgcaggacgacagcgacctggacagaaagagaagagagaccgaggccctgctgcagagcatcggcatcagccccgagccccccctggtgcccacccccatgagccccagcagcaagagcgtgagcacccccagcgaggccggcagccaggacagcggcgacctgggccccctgaccagaagaagactgcacaagctgggcgtgagcaaggtgacccaggtggacttcctgcccagagaggtggtgagctacagcaaggagacccagacccccctggccacccaccagagcgaggaggacgaggaggacgaggagatggtggagagcaaggtgggccaggacagcgagctggagaaccaggacaagaagcaggaggtgaaggaggccccccccagagagctgaccgaggaggagaagcagcagatcctgcacagcgaggagttcctgatcttcttcgacagaaccatcagagtgatcgagagagccctggccgaggacagcgacatcttcttcgactacagcggcagagagctggaggagaaggacggcgacgtgcaggccggcgccaacctgagcttcaacagacagttctacgacgagcactggagcaagcacagagtggtgacctgcatggactggagcctgcagtaccccgagctgatggtggccagctacaacaacaacgaggacgccccccacgagcccgacggcgtggccctggtgtggaacatgaagttcaagaagaccacccccgagtacgtgttccactgccagagcagcgtgatgagcgtgtgcttcgccagattccaccccaacctggtggtgggcggcacctacagcggccagatcgtgctgtgggacaacagaagccacagaagaacccccgtgcagagaacccccctgagcgccgccgcccacacccaccccgtgtactgcgtgaacgtggtgggcacccagaacgcccacaacctgatcaccgtgagcaccgacggcaagatgtgcagctggagcctggacatgctgagcaccccccaggagagcatggagctggtgtacaacaagagcaagcccgtggccgtgaccggcatggccttccccaccggcgacgtgaacaacttcgtggtgggcagcgaggagggcaccgtgtacaccgcctgcagacacggcagcaaggccggcatcggcgaggtgttcgagggccaccagggccccgtgaccggcatcaactgccacatggccgtgggccccatcgacttcagccacctgttcgtgaccagcagcttcgactggaccgtgaagctgtggaccaccaagcacaacaagcccctgtacagcttcgaggacaacgccgactacgtgtacgacgtgatgtggagccccgtgcaccccgccctgttcgcctgcgtggacggcatgggcagactggacctgtggaacctgaacaacgacaccgaggtgcccaccgccagcgtggccatcgagggcgccagcgccctgaacagagtgagatgggcccaggccggcaaggaggtggccgtgggcgacagcgagggcagaatctgggtgtacgacgtgggcgagctggccgtgccccacaacgacgagtggaccagattcgccagaaccctggtggagatcagagccaacagagccgacagcgaggaggagggcaccgtggagctgagcgcctag

SEQ ID NO: 50679 - DNA, 2843 bp, Artificial Sequence
  derived and/or modified sequence
gaggaagtgatcgctcccggaggagcgcgagccgagcggccggcgcagcgtgagacagcacatcctgcccgcgccggccccgccaccttcgggagccgcctgcaccaacgctgccgccgcccaggagccgccgccggctcggggagcccagttccgccgctgccgagcgcgtccaggaaaccaacatgtctgacaaaagtgacttaaaagctgagctagagcgcaaaaagcagcgcttagcacagataagagaagagaagaaacggaaggaagaggagaggaaaaagaaagaggctgatatgcagcagaagaaagaacccgttcaggacgactctgatctggatcgcaaacgacgagagacagaggctttgctgcaaagcattggtatctcaccggagccgcctctagtcccaacccctatgtctccctcctcgaaatcagtgagcactcccagtgaagctggaagccaagactcaggcgatctggggccattaacaagaagaagactgcataaactgggcgtgtcaaaggtcacccaagtggatttcctgccaagggaagtagtgtcctactcaaaggagacccagactcctcttgccacgcatcagtctgaagaggatgaggaagatgaggaaatggtggaatctaaagttggccaggactcagaactggaaaatcaggacaaaaaacaggaagtgaaggaagcccctccaagagagttgacagaggaagaaaaacagcagatccttcattcagaggaatttctcatcttttttgaccggacaatacgggtaattgaaagagccctggctgaagattccgacatcttttttgactacagcggccgagagttagaggaaaaagatggggatgttcaggctggagccaatctttctttcaatcgtcagttctatgatgaacattggtccaagcatcgagtggtcacttgtatggactggtccctccagtaccctgagctgatggtggcttcttacaacaacaatgaagatgctccccatgaaccagatggagtggccttggtttggaacatgaagtttaagaaaaccacaccagaatacgtcttccactgtcagtcctctgtgatgtcggtctgcttcgcccgtttccatcctaacttggtggttggtgggacttactcgggccagattgtcctctgggacaatcgcagtcatcgaaggactccagtgcagcggacacccttatcagctgctgcacacacgcatcccgtgtactgtgtaaatgttgttgggacccagaatgctcataacctcatcactgtctccactgatggcaaaatgtgttcctggagcctggacatgctctcaactccacaggagagcatggagctggtgtacaataagtccaagcctgtcgctgttaccggaatggctttcccaacgggagacgtcaataacttcgtggttggcagtgaggaaggtacagtctacacggcttgtcgtcatggaagcaaagcaggtattggtgaggtctttgaaggtcaccaagggccagtgacaggaattaactgccacatggcagtgggcccaatcgacttttctcacctgtttgtcacatcatcatttgactggactgtcaaactgtggaccaccaagcacaacaagccgctctactcctttgaagacaatgcagactatgtgtacgatgtcatgtggtcccccgtgcatcctgcgctttttgcctgcgtggacgggatggggcgcttggacctctggaacctcaacaatgacaccgaggttccaacagcaagtgtggccattgagggggcatccgccctaaaccgtgttcgttgggcccaagctggcaaagaagttgctgttggggactcggaaggccgtatttgggtctatgacgttggagagcttgcagttccccacaatgatgaatggacccgatttgccaggacccttgtggaaattcgtgctaacagagctgatagcgaggaggaaggcactgttgagttatctgcctagtggaaatgagccacccccactgcagcccccacctttgtgtcctagagctcagcgtctgcagtcaagtctcttgtattcggtgtccattcagtatcagtattgctgtgatattttgggtgccatattgtgccagctttgctccaagtattctaaatgtgtcccatcatgctttccactgacccaaaattcaccacagcatttctatctttatatttctgtctcaaaaatgaagagaagggggttatgggttaagttgctgccttttaactactttgtagctgtatttaatagctggaaacctctggttaaatttgtgcttacatgcactcctggcatagtcctattaaatccatatgaagccagatatgattgggtgcagatgtggtgttcctcatattatggtacagggccaaagacttgagacgtggtgttttacatggtgactcacattatgaatggatttactagaagaacattgctgctccttatttattgtagtgtgctgcatggaacgtatttatttgaaagcattaaaataaatgatcctagagcatgtgcataatgagaggactgtattctctctgctgctgttgaggttatattaagttccacatagcaattacagtatgccagttccactgaagacatgaaatctttagaggtttcttgcagtgaacgaaatgaattttaatgcctattatttctgggtactttaacaatatttcaaatatcattgaccactaatacttctcactgaagctaacacagtctgacaaaagtctatggttcctaaatatgacatcagtgttgccaataaaatgtttcaaacca

SEQ ID NO: 50680 - DNA, 1827 bp, Artificial Sequence
  derived and/or modified sequence
atgtcagacaagagcgatctgaaggctgaactcgaaagaaaaaagcagcgcctggctcagataagggaggagaagaaacgaaaagaggaagagcggaaaaagaaggaagctgatatgcagcagaaaaaggagccggtccaagatgacagtgatctggatagaaaacgcagagaaacggaggctctgcttcagtccataggcatcagcccagagccacccttggtgcctacgcctatgagcccatccagtaagagtgtgtcgacaccgagtgaagccggttcccaagactcaggcgacctcggtccgctgacgagaaggcgtctgcacaaattgggtgtgagcaaagtgactcaggtcgactttttgccccgggaagtggtgtcctatagtaaggaaacccagactcctctagctacacaccagagcgaagaagatgaggaagacgaggagatggtcgagtctaaagtcggtcaggattccgagcttgaaaatcaagataaaaagcaggaagtgaaggaagccccgcctcgtgagttgaccgaagaagagaagcagcagatactccactcggaagaatttctaattttttttgaccgaactatcagggttatcgaacgggccctcgccgaggacagtgatatcttctttgactatagcggtcgcgaattggaggaaaaggacggcgatgtgcaggccggtgcgaatttgtcatttaataggcagttctacgatgaacattggagcaagcatcgcgtcgtgacctgcatggattggagcttgcagtaccctgagctcatggtcgccagttataacaacaatgaagacgctcctcacgagccagatggcgtagcgctggtttggaacatgaaatttaaaaaaacaacccctgaatatgttttccactgccagagttctgtgatgagcgtctgctttgcccgcttccacccgaatctcgtggtagggggtacgtatagcgggcagatcgtgttatgggataaccgatcgcaccgcaggactcccgtacagcgtacaccactctctgccgctgcccatacccaccccgtgtattgcgtaaacgtggttgggacgcaaaatgcgcataatctaatcaccgtgtcgactgatggcaaaatgtgctcctggagtctggatatgctgtccactccacaggaatctatggagctggtgtacaacaagtcaaagcccgttgccgtcaccgggatggcctttccaaccggcgatgtcaacaactttgttgttgggagcgaagagggcacggtttacactgcttgccgccatggctccaaggccggaataggagaggtgttcgagggacatcagggcccagtgactggtattaattgccatatggccgttggacctatcgacttcagccatctcttcgtgaccagctcattcgactggaccgtcaagctatggacaaccaaacacaacaagccactgtatagcttcgaggataacgccgactacgtgtacgacgtcatgtggtctcctgtgcaccccgccctgttcgcttgtgtagatgggatgggaaggctcgatctttggaatctgaataacgatacagaggtcccaacagcctctgtggctatagaaggcgcctcggccctaaaccgggtccggtgggctcaagctggcaaagaagtggctgtcggggatagcgaaggacgcatttgggtttacgacgtcggtgagctggccgtacctcacaatgatgagtggacccgattcgcaaggaccttagtcgaaatcagggctaaccgggccgactctgaggaggaggggacagtcgagctgagcgcttag

SEQ ID NO: 50681 - DNA, 1827 bp, Artificial Sequence
  derived and/or modified sequence
atgtctgacaagagtgacctgaaggccgagctggagaggaagaagcagaggctggcccagatccgggaggagaagaagaggaaggaggaggagaggaagaagaaggaggccgacatgcagcagaagaaggagcctgtgcaggatgacagcgacctggacaggaagaggcgggagacagaggccctgctgcagagcatcggcatcagccctgagccccccctggtgcccacccccatgagccccagcagcaagtctgtgtccacccccagcgaggccggcagccaggacagcggggacctgggccccctgacccggcggcggctgcacaagctgggcgtgtccaaggtgacccaggtggacttcctgccccgggaggtggtgtcctacagcaaggagacccagacccccctggccacccaccagagcgaggaggatgaagaagatgaggagatggtggagagcaaggtgggccaggacagcgagctggagaaccaggacaagaagcaggaggtgaaggaggccccaccccgggagctgacagaggaggagaagcagcagatcctgcacagcgaggagttcctgatcttctttgacaggaccatccgggtcatcgagcgggccctggccgaggacagcgacatcttctttgactacagcggccgggagctggaggagaaggatggagatgtgcaggccggggccaacctgtccttcaaccggcagttctatgatgagcactggagcaagcaccgggtggtgacctgcatggactggagcctgcagtacccagagctgatggtggccagctacaacaacaatgaagatgcccctcatgagccagatggagtggccctggtgtggaacatgaagttcaagaagaccaccccagaatatgtgttccactgccagagctctgtgatgtctgtgtgctttgcccgcttccaccccaacctggtggtgggcggcacctacagcggccagatcgtgctgtgggacaacagaagccacaggaggacccctgtgcagaggacccccctgtctgctgctgcccacacccaccctgtgtactgtgtgaatgtggtgggcacccagaatgcccacaacctgatcaccgtgtccacagatggcaagatgtgctcctggagcctggacatgctgagcaccccccaggagagcatggagctggtgtacaacaagagcaagcctgtggccgtgacaggcatggccttccccactggagatgtgaacaactttgtggtgggcagcgaggagggcaccgtgtacacagcctgcagacatggcagcaaggccggcattggagaggtgtttgagggccaccagggccctgtgacaggcatcaactgccacatggctgtgggccccatcgacttcagccacctgtttgtgaccagcagctttgactggacagtgaagctgtggaccaccaagcacaacaagcccctgtacagctttgaggacaatgctgactatgtgtatgatgtgatgtggagccctgtgcacccagccctgtttgcctgtgtggatggcatgggccgcctggacctgtggaacctgaacaatgacacagaggtgcccacagcctctgtggccatcgagggcgccagcgccctgaacagagtgcgctgggcccaggccggcaaggaggtggccgtgggggacagcgagggccgcatctgggtgtatgatgtgggggagctggccgtgccccacaatgatgagtggaccaggtttgcccggaccctggtggagatccgggccaacagagctgacagcgaggaggagggcaccgtggagctgagcgcctag

SEQ ID NO: 50682 - DNA, 1827 bp, Artificial Sequence
  derived and/or modified sequence
atgagcgacaagagcgacctgaaggccgagctggagcggaagaagcaacggctggcccagatccgcgaggagaaaaagcgaaaggaagaggagcgcaaaaaaaaggaggctgatatgcagcagaagaaggaacccgttcaagatgacagtgatttagatcggaagaggagagaaactgaagcgctactgcagtctatcggaatttctcccgagccccccctggtgcccacacccatgtcaccatctagtaagtcagtgtcgacgccgagcgaggcaggcagccaggactcaggcgacctagggccacttaccagacgccgcttacacaagctgggtgtgagcaaagtgacccaggtggatttcctccctagggaggttgtcagctactccaaggaaacccagacccccctggccacccaccagtcagaagaagacgaggaggacgaggagatggtggaatctaaggtgggacaagattccgagttagagaaccaggataagaagcaggaggtgaaggaggcccctcccagagaactgacagaagaggagaagcagcagattctccactcggaagagtttcttatcttctttgatagaacaataagggtcatcgaacgggctctagctgaggactccgacatatttttcgactactctggccgtgagcttgaggagaaagatggcgacgttcaggccggagccaacctgtcgttcaaccgccagttctatgatgagcactggtctaaacaccgagtggtgacgtgtatggactggtccttgcagtaccccgagctgatggtggccagttataacaacaatgaggatgccccacacgaaccagacggcgtggcactcgtgtggaacatgaaattcaagaaaactacacctgagtatgtcttccactgtcagagttcagtcatgagcgtgtgcttcgcgagattccacccaaacctggtagtgggggggacctatagtgggcaaattgtgctctgggataaccggtcccaccgtagaacaccagttcagagaacccccctgtcagcagctgctcacactcacccggtgtactgcgtcaacgtggtgggaacccagaatgcgcacaatctgattacggtttcaaccgatggcaagatgtgctcctggtctctggacatgttaagcacacctcaagaatctatggaattggtgtacaataagagcaagcctgtcgccgtgaccggtatggctttccctacaggtgacgtgaataatttcgtcgtgggtagtgaagaggggacggtctatactgcatgcagacacggcagcaaggctggtatcggtgaggtttttgagggccatcagggtcccgtaaccggaattaactgtcatatggctgttgggccgatagacttttctcatttatttgtgacctcctctttcgactggacagtaaagctatggacgaccaagcataataagccgctgtatagtttcgaagacaacgccgattacgtctacgacgtaatgtggtcgccagtccaccctgcactgttcgcgtgcgtggatggaatgggccggcttgatctctggaaccttaataacgacaccgaggttcctaccgcaagcgttgccatcgaaggggcttccgcgctgaacagggtgagatgggcccaggccgggaaggaggtagccgtcggagactccgagggtcgcatttgggtttatgatgttggggaactagccgtgccacacaacgacgaatggactcgctttgctaggacacttgttgagatccgcgctaacagagctgacagcgaggaggaaggtacagtggagctcagtgcctag

SEQ ID NO: 50683 - DNA, 1827 bp, Artificial Sequence
  derived and/or modified sequence
atgtccgataaatccgatttgaaggccgaactcgagcgcaagaaacagagactggcacagatacgcgaggagaagaagagaaaagaagaagagcgcaagaagaaagaagcagatatgcaacagaagaaggagcctgtccaggacgacagcgacctcgatcggaaaagaagagaaacagaggcgctgctacagagtatagggatttctcccgagccgcctctggtgcctacgcctatgagcccctcatccaagtctgtttcaacgccctccgaagccggatcccaggacagcggcgacttggggcctctgactaggaggcgattacataaactgggcgtgagcaaagtcacccaggttgactttctcccaagagaggtcgtgtcttatagcaaagaaacccagacccctctggctacgcaccagtctgaggaggacgaagaggacgaagagatggtcgagtcaaaagtgggccaggacagcgaattggagaatcaggataagaagcaggaagttaaggaggccccacctcgagagctcacagaagaggagaaacaacaaatcctccactccgaagagttcctgatcttcttcgaccggaccatccgagtgattgaaagggctctggccgaagattcggacatcttttttgactattctgggagggaactggaggagaaggacggtgacgtccaggctggcgcaaacctctccttcaacaggcagttttatgacgaacattggtcaaagcatagagtggtgacgtgcatggactggtcactccaatatccggagttaatggttgcttcgtataataacaatgaagatgccccacacgagcctgacggcgtggctttagtgtggaatatgaaattcaagaagaccacgccggaatacgtttttcattgtcagagcagtgtgatgagtgtgtgcttcgctcggtttcatcccaacctcgtggttgggggaacgtattctggacagatcgtgctgtgggataaccggagccacagaaggacacccgtgcagcggacgccactgtccgcggctgcacacacacatcctgtttattgtgtgaacgtggtgggcacacagaatgcccacaacctgatcacggtctccaccgacggcaagatgtgctcttggagtctcgatatgctttccactccccaagaatccatggaactggtatataataaaagtaaaccagtcgcagtaactggaatggcgttccccacaggagacgtcaacaattttgtggtcggcagcgaagagggtacagtctatactgcatgtcgccacggaagcaaagccggtataggggaagtgtttgagggacaccagggacccgtgacaggcatcaattgtcatatggctgttggcccaatcgatttcagtcaccttttcgtgaccagctctttcgattggacggtcaagctgtggactaccaagcataacaaaccgctctatagtttcgaagacaacgccgattatgtctatgacgttatgtggtctccagtgcatccagccctcttcgcctgtgtcgacggaatggggcgactggacctgtggaatttgaataacgatacagaggttccaacagcatcagtcgccattgaaggcgcaagtgcgttgaaccgcgtccggtgggcccaggcgggtaaagaggtggcggtgggggatagcgaaggacgaatctgggtttacgacgtgggtgaattagcggtgccacacaacgacgaatggacccgatttgcgcgaaccctggtggagataagggcgaacagagcagattctgaagaagagggtacagtcgaactcagcgcgtag

SEQ ID NO: 50684 - protein, 518 aa, Artificial Sequence
  derived and/or modified sequence
MKQSSNVPAFLSKLWTLVEETHTNEFITWSQNGQSFLVLDEQRFAKEILPKYFKHNNMASFVRQLNMYGFRKVVHIDSGIVKQERDGPVEFQHPYFKQGQDDLLENIKRKVSSSKPEENKIRQEDLTKIISSAQKVQIKQETIESRLSELKSENESLWKEVSELRAKHAQQQQVIRKIVQFIVTLVQNNQLVSLKRKRPLLLNTNGAQKKNLFQHIVKEPTDNHHHKVPHSRTEGLKPRERISDDIIIYDVTDDNADEENIPVIPETNEDVISDPSNCSQYPDIVIVEDDNEDEYAPVIQSGEQNEPARESLSSGSDGSSPLMSSAVQLNGSSSLTSEDPVTMMDSILNDNINLLGKVELLDYLDSIDCSLEDFQAMLSGRQFSIDPDLLVDSENKGLETTKNNVVQPVSEEGRKSKSKPDKQLIQYTAFPLLAFLDGNPASSVEQASTTASSEVLSSVDKPIEVDELLDSSLDPEPTQSKLVRLEPLTEAEASEATLFYLCELAPAPLDSDMPLLDS

SEQ ID NO: 50685 - DNA, 1557 bp, Artificial Sequence
  derived and/or modified sequence
atgaaacagtccagcaatgtacccgcattcctctcgaaactgtggacccttgtggaagagacccacaccaacgagttcatcacttggagccagaatgggcaaagctttctggtacttgacgagcagcggttcgccaaagagatcctcccaaagtacttcaagcataataatatggcctcattcgtacggcagcttaacatgtatggctttcgcaaagttgtacacattgatagtggcattgtaaaacaggaacgggacggtccagttgaattccagcatccgtattttaaacaaggtcaggatgaccttctggagaacataaagcgaaaagtgagcagtagcaaaccggaagagaacaagatccgccaggaggacctgacaaaaatcatttcctccgctcagaaagtgcagattaaacaggaaacaatcgagagcagactaagcgaactaaaatctgagaatgagtcactttggaaagaagtgtcagagttgagggcgaagcacgctcagcaacagcaggtcataagaaagatcgtgcagtttattgtgactctggtgcaaaataaccaattagtcagtctgaaaaggaagcggccactcctgctcaacactaacggtgcccagaaaaagaacctgttccagcatatcgttaaagagcctaccgataaccatcaccataaagtcccccactcccgaactgaagggctgaagccgcgggagaggatttctgatgatatcattatctacgatgtgactgacgacaatgctgatgaggaaaacatccccgtcatccccgaaacaaacgaggatgtcatcagtgatccgtcaaattgtagccagtacccagacatcgtaatagtggaggatgacaacgaggatgaatacgccccggtcattcagtcaggggaacagaacgaacccgcacgggagtctctctcatcgggttccgatggctcgtctccactgatgtcctccgctgtacaattaaacggctcatctagcctgaccagcgaggatcccgtgactatgatggacagcatcttgaacgataacattaatctcttgggtaaagtggagttgcttgattatctggactctattgactgttccctcgaagatttccaggctatgttgtccggccgacagttcagcatcgacccggatctgcttgtcgattccgagaacaaagggcttgaaactaccaagaataatgtcgtgcagcccgtgtccgaggagggacggaagtcgaaatctaaaccggacaaacagttgatccagtataccgctttccccctcttagccttcttagatggtaaccctgcatcctcagtggaacaggcgagtacaactgcctcctccgaggtgctaagcagcgtcgacaaaccaatcgaggtcgatgagctgctggacagtagcttggatccagagcccacacaatcaaaactcgtccgactggagccactgacagaggccgaggcttccgaagccaccctcttttacctgtgcgagctggcaccggctcctttggattccgacatgcccctcttggattcttag

SEQ ID NO: 50686 - DNA, 2643 bp, Artificial Sequence
  derived and/or modified sequence
acttgtccgtcacgtgcggccgcccggcctctcggccttgccgcgcgcctggcggggttgggggggcggggaccaagatctgctgcgcctgcgttgtgggcgttctcggggagctgctgccgtagctgccgccgccgctaccaccgcgttcgggtgtagaatttggaatccctgcgccgcgttaacaatgaagcagagttcgaacgtgccggctttcctcagcaagctgtggacgcttgtggaggaaacccacactaacgagttcatcacctggagccagaatggccaaagttttctggtcttggatgagcaacgatttgcaaaagaaattcttcccaaatatttcaagcacaataatatggcaagctttgtgaggcaactgaatatgtatggtttccgtaaagtagtacatatcgactctggaattgtaaagcaagaaagagatggtcctgtagaatttcagcatccttacttcaaacaaggacaggatgacttgttggagaacattaaaaggaaggtttcatcttcaaaaccagaagaaaataaaattcgtcaggaagatttaacaaaaattataagtagtgctcagaaggttcagataaaacaggaaactattgagtccaggctttctgaattaaaaagtgagaatgagtccctttggaaggaggtgtcagaattacgagcaaagcatgcacaacagcaacaagttattcgaaagattgtccagtttattgttacattggttcaaaataaccaacttgtgagtttaaaacgtaaaaggcctctacttctaaacactaatggagcccaaaagaagaacctgtttcagcacatagtcaaagaaccaactgataatcatcatcataaagttccacacagtaggactgaaggtttaaagccaagggagaggatttcagatgacatcattatttatgatgttactgatgataatgcagatgaagaaaatatcccagttattccagaaactaatgaggatgttatatctgatccctccaactgtagccagtaccctgatattgtcatcgttgaagatgacaatgaagatgagtatgcacctgtcattcagagtggagagcagaatgaaccagccagagaatccctaagttcaggcagtgatggcagcagccctctcatgtctagtgctgtccagctaaatggctcatccagtctgacctcagaagatccagtgaccatgatggattccattttgaatgataacatcaatcttttgggaaaggttgagctgttggattatcttgacagtattgactgcagtttagaggacttccaggccatgctatcaggaagacaatttagcatagacccagatctcctggttgattctgagaataaaggattagaaactaccaagaacaatgtagttcagccagtttcggaagagggaagaaaatctaaatccaaaccagataagcagcttatccagtataccgcctttccacttcttgcattcctcgatgggaaccctgcttcttctgttgaacaggcgagtacaacagcatcatcagaagttttgtcctctgtagataaacccatagaagttgatgagcttctggatagcagcctagacccagaaccaacccaaagtaagcttgttcgcctggagccattgactgaagctgaagctagtgaagctacactgttttatttatgtgaacttgctcctgcacctctggatagtgatatgccacttttagatagctaaatccccaggaagtggactttacatgtatatattcatcaaaatgatgaactatttattttaaagtatcatttggtactttttttgtaaattgctttgttttgtttaatcagatactgtggaataaaagcaccttttgcttttctcactaaccacacactcttgcagagctttcaggtgttactcagctgcatagttacgcagatgtaatgcacattattggcgtatctttaagttggattcaaatggccatttttctccaattttggtaaattggatatcttttttttacaaatacgaccattaacctcagttaaatttttgtttgttttcctgtttgatgctgtctatttgcattgagtgtaagtcatttgaactaatggtataactcctaaagctttctctgctccagttatttttattaaatatttttcacttggcttatttttaaaactgggaacataaagtgcctgtatcttgtaaaacttcatttgtttcttttggttcagagaagttcatttatgttcaaagacgtttattcatgttcaacaggaaagacaaagtgtacgtgaatgctcgctgtctgatagggttccagctccatatatatagaaagatcgggggtgggatgggatggagtgagccccatccagttagttggactagttttaaataaaggttttccggtttgtgtttttttgaaccatactgtttagtaaaataaatacaatgaatgttgagtactagtgtctgttatgtgtcttctttagaggtgacactcacatgaaacaattttttcttctcataggaagcagtagctttaaactgtctgtggttcattattctcaatatgaatcataccaagatatttgtgcctcatctcgaaaatatattgtatattg

SEQ ID NO: 50687 - DNA, 1557 bp, Artificial Sequence
  derived and/or modified sequence
atgaagcagagcagcaatgtgcctgccttcctgagcaagctgtggaccctggtggaggagacccacaccaatgagttcatcacctggagccagaatggccagagcttcctggtgctggatgagcagagatttgccaaggagatcctgcccaagtacttcaagcacaacaacatggccagctttgtgcggcagctgaacatgtatggcttcaggaaggtggtgcacatcgacagcggcatcgtgaagcaggagagagatggccctgtggagttccagcacccctacttcaagcagggccaggatgacctgctggagaacatcaagaggaaggtgagcagcagcaagccagaggagaacaagatccggcaggaggacctgaccaagatcatcagcagcgcccagaaggtgcagatcaagcaggagaccatcgagagccggctgtctgagctgaagtcagaaaatgaaagcctgtggaaggaggtgtctgagctgcgggccaagcacgcccagcagcagcaggtgatcaggaagatcgtgcagttcatcgtgaccctggtgcagaacaaccagctggtgtccctgaagaggaagaggcccctgctgctgaacaccaatggagcccagaagaagaacctcttccagcacatcgtgaaggagcccacagacaaccaccaccacaaggtgccccacagcaggacagagggcctgaagccccgggagcgcatcagtgatgacatcatcatctatgatgtgacagatgacaatgctgatgaggagaacatccctgtgattcctgagaccaatgaagatgtgatcagtgaccccagcaactgcagccagtacccagacatcgtcatcgtggaggatgacaatgaagatgaatatgcccctgtgatccagagcggggagcagaatgaaccagcccgggagagcctgagcagcggcagtgatggcagcagccccctgatgagcagcgctgtgcagctgaatggcagcagcagcctgaccagcgaggaccctgtgaccatgatggacagcatcctgaatgacaacatcaacctgctgggcaaggtggagctgctggactacctggacagcattgactgcagcctggaggacttccaggccatgctgagcggccggcagttcagcattgatcctgacctgctggtggacagcgagaacaagggcctggagaccaccaagaacaacgtggtgcagcctgtgtctgaggagggcaggaagagcaagagcaagccagacaagcagctgatccagtacacagccttccccctgctggccttcctggatggcaacccagccagctctgtggagcaggccagcaccacagccagcagcgaggtgctgagctctgtggacaagcccatcgaggtggatgagctgctggacagcagcctggaccctgagcccacccagagcaagctggtgcggctggagcccctgacagaagctgaggccagcgaggccaccctcttctacctgtgtgagctggccccagcccccctggacagcgacatgcccctgctggacagctag

SEQ ID NO: 50688 - DNA, 1557 bp, Artificial Sequence
  derived and/or modified sequence
atgaagcagagcagcaacgtgcccgccttcctgagcaagctgtggacactggtcgaggagacccacacaaatgaattcatcacttggtcgcagaacgggcagtcatttttggtgcttgacgaacagaggtttgcaaaggaaattttgcccaagtactttaagcacaataacatggcctctttcgtcagacagctgaacatgtacgggtttaggaaagtagtgcacattgattcaggcattgtgaagcaggaacgggacggacctgttgaatttcagcatccatacttcaagcagggccaggacgatctgctggagaacattaaacgtaaggtctcctcatccaagcccgaggaaaacaagatccggcaagaagatctgaccaagattatctcaagtgctcaaaaggtgcagattaaacaggagacaatcgagagtagactgtcggaattgaaaagcgagaacgaatctctgtggaaggaggtgtctgaattacgcgccaaacatgcccaacagcaacaggtgattaggaagatagtgcagttcattgttaccctggtgcagaacaaccagcttgtgtcactgaagcggaaacgccctcttctgctaaataccaacggcgcccagaagaagaacctgttccagcacattgttaaggaaccaaccgacaatcaccaccataaggtgccccatagcagaaccgaaggactcaaacctcgggagcgaatctccgatgacattattatttacgatgtgactgatgacaacgccgacgaggagaatatcccagtgattccggaaaccaatgaagacgtgatctcggacccttcaaattgttctcaatatccagatatcgtgatagtagaagacgacaatgaagacgaatacgctcccgtgatacagtctggtgagcaaaacgaacccgcccgcgaatcactcagttctggcagcgatggttcttcccctctcatgagttccgcagtacagctgaacggctcttctagcctgacctcagaggaccccgttaccatgatggattccattttaaatgacaacattaatttgctgggcaaagttgagctcttagattatctcgatagcattgattgctcgcttgaggatttccaggccatgttgtctgggaggcagttctcgatcgatccagatcttcttgtggacagtgaaaataagggactagagaccactaagaataatgtcgtgcagcccgtctcagaggaaggccggaagtctaagtcaaagccagataagcagcttattcaatacacggcttttcctctgttagcattcctggatggcaatccagcctctagcgttgagcaggcctctacaaccgctagcagcgaagtcctgtcttctgtggataaacccatagaggtcgatgagctgcttgactcctctcttgatcccgagccaacacaatcaaaattagtgagactcgaacctctgacggaggcggaggcttccgaggctacactgttttatctctgtgaactcgcccctgccccactggattcagatatgcccctcctagatagttag

SEQ ID NO: 50689 - DNA, 1557 bp, Artificial Sequence
  derived and/or modified sequence
atgaaacaaagttcgaacgtgcccgcattccttagcaaactctggactctggttgaagagactcatactaatgagtttattacatggtctcaaaatggacaatcctttcttgtgctggacgaacagcggtttgcaaaggagattctccctaagtactttaaacataacaacatggcaagcttcgttcgacagctcaacatgtatggcttccgtaaggttgttcatatcgactccggaattgttaagcaggaaagggatggccctgtagaatttcagcacccctattttaagcagggccaggacgacttactcgaaaacatcaagagaaaagtgtcctcctcaaagcctgaggagaataaaattagacaagaggatctcactaagatcatttcttccgcccagaaagtccagattaagcaggagactattgaatcccggttgagtgaactgaagtcagagaacgaaagtttgtggaaggaggtgagtgaactgcgcgctaaacatgcccagcagcagcaagttatcagaaagatagtccagttcatcgtgacactagtgcagaacaaccagcttgtcagcctgaagcggaaaagaccccttctcctaaatacaaatggtgcccagaagaagaacctgtttcagcacattgtgaaagagcctaccgacaatcaccaccacaaggtgccccactcccggacagaaggactgaaaccacgggagcgtattagtgacgacataatcatctatgacgtgactgatgataatgccgatgaggagaacattcctgtgataccggagaccaacgaggacgtgattagcgacccgagtaattgcagtcagtatccggatatagtgattgttgaggatgacaatgaagacgagtacgcccctgtcatccaatctggggagcagaacgagcctgcccgagagtctcttagcagcgggtcagacggatcttcacccctgatgtcatctgcagtacagttgaatgggagcagcagcctgacaagcgaagatccagtcacgatgatggacagtattttaaacgacaatatcaaccttctgggcaaggtggaactgctcgactatttagatagcattgactgctctctagaggacttccaagctatgctctccggcagacagttttcaatagatcctgatctgttggtggactcagagaataaggggcttgagaccactaagaacaatgttgtgcaacccgtgtcggaggaggggagaaaaagtaagtccaagccagacaaacaactcattcagtataccgcttttcctctcctggctttccttgacggcaatccagccagttccgtggaacaggcttctacgactgcgagcagcgaagttctgagcagtgtcgataagccaatagaggtcgacgagcttctggattctagcctggaccccgaacccacccagtcgaaactggttcggctcgagcctctcacagaggcggaggccagcgaagcaactctgttttacctgtgcgaactcgccccagcacctctagactctgacatgcccctactggactcctag

SEQ ID NO: 50690 - DNA, 1557 bp, Artificial Sequence
  derived and/or modified sequence
atgaagcagagcagcaacgtgcccgccttcctgagcaagctgtggaccctggtggaggagacccacaccaacgagttcatcacctggagccagaacggccagagcttcctggtgctggacgagcagagattcgccaaggagatcctgcccaagtacttcaagcacaacaacatggccagcttcgtgagacagctgaacatgtacggcttcagaaaggtggtgcacatcgacagcggcatcgtgaagcaggagagagacggccccgtggagttccagcacccctacttcaagcagggccaggacgacctgctggagaacatcaagagaaaggtgagcagcagcaagcccgaggagaacaagatcagacaggaggacctgaccaagatcatcagcagcgcccagaaggtgcagatcaagcaggagaccatcgagagcagactgagcgagctgaagagcgagaacgagagcctgtggaaggaggtgagcgagctgagagccaagcacgcccagcagcagcaggtgatcagaaagatcgtgcagttcatcgtgaccctggtgcagaacaaccagctggtgagcctgaagagaaagagacccctgctgctgaacaccaacggcgcccagaagaagaacctgttccagcacatcgtgaaggagcccaccgacaaccaccaccacaaggtgccccacagcagaaccgagggcctgaagcccagagagagaatcagcgacgacatcatcatctacgacgtgaccgacgacaacgccgacgaggagaacatccccgtgatccccgagaccaacgaggacgtgatcagcgaccccagcaactgcagccagtaccccgacatcgtgatcgtggaggacgacaacgaggacgagtacgcccccgtgatccagagcggcgagcagaacgagcccgccagagagagcctgagcagcggcagcgacggcagcagccccctgatgagcagcgccgtgcagctgaacggcagcagcagcctgaccagcgaggaccccgtgaccatgatggacagcatcctgaacgacaacatcaacctgctgggcaaggtggagctgctggactacctggacagcatcgactgcagcctggaggacttccaggccatgctgagcggcagacagttcagcatcgaccccgacctgctggtggacagcgagaacaagggcctggagaccaccaagaacaacgtggtgcagcccgtgagcgaggagggcagaaagagcaagagcaagcccgacaagcagctgatccagtacaccgccttccccctgctggccttcctggacggcaaccccgccagcagcgtggagcaggccagcaccaccgccagcagcgaggtgctgagcagcgtggacaagcccatcgaggtggacgagctgctggacagcagcctggaccccgagcccacccagagcaagctggtgagactggagcccctgaccgaggccgaggccagcgaggccaccctgttctacctgtgcgagctggcccccgcccccctggacagcgacatgcccctgctggacagctag

SEQ ID NO: 50691 - protein, 251 aa, Artificial Sequence
  derived and/or modified sequence
MAAPPQPVTHLIFDMDGLLLGYTGSIVAAASGESSRGLQSRWTDTERLYSVVFQEICNRYDKKYSWDVKSLVMGKKALEAAQIIIDVLQLPMSKEELVEESQTKLKEVFPTAALMPGAEKLIIHLRKHGIPFALATSSGSASFDMKTSRHKEFFSLFSHIVLGDDPEVQHGKPDPDIFLACAKRFSPPPAMEKCLVFEDAPNGVEAALAAGMQVVMVPDGNLSRDLTTKATLVLNSLQDFQPELFGLPSYE

SEQ ID NO: 50692 - protein, 244 aa, Artificial Sequence
  derived and/or modified sequence
MAAPPQPVTHLIFDGRTSSGWVVAAASGRSCVGVGTDTERLYSVVFQEICNRYDKKYSWDVKSLVMGKKALEAAQIIIDVLQLPMSKEELVEESQTKLKEVFPTAALMPGAEKLIIHLRKHGIPFALATSSGSASFDMKTSRHKEFFSLFSHIVLGDDPEVQHGKPDPDIFLACAKRFSPPPAMEKCLVFEDAPNGVEAALAAGMQVVMVPDGNLSRDLTTKATLVLNSLQDFQPELFGLPSYE

SEQ ID NO: 50693 - DNA, 756 bp, Artificial Sequence
  derived and/or modified sequence
atggccgcccccccccagcccgtgacccacctgatcttcgacatggacggcctgctgctgggctacaccggcagcatcgtggccgccgccagcggcgagagcagcagaggcctgcagagcagatggaccgacaccgagagactgtacagcgtggtgttccaggagatctgcaacagatacgacaagaagtacagctgggacgtgaagagcctggtgatgggcaagaaggccctggaggccgcccagatcatcatcgacgtgctgcagctgcccatgagcaaggaggagctggtggaggagagccagaccaagctgaaggaggtgttccccaccgccgccctgatgcccggcgccgagaagctgatcatccacctgagaaagcacggcatccccttcgccctggccaccagcagcggcagcgccagcttcgacatgaagaccagcagacacaaggagttcttcagcctgttcagccacatcgtgctgggcgacgaccccgaggtgcagcacggcaagcccgaccccgacatcttcctggcctgcgccaagagattcagccccccccccgccatggagaagtgcctggtgttcgaggacgcccccaacggcgtggaggccgccctggccgccggcatgcaggtggtgatggtgcccgacggcaacctgagcagagacctgaccaccaaggccaccctggtgctgaacagcctgcaggacttccagcccgagctgttcggcctgcccagctacgagtag

SEQ ID NO: 50694 - DNA, 735 bp, Artificial Sequence
  derived and/or modified sequence
atggccgcccccccccagcccgtgacccacctgatcttcgacggcagaaccagcagcggctgggtggtggccgccgccagcggcagaagctgcgtgggcgtgggcaccgacaccgagagactgtacagcgtggtgttccaggagatctgcaacagatacgacaagaagtacagctgggacgtgaagagcctggtgatgggcaagaaggccctggaggccgcccagatcatcatcgacgtgctgcagctgcccatgagcaaggaggagctggtggaggagagccagaccaagctgaaggaggtgttccccaccgccgccctgatgcccggcgccgagaagctgatcatccacctgagaaagcacggcatccccttcgccctggccaccagcagcggcagcgccagcttcgacatgaagaccagcagacacaaggagttcttcagcctgttcagccacatcgtgctgggcgacgaccccgaggtgcagcacggcaagcccgaccccgacatcttcctggcctgcgccaagagattcagccccccccccgccatggagaagtgcctggtgttcgaggacgcccccaacggcgtggaggccgccctggccgccggcatgcaggtggtgatggtgcccgacggcaacctgagcagagacctgaccaccaaggccaccctggtgctgaacagcctgcaggacttccagcccgagctgttcggcctgcccagctacgagtag

SEQ ID NO: 50695 - DNA, 756 bp, Artificial Sequence
  derived and/or modified sequence
atggccgcccctccgcaaccagtgacacacctgattttcgacatggatgggctgctgttaggttacaccgggtctatcgtggccgccgcctctggcgaaagctcacgcggccttcagtcccggtggacagatacagagcgcctctattcagttgtgttccaggaaatttgcaaccgctacgataaaaagtattcttgggatgtgaagtcactggtgatgggcaagaaggctttggaggccgcacagatcatcatcgacgtgctgcagttacccatgagtaaagaggagttggtcgaggagtcccagacgaaactgaaggaagtcttccctacggctgctctgatgcctggagctgaaaaactcattatccatctgcggaagcatggtattcctttcgcccttgccacgtcatccggtagcgccagctttgacatgaagacaagtagacacaaagaattcttctcccttttcagccacatcgttctcggtgacgaccccgaagtgcagcatggaaaaccagaccccgatatctttctggcctgtgcaaagcggttttcacctccaccagccatggaaaaatgtctggtgtttgaggacgcacccaatggcgtggaggccgccttggcagctgggatgcaggtggtgatggtacccgatggcaacctctcccgagacctcacaaccaaggcaacactggtcctcaactcactccaggactttcagcctgaactctttggtctgcctagctatgagtag

SEQ ID NO: 50696 - DNA, 735 bp, Artificial Sequence
  derived and/or modified sequence
atggcggctccaccacagccagtgacccatctcatattcgacggacgcacaagctctgggtgggtcgtggctgcggcctcgggtcgttcctgtgttggtgttgggacagatacagaaaggctttactccgtagtcttccaggagatatgtaacaggtatgataaaaagtactcttgggacgtcaagtcactggtgatgggaaagaaggcactcgaagcagcacagatcatcattgatgtgcttcagctccccatgagcaaagaggagctggtggaagaaagccagactaagctcaaggaagtgttccccactgcggcgctgatgccaggtgccgagaaactaattatccacctgcggaaacacggtattccgtttgcgcttgcgacatcaagcggctctgcctcttttgacatgaaaacatctcgccacaaggagttttttagtctgttctctcatatcgtactcggggatgacccagaagtgcagcacggtaaacctgacccagacatcttcttggcatgtgccaaaaggttctctccccctccagccatggaaaaatgccttgtgttcgaggacgcccccaatggagtggaagccgccctcgccgcaggtatgcaggtagtgatggtgcctgacggaaatctcagtcgggacctgaccactaaggccaccctggttcttaatagtcttcaagactttcaacctgagttgtttggcttgccctcctacgaatag

SEQ ID NO: 50697 - DNA, 756 bp, Artificial Sequence
  derived and/or modified sequence
atggccgccccaccccagcctgtgacccacctgatctttgacatggatggcctgctgctgggctacacaggcagcatcgtggccgccgccagcggggagagcagccggggcctgcagagccgctggacagacacagagcggctgtacagcgtggtgttccaggagatctgcaacagatatgacaagaagtacagctgggatgtgaagagcctggtgatgggcaagaaggccctggaggccgcccagatcatcattgatgtgctgcagctgcccatgagcaaggaggagctggtggaggagagccagaccaagctgaaggaggtgttccccacagctgccctgatgcctggagctgagaagctgatcatccacctgaggaagcacggcatcccctttgccctggccaccagcagcggcagcgccagctttgacatgaagaccagccgccacaaggagttcttcagcctcttcagccacatcgtgctgggagatgatcctgaggtgcagcacggcaagccagaccctgacatcttcctggcctgtgccaagcgcttcagccccccaccagccatggagaagtgcctggtgtttgaagatgcccccaacggggtggaggccgccctggccgccggcatgcaggtggtgatggtgcctgatggcaacctgagccgggacctgaccaccaaggccaccctggtgctgaacagcctgcaggacttccagcctgagctgtttggcctgcccagctatgaatag

SEQ ID NO: 50698 - DNA, 735 bp, Artificial Sequence
  derived and/or modified sequence
atggccgccccaccccagcctgtgacccacctgatctttgatggccgcaccagcagcggctgggtggtggccgccgccagcggccgcagctgtgtgggcgtgggcacagacacagagcggctgtacagcgtggtgttccaggagatctgcaacagatatgacaagaagtacagctgggatgtgaagagcctggtgatgggcaagaaggccctggaggccgcccagatcatcattgatgtgctgcagctgcccatgagcaaggaggagctggtggaggagagccagaccaagctgaaggaggtgttccccacagctgccctgatgcctggagctgagaagctgatcatccacctgaggaagcacggcatcccctttgccctggccaccagcagcggcagcgccagctttgacatgaagaccagccgccacaaggagttcttcagcctcttcagccacatcgtgctgggagatgatcctgaggtgcagcacggcaagccagaccctgacatcttcctggcctgtgccaagcgcttcagccccccaccagccatggagaagtgcctggtgtttgaagatgccccaaatggagtggaggccgccctggccgccggcatgcaggtggtgatggtgcctgatggcaacctgagccgggacctgaccaccaaggccaccctggtgctgaacagcctgcaggacttccagcctgagctgtttggcctgcccagctatgaatag

SEQ ID NO: 50699 - DNA, 1334 bp, Artificial Sequence
  derived and/or modified sequence
cgcgcacttcctcctcgcccccacccagacccagaaggcgccaccatggcggcgcccccgcagcccgtcacccacctcatctttgacatggacggacttcttctgggttatacaggaagcatagtggcagctgcttcgggggagtcctcaagaggcttacaatcacggtggacggatactgaacggctgtattcagtggtgtttcaagaaatatgtaatcgctatgacaagaaatacagctgggatgtaaagtccctggttatgggtaagaaggcattagaggcggcacagattataatagacgtcttgcagctcccgatgtccaaagaggagctggtggaagaaagccaaacgaagttaaaggaagtgttccccacggctgcgctcatgccaggggcggagaaactcatcatccacctgcggaaacatggcatcccctttgcactggccaccagctcggggtccgcgtcgttcgatatgaagacaagccgccacaaggagttcttcagcttgttttcccacattgtgctgggagatgaccccgaagtgcagcatggcaagccagacccggacatcttcctagcttgtgccaagaggttctctccccctcctgctatggagaagtgccttgtctttgaagatgctcccaatggggtggaggcggccctggcagctgggatgcaggtggtcatggttcctgacggaaacttgagccgagatctgacaacaaaggccaccctggtgctgaattccctgcaggacttccagcccgagctgtttggtttgccctcctatgagtgagagggagggcctcagtcttccgcccccagcccactctcatggtccacactgctgggggaaagggaaaggaaatcagcaactcttcaatcccaacctgcgctgtgattttagcctcctgagattggagtttccatcccatgttggtttgtcccagtctaacgtgttgataaaatgtgacttgacggttgagacaaaaaatacagtagagacagaaacgaagcccagaacaaagatgaaacttgaattaccatctcagaagtcaagctgatggagtatgtgataaagtgaatgtacatgtatatacacacacacctccatatatacatgtgtgtatcagtttggtaatatgcaggtaggcattacatgcatatgtatgtagacatatgcatgcatgtatatgtaaaatatatacttttccaagacaaaatggaacatcacttctctcttctagtttttctgaacactggctgggaaatgtaaactgtgtatgcatataagtatatgctttatgtatgcatatgtatgtagatatg

SEQ ID NO: 50700 - DNA, 2188 bp, Artificial Sequence
  derived and/or modified sequence
ctcagtgcgcgtgcgcggggcgggcgggtgcgcgcgcacttcctcctcgcccccacccagacccagaaggcgccaccatggcggcgcccccgcagcccgtcacccacctcatctttgacggacggacttcttctgggtgggtagtggccgccgcctccgggcggtcttgtgtgggcgtggggacggatactgaacggctgtattcagtggtgtttcaagaaatatgtaatcgctatgacaagaaatacagctgggatgtaaagtccctggttatgggtaagaaggcattagaggcggcacagattataatagacgtcttgcagctcccgatgtccaaagaggagctggtggaagaaagccaaacgaagttaaaggaagtgttccccacggctgcgctcatgccaggggcggagaaactcatcatccacctgcggaaacatggcatcccctttgcactggccaccagctcggggtccgcgtcgttcgatatgaagacaagccgccacaaggagttcttcagcttgttttcccacattgtgctgggagatgaccccgaagtgcagcatggcaagccagacccggacatcttcctagcttgtgccaagaggttctctccccctcctgctatggagaagtgccttgtctttgaagatgctcccaatggggtggaggcggccctggcagctgggatgcaggtggtcatggttcctgacggaaacttgagccgagatctgacaacaaaggccaccctggtgctgaattccctgcaggacttccagcccgagctgtttggtttgccctcctatgagtgagagggagggcctcagtcttccgcccccagcccactctcatggtccacactgctgggggaaagggaaaggaaatcagcaactcttcaatcccaacctgcgctgtgattttagcctcctgagattggagtttccatcccatgttggtttgtcccagtctaacgtgttgataaaatgtgacttgacggttgagacaaaaaatacagtagagacagaaacgaagcccagaacaaagatgaaacttgaattaccatctcagaagtcaagctgatggagtatgtgataaagtgaatgtacatgtatatacacacacacctccatatatacatgtgtgtatcagtttggtaatatgcaggtaggcattacatgcatatgtatgtagacatatgcatgcatgtatatgtaaaatatatacttttccaagacaaaatggaacatcacttctctcttctagtttttctgaacactggctgggaaatgtaaactgtgtatgcatataagtatatgctttatgtatgcatatgtatgtagatatgtttatatctatcgtctgcatcactctcctcagtgttgatgtcaacatgcaatgacaactgataaagcgagatggtagttctgcctggtttgcagtctgagtgggaaagtcctgtttttgatgagcactccttgttagctaacatttaaattctttttgtgacctcagaatgtctctggatctttcctcattgactgactctgtgccacgtcatccatagtttattgttagtatgaacacaactgtaacatttacctggtatctacatccttacctgcattggaaaatgtttgctacctcacaacaaccatttgcctcctttaagaacactgatgggctgcactttttggatagaaatagaatttgatttcagaatgtatgcttggtgagtctcagtgcccaggaacacttttggaataatttatcagacattgaacttctgtgattaatcgcttttatagatttactcagtctttaaaattcgtctctgatttgccagagaaaaacggtggtagccatggaaatcgggagtgaaggagcactgcttcattgtggctcagcccttcctaggggcctctgccctttgatgtccttgagctactcttcagctctggaagttgtggacaaaccgtaggaatgtatgtgtgcgtgtggtggagtgattgtctgtgaatgacaggccctggctattgattgatgttgcatcaatttagcaaattcatttcctcattcttgatggcctgaatatatgtctgcacttttaatgctcctcttaaccagttgtaacatcttaccatttccctaacaaattgaattagtttaataaaatcttttgacacatgtt

SEQ ID NO: 50701 - DNA, 756 bp, Artificial Sequence
  derived and/or modified sequence
atggccgcccccccccagcccgtgacccacctgatcttcgacatggatggactgctcctaggctacacaggatcaattgtggccgccgcaagcggagaatcttcgcgtggactccagagcagatggacagacacagagaggctctactccgtagtttttcaggagatctgcaataggtacgacaagaagtattcctgggatgttaaaagcttagttatgggaaaaaaggccttggaggctgcccagattataatagacgtgcttcagctgcctatgtccaaggaggagctcgtagaagaatcccaaacgaaactcaaggaagtatttcctacagccgccctgatgccaggggccgagaaactgatcattcacctgaggaagcacgggattccgttcgcactcgctacatcttccggcagcgcatcttttgacatgaagacctcgcgacataaagaatttttcagcctgtttagccacatcgttctgggcgacgacccagaggtgcaacacggcaaacctgatcccgatatattcctcgcctgcgcgaagcgcttcagccctccccccgccatggagaaatgcctggtcttcgaagatgcaccaaacggcgttgaagctgctcttgcggctggcatgcaggtcgtgatggtgcctgacggtaatctgtctcgtgacctaactaccaaggccaccctagtgctgaatagtcttcaggacttccagccagagctgtttgggttgcctagttatgaatag

SEQ ID NO: 50702 - DNA, 735 bp, Artificial Sequence
  derived and/or modified sequence
atggccgcccccccccagcccgtgacccacctgatcttcgacggcagaacgtcttccggttgggtggtagccgctgcctccggcaggagttgcgtaggtgtgggcacggataccgagagactatattcagtggtatttcaggaaatatgtaaccgctatgataagaaatattcatgggacgtcaaatccctcgtgatgggcaaaaaagctctggaagccgctcagataataatagacgtcttgcagctacccatgagcaaggaagagctggttgaagagtcacaaacaaagctcaaggaagtatttccgactgccgcgctcatgcctggcgctgaaaaactcattatccatctgcgcaagcacgggatccctttcgcactcgctactagctctggcagcgctagtttcgatatgaagacttcccgccacaaggagttctttagcctgtttagtcacattgtgctgggcgatgacccagaggtacaacacgggaaacccgacccagatatattccttgcctgcgctaaacgtttctctcctcctccagccatggagaaatgtctcgtttttgaggatgcacccaacggcgtggaagcggccctcgcagctgggatgcaggtggtaatggtacccgacggtaacctgagcagagaccttacaaccaaagccactctagtgctgaatagtctccaggatttccagccagaactgtttggtttgccctcttatgaatag

SEQ ID NO: 50703 - DNA, 756 bp, Artificial Sequence
  derived and/or modified sequence
atggccgctccgcctcaacccgttacccacctgatcttcgacatggatggcctgctgttgggctataccgggtctatcgtggccgcagcctccggcgagagcagtcgcggtctgcagagtaggtggacagatactgagcgtctgtattcggtggtcttccaggaaatctgtaatagatatgataagaaatactcatgggacgtaaaatcattagtaatggggaagaaggcgctggaggctgcccaaatcatcattgatgtgctccagttgccgatgtcgaaagaagagttagtggaagaatcacagaccaaattgaaggaagtctttccaacggctgccttgatgcccggtgctgagaaactgatcattcacttgcgaaagcacgggataccatttgccttagccacctctagcgggtcagcttcattcgatatgaaaacctcgagacataaagaattcttcagcctcttcagtcacattgtcctgggcgatgacccagaagtacaacacggaaaacctgatccagacatctttttggcatgcgctaaacggttttcaccacctcctgccatggaaaagtgtcttgtgttcgaggacgcgcctaatggggtagaagcggctctagctgctggaatgcaagtggttatggtgcccgacggcaacctgtctagagatctcacaaccaaagcaacattagtgctcaacagccttcaggatttccaacccgaactgttcgggctgccctcctatgagtag

SEQ ID NO: 50704 - DNA, 735 bp, Artificial Sequence
  derived and/or modified sequence
atggccgctccaccccagcctgtgactcacctgatctttgacggcaggacaagtagcggttgggtcgtggccgctgcatcaggtagaagttgtgtgggtgtgggaaccgatacggagagactttattccgtcgtattccaggagatttgcaacaggtacgacaagaagtacagctgggatgtgaagtcattggttatggggaaaaaagctttagaggccgctcagatcattatcgatgtcctccagcttcctatgtcaaaggaagagcttgtagaagagagtcagaccaagcttaaagaggtgtttcccacggcggctctcatgcctggtgccgagaagctgataatccacctgaggaagcatggcataccctttgcccttgccacgtcctctggaagtgcgagcttcgatatgaagacctctcgtcacaaggagttcttcagcctcttttctcatatcgtgctgggtgacgaccccgaagtccagcacgggaagcccgatcctgacatctttctggcctgcgccaaacggttctctcctccccctgccatggagaagtgccttgtttttgaagatgcacccaatggcgtggaggctgctctagcagcaggcatgcaggtcgtgatggtgcccgacggcaacctgagcagagacctgacaaccaaagcaactcttgtgctgaattccctgcaggattttcagcctgagctcttcgggcttccctcgtacgagtag

SEQ ID NO: 50705 - DNA, 135 bp, Artificial Sequence
  derived and/or modified sequence
atgaagaacgccaccatcgtgatgagcgtgagaagagagcagggcagcagcagcggcgagggcagcctgagcttcgaggacgtggccgtgggcttcaccagagaggagtggcagttcctggaccagagccagtag

SEQ ID NO: 50706 - DNA, 177 bp, Artificial Sequence
  derived and/or modified sequence
atgaagaacgccaccatcgtgatgagcgtgagaagagagcagggcagcagcagcggcgagggcagcctgagcttcgaggacgtggccgtgggcttcaccagagaggagtggcagttcctggaccagagccagaaggtgctgtacaaggaggtgatgctggagaactacatcaactag

SEQ ID NO: 50707 - DNA, 189 bp, Artificial Sequence
  derived and/or modified sequence
atgaagaacgccaccatcgtgatgagcgtgagaagagagcagggcagcagcagcggcgagggcagcctgagcttcgaggacgtggccgtgggcttcaccagagaggagtggcagttcctggaccagagccagaaggtgctgtacaaggaggtgatgctggagaactacatcaacctggtgagcatctag

SEQ ID NO: 50708 - DNA, 135 bp, Artificial Sequence
  derived and/or modified sequence
atgaagaacgccacgatagtcatgagcgtccggcgggagcaaggaagctctagcggcgaaggctctttgagtttcgaggacgtcgcggtcggcttcaccagagaggaatggcagtttctggatcagtcacagtag

SEQ ID NO: 50709 - DNA, 177 bp, Artificial Sequence
  derived and/or modified sequence
atgaaaaacgcgaccatcgtcatgtctgtgaggcgagagcagggcagctctagtggagagggctctctttcattcgaagatgtcgctgtgggctttactcgcgaggagtggcaattcctcgaccagagtcaaaaagtcctctacaaggaggttatgttagagaactacatcaattag

SEQ ID NO: 50710 - DNA, 189 bp, Artificial Sequence
  derived and/or modified sequence
atgaaaaatgctacgattgttatgagtgtccgccgcgaacaggggtcctcctcaggggagggctctctgagcttcgaagatgtggcagtgggtttcacgcgtgaagaatggcagttccttgaccagtctcagaaggtgctgtataaggaggtcatgttggagaattatattaacctggtatccatctag

SEQ ID NO: 50711 - DNA, 135 bp, Artificial Sequence
  derived and/or modified sequence
atgaagaatgccaccatcgtgatgtctgtgagaagagagcagggcagcagcagcggggagggcagcctgagctttgaagatgtggccgtgggcttcacccgggaggagtggcagttcctggaccagagccagtag

SEQ ID NO: 50712 - DNA, 177 bp, Artificial Sequence
  derived and/or modified sequence
atgaagaatgccaccatcgtgatgtctgtgagaagagagcagggcagcagcagcggggagggcagcctgagctttgaagatgtggccgtgggcttcacccgggaggagtggcagttcctggaccagagccagaaggtgctgtacaaggaggtgatgctggagaactacatcaactag

SEQ ID NO: 50713 - DNA, 189 bp, Artificial Sequence
  derived and/or modified sequence
atgaagaatgccaccatcgtgatgtctgtgagaagagagcagggcagcagcagcggggagggcagcctgagctttgaagatgtggccgtgggcttcacccgggaggagtggcagttcctggaccagagccagaaggtgctgtacaaggaggtgatgctggagaactacatcaacctggtgtccatctag

SEQ ID NO: 50714 - DNA, 135 bp, Artificial Sequence
  derived and/or modified sequence
atgaagaacgccaccatcgtgatgagcgtgcggcgggagcagggctcgagctctggcgagggaagcctttcattcgaagatgtggcagtgggctttacaagggaggagtggcagtttctggaccaatctcagtag

SEQ ID NO: 50715 - DNA, 177 bp, Artificial Sequence
  derived and/or modified sequence
atgaagaacgccaccatcgtgatgagcgtgcggcgggagcagggcagcagttcaggcgaagggagcctctccttcgaagatgtggcggtggggtttacacgggaggaatggcagtttcttgaccagtcccaaaaggtgttgtataaggaggtgatgctggagaactatataaattag

SEQ ID NO: 50716 - DNA, 189 bp, Artificial Sequence
  derived and/or modified sequence
atgaagaacgccaccatcgtgatgagcgtgcggcgggagcagggctcatcctccggcgaaggctctctatctttcgaggatgtggccgtcggtttcactagggaagagtggcagttcttggatcagtcccagaaagtcctctacaaagaggtcatgctcgaaaattatatcaacctggtgagcatttag

SEQ ID NO: 50717 - DNA, 135 bp, Artificial Sequence
  derived and/or modified sequence
atgaagaatgcgaccatcgttatgtctgtgcgccgtgagcaggggtcctcaagtggtgagggcagcctgagcttcgaggatgtggctgtcgggtttacacgagaggagtggcagtttctggatcagtcacaatag

SEQ ID NO: 50718 - DNA, 177 bp, Artificial Sequence
  derived and/or modified sequence
atgaagaatgccaccattgttatgagcgttagacgtgagcagggcagttccagcggcgaaggatcactgagtttcgaagatgtagccgtcggctttactagggaggaatggcagtttctcgaccagagtcagaaagtgctgtataaagaagtgatgttggaaaattatatcaactag

SEQ ID NO: 50719 - DNA, 189 bp, Artificial Sequence
  derived and/or modified sequence
atgaaaaacgcgaccatagtgatgtctgtcagaagagagcagggttcttcgtctggcgaaggctctttgtcctttgaggatgtcgcagtgggctttacacgagaagagtggcaatttctcgaccagtctcagaaggttctctataaggaggtaatgctcgagaactatataaacctcgtgagcatctag

SEQ ID NO: 50720 - DNA, 512 bp, Artificial Sequence
  derived and/or modified sequence
atggccctcgccggccgccatccccgaaacttgcgagtgtcgcgtctgcagtgtgtggggttcgcggggcggcgggtagagttgagcatttttgtcatctgcaaataattttagccaggtggcaagtgtatggactgtggagtaagaagtacctgcctctgcctctgacttgggttctggcctataggaacaagacattttcagtaatggaagaaggagcttccaggctggggaagatcatcatttccagtggtagcttgacctgagatgatacctgaccaccacttctgggaaggcccagaatagacagaagagagagaacatactagagttgctagcccctaagagttgaacgaaatgggcaaggcccaggaaacacatgaaaaatgccacgattgtaatgtctgtgaggagagagcaaggcagttcttcaggggaggggtcattgtcattcgaagatgtggctgtgggcttcaccagggaggagtggcagtttttggaccagtctcaga

SEQ ID NO: 50721 - DNA, 573 bp, Artificial Sequence
  derived and/or modified sequence
gtttagagacttcgggtccctgactcgcctccagcagtggagacaggtcatcggtctgttgagcatttttgtcatctgcaaataattttagccaggtggcaagtgtatggactgtggagtaagaagtacctgcctctgcctctgacttggaagccctcatcttctctctcctctccaaaggttctggcctataggaacaagacattttcagtaatggaagaaggagcttccaggctggggaagatcatcatttccagtggtagcttgacctgagatgatacctgaccaccacttctgggaaggcccagaatagacagaagagagagaacatactagagttgctagcccctaagagttgaacgaaatgggcaaggcccagctgaaataacaggaaacacatgaaaaatgccacgattgtaatgtctgtgaggagagagcaaggcagttcttcaggggaggggtcattgtcattcgaagatgtggctgtgggcttcaccagggaggagtggcagtttttggaccagtctcagaaggtcttgtacaaggaagtaatgttggagaactacatcaacc

SEQ ID NO: 50722 - DNA, 523 bp, Artificial Sequence
  derived and/or modified sequence
cactcaggagagaaaccctataaatgcagtgactgtgggaaagccttccttacaaagacaatgctcattgtacatcacagaactcacacgggagagagaccctatggctgtgatgagtgttctggcctataggaacaagacattttcagtaatggaagaaggagcttccaggctggggaagatcatcatttccagtggtagcttgacctgagatgatacctgaccaccacttctgggaaggcccagaatagacagaagagagagaacatactagagttgctagcccctaagagttgaacgaaatgggcaaggcccagctgaaataacaggaaacacatgaaaaatgccacgattgtaatgtctgtgaggagagagcaaggcagttcttcaggggaggggtcattgtcattcgaagatgtggctgtgggcttcaccagggaggagtggcagtttttggaccagtctcagaaggtcttgtacaaggaagtaatgttggagaactacatcaacctagtatcaatag

SEQ ID NO: 50723 - protein, 1870 aa, Artificial Sequence
  derived and/or modified sequence
MENEIFTPLLEQFMTSPLVTWVKTFGPLAAGNGTNLDEYVALVDGVFLNQVMLQINPKLESQRVNKKVNNDASLRMHNLSILVRQIKFYYQETLQQLIMMSLPNVLIIGKNPFSEQGTEEVKKLLLLLLGCAVQCQKKEEFIERIQGLDFDTKAAVAAHIQEVTHNQENVFDLQWMEVTDMSQEDIEPLLKNMALHLKRLIDERDEHSETIIELSEERDGLHFLPHASSSAQSPCGSPGMKRTESRQHLSVELADAKAKIRRLRQELEEKTEQLLDCKQELEQMEIELKRLQQENMNLLSDARSARMYRDELDALREKAVRVDKLESEVSRYKERLHDIEFYKARVEELKEDNQVLLETKTMLEDQLEGTRARSDKLHELEKENLQLKAKLHDMEMERDMDRKKIEELMEENMTLEMAQKQSMDESLHLGWELEQISRTSELSEAPQKSLGHEVNELTSSRLLKLEMENQSLTKTVEELRTTVDSVEGNASKILKMEKENQRLSKKVEILENEIVQEKQSLQNCQNLSKDLMKEKAQLEKTIETLRENSERQIKILEQENEHLNQTVSSLRQRSQISAEARVKDIEKENKILHESIKETSSKLSKIEFEKRQIKKELEHYKEKGERAEELENELHHLEKENELLQKKITNLKITCEKIEALEQENSELERENRKLKKTLDSFKNLTFQLESLEKENSQLDEENLELRRNVESLKCASMKMAQLQLENKELESEKEQLKKGLELLKASFKKTERLEVSYQGLDIENQRLQKTLENSNKKIQQLESELQDLEMENQTLQKNLEELKISSKRLEQLEKENKSLEQETSQLEKDKKQLEKENKRLRQQAEIKDTTLEENNVKIGNLEKENKTLSKEIGIYKESCVRLKELEKENKELVKRATIDIKTLVTLREDLVSEKLKTQQMNNDLEKLTHELEKIGLNKERLLHDEQSTDDRYKLLESKLESTLKKSLEIKEEKIAALEARLEESTNYNQQLRQELKTVKKNYEALKQRQDEERMVQSSPPISGEDNKWERESQETTRELLKVKDRLIEVERNNATLQAEKQALKTQLKQLETQNNNLQAQILALQRQTVSLQEQNTTLQTQNAKLQVENSTLNSQSTSLMNQNAQLLIQQSSLENENESVIKEREDLKSLYDSLIKDHEKLELLHERQASEYESLISKHGTLKSAHKNLEVEHRDLEDRYNQLLKQKGQLEDLEKMLKVEQEKMLLENKNHETVAAEYKKLCGENDRLNHTYSQLLKETEVLQTDHKNLKSLLNNSKLEQTRLEAEFSKLKEQYQQLDITSTKLNNQCELLSQLKGNLEEENRHLLDQIQTLMLQNRTLLEQNMESKDLFHVEQRQYIDKLNELRRQKEKLEEKIMDQYKFYDPSPPRRRGNWITLKMRKLIKSKKDINRERQKSLTLTPTRSDSSEGFLQLPHQDSQDSSSVGSNSLEDGQTLGTKKSSMVALKRLPFLRNRPKDKDKMKACYRRSMSMNDLVQSMVLAGQWTGSTENLEVPDDISTGKRRKELGAMAFSTTAINFSTVNSSAGFRSKQLVNNKDTTSFEDISPQGVSDDSSTGSRVHASRPASLDSGRTSTSNSNNNASLHEVKAGAVNNQSRPQSHSSGEFSLLHDHEAWSSSGSSPIQYLKRQTRSSPVLQHKISETLESRHHKIKTGSPGSEVVTLQQFLEESNKLTSVQIKSSSQENLLDEVMKSLSVSSDFLGKDKPVSCGLARSVSGKTPGDFYDRRTTKPEFLRPGPRKTEDTYFISSAGKPTPGTQGKIKLVKESSLSRQSKDSNPYATLPRASSVISTAEGTTRRTSIHDFLTKDSRLPISVDSPPAAADSNTTAASNVDKVQESRNSKSRSREQQSS

SEQ ID NO: 50724 - DNA, 5613 bp, Artificial Sequence
  derived and/or modified sequence
atggagaacgaaatctttacaccccttcttgagcagtttatgacttcgcccctggttacatgggttaagacctttggaccattggctgctggaaatggcaccaacttagatgaatatgttgccctggtggacggagtgttcctgaaccaggtcatgctgcagatcaaccccaagctggaaagtcagcgtgtaaacaagaaagtgaacaacgatgcctccttaagaatgcacaatttgtccatcctcgttcggcaaatcaagttttactaccaggagactctccaacaactgattatgatgagcctacccaatgtattgatcatcgggaaaaatcccttctccgagcaggggacagaagaagtgaaaaagttgctcctgctcctgctgggctgtgcggtccagtgccaaaaaaaagaagagttcatagaacggattcagggcctggactttgatacgaaggctgcggtggccgcccacatccaggaggtgactcacaaccaggaaaacgttttcgacctacagtggatggaggtgacagatatgtcgcaagaggacatcgagcccctcctgaagaacatggctctgcatctgaagcgactgattgacgaaagggatgaacacagtgaaaccattatagaactgtccgaggagagagacgggctgcacttcctgccccatgcttcatcatctgcccagagtccgtgcggtagtccaggaatgaaacggaccgagtctcgccagcacttgagtgtcgaactggccgacgctaaggcaaagatccgcaggctccggcaggagctggaggaaaagacagaacagcttctcgactgtaaacaggagctcgagcaaatggaaatcgaactgaagaggctgcagcaggagaacatgaacttactctccgacgccaggtctgccagaatgtatagggacgaactcgatgcactgagggagaaggcagttagggttgataaactcgagagtgaagtttcccggtacaaggaacggctgcacgatatcgaattctataaggcacgagttgaggaacttaaggaagataaccaggttctgctcgaaacgaaaacgatgctcgaggaccaattggaagggactcgcgctaggagtgataagctgcacgagctcgaaaaagagaaccttcagctgaaggcaaaattgcacgacatggagatggagcgagatatggaccggaagaaaattgaagagctgatggaagagaacatgaccctggaaatggcccagaagcaaagtatggacgaatctctgcatttggggtgggagctggaacagataagccgaacctccgagctgagcgaagcccctcagaaatcacttgggcatgaggtaaatgaattgacatcctccagattgctgaagttggagatggagaaccagagtctgactaaaactgtcgaagaacttcgcaccaccgtcgattccgtcgaaggcaatgctagcaaaatattaaagatggaaaaagagaaccagcgtttgtcgaagaaggtagaaatcctcgaaaacgaaatcgtacaggagaagcagtcccttcaaaactgccagaacctctccaaggacttaatgaaggaaaaggcacagcttgaaaagaccatagagacactgcgggagaactcggaaagacagattaagattctggagcaagaaaacgagcacctgaaccagaccgttagctcgctgagacagagatctcaaataagcgccgaggctcgcgtgaaagacattgaaaaagagaacaaaattctacatgagtctatcaaagagacaagctctaaactgagtaagattgaatttgaaaagagacagattaaaaaagagctggagcactacaaggaaaagggggaacgtgcggaggagctcgagaacgagttacaccacttggaaaaggaaaacgaacttctgcaaaagaagattacaaatctgaaaattacttgcgagaaaattgaggcgctggagcaggaaaatagtgaactcgagcgggagaaccgcaaacttaagaagacgctggattctttcaagaacctcaccttccagctggaatccctcgaaaaggaaaacagccagttggacgaagagaatctggaactccggagaaacgttgagagtctcaagtgcgcctcaatgaagatggcccagttgcagctcgaaaataaagagttggagagtgagaaagagcagctgaagaaaggtctggaactcctgaaggcgagctttaaaaaaacggagcggttggaggttagttaccaaggactagatattgagaatcaacgcttacagaagaccttagaaaacagcaacaagaaaatccagcaattagaatcagagctccaggaccttgagatggagaaccagacccttcaaaagaacctggaagaactcaagatcagctcgaagcgcctcgaacagctcgagaaagagaataagtcgctcgaacaggagacctcccaactagaaaaggataagaaacaattagaaaaggaaaacaaacgtttgcggcagcaggcagagatcaaggacacaaccctggaggagaataacgtgaagattggtaaccttgagaaggagaataaaaccctgagtaaagagattggtatttataaggaaagctgcgtgagacttaaagaactggagaaagaaaataaagaattagtaaaaagagcaacaattgacattaaaaccctagttacattacgcgaagacttggtgtctgagaagctcaagacccaacagatgaataatgacctcgagaagctgacgcacgaactagagaagattgggttgaacaaggaacgccttttgcatgatgagcaatctaccgacgaccggtataagctgctagaaagcaaactagaaagtactttgaagaagagccttgagattaaggaagaaaaaatagcggccctggaggctagactcgaggaaagcactaactataatcagcaactgcgccaggagctgaaaactgttaaaaagaactacgaggctctgaagcaacggcaggatgaggagcgaatggtacaatcctctcctccgatctctggggaagacaataaatgggagcgggagtcacaagagactactcgcgagctacttaaagtgaaggataggctgatcgaggttgagcgtaacaatgccaccctgcaagcagaaaaacaggccctgaaaacacaactcaagcagcttgagacgcaaaataacaacctccaagcacagatccttgcactgcagaggcagacagtgtcccttcaggaacagaacacaaccctccagacacagaacgcaaaactgcaggtggagaattctaccctcaattctcagagtacttctctgatgaaccagaacgctcagctactgatccaacaaagctctcttgagaatgaaaacgagagcgtgattaaagagcgcgaggacctgaagtcattgtacgactccctcatcaaggaccacgaaaagctagagttactgcacgagagacaggcttctgaatatgagtcattgatcagtaagcacggaactctcaaaagcgctcacaagaatctggaggtcgaacatcgagacctggaggaccggtataatcaactcttgaaacagaaaggccagctcgaggacttggaaaaaatgctcaaagtggagcaggagaagatgcttctggaaaataagaaccacgagacagtcgcagcagaatataagaagctctgtggcgagaacgaccggctcaaccacacctactctcagttgttgaaagaaactgaagtgcttcagacggatcataaaaacctcaaaagcctcctgaataactccaagctggaacagactcgactggaggccgagttttctaaactgaaggagcaatatcagcagctcgacatcacaagcaccaagctgaataatcagtgtgagctactgagtcagcttaaggggaatctggaggaggagaatcggcacctgctggaccaaatacagacactgatgcttcaaaatcggaccttactggaacagaacatggaatctaaagatttgtttcatgtggagcagcggcagtacatcgacaagttaaacgaactgagaagacagaaggagaaactcgaagagaagatcatggatcagtacaaattctatgaccccagccctccacgccggagagggaattggattacgctgaagatgcgcaagctgattaagtctaaaaaggatatcaaccgagaaaggcagaagagcctgaccctcactccaacacggtcagactccagcgaaggtttcttacagctgcctcatcaggactctcaagacagtagctctgtcggaagcaattcgctggaggatggtcagaccctaggcactaaaaaatccagcatggtggcactgaaacgcctgccatttctaaggaataggcccaaagataaagataaaatgaaggcctgttaccgaaggagcatgtcgatgaatgacctcgtgcagtccatggtgctggccggccaatggactggatctaccgagaatctggaggtcccagacgatatatctaccggaaagcgccggaaggagcttggagccatggccttcagtactactgccatcaacttttccacggtcaattccagcgccggcttcagatcaaaacagctggttaataataaagacacgacttctttcgaggacatctccccccaaggagtcagcgatgatagttccaccgggtcccgggtccatgctagcagacctgcatcgctcgattccggccggactagcacgagcaattctaataacaacgcctctctgcatgaggtcaaagcaggagccgttaataaccagtccagaccccaatctcactcttctggcgagttttctctgcttcatgatcacgaagcatggtcttcttcaggctcatcgccaatccagtatctgaaaagacagacaaggagttctcccgtcctacaacataagatctcggagacccttgagtctagacaccacaaaatcaaaactggatcccctggctccgaggtggtcaccttacagcagttcctggaggagtcaaacaagctgacatccgttcagatcaagagcagttcccaggagaatctcctggatgaggttatgaagtctctctccgtgtcttccgatttcctgggcaaggataagcctgtgtcttgcggcctcgcacgcagtgtcagtggcaaaacacccggtgacttttatgatagaagaaccaccaaaccagagtttctgaggccggggccgagaaagactgaagatacctacttcatatctagtgctggtaagccaactcccggtacacaggggaagatcaaactggtgaaagaatccagcctgagccgccagtctaaagactcaaatccctacgccaccttgccccgagcttcaagcgtcataagtaccgccgaagggaccacccgtagaacttctatccacgattttctgactaaagacagccgccttccgatatccgtggattctcctccagcagctgccgattcgaacacgacagcggcatcaaatgtggataaggtacaggagagcagaaatagtaagagcagatctagagaacagcaatcatcatag

SEQ ID NO: 50725 - DNA, 5613 bp, Artificial Sequence
  derived and/or modified sequence
atggagaatgagatcttcacccccctgctggagcagttcatgaccagccccctggtgacctgggtgaagaccttcggccccctggccgctggaaatggcaccaacctggatgaatatgtggccctggtggatggagtcttcctgaaccaggtgatgctgcagatcaaccccaagctggagagccagagggtgaacaagaaggtgaacaatgatgccagcctgaggatgcacaacctgagcatcctggtgcggcagatcaagttctactaccaggagaccctgcagcagctgatcatgatgagcctgcccaacgtgctgatcatcggcaagaaccccttcagcgagcagggcacagaggaggtgaagaagctgctgctgctgctgctgggctgtgctgtgcagtgccagaagaaggaggagttcatcgagcgcatccagggcctggactttgacaccaaggctgctgtggccgcccacatccaggaggtgacccacaaccaggagaatgtgtttgacctgcagtggatggaggtgacagacatgagccaggaggacatcgagcccctgctgaagaacatggccctgcacctgaagaggctgattgatgaaagagatgagcacagcgagaccatcatcgagctgtctgaggagagagatggcctgcacttcctgccccacgccagcagcagcgcccagagcccctgtggcagccctggcatgaagaggacagagagccggcagcacctgtctgtggagctggctgatgccaaggccaagatccggcggctgcggcaggagctggaggagaagacagagcagctgctggactgcaagcaggagctggagcagatggagattgagctgaagaggctgcagcaggagaacatgaacctgctgagtgatgcccggagcgccaggatgtacagagatgagctggatgccctgcgggagaaggctgtgcgggtggacaagctggagagcgaggtgagccgctacaaggagcggctgcatgacatcgagttctacaaggcccgggtggaggagctgaaggaggacaaccaggtgctgctggagaccaagaccatgctggaggaccagctggagggcacccgggcccggagtgacaagctgcacgagctggagaaggagaacctgcagctgaaggccaagctgcatgacatggagatggagcgggacatggacaggaagaagattgaggagctgatggaggagaacatgaccctggagatggcccagaagcagagcatggatgagagcctgcacctgggctgggagctggagcagatcagcaggaccagcgagctgtctgaggccccccagaagagcctgggccacgaggtgaatgagctgaccagcagccggctgctgaagctggagatggagaaccagagcctgaccaagacagtggaggagctgcggaccaccgtggacagcgtggagggcaatgccagcaagatcctgaagatggagaaggagaaccagaggctgagcaagaaggtggagatcctggagaatgagatcgtgcaggagaagcagagcctgcagaactgccagaacctgagcaaggacctgatgaaggagaaggcccagctggagaagaccatcgagaccctgagagaaaattctgagcggcagatcaagatcctggagcaggagaatgagcacctgaaccagacagtgagcagcctgcggcagaggagccagatctctgctgaggcccgggtgaaggacatcgagaaggagaacaagatcctgcacgagagcatcaaggagaccagcagcaagctgagcaagattgaatttgagaagaggcagatcaagaaggagctggagcactacaaggagaagggggagagagctgaggagctggagaatgagctgcaccacctggagaaggaaaatgagctgctgcagaagaagatcaccaacctgaagatcacctgtgagaagattgaggccctggagcaggagaacagcgagctggagagagaaaataggaagctgaagaagaccctggacagcttcaagaacctgaccttccagctggagagcctggagaaggagaacagccagctggatgaggagaacctggagctgcggagaaatgtggagagcctgaagtgtgcctccatgaagatggcccagctgcagctggagaacaaggagctggagagcgagaaggagcagctgaagaagggcctggagctgctgaaggccagcttcaagaagacagagcggctggaggtgtcctaccagggcctggacatcgagaaccagaggctgcagaagaccctggagaacagcaacaagaagatccagcagctggagagcgagctgcaggacctggagatggagaaccagaccctgcagaagaacctggaggagctgaagatcagcagcaagaggctggagcagctggagaaggagaacaagagcctggagcaggagaccagccagctggagaaggacaagaagcagctggagaaggagaacaagaggctgcggcagcaggccgagatcaaggacaccaccctggaggagaacaacgtgaagattggcaacctggagaaggagaacaagaccctgagcaaggagatcggcatctacaaggagagctgtgtgcggctgaaggagctggagaaggagaacaaggagctggtgaagagggccaccatcgacatcaagaccctggtgaccctgcgggaggacctggtgtctgagaagctgaagacccagcagatgaacaatgacctggagaagctgacccatgagctggagaagattggcctgaacaaggagcggctgctgcatgatgagcagagcacagatgaccgctacaagctgctggagagcaagctggagagcaccctgaagaagagcctggagatcaaggaggagaagattgctgccctggaggcccggctggaggagagcaccaactacaaccagcagctgcggcaggagctgaagacagtgaagaagaactatgaggccctgaagcagaggcaggatgaggagaggatggtgcagagcagcccccccatctctggagaggacaacaagtgggagcgggagagccaggagaccacccgggagctgctgaaggtgaaggacaggctcatcgaggtggagaggaacaatgccaccctgcaggccgagaagcaggccctgaagacccagctgaagcagctggagacccagaacaacaacctgcaggcccagatcctggccctgcagaggcagacagtgtccctgcaggagcagaacaccaccctgcagacccagaatgccaagctgcaggtggagaacagcaccctgaacagccagagcaccagcctgatgaaccagaatgcccagctgctgatccagcagagcagcctggagaatgaaaatgaatctgtcatcaaggagcgggaggacctgaagagcctgtatgacagcctcatcaaggaccacgagaagctggagctgctgcacgagcggcaggcctctgaatatgagagcctcatcagcaagcacggcaccctgaagagcgcccacaagaacctggaggtggagcaccgggacctggaggaccgctacaaccagctgctgaagcagaagggccagctggaggacctggagaagatgctgaaggtggagcaggagaagatgctgctggagaacaagaaccacgagaccgtggccgctgagtacaagaagctgtgtggagaaaatgaccggctgaaccacacctacagccagctgctgaaggagacagaggtgctgcagacagaccacaagaacctgaagagcctgctgaacaacagcaagctggagcagacccggctggaggccgagttcagcaagctgaaggagcagtaccagcagctggacatcaccagcaccaagctgaacaaccagtgtgagctgctgagccagctgaagggcaacctggaggaggagaacagacacctgctggaccagatccagaccctgatgctgcagaacagaaccctgctggagcagaacatggagagcaaggacctcttccacgtggagcagaggcagtacatcgacaagctgaatgagctgcggcggcagaaggagaagctggaggagaagatcatggaccagtacaagttctatgaccccagccccccaagaagaagaggcaactggatcaccctgaagatgaggaagctgatcaagagcaagaaggacatcaaccgggagcggcagaagagcctgaccctgacccccaccaggagtgacagcagcgagggcttcctgcagctgccccaccaggacagccaggacagcagctctgtgggcagcaacagcctggaggatggccagaccctgggcaccaagaagagctccatggtggccctgaagaggctgcccttcctgaggaaccggcccaaggacaaggacaagatgaaggcctgctaccgccgctccatgtccatgaatgacctggtgcagagcatggtgctggccggccagtggacaggcagcacagagaacctggaggtgcctgatgacatcagcacaggcaagaggaggaaggagctgggcgccatggccttcagcaccacagccatcaacttcagcacagtgaacagcagcgctggcttccgcagcaagcagctggtgaacaacaaggacaccaccagctttgaggacatcagcccccagggcgtgtctgatgacagcagcacaggcagccgggtgcacgccagcaggcctgccagcctggacagcggccgcaccagcaccagcaacagcaacaacaatgccagcctgcacgaggtgaaggccggggctgtgaacaaccagagccggccccagagccacagcagcggggagttcagcctgctgcatgaccacgaggcctggagcagcagcggcagcagccccatccagtacctgaagaggcagaccaggagcagccctgtgctgcagcacaagatcagcgagaccctggagagccgccaccacaagatcaagacaggcagccctggcagcgaggtggtgaccctgcagcagttcctggaggagagcaacaagctgacctctgtgcagatcaagagcagcagccaggagaacctgctggatgaggtgatgaagagcctgtctgtgtccagtgacttcctgggcaaggacaagcctgtgtcctgtggcctggcccggtctgtgtctgggaagacccctggggacttctatgacaggaggaccaccaagccagagttcctgcggcccggccccaggaagacagaggacacctacttcatcagcagcgctgggaagcccaccccaggcacccagggcaagatcaagctggtgaaggagagcagcctgagccggcagagcaaggacagcaacccctatgccaccctgccccgggccagcagcgtcatcagcacagctgagggcaccaccaggaggaccagcatccatgacttcctgaccaaggacagccggctgcccatctctgtggacagccccccagctgctgctgacagcaacaccacagctgccagcaatgtggacaaggtgcaggagagcaggaacagcaagagccgcagccgggagcagcagagcagctag

SEQ ID NO: 50726 - DNA, 5613 bp, Artificial Sequence
  derived and/or modified sequence
atggagaacgagatcttcacccccctgctggagcagttcatgaccagtcctctcgtaacgtgggtgaagaccttcggcccgcttgctgccggaaacggaactaacctggatgaatacgtggcccttgttgacggcgtcttcctgaaccaggtgatgctccagatcaaccccaagcttgagtcccagcgagtgaataagaaagtgaacaacgatgcatcgttgcgcatgcataacttgagcatcctcgtgagacagattaaattctactaccaagagacgctgcagcagctcatcatgatgagccttcccaacgtgctgatcatcggcaaaaacccctttagtgaacaaggaaccgaggaggtaaagaagctgctgctcctgctgttgggatgcgctgtgcagtgtcagaaaaaagaggagttcatcgagagaattcagggtctggattttgacacaaaagcagccgtggcagcccacatccaggaggttacccacaaccaggaaaacgtcttcgacctgcagtggatggaagtcacagacatgtcacaggaggatattgagccgttactcaaaaatatggcactgcacctcaagagacttattgacgagcgagatgagcattccgagacaatcatcgagctatctgaagagcgagacggactgcactttctgcctcatgcgtcctccagtgcccagagcccatgcgggtctccgggcatgaaacgcaccgaaagccgccaacatctgtctgtcgagcttgcggatgcgaaggccaaaatcagacgactgcgccaggaactcgaagagaagaccgagcaacttcttgattgcaagcaggaactggagcagatggaaatagagctgaagcgccttcaacaagagaacatgaacttgctatcagatgctcggtccgcccgcatgtacagggatgaactggatgctctgagagagaaagcagtgcgggtggacaagctggagtcagaggtgtctagatacaaagaacggcttcatgatatcgagttttacaaagctcgggtcgaggaactgaaggaagacaatcaggtgctgcttgagaccaagacgatgctcgaggaccagctggaaggcaccagagcccgttctgacaaacttcacgaactggaaaaggaaaatcttcagcttaaagccaagctgcatgacatggaaatggagcgcgacatggacagaaagaaaattgaggaactcatggaggagaacatgactctcgagatggcccagaagcagagcatggatgagagcctccatctgggatgggagctggagcaaatctcccggactagtgagttatctgaggcaccgcagaaatccctggggcacgaggttaacgagctgacgagctctcgactgctcaaactggaaatggagaatcagagcctgactaagacagttgaagagctcagaacgactgttgatagtgttgaagggaatgcatccaagattttaaaaatggagaaggagaaccaacggttgtcgaagaaggttgagatcctggagaatgagattgtccaggagaagcagagcctccaaaactgccagaatctatcaaaggacctgatgaaggagaaggcacagttggaaaaaacaattgagactctgcgggagaacagcgagcggcaaattaaaatcctggaacaggaaaacgagcatctgaatcagactgtttcgagtttgcgccaaaggagtcagatctcggcggaggcacgagtcaaagatatcgagaaagagaacaagatcctgcacgaaagtatcaaagaaacatcctcaaagctttctaagattgagttcgagaagcgacagatcaagaaagaattagaacactataaagagaaaggggagcgtgccgaagaattggaaaacgagttgcaccatctggaaaaggaaaatgagctcctgcagaaaaagattaccaatcttaagattacctgcgagaagattgaagcccttgagcaggaaaattccgagctggaaagggaaaaccggaaacttaagaagaccttggactctttcaagaacctcacatttcagctggagagcttggagaaagagaactcacagctggatgaggaaaatctggagcttagacgaaatgtggagtccctgaaatgcgcctcaatgaaaatggctcagctccaactcgagaataaggagctggagagtgaaaaagagcagctcaagaagggcctggaactgctgaaagcttcgttcaaaaagacagaaagactagaggtgagctaccagggcttggatatcgaaaaccagaggctgcagaaaacactcgaaaatagtaacaagaaaatccaacagctggaaagcgaactgcaggacctagaaatggagaaccagacactccaaaaaaatctggaggaactaaaaattagtagcaaacggctggagcaactcgaaaaagaaaataagtccctggagcaggaaacatctcaactagaaaaggataaaaagcagctggagaaggaaaataagcgcttacggcagcaggctgaaataaaggatacgaccttggaggagaataacgtgaaaataggcaacttagaaaaggagaataaaacgctctccaaggaaattgggatctataaggaatcatgcgtccggcttaaagagctcgaaaaggagaataaggagctcgtgaaacgcgccactatcgacatcaagaccttggtgaccctccgcgaggatctggtgtctgagaaactgaaaacccagcagatgaataatgacctggagaagctgacacatgaactggagaaaattggtctcaacaaagagcgcctgctccatgacgaacagtctacagacgacaggtacaaactcctggagtccaagttggaaagtactctcaaaaagtcattggagattaaggaggaaaagattgcggcactggaagctcgactggaggaaagcactaattacaatcagcagctgcgccaagagcttaaaactgtgaaaaaaaactatgaagctctgaagcagaggcaagacgaagaaagaatggtgcagagttctccccccatttctggcgaagacaacaagtgggaaagagagtcccaggagacaacccgtgaattgctgaaggtgaaagacagactcatcgaagttgaacgcaataatgcaaccctccaggcggaaaaacaggcattaaagactcagctgaaacagctcgaaacccaaaataacaatttgcaggcccagatcctggccttgcagcggcagacagtttctctgcaggagcaaaatacaaccttgcaaacccagaacgccaagctgcaggtggaaaacagcaccctcaacagccagtcaacaagtttgatgaaccagaatgcccaactgcttattcaacagtcaagcctagaaaacgaaaatgagagcgtgataaaagaacgagaggacctgaagtcattgtacgactcactcataaaagatcatgagaagctagagctcctgcatgagagacaggcctccgaatacgagtccttgatctctaagcatggcaccttgaaaagtgcacacaagaatcttgaagtggagcatagagacctcgaagatagatataaccaattgttaaagcagaagggccaactggaggacctcgaaaaaatgctgaaggtggaacaagagaagatgctcctggaaaacaaaaaccacgagacagtggcagccgagtacaagaaactctgcggggagaacgataggttgaatcatacttattctcagctgctcaaggagacggaggtgttgcaaaccgatcataagaacttgaagagccttctgaacaattctaaactagaacagacacgactggaagccgaattttcaaagctcaaggagcagtatcagcagctcgatattacctctaccaaattaaacaaccagtgcgagctactgtctcagctgaaagggaaccttgaagaagagaataggcacctgttggatcagattcagaccttgatgttacagaatcgcaccctgctggagcaaaatatggagagcaaagacctcttccacgtagagcaacggcagtatattgataagttaaacgaacttcgccggcaaaaggagaaattggaggagaagatcatggatcaatataagttttatgacccttcaccgccacgtcgacgcggtaactggattactctgaagatgcggaaacttattaagtcaaaaaaagatattaaccgggagcgccagaagagcctgaccctcacccccactaggtcagacagttccgagggctttctccagctgccccaccaggattcccaggactcgagtagtgttggctcaaattcactggaggatggtcagaccctgggaactaaaaaaagcagtatggttgctctgaaacgcctgccctttcttcgtaaccggcctaaggacaaggataaaatgaaagcatgttacagacgtagtatgtcgatgaatgatctggtgcaaagcatggtccttgcgggccaatggaccgggagtaccgagaacctggaggtgcctgacgacattagcaccggcaagaggcgtaaagagctcggggccatggcctttagcacgactgccatcaacttttccacagttaactcttccgccggcttcaggtccaaacagctcgtgaacaacaaggacacgaccagttttgaagacatctctccacaaggcgttagtgatgattcctccaccggatctcgagttcacgcctcccgccctgcctcactggactctgggcggacaagcacctccaacagtaacaataacgcttccctccacgaggttaaggcaggcgcggtgaataaccaaagtagaccccagtcgcacagcagcggtgagttcagtttgctccatgatcatgaggcttggtcatcctccggatcttccccaattcagtacttgaagcggcagaccagatctagccccgtcctccagcataaaatctctgaaacactcgaatcccggcaccacaagataaaaaccgggagtccaggatccgaggtggtaacgctgcagcagttcctcgaggagtcaaataagttgacttctgtgcagataaaatcttcttcccaggaaaatctgctggatgaagtcatgaaaagcctctctgtgtccagcgatttcctcggtaaggacaagccggtttcttgcggcctggcacgctccgtgagtggcaaaacacctggagatttctacgatcggaggaccaccaaaccagagtttcttagacccgggcctagaaagaccgaggacacttattttatcagcagcgccggaaaacctacccccggaacacaggggaaaatcaagctagtgaaggaatccagccttagcaggcaaagcaaggactcgaacccttacgcgaccttgccacgcgccagcagtgtcattagcactgccgaggggactactcggcgaacatcaattcatgattttttgacaaaagatagccggttgcccatatcagttgactccccgccagccgctgcagattccaacactaccgctgccagcaatgtagacaaagtgcaagagagcaggaacagcaagagcagaagccgggagcaacagtcttcttag

SEQ ID NO: 50727 - DNA, 5612 bp, Artificial Sequence
  derived and/or modified sequence
atggaaaacgagatttttacccctttgctggaacagtttatgaccagtcccctagtgacatgggttaagaccttcgggccactggcagctgggaacggaaccaacctggatgagtacgtggccctggtcgacggggtgtttttgaaccaggtgatgcttcagattaacccaaaactggaatcccagcgggttaacaaaaaagttaataatgacgctagcttgcgtatgcacaatctgtctatactcgttcgccagatcaaattctactatcaggagacattacagcagctgattatgatgagtctgccaaacgtcctgatcatcgggaaaaatcccttctctgaacaaggcaccgaggaagtcaagaaactgctcctgctccttctgggctgtgccgtccagtgtcagaagaaagaagaattcatcgaacggatccagggactcgactttgatacaaaggctgcggtagcagcgcacattcaggaagtgacacacaaccaagagaatgtgttcgacctccagtggatggaagtcactgatatgtctcaggaagatatcgaacctctgctgaagaatatggccctccacctcaagagactgattgatgagcgcgatgagcatagcgaaaccattatcgagctctctgaggaacgtgacggtctccatttccttccacacgctagttcgtcagctcaatccccttgtggttctcccggaatgaaaaggactgagagccgccaacatctctcagttgaactagccgatgcgaaggccaagattagaaggttaagacaggagctagaggagaaaaccgagcagcttttggattgcaagcaggaactggaacagatggaaattgagctaaaacgtctccagcaagaaaatatgaatctgcttagcgatgcacggagcgcaaggatgtacagggacgaattggacgccctccgagagaaagccgttcgagtcgacaaacttgagtctgaggtgtctcgatacaaggaacggctccatgacatcgaattctacaaggccagggtggaagaacttaaggaggataatcaagtgttactcgagactaagaccatgctcgaggatcagctcgaaggcacaagagcgaggtcagacaaattacacgagctggaaaaagagaatctacaattaaaagccaaattgcatgacatggaaatggagagagacatggacaggaaaaaaatcgaggagttaatggaagagaatatgaccttggaaatggcccagaagcaatcaatggatgagagtctccatctgggttgggagttagagcagatttcccgtacaagcgaactgagcgaggcacctcaaaagtcactcggacacgaggtgaacgagttaaccagctcccgtctgctcaagctggagatggagaaccagtcgctgacaaagacagtggaggagctgaggaccacggttgattccgtcgagggtaatgcctccaagattctgaaaatggagaaggagaaccagcgcctttcaaagaaagtcgagatcctggagaacgagattgtgcaggaaaagcagagcctccagaactgtcagaacctgtccaaggacttgatgaaggaaaaggctcaacttgaaaaaacgatagagacactaagggaaaattccgaacgacagataaagatcttagagcaggagaatgaacatctgaaccagacggtgagcagcctgcgccagcgatcccagatatctgccgaggccagagtcaaggatatcgagaaggaaaacaaaattcttcacgagtccatcaaagagactagttctaagctgtccaagatcgagttcgagaaacgacagattaaaaaggaactagagcattacaaggaaaaaggcgagcgcgctgaagaactcgagaatgagcttcaccacctcgagaaagagaacgagctcctgcagaagaaaatcaccaatctgaaaattacctgcgagaagattgaggccctggaacaggaaaattcagaactggagagggagaaccggaaattgaagaagaccttggatagtttcaagaacctgaccttccagctggagtcactcgaaaaggagaatagtcagctcgatgaagaaaacttggagctgcgaagaaacgtggagagtctcaaatgtgccagcatgaagatggcccagctccagctggaaaataaagagctcgagtccgaaaaggaacagcttaagaaaggcctggaactactcaaggcatctttcaaaaagactgagagactggaggtaagttaccaggggctcgatattgagaatcagagattacagaagacccttgaaaactccaataagaagatccaacagctggagagcgagctgcaagacttggagatggagaaccagacactgcagaagaacctagaagagctaaaaataagttccaagaggctggaacagttagaaaaagagaataagtcgctcgaacaagaaacgtcacagctggagaaggataaaaagcaactggagaaagagaataaacggctgagacagcaggctgaaatcaaggatacgactctcgaggagaacaatgtgaagattggcaaccttgagaaagagaacaagaccctgtcgaaagaaatcggcatctacaaggagtcctgtgtaagactgaaagagctcgaaaaagagaataaggagctcgtgaaaagagctacaatagatattaaaacccttgtgaccctgcgggaggatctggtcagcgagaagctcaaaacccagcagatgaataacgacctggaaaaactcacccacgagctcgagaagatcggcctgaacaaagaacgacttttacacgacgaacaatcaaccgatgaccggtataaattgctggaatccaaactggagtctacactcaaaaagtcccttgagataaaggaagaaaagatagccgctctggaagctcgtctcgaagagtctacaaactataatcaacagttgcggcaagagcttaaaactgtgaagaaaaactacgaagctctaaaacaaaggcaagacgaagagcgcatggtgcagagctcaccaccaattagcggggaggataacaagtgggagcgggagagtcaagagactactagagaactattgaaagtaaaagatcgcttaattgaagtcgaacgcaataatgcaaccctgcaggccgagaaacaggccctgaagacccaactaaagcagttggagacgcagaacaataatctgcaggctcagatcctggccctgcagcgccagactgtctcgttgcaggagcagaacacgactttgcaaacacaaaacgctaaactccaagtggaaaactcaaccctcaatagtcaatcaactagcttgatgaaccagaacgcacagttactgattcagcagtcctcacttgaaaatgagaacgagagtgtcataaaggagagggaggatctgaagtccctgtatgattcactaataaaagaccacgagaagctggaactgctgcacgagaggcaagctagcgaatatgaaagtttaatttctaaacatggaacgctgaaatcagcccataagaatttagaagttgaacatagggatctcgaggacaggtataaccagctgctgaagcagaagggtcagctggaggatctggagaagatgctgaaggttgaacaagaaaaaatgcttctcgaaaacaagaaccacgagactgttgccgcagagtacaagaagctgtgtggggaaaatgatagactgaaccacacttattcacaactgctcaaagaaacagaagtgttacagaccgaccataaaaacctgaaaagcctgttgaataactccaaactcgagcagaccaggctggaggcagagttttctaaattaaaggagcagtaccagcagctagatatcacctcaacgaagctgaacaatcagtgcgagttgctatcccaattgaaaggaaacttggaggaagagaacaggcatctactggatcaaatccagacgctgatgctgcagaaccgaaccctgctcgagcagaacatggagtcaaaagatttgttccatgtcgaacagagacagtacattgacaaactgaatgagctgcgacgccagaaagagaaactggaggagaagattatggatcagtataagttctatgatccttcccctccgagacgcagaggtaattggatcacattgaaaatgaggaagctgatcaagtcgaaaaaggatattaaccgggaaagacagaagagcctaaccctcactccaacaagaagtgattcctccgaaggctttctgcagttgccacaccaagattcgcaggactcctcatccgtgggttccaacagtttggaggatggccaaacgctagggaccaaaaagtcaagcatggtggctcttaaacggctccccttcctccggaatcggccaaaagacaaggataaaatgaaggcttgttacaggcggtctatgagcatgaatgacctggtgcaatcaatggtcctggcgggacagtggaccggctctactgagaatctggaggtcccagacgatatctccaccggaaagagaaggaaggaactgggggcaatggccttctccaccaccgctattaacttctctacagtgaacagctcagcaggcttccgctcaaagcagctggtcaacaataaggataccactagttttgaggatatctccccacagggcgtaagtgatgactcaagcactggatcccgggtgcacgcgtctcgcccagctagcttggattcgggacggacctccacaagtaactcaaacaataatgcgagtttgcacgaggtcaaagccggtgcagtaaacaatcaaagccggccacagtcccattctagtggtgaattcagtttgcttcatgaccacgaggcttggtcctcctccggctcctcaccaattcagtacctcaagcgccagacccgctcaagtccagtgcttcaacacaagattagtgaaaccctggaaagccggcaccacaagatcaagactgggtcaccgggatccgaagtagtgaccctgcagcagttcctcgaggagtccaacaaactgaccagtgtgcagataaaatcctcctcacaagagaatctgctggatgaggtcatgaaatcactgtctgtgagctcggacttcttgggcaaggacaagcctgtctcatgcggtctcgcccgtagtgtgagtgggaagacaccaggggatttctacgaccgtagaactaccaagcctgagttcctgcgtccagggccacggaaaacggaagatacctactttattagctccgctggtaaaccaacaccgggtacgcaggggaaaattaaacttgtcaaagaaagcagcttgtctagacagagtaaggattccaacccatacgcgaccctcccgagggcctcgtccgtgatttcaaccgcagaaggcaccactcgcaggacaagtattcatgactttctgactaaggattcaaggcttcccattagcgtggattccccaccagccgctgcggactccaatacaacagcagcctccaacgtagacaaagtgcaggagagcagaaattccaaatcgcgtagccgggagcaacaatcctcgta

SEQ ID NO: 50728 - DNA, 9505 bp, Artificial Sequence
  derived and/or modified sequence
cgggcagtggaggctccgcgggtcgaaagcggctccatgcccatcggtgggtggaacgtgtagaggtcggaacgccgaggtcgagtctggtggcgcctcggtatccttaacgtggtctctgtttaacgtatttcatttagcccccgttgggattgattcattgggagcagtttcgctggtctggatcctccaggagctggacaaccttgacgggctttttgtcttgggttccagccccctttcccttcctcctcctccagatgccttttctctgcccctcctcgcccggtacagacatttccagcgcaggctgctgctcgtggtgtccgtcgtcgaagccacttcttgggatttcggctcgtttcactctggggtgttttttgaggagggagagtgcccccctcctccacgatgggatttttctcccttgccgaaatggactttcattgatttctacttacttccacgtttagtgaccaattccctaggcgtatttttgtggtagttccttttttcaaatacatactctgtaaaatggagaacgaaatttttactccccttctggagcagttcatgaccagccctttggtcacttgggttaaaacgtttggacctctggccgcaggaaatgggaccaaccttgatgaatatgtggctttggtggatggggtattcttgaaccaggtcatgctccaaattaatcctaaattggagagtcagagagtaaataaaaaagtcaataatgatgcctcacttagaatgcacaatctatccattttggtgagacagataaaattttattaccaggagactttgcagcaattgatcatgatgtcgttgccaaatgtcttaatcattggcaaaaatcccttttctgaacaaggcacagaagaagttaaaaaactgcttttacttttattgggttgtgcagttcagtgtcagaaaaaagaggaatttattgaaagaattcaaggtttagattttgatacaaaagcagcggttgccgcacatattcaagaggtaactcataatcaggaaaatgtgtttgacctgcaatggatggaagtgactgatatgtcgcaggaggacatagaaccactcttgaaaaatatggcattgcatctaaaaagacttatagatgagagagatgaacattcagagactatcatagaactctctgaagagcgggatggtctccattttctaccccatgcctcttcatctgcacagtcaccctgtggttctccaggcatgaagcgaacagaaagtcgacaacatctgtcggtggaactggcagatgctaaagccaagataagaaggcttaggcaggaattggaggaaaagactgagcagttgttggattgtaaacaagaacttgagcaaatggaaatagaactcaaaaggctgcaacaagagaacatgaatttgctttcggatgctcgctctgccagaatgtaccgagatgaattagatgcacttcgagagaaagcagtcagagtcgataagcttgaaagtgaagtcagcagatataaagagagactacatgatattgaattttataaggcaagagttgaggaattaaaagaagacaatcaagttttattagaaacaaaaaccatgttggaagaccaactagagggaactcgtgctcgttctgataaattacatgaattagaaaaagagaacttacaactgaaagctaaacttcatgatatggaaatggaacgagatatggatagaaaaaagattgaagaattaatggaagaaaatatgactttggaaatggcacagaaacaaagtatggatgaatcattacatcttggctgggaactggaacagatatccagaactagtgaactttccgaagcaccccagaaatccctgggccatgaggtgaatgagttgacatcaagtagattattgaagctagagatggaaaatcaaagtttgacaaaaaccgtagaagagcttcggactactgtggattctgtagaaggcaatgcttccaaaatcctgaaaatggaaaaagaaaatcaaaggctcagtaaaaaggttgagattcttgaaaatgagattgttcaagaaaagcaaagtcttcagaattgtcagaatttaagcaaggatctaatgaaggagaaagctcagcttgaaaaaacaatagaaacactgagagaaaattcagagagacagattaagatactggaacaggaaaatgaacatctgaatcaaacagtgtcttccttaaggcagcggtcccagataagtgcagaagcaagagtgaaagacattgaaaaagaaaacaaaattcttcatgaatctatcaaagaaacaagtagcaagctaagcaagattgaatttgaaaaaagacaaattaaaaaagaattggaacattataaagaaaaaggagaacgagctgaagaacttgaaaatgaattgcatcatcttgaaaaagaaaatgaattattacagaaaaaaataactaatttaaaaattacttgtgaaaaaattgaggccttagaacaagaaaattcagagctagaaagagaaaatagaaaattaaaaaaaacattggatagctttaaaaatctgacctttcagttagaatccctagaaaaagagaattcccaacttgatgaggaaaacttagaactgcgaaggaatgtagaatctttgaagtgtgcaagcatgaaaatggctcagctacagctagaaaacaaagaactggaaagtgaaaaagagcaacttaagaagggtttggagctcctgaaagcatctttcaagaaaacagaacgcttagaagttagctaccagggtttagatatagaaaatcaaagactgcaaaaaactttagagaacagcaataaaaaaatccagcaattagagagtgaactacaagacttagagatggaaaatcaaacattgcagaaaaacctagaagaactaaaaatatctagcaaaagactagaacagctggaaaaagaaaataaatcattagagcaagagacttctcaactggaaaaggataagaaacaattggagaaggaaaataagagactccgacaacaagcagaaattaaagataccacattagaagaaaataatgtgaagattggaaatttggaaaaagaaaacaaaaccctatccaaagaaattggtatatataaagaatcttgtgtccgtctgaaagaactagaaaaagaaaataaggagcttgtgaaaagagcaactattgatataaaaacgttggttacactacgtgaggatttggtgagtgaaaagttgaagacccaacagatgaacaatgatctcgaaaaattaactcatgagcttgagaagatagggttaaataaggagcgactcttacatgatgaacaaagtactgatgacaggtataaacttttggaatcaaaattagaatccactcttaagaagtctcttgaaataaaagaagaaaaaattgctgctttagaagctcgattagaagaatccacgaattataaccagcaattgcgccaagaacttaaaacagtgaaaaaaaattatgaagctctcaaacagagacaagatgaggaaaggatggtacagagctctcctccaatatctggtgaagacaacaaatgggagcgagaaagtcaagaaacgactagagaacttctgaaagttaaagacagattaattgaagtagaaagaaataatgctacactgcaagcagagaagcaagcgttgaaaactcaactgaagcaacttgagacacagaacaataatttgcaggctcagattcttgcacttcagaggcagacagtgtcattacaagaacagaataccactcttcaaacacagaatgccaagcttcaggttgaaaattccacccttaattcccaaagtacctcactcatgaaccagaatgcccaactcctaatccagcagtcttccttagaaaatgaaaatgaatctgtaatcaaagagcgagaagacctaaaatctctctatgattctctgatcaaagatcatgaaaagctggaacttcttcatgaacgtcaggcttcagagtatgaatctcttatctctaaacatggaactctgaagtctgcccacaaaaatcttgaggtggaacatagagaccttgaagaccgttacaatcagttattaaaacagaaaggacagttggaagatttggaaaaaatgctcaaagtagaacaggaaaaaatgctgcttgaaaataaaaatcatgaaacagtagctgcagaatacaagaaactttgtggtgaaaatgataggctgaatcatacctatagtcaacttttaaaagagactgaagttttacaaactgaccataaaaatttgaaaagtcttctgaataattccaaactggaacaaacaagattagaagctgaattttcaaaactaaaggaacaataccaacaattggatattacatcaaccaagctgaataaccagtgtgagttgctaagccaacttaaaggaaatttagaagaagaaaatcggcatctactagatcaaattcagacattaatgctacagaacagaacacttttggagcagaatatggaaagcaaggatctttttcatgttgaacaaagacagtacattgataagttaaatgaattaagacgtcagaaggagaaactagaagagaaaattatggatcaatacaaattttatgacccatctcctcctagaaggagaggcaactggattactctaaaaatgagaaaattgataaagtctaagaaagatattaatcgggaacgccagaaatctctaacattaacacccacccgctcagactccagtgaaggatttcttcagctccctcatcaagacagtcaagatagttcttcagtaggttcaaactctttagaagatggccagaccttggggaccaagaaaagcagcatggttgcactgaaaagactgccctttttgaggaacagaccgaaggataaagacaaaatgaaggcctgctaccgtcgttccatgtccatgaatgacctggtgcagtccatggtcctagcaggacagtggacaggtagtactgagaatttggaggttcctgatgatatttcaacgggtaaaaggagaaaagaattgggagctatggccttctctactacagccatcaacttttcaactgtcaactcttctgcaggcttcagatccaagcagttggttaataataaagatactacatcctttgaagacataagtccacaaggtgttagtgatgattctagtacgggatcaagagttcatgcttcaagaccagccagccttgatagtggcagaacatccactagcaatagcaataataatgcttcactacatgaagtcaaagcaggtgcagttaataaccaaagcaggccacaaagccacagcagtggagaatttagcctgcttcatgaccatgaggcttggtccagcagtggtagcagtccaatccagtacttgaaaagacagaccagatcaagcccagtgctccagcacaaaatatctgaaacactggagagtcgacatcacaagatcaaaactggttcccctggaagtgaagttgttactctacaacagtttttggaagaaagcaataagcttacctcagtacagataaagtcctcaagtcaagagaatcttttagatgaagtaatgaaaagtttgtctgtctcttctgactttttgggaaaagacaaaccagttagctgtggtctggccaggtcagtaagtggaaaaaccccaggggacttctatgatagacggacaactaagcctgagtttttgagacctggtcctcgaaaaactgaagatacctacttcattagttctgcgggaaaacctacaccaggcactcaaggaaaaataaaattagtaaaagaatcttctctgtcacgacaatcaaaagatagtaacccttatgcaactttacctcgtgcaagcagcgtgatctcaactgccgaaggaactacacgaaggacaagcatccatgattttttgaccaaggacagtagactgcctatatcagttgattcaccaccagctgctgctgacagcaacaccactgcagcatctaatgtggacaaagtacaagaaagcagaaattcaaaaagcaggtctagggagcaacaaagctcctaattctattacccactacatgacatgtgggccaagtgagagaaaagtgtccttcagtttctcagtatgaagcctttatttctgaagtaacaagacacctagcaactataggaatcatttttaaaaatctttaaggagacttttaacagtccttcgtgaatagagcaggcaagaaatacaaaccttcattccttgaatcaaggagcactactggattcaactgccaaaattttttaaaggttttaggacttactataccttgtactgttaagatctactgaataaaggacgttctctcactaaggaccaggtgttttaaggttaagtgtttaaagaagtactccaagaacaatctgcttttttcatcatttgttttatgaatttatccatgtttgcttaatgcttctgctaagtgttagccaaaatctagccatttatatttagttgtgtaaacctaaattaaatgctgtagtattttgtggaatgtactatatagcaagatacagagaaaattgttttggcatgtcagagccttatttggttagcagactgcatgtgttgatactttttttttcttaaagccaattattttgatgcaaaagaaattcagtttataagataaatctgaaaaatccataatgaaataggagttataaaaaatttatagtgatattaatctttccatatttcccattaagcaacactaagcattcataagttaacccatggtaaagagtgtttttctgaaacttttttttagtaagatggtttttcagcaaatggcattcccaagataaagctgttgtgctttaactcatttcttttctttggtattgggttatgtatgcgtgtgcatttttttaacttgagagctgactgttgcttaagaagttttcttatggcaaaaataatgtaaataagttactatgatctgcattttgccagaaactcatttataattaaggctatcatttattaatgatttttttctcctttatgatattacattaaagttgataactgttattggtacttttgaaatatttgtatgcatttgttacctttaaacatttggaagaagcacaaaaaaatagatttagttaacccagggaaacatcaatttttttagtagttccaattttatatcacagttttattttcttatgaaatcaaaaaatgcattgatactcattaatgcaaattcattatttaacatcaatatcagagtaatcttcaaggtctgaaatgagaaacatactgactttttaaaattttaacagtgtacttcttaggctttcattaccagctctgaagaactttttggaataattccatattccatagtgtgtggtttatgagttgtgggtttcatcactaacccagtaaccataagaaaagtctctctctctctctctctctctctctctttctctctccctctttctctctctctttcgtaggccagtagcaatgttgtgttcacagtctaatttccaaaagaccatcaataaaaaagagagcatgtttaaattgaaatggaacttagagaacttgagcttacttacgtacttcaatgccaccggtaacttaggttttaccaccaaatgctgttaacgttaaatcattttgaaaatcttggatgaaaggtgctatgtaaatggaaatacaaaggattcttactaacatacaaaaataatgcacaacagaaatatctaaaaccttttccgtagactttgaaacatctctctctctcataactccctggattcaagtagcacattggtaataggtatcagagcagtctagagacaattgcatgtcaaaaaatgtacattcatttttaggtggataaaagtaaacatagaaattatgttatggctaaatacagttagtgggtaacttagatttatattagctagcatctaatttgcacaactagaacacatcccagaacaattactgaaaagctgaaatttaatgggtggtgatgtagcccaatgagggcgaatgacattacagcttgacctctccagaacactaatatcctaaaatacagaacatgctgggttaagtgcattagtgcttcaagcagaaaatgctgaaaacaacgtgtaaagtactgaatctgagtaggctgaccctgagaagggacaattaaagagacaaccaagggaacacattgagactacaaaaatatgaataatctcaattatattcatcacacttttttcataccatttcaagaaacgactagacagtagtaaccacatgaatattttactttctccagtataccttgagaagcaaactttgtaggaagccactcttctcccctaaacaacttctgccaaacaataataaagccaactggaaacgaatcggagccattttcattttcctaaccggggcctgacatgctttaaattatctggctgtattctaaatcaacacctaacccctcaaggaaactgaagaatcaatatacagggtaatagctttggctcagagctccaataatgtgcttcagatctgtccatgtggaaatgctttcatccaaatttttaaattggtggttaccaaagagttcacaaaacaggtttgtatgtagcacctttcatgcaaggcatgcaaaaagcctattttaaaatcactgtgcatattatagagttgtagccacctcacaatgaagtactacagcctgtgctgtcttaatggtttatgtcaggaaatgaaaaagatactgtaccaaatctggaattacaatggggagtaataatgtatactaaatgacttttgtattttaagttactttttgtgagtggtgaatttttgtgtttttcttttcagctacacttagtcctgagatgtattttttctttaagtcttgaatgaatacaaaaggagcccattttataatataaaccttgatgtacatgttgagatatttggacaatgaaaatgccttaaaaggaatgcatatggataaagttgcacttataacacccttcaacaaaatctaattttaaattgtctttttcttttctattaagggttttctttttcagtgtctaccattgtacttataactgttattaaataccaaatcaaataatataaaagctgtaacatttcctttaaaactaatgctaataagggatttagagttgaatggcaaaatgtttattacttggcaatacctgatgtcagtcacaggcatccaactcatgacaagagataccactgtttgttttttaaaaaacatttttcattttgtttctccttcaaaaattaagttggactaacattcacgtatcaaactaatataaaaagaaataaaaccaagaggtgatttttgtaacaa

SEQ ID NO: 50729 - DNA, 5613 bp, Artificial Sequence
  derived and/or modified sequence
atggagaacgagatcttcacccccctgctggagcagttcatgaccagccccctggtgacctgggtgaagaccttcggccccctggccgccggcaacggcaccaacctggacgagtacgtggccctggtggacggcgtgttcctgaaccaggtgatgctgcagatcaaccccaagctggagagccagagagtgaacaagaaggtgaacaacgacgccagcctgagaatgcacaacctgagcatcctggtgagacagatcaagttctactaccaggagaccctgcagcagctgatcatgatgagcctgcccaacgtgctgatcatcggcaagaaccccttcagcgagcagggcaccgaggaggtgaagaagctgctgctgctgctgctgggctgcgccgtgcagtgccagaagaaggaggagttcatcgagagaatccagggcctggacttcgacaccaaggccgccgtggccgcccacatccaggaggtgacccacaaccaggagaacgtgttcgacctgcagtggatggaggtgaccgacatgagccaggaggacatcgagcccctgctgaagaacatggccctgcacctgaagagactgatcgacgagagagacgagcacagcgagaccatcatcgagctgagcgaggagagagacggcctgcacttcctgccccacgccagcagcagcgcccagagcccctgcggcagccccggcatgaagagaaccgagagcagacagcacctgagcgtggagctggccgacgccaaggccaagatcagaagactgagacaggagctggaggagaagaccgagcagctgctggactgcaagcaggagctggagcagatggagatcgagctgaagagactgcagcaggagaacatgaacctgctgagcgacgccagaagcgccagaatgtacagagacgagctggacgccctgagagagaaggccgtgagagtggacaagctggagagcgaggtgagcagatacaaggagagactgcacgacatcgagttctacaaggccagagtggaggagctgaaggaggacaaccaggtgctgctggagaccaagaccatgctggaggaccagctggagggcaccagagccagaagcgacaagctgcacgagctggagaaggagaacctgcagctgaaggccaagctgcacgacatggagatggagagagacatggacagaaagaagatcgaggagctgatggaggagaacatgaccctggagatggcccagaagcagagcatggacgagagcctgcacctgggctgggagctggagcagatcagcagaaccagcgagctgagcgaggccccccagaagagcctgggccacgaggtgaacgagctgaccagcagcagactgctgaagctggagatggagaaccagagcctgaccaagaccgtggaggagctgagaaccaccgtggacagcgtggagggcaacgccagcaagatcctgaagatggagaaggagaaccagagactgagcaagaaggtggagatcctggagaacgagatcgtgcaggagaagcagagcctgcagaactgccagaacctgagcaaggacctgatgaaggagaaggcccagctggagaagaccatcgagaccctgagagagaacagcgagagacagatcaagatcctggagcaggagaacgagcacctgaaccagaccgtgagcagcctgagacagagaagccagatcagcgccgaggccagagtgaaggacatcgagaaggagaacaagatcctgcacgagagcatcaaggagaccagcagcaagctgagcaagatcgagttcgagaagagacagatcaagaaggagctggagcactacaaggagaagggcgagagagccgaggagctggagaacgagctgcaccacctggagaaggagaacgagctgctgcagaagaagatcaccaacctgaagatcacctgcgagaagatcgaggccctggagcaggagaacagcgagctggagagagagaacagaaagctgaagaagaccctggacagcttcaagaacctgaccttccagctggagagcctggagaaggagaacagccagctggacgaggagaacctggagctgagaagaaacgtggagagcctgaagtgcgccagcatgaagatggcccagctgcagctggagaacaaggagctggagagcgagaaggagcagctgaagaagggcctggagctgctgaaggccagcttcaagaagaccgagagactggaggtgagctaccagggcctggacatcgagaaccagagactgcagaagaccctggagaacagcaacaagaagatccagcagctggagagcgagctgcaggacctggagatggagaaccagaccctgcagaagaacctggaggagctgaagatcagcagcaagagactggagcagctggagaaggagaacaagagcctggagcaggagaccagccagctggagaaggacaagaagcagctggagaaggagaacaagagactgagacagcaggccgagatcaaggacaccaccctggaggagaacaacgtgaagatcggcaacctggagaaggagaacaagaccctgagcaaggagatcggcatctacaaggagagctgcgtgagactgaaggagctggagaaggagaacaaggagctggtgaagagagccaccatcgacatcaagaccctggtgaccctgagagaggacctggtgagcgagaagctgaagacccagcagatgaacaacgacctggagaagctgacccacgagctggagaagatcggcctgaacaaggagagactgctgcacgacgagcagagcaccgacgacagatacaagctgctggagagcaagctggagagcaccctgaagaagagcctggagatcaaggaggagaagatcgccgccctggaggccagactggaggagagcaccaactacaaccagcagctgagacaggagctgaagaccgtgaagaagaactacgaggccctgaagcagagacaggacgaggagagaatggtgcagagcagcccccccatcagcggcgaggacaacaagtgggagagagagagccaggagaccaccagagagctgctgaaggtgaaggacagactgatcgaggtggagagaaacaacgccaccctgcaggccgagaagcaggccctgaagacccagctgaagcagctggagacccagaacaacaacctgcaggcccagatcctggccctgcagagacagaccgtgagcctgcaggagcagaacaccaccctgcagacccagaacgccaagctgcaggtggagaacagcaccctgaacagccagagcaccagcctgatgaaccagaacgcccagctgctgatccagcagagcagcctggagaacgagaacgagagcgtgatcaaggagagagaggacctgaagagcctgtacgacagcctgatcaaggaccacgagaagctggagctgctgcacgagagacaggccagcgagtacgagagcctgatcagcaagcacggcaccctgaagagcgcccacaagaacctggaggtggagcacagagacctggaggacagatacaaccagctgctgaagcagaagggccagctggaggacctggagaagatgctgaaggtggagcaggagaagatgctgctggagaacaagaaccacgagaccgtggccgccgagtacaagaagctgtgcggcgagaacgacagactgaaccacacctacagccagctgctgaaggagaccgaggtgctgcagaccgaccacaagaacctgaagagcctgctgaacaacagcaagctggagcagaccagactggaggccgagttcagcaagctgaaggagcagtaccagcagctggacatcaccagcaccaagctgaacaaccagtgcgagctgctgagccagctgaagggcaacctggaggaggagaacagacacctgctggaccagatccagaccctgatgctgcagaacagaaccctgctggagcagaacatggagagcaaggacctgttccacgtggagcagagacagtacatcgacaagctgaacgagctgagaagacagaaggagaagctggaggagaagatcatggaccagtacaagttctacgaccccagcccccccagaagaagaggcaactggatcaccctgaagatgagaaagctgatcaagagcaagaaggacatcaacagagagagacagaagagcctgaccctgacccccaccagaagcgacagcagcgagggcttcctgcagctgccccaccaggacagccaggacagcagcagcgtgggcagcaacagcctggaggacggccagaccctgggcaccaagaagagcagcatggtggccctgaagagactgcccttcctgagaaacagacccaaggacaaggacaagatgaaggcctgctacagaagaagcatgagcatgaacgacctggtgcagagcatggtgctggccggccagtggaccggcagcaccgagaacctggaggtgcccgacgacatcagcaccggcaagagaagaaaggagctgggcgccatggccttcagcaccaccgccatcaacttcagcaccgtgaacagcagcgccggcttcagaagcaagcagctggtgaacaacaaggacaccaccagcttcgaggacatcagcccccagggcgtgagcgacgacagcagcaccggcagcagagtgcacgccagcagacccgccagcctggacagcggcagaaccagcaccagcaacagcaacaacaacgccagcctgcacgaggtgaaggccggcgccgtgaacaaccagagcagaccccagagccacagcagcggcgagttcagcctgctgcacgaccacgaggcctggagcagcagcggcagcagccccatccagtacctgaagagacagaccagaagcagccccgtgctgcagcacaagatcagcgagaccctggagagcagacaccacaagatcaagaccggcagccccggcagcgaggtggtgaccctgcagcagttcctggaggagagcaacaagctgaccagcgtgcagatcaagagcagcagccaggagaacctgctggacgaggtgatgaagagcctgagcgtgagcagcgacttcctgggcaaggacaagcccgtgagctgcggcctggccagaagcgtgagcggcaagacccccggcgacttctacgacagaagaaccaccaagcccgagttcctgagacccggccccagaaagaccgaggacacctacttcatcagcagcgccggcaagcccacccccggcacccagggcaagatcaagctggtgaaggagagcagcctgagcagacagagcaaggacagcaacccctacgccaccctgcccagagccagcagcgtgatcagcaccgccgagggcaccaccagaagaaccagcatccacgacttcctgaccaaggacagcagactgcccatcagcgtggacagcccccccgccgccgccgacagcaacaccaccgccgccagcaacgtggacaaggtgcaggagagcagaaacagcaagagcagaagcagagagcagcagagcagctag

SEQ ID NO: 50730 - protein, 442 aa, Artificial Sequence
  derived and/or modified sequence
MHYCVLSAFLILHLVTVALSLSTCSTLDMDQFMRKRIEAIRGQILSKLKLTSPPEDYPEPEEVPPEVISIYNSTRDLLQEKASRRAAACERERSDEEYYAKEVYKIDMPPFFPSETVCPVVTTPSGSVGSLCSRQSQVLCGYLDAIPPTFYRPYFRIVRFDVSAMEKNASNLVKAEFRVFRLQNPKARVPEQRIELYQILKSKDLTSPTQRYIDSKVVKTRAEGEWLSFDVTDAVHEWLHHKDRNLGFKISLHCPCCTFVPSNNYIIPNKSEELEARFAGIDGTSTYTSGDQKTIKSTRKKNSGKTPHLLLMLLPSYRLESQQTNRRKKRALDAAYCFRNVQDNCCLRPLYIDFKRDLGWKWIHEPKGYNANFCAGACPYLWSSDTQHSRVLSLYNTINPEASASPCCVSQDLEPLTILYYIGKTPKIEQLSNMIVKSCKCS

SEQ ID NO: 50731 - DNA, 1329 bp, Artificial Sequence
  derived and/or modified sequence
atgcactactgcgtgctgagcgccttcctgatcctgcacctggtgaccgtggccctgagcctgagcacctgcagcaccctggacatggaccagttcatgagaaagagaatcgaggccatcagaggccagatcctgagcaagctgaagctgaccagcccccccgaggactaccccgagcccgaggaggtgccccccgaggtgatcagcatctacaacagcaccagagacctgctgcaggagaaggccagcagaagagccgccgcctgcgagagagagagaagcgacgaggagtactacgccaaggaggtgtacaagatcgacatgccccccttcttccccagcgagaccgtgtgccccgtggtgaccacccccagcggcagcgtgggcagcctgtgcagcagacagagccaggtgctgtgcggctacctggacgccatcccccccaccttctacagaccctacttcagaatcgtgagattcgacgtgagcgccatggagaagaacgccagcaacctggtgaaggccgagttcagagtgttcagactgcagaaccccaaggccagagtgcccgagcagagaatcgagctgtaccagatcctgaagagcaaggacctgaccagccccacccagagatacatcgacagcaaggtggtgaagaccagagccgagggcgagtggctgagcttcgacgtgaccgacgccgtgcacgagtggctgcaccacaaggacagaaacctgggcttcaagatcagcctgcactgcccctgctgcaccttcgtgcccagcaacaactacatcatccccaacaagagcgaggagctggaggccagattcgccggcatcgacggcaccagcacctacaccagcggcgaccagaagaccatcaagagcaccagaaagaagaacagcggcaagaccccccacctgctgctgatgctgctgcccagctacagactggagagccagcagaccaacagaagaaagaagagagccctggacgccgcctactgcttcagaaacgtgcaggacaactgctgcctgagacccctgtacatcgacttcaagagagacctgggctggaagtggatccacgagcccaagggctacaacgccaacttctgcgccggcgcctgcccctacctgtggagcagcgacacccagcacagcagagtgctgagcctgtacaacaccatcaaccccgaggccagcgccagcccctgctgcgtgagccaggacctggagcccctgaccatcctgtactacatcggcaagacccccaagatcgagcagctgagcaacatgatcgtgaagagctgcaagtgcagctag

SEQ ID NO: 50732 - DNA, 1329 bp, Artificial Sequence
  derived and/or modified sequence
atgcattactgcgtcctttcagctttccttatcctgcatttggtgacagtggccctttctctgtctacctgctctactttagacatggatcagtttatgaggaagagaatcgaagccatcagaggtcagattttaagcaagctgaagctcacatcccctccagaggactaccctgaacccgaagaggtgccaccggaagtcatctccatctacaatagcactagggacctgctgcaggaaaaggccagcagacgcgccgctgcgtgtgaaagagagcgctctgatgaggagtactacgccaaggaagtatacaagattgacatgcctccgttttttccttctgagacagtgtgccccgtagtcaccaccccaagtgggagtgtgggatccctgtgcagccgacaatcccaggtgctgtgcggatacctggatgccattcctcctaccttctatcgaccttacttccggatagttcgctttgacgtgtccgctatggagaaaaacgcctcaaacctggtcaaagctgagttccgagttttcagacttcaaaatccaaaagcccgagtgccggaacagaggatcgagttgtaccagatcctgaaatccaaggacctaacaagtcctacacagcggtacatcgattccaaggtcgttaagacccgagctgaaggggagtggctctcttttgacgtgactgacgcggtacacgaatggttgcatcacaaagaccgaaacttaggattcaagattagtctccactgtccctgctgtaccttcgtcccgagcaataactatattatccctaacaaatccgaagaattagaagcccggttcgccggcatcgatggtactagcacctacacgagcggcgaccaaaaaactatcaagagcaccaggaaaaaaaattcgggcaagacaccgcacctgcttctgatgttgctcccctcttatcggctagagagtcagcagaccaaccggcggaagaaacgtgcacttgacgcggcatattgctttcgcaatgtgcaggataattgttgtctccgccccctttacatcgattttaagagagatctcggatggaagtggattcacgaacctaaaggatacaatgctaacttctgtgccggtgcttgtccttacctgtggagttccgacacccagcatagcagggtccttagcctgtataatacaataaacccagaggctagcgccagcccctgctgtgtgagccaagacttggaacctcttactattctttactacatcggcaaaacacctaaaatcgaacaattaagtaacatgattgttaaaagctgcaaatgcagctag

SEQ ID NO: 50733 - DNA, 1329 bp, Artificial Sequence
  derived and/or modified sequence
atgcactactgtgtgctgagcgccttcctgatcctgcacctggtgacagtggccctgagcctgagcacctgcagcaccctggacatggaccagttcatgaggaagagaattgaggccatccggggccagatcctgagcaagctgaagctgaccagccccccagaggactacccagagcctgaggaggtgcccccagaggtgatcagcatctacaacagcacccgggacctgctgcaggagaaggccagccggcgggctgctgcctgtgagcgggagaggagtgatgaggagtactatgccaaggaggtgtacaagattgacatgccacccttcttccccagcgagaccgtgtgccctgtggtgaccaccccatctggctctgtgggcagcctgtgcagccggcagagccaggtgctgtgtggctacctggatgccatcccccccaccttctaccggccctacttcagaattgtgcgctttgatgtgtctgccatggagaagaatgccagcaacctggtgaaggccgagttccgggtcttccggctgcagaaccccaaggcccgggtgcctgagcagagaattgagctgtaccagatcctgaagagcaaggacctgaccagccccacccagcgctacatcgacagcaaggtggtgaagaccagggctgagggggagtggctgagctttgatgtgacagatgctgtgcatgagtggctgcaccacaaggacaggaacctgggcttcaagatcagcctgcactgcccctgctgcacctttgtgcccagcaacaactacatcatccccaacaagtctgaggagctggaggccaggtttgctggcattgatggcaccagcacctacaccagcggggaccagaagaccatcaagagcaccaggaagaagaacagcggcaagaccccccacctgctgctgatgctgctgcccagctaccgcctggagagccagcagaccaacagaaggaagaagagggccctggatgctgcctactgcttcagaaatgtgcaggacaactgctgcctgcggcccctgtacatcgacttcaagagggacctgggctggaagtggatccacgagcccaagggctacaatgccaacttctgtgccggggcctgcccctacctgtggagcagtgacacccagcacagccgggtgctgagcctgtacaacaccatcaaccctgaggccagcgccagcccctgctgcgtgtcccaggacctggagcccctgaccatcctgtactacatcggcaagacccccaagattgagcagctgagcaacatgattgtgaagagctgcaagtgcagctag

SEQ ID NO: 50734 - DNA, 1329 bp, Artificial Sequence
  derived and/or modified sequence
atgcactactgcgtgctgagcgccttcctgatcctgcacctggtgaccgtggccttaagtctgtccacatgttcaacactggatatggaccagtttatgagaaaacggatcgaggccatccgaggtcaaatcctgagcaagctaaagcttaccagtcctccagaggactacccggaacctgaagaagtgccccctgaggtaatctcaatatacaattcgacacgcgacctgctccaggagaaggcaagcagacgagccgcagcatgcgaacgggagcgctccgatgaggagtattacgctaaagaggtgtataaaattgacatgcccccattcttcccttcagaaacggtatgtccagtggtgaccaccccatctggctccgtagggtctctgtgttcccgtcaatcacaggtgctctgtgggtatcttgacgcaatccccccaactttttataggccttattttcggattgtgcgtttcgacgtcagcgctatggagaaaaacgcttccaatctggtgaaggccgagttcagagtcttccgcctccaaaacccaaaggctcgggtgcccgaacagcggattgaactctaccagatcttgaaaagtaaagacctcacatctcccacgcaacgttatattgattcaaaagtcgttaagactcgggcggagggcgagtggctgtcattcgacgtgacggacgccgtgcacgagtggctgcaccacaaggatagaaatttgggtttcaagatctcccttcattgtccatgctgcacgttcgtgccctctaacaattacatcattccaaataagtccgaagagcttgaggcccgatttgccggaattgacggtacctctacctacacttctggggatcaaaagacaatcaaaagcacaaggaaaaagaactccggcaagactcctcacctgttactcatgctattaccaagctaccgattggaatcccaacagacaaaccgtaggaagaagagggcgcttgatgccgcatattgcttcaggaacgtgcaggataattgctgcttaagaccattatacattgacttcaaacgagatctcggctggaagtggatccacgagcctaaggggtacaacgcgaatttttgtgccggggcatgcccctacctctggtcctcggacacacaacatagcagggtgctgagcctctacaatacaattaatcccgaggcaagcgcatctccctgttgtgtgtcacaagacttagagccgctgacaatcctttactatatcggaaagacccctaaaatcgagcagctgtctaacatgatcgttaaatcttgcaagtgttcttag

SEQ ID NO: 50735 - DNA, 1329 bp, Artificial Sequence
  derived and/or modified sequence
atgcactactgtgtgttatcagcatttctaatcctgcacttggttactgttgccttgtccctctcaacttgttctacactggatatggatcagttcatgcggaagcgcatcgaggccatcagggggcagattttgtccaaattgaaacttactagtccacctgaagattatcccgaacccgaagaggttcccccagaggtcatctctatatataacagcacccgcgatttgctgcaggagaaagcttcaaggagagctgcagcatgcgaacgggaacggtctgacgaagagtattatgctaaagaagtttacaagattgatatgcctccgtttttcccatcagagacagtttgtcccgtcgtgacgaccccttccgggtccgtcggcagtttatgctcaaggcaaagccaggtgctttgtggctacctcgatgccatacctcctactttctatcggccttactttagaatcgtgcggttcgatgtgagcgccatggaaaaaaatgcttctaacctcgttaaagccgagttccgagtattccgactacaaaatcctaaggcaagggtaccagagcaacgcattgaactctaccagatactgaagtctaaggacctgacatcgcctacacagagatacatcgactctaaagtggtaaaaactagagccgaaggcgaatggctgagctttgatgtcactgacgccgtgcacgagtggttgcaccataaagacaggaacctgggctttaaaatctctcttcattgcccttgctgtacgttcgttccatcaaacaattacatcatccccaacaaatcagaggagcttgaggccagatttgcgggaattgatggcacctccacatatacgagcggtgaccagaaaacaattaagtccacaaggaaaaagaatagtggtaagaccccgcacctgctgctcatgctgctgccgtcctatagactggagtcgcaacagaccaatcggagaaagaagagggcattggacgcagcgtactgtttccgcaacgttcaggacaattgttgcctgaggcctttatatatcgattttaagagggaccttggctggaagtggattcatgagccaaaaggctacaacgcaaatttctgtgccggagcctgtccatacctttggtcctccgacacacagcattctcgcgtgttgtccttatataataccattaatcccgaggcctcggcctccccttgctgcgttagtcaggacttggaacccttgacaatcctgtattacatagggaaaacacctaaaatagaacagctgagcaatatgatcgtgaaaagctgcaaatgtagttag

SEQ ID NO: 50736 - DNA, 5053 bp, Artificial Sequence
  derived and/or modified sequence
gcccctcccgtcagttcgccagctgccagccccgggaccttttcatctcttcccttttggccggaggagccgagttcagatccgccactccgcacccgagactgacacactgaactccacttcctcctcttaaatttatttctacttaatagccactcgtctctttttttccccatctcattgctccaagaatttttttcttcttactcgccaaagtcagggttccctctgcccgtcccgtattaatatttccacttttggaactactggccttttctttttaaaggaattcaagcaggatacgtttttctgttgggcattgactagattgtttgcaaaagtttcgcatcaaaaacaacaacaacaaaaaaccaaacaactctccttgatctatactttgagaattgttgatttcttttttttattctgacttttaaaaacaacttttttttccacttttttaaaaaatgcactactgtgtgctgagcgcttttctgatcctgcatctggtcacggtcgcgctcagcctgtctacctgcagcacactcgatatggaccagttcatgcgcaagaggatcgaggcgatccgcgggcagatcctgagcaagctgaagctcaccagtcccccagaagactatcctgagcccgaggaagtccccccggaggtgatttccatctacaacagcaccagggacttgctccaggagaaggcgagccggagggcggccgcctgcgagcgcgagaggagcgacgaagagtactacgccaaggaggtttacaaaatagacatgccgcccttcttcccctccgaaactgtctgcccagttgttacaacaccctctggctcagtgggcagcttgtgctccagacagtcccaggtgctctgtgggtaccttgatgccatcccgcccactttctacagaccctacttcagaattgttcgatttgacgtctcagcaatggagaagaatgcttccaatttggtgaaagcagagttcagagtctttcgtttgcagaacccaaaagccagagtgcctgaacaacggattgagctatatcagattctcaagtccaaagatttaacatctccaacccagcgctacatcgacagcaaagttgtgaaaacaagagcagaaggcgaatggctctccttcgatgtaactgatgctgttcatgaatggcttcaccataaagacaggaacctgggatttaaaataagcttacactgtccctgctgcacttttgtaccatctaataattacatcatcccaaataaaagtgaagaactagaagcaagatttgcaggtattgatggcacctccacatataccagtggtgatcagaaaactataaagtccactaggaaaaaaaacagtgggaagaccccacatctcctgctaatgttattgccctcctacagacttgagtcacaacagaccaaccggcggaagaagcgtgctttggatgcggcctattgctttagaaatgtgcaggataattgctgcctacgtccactttacattgatttcaagagggatctagggtggaaatggatacacgaacccaaagggtacaatgccaacttctgtgctggagcatgcccgtatttatggagttcagacactcagcacagcagggtcctgagcttatataataccataaatccagaagcatctgcttctccttgctgcgtgtcccaagatttagaacctctaaccattctctactacattggcaaaacacccaagattgaacagctttctaatatgattgtaaagtcttgcaaatgcagctaaaattcttggaaaagtggcaagaccaaaatgacaatgatgatgataatgatgatgacgacgacaacgatgatgcttgtaacaagaaaacataagagagccttggttcatcagtgttaaaaaatttttgaaaaggcggtactagttcagacactttggaagtttgtgttctgtttgttaaaactggcatctgacacaaaaaaagttgaaggccttattctacatttcacctactttgtaagtgagagagacaagaagcaaattttttttaaagaaaaaaataaacactggaagaatttattagtgttaattatgtgaacaacgacaacaacaacaacaacaacaaacaggaaaatcccattaagtggagttgctgtacgtaccgttcctatcccgcgcctcacttgatttttctgtattgctatgcaataggcacccttcccattcttactcttagagttaacagtgagttatttattgtgtgttactatataatgaacgtttcattgcccttggaaaataaaacaggtgtataaagtggagaccaaatactttgccagaaactcatggatggcttaaggaacttgaactcaaacgagccagaaaaaaagaggtcatattaatgggatgaaaacccaagtgagttattatatgaccgagaaagtctgcattaagataaagaccctgaaaacacatgttatgtatcagctgcctaaggaagcttcttgtaaggtccaaaaactaaaaagactgttaataaaagaaactttcagtcagaataagtctgtaagtttttttttttctttttaattgtaaatggttctttgtcagtttagtaaaccagtgaaatgttgaaatgttttgacatgtactggtcaaacttcagaccttaaaatattgctgtatagctatgctataggttttttcctttgttttggtatatgtaaccatacctatattattaaaatagatggatatagaagccagcataattgaaaacacatctgcagatctcttttgcaaactattaaatcaaaacattaactactttatgtgtaatgtgtaaatttttaccatattttttatattctgtaataatgtcaactatgatttagattgacttaaatttgggctctttttaatgatcactcacaaatgtatgtttcttttagctggccagtacttttgagtaaagcccctatagtttgacttgcactacaaatgcattttttttttaataacatttgccctacttgtgctttgtgtttctttcattattatgacataagctacctgggtccacttgtcttttcttttttttgtttcacagaaaagatgggttcgagttcagtggtcttcatcttccaagcatcattactaaccaagtcagacgttaacaaatttttatgttaggaaaaggaggaatgttatagatacatagaaaattgaagtaaaatgttttcattttagcaaggatttagggttctaactaaaactcagaatctttattgagttaagaaaagtttctctaccttggtttaatcaatatttttgtaaaatcctattgttattacaaagaggacacttcataggaaacatctttttctttagtcaggtttttaatattcagggggaaattgaaagatatatattttagtcgatttttcaaaaggggaaaaaagtccaggtcagcataagtcattttgtgtatttcactgaagttataaggtttttataaatgttctttgaaggggaaaaggcacaagccaatttttcctatgatcaaaaaattctttctttcctctgagtgagagttatctatatctgaggctaaagtttaccttgctttaataaataatttgccacatcattgcagaagaggtatcctcatgctggggttaatagaatatgtcagtttatcacttgtcgcttatttagctttaaaataaaaattaataggcaaagcaatggaatatttgcagtttcacctaaagagcagcataaggaggcgggaatccaaagtgaagttgtttgatatggtctacttcttttttggaatttcctgaccattaattaaagaattggatttgcaagtttgaaaactggaaaagcaagagatgggatgccataatagtaaacagcccttgtgttggatgtaacccaatcccagatttgagtgtgtgttgattatttttttgtcttccacttttctattatgtgtaaatcacttttatttctgcagacattttcctctcagataggatgacattttgttttgtattattttgtctttcctcatgaatgcactgataatattttaaatgctctattttaagatctcttgaatctgttttttttttttttaatttgggggttctgtaaggtctttatttcccataagtaaatattgccatgggaggggggtggaggtggcaaggaaggggtgaagtgctagtatgcaagtgggcagcaattatttttgtgttaatcagcagtacaatttgatcgttggcatggttaaaaaatggaatataagattagctgttttgtattttgatgaccaattacgctgtattttaacacgatgtatgtctgtttttgtggtgctctagtggtaaataaattatttcgatgatatgtggatgtctttttcctatcagtaccatcatcgagtctagaaaacacctgtgatgcaataagactatctcaagctggaaaagtcataccacctttccgattgccctctgtgctttctcccttaaggacagtcacttcagaagtcatgctttaaagcacaagagtcaggccatatccatcaaggatagaagaaatccctgtgccgtctttttattcccttatttattgctatttggtaattgtttgagatttagtttccatccagcttgactgccgaccagaaaaaatgcagagagatgtttgcaccatgctttggctttctggttctatgttctgccaacgccagggccaaaagaactggtctagacagtatcccctgtagccccataacttggatagttgctgagccagccagatataacaagagccacgtgctttctggggttggttgtttgggatcagctacttgcctgtcagtttcactggtaccactgcaccacaaacaaaaaaacccaccctatttcctccaatttttttggctgctacctacaagaccagactcctcaaacgagttgccaatctcttaataaataggattaataaaaaaagtaattgtgactcaa

SEQ ID NO: 50737 - DNA, 5966 bp, Artificial Sequence
  derived and/or modified sequence
gtgatgttatctgctggcagcagaaggttcgctccgagcggagctccagaagctcctgacaagagaaagacagattgagatagagatagaaagagaaagagagaaagagacagcagagcgagagcgcaagtgaaagaggcaggggagggggatggagaatattagcctgacggtctagggagtcatccaggaacaaactgaggggctgcccggctgcagacaggaggagacagagaggatctattttagggtggcaagtgcctacctaccctaagcgagcaattccacgttggggagaagccagcagaggttgggaaagggtgggagtccaagggagcccctgcgcaaccccctcaggaataaaactccccagccagggtgtcgcaagggctgccgttgtgatccgcagggggtgaacgcaaccgcgacggctgatcgtctgtggctgggttggcgtttggagcaagagaaggaggagcaggagaaggagggagctggaggctggaagcgtttgcaagcggcggcggcagcaacgtggagtaaccaagcgggtcagcgcgcgcccgccagggtgtaggccacggagcgcagctcccagagcaggatccgcgccgcctcagcagcctctgcggcccctgcggcacccgaccgagtaccgagcgccctgcgaagcgcaccctcctccccgcggtgcgctgggctcgcccccagcgcgcgcacacgcacacacacacacacacacacacacgcacgcacacacgtgtgcgcttctctgctccggagctgctgctgctcctgctctcagcgccgcagtggaaggcaggaccgaaccgctccttctttaaatatataaatttcagcccaggtcagcctcggcggcccccctcaccgcgctcccggcgcccctcccgtcagttcgccagctgccagccccgggaccttttcatctcttcccttttggccggaggagccgagttcagatccgccactccgcacccgagactgacacactgaactccacttcctcctcttaaatttatttctacttaatagccactcgtctctttttttccccatctcattgctccaagaatttttttcttcttactcgccaaagtcagggttccctctgcccgtcccgtattaatatttccacttttggaactactggccttttctttttaaaggaattcaagcaggatacgtttttctgttgggcattgactagattgtttgcaaaagtttcgcatcaaaaacaacaacaacaaaaaaccaaacaactctccttgatctatactttgagaattgttgatttcttttttttattctgacttttaaaaacaacttttttttccacttttttaaaaaatgcactactgtgtgctgagcgcttttctgatcctgcatctggtcacggtcgcgctcagcctgtctacctgcagcacactcgatatggaccagttcatgcgcaagaggatcgaggcgatccgcgggcagatcctgagcaagctgaagctcaccagtcccccagaagactatcctgagcccgaggaagtccccccggaggtgatttccatctacaacagcaccagggacttgctccaggagaaggcgagccggagggcggccgcctgcgagcgcgagaggagcgacgaagagtactacgccaaggaggtttacaaaatagacatgccgcccttcttcccctccgaaactgtctgcccagttgttacaacaccctctggctcagtgggcagcttgtgctccagacagtcccaggtgctctgtgggtaccttgatgccatcccgcccactttctacagaccctacttcagaattgttcgatttgacgtctcagcaatggagaagaatgcttccaatttggtgaaagcagagttcagagtctttcgtttgcagaacccaaaagccagagtgcctgaacaacggattgagctatatcagattctcaagtccaaagatttaacatctccaacccagcgctacatcgacagcaaagttgtgaaaacaagagcagaaggcgaatggctctccttcgatgtaactgatgctgttcatgaatggcttcaccataaagacaggaacctgggatttaaaataagcttacactgtccctgctgcacttttgtaccatctaataattacatcatcccaaataaaagtgaagaactagaagcaagatttgcaggtattgatggcacctccacatataccagtggtgatcagaaaactataaagtccactaggaaaaaaaacagtgggaagaccccacatctcctgctaatgttattgccctcctacagacttgagtcacaacagaccaaccggcggaagaagcgtgctttggatgcggcctattgctttagaaatgtgcaggataattgctgcctacgtccactttacattgatttcaagagggatctagggtggaaatggatacacgaacccaaagggtacaatgccaacttctgtgctggagcatgcccgtatttatggagttcagacactcagcacagcagggtcctgagcttatataataccataaatccagaagcatctgcttctccttgctgcgtgtcccaagatttagaacctctaaccattctctactacattggcaaaacacccaagattgaacagctttctaatatgattgtaaagtcttgcaaatgcagctaaaattcttggaaaagtggcaagaccaaaatgacaatgatgatgataatgatgatgacgacgacaacgatgatgcttgtaacaagaaaacataagagagccttggttcatcagtgttaaaaaatttttgaaaaggcggtactagttcagacactttggaagtttgtgttctgtttgttaaaactggcatctgacacaaaaaaagttgaaggccttattctacatttcacctactttgtaagtgagagagacaagaagcaaattttttttaaagaaaaaaataaacactggaagaatttattagtgttaattatgtgaacaacgacaacaacaacaacaacaacaaacaggaaaatcccattaagtggagttgctgtacgtaccgttcctatcccgcgcctcacttgatttttctgtattgctatgcaataggcacccttcccattcttactcttagagttaacagtgagttatttattgtgtgttactatataatgaacgtttcattgcccttggaaaataaaacaggtgtataaagtggagaccaaatactttgccagaaactcatggatggcttaaggaacttgaactcaaacgagccagaaaaaaagaggtcatattaatgggatgaaaacccaagtgagttattatatgaccgagaaagtctgcattaagataaagaccctgaaaacacatgttatgtatcagctgcctaaggaagcttcttgtaaggtccaaaaactaaaaagactgttaataaaagaaactttcagtcagaataagtctgtaagtttttttttttctttttaattgtaaatggttctttgtcagtttagtaaaccagtgaaatgttgaaatgttttgacatgtactggtcaaacttcagaccttaaaatattgctgtatagctatgctataggttttttcctttgttttggtatatgtaaccatacctatattattaaaatagatggatatagaagccagcataattgaaaacacatctgcagatctcttttgcaaactattaaatcaaaacattaactactttatgtgtaatgtgtaaatttttaccatattttttatattctgtaataatgtcaactatgatttagattgacttaaatttgggctctttttaatgatcactcacaaatgtatgtttcttttagctggccagtacttttgagtaaagcccctatagtttgacttgcactacaaatgcattttttttttaataacatttgccctacttgtgctttgtgtttctttcattattatgacataagctacctgggtccacttgtcttttcttttttttgtttcacagaaaagatgggttcgagttcagtggtcttcatcttccaagcatcattactaaccaagtcagacgttaacaaatttttatgttaggaaaaggaggaatgttatagatacatagaaaattgaagtaaaatgttttcattttagcaaggatttagggttctaactaaaactcagaatctttattgagttaagaaaagtttctctaccttggtttaatcaatatttttgtaaaatcctattgttattacaaagaggacacttcataggaaacatctttttctttagtcaggtttttaatattcagggggaaattgaaagatatatattttagtcgatttttcaaaaggggaaaaaagtccaggtcagcataagtcattttgtgtatttcactgaagttataaggtttttataaatgttctttgaaggggaaaaggcacaagccaatttttcctatgatcaaaaaattctttctttcctctgagtgagagttatctatatctgaggctaaagtttaccttgctttaataaataatttgccacatcattgcagaagaggtatcctcatgctggggttaatagaatatgtcagtttatcacttgtcgcttatttagctttaaaataaaaattaataggcaaagcaatggaatatttgcagtttcacctaaagagcagcataaggaggcgggaatccaaagtgaagttgtttgatatggtctacttcttttttggaatttcctgaccattaattaaagaattggatttgcaagtttgaaaactggaaaagcaagagatgggatgccataatagtaaacagcccttgtgttggatgtaacccaatcccagatttgagtgtgtgttgattatttttttgtcttccacttttctattatgtgtaaatcacttttatttctgcagacattttcctctcagataggatgacattttgttttgtattattttgtctttcctcatgaatgcactgataatattttaaatgctctattttaagatctcttgaatctgttttttttttttttaatttgggggttctgtaaggtctttatttcccataagtaaatattgccatgggaggggggtggaggtggcaaggaaggggtgaagtgctagtatgcaagtgggcagcaattatttttgtgttaatcagcagtacaatttgatcgttggcatggttaaaaaatggaatataagattagctgttttgtattttgatgaccaattacgctgtattttaacacgatgtatgtctgtttttgtggtgctctagtggtaaataaattatttcgatgatatgtggatgtctttttcctatcagtaccatcatcgagtctagaaaacacctgtgatgcaataagactatctcaagctggaaaagtcataccacctttccgattgccctctgtgctttctcccttaaggacagtcacttcagaagtcatgctttaaagcacaagagtcaggccatatccatcaaggatagaagaaatccctgtgccgtctttttattcccttatttattgctatttggtaattgtttgagatttagtttccatccagcttgactgccgaccagaaaaaatgcagagagatgtttgcaccatgctttggctttctggttctatgttctgccaacgccagggccaaaagaactggtctagacagtatcccctgtagccccataacttggatagttgctgagccagccagatataacaagagccacgtgctttctggggttggttgtttgggatcagctacttgcctgtcagtttcactggtaccactgcaccacaaacaaaaaaacccaccctatttcctccaatttttttggctgctacctacaagaccagactcctcaaacgagttgccaatctcttaataaataggattaataaaaaaagtaattgtgactcaaaaaaaaaaaaaa

SEQ ID NO: 50738 - protein, 546 aa, Artificial Sequence
  derived and/or modified sequence
MPGFLVRILPLLLVLLLLGPTRGLRNATQRMFEIDYSRDSFLKDGQPFRYISGSIHYSRVPRFYWKDRLLKMKMAGLNAIQTLPGSCGQVVGSPSAQDEASPLSEWRASYNSAGSNITDAFLSQRKCEPKGPLINSEFYTGWLDHWGQPHSTIKTEAVASSLYDILARGASVNLYMFIGGTNFAYWNGANSPYAAQPTSYDYDAPLSEAGDLTEKYFALRNIIQKFEKVPEGPIPPSTPKFAYGKVTLEKLKTVGAALDILCPSGPIKSLYPLTFIQVKQHYGFVLYRTTLPQDCSNPAPLSSPLNGVHDRAYVAVDGIPQGVLERNNVITLNITGKAGATLDLLVENMGRVNYGAYINDFKGLVSNLTLSSNILTDWTIFPLDTEDAVCSHLGGWGHRDSGHHDEAWAHNSSNYTLPAFYMGNFSIPSGIPDLPQDTFIQFPGWTKGQVWINGFNLGRYWPARGPQLTLFVPQHILMTSAPNTITVLELEWAPCSSDDPELCAVTFVDRPVIGSSVTYDHPSKPVEKRLMPPPPQKNKDSWLDHV

SEQ ID NO: 50739 - DNA, 2018 bp, Artificial Sequence
  derived and/or modified sequence
agtcaagtgacgcgaagcggccggcctgggcgccgactgcagagccgggaggctggtggtcatgccggggttcctggttcgcatcctccctctgttgctggttctgctgcttctgggccctacgcgcggcttgcgcaatgccacccagaggatgtttgaaattgactatagccgggactccttcctcaaggatggccagccatttcgctacatctcaggaagcattcactactcccgtgtgccccgcttctactggaaggaccggctgctgaagatgaagatggctgggctgaacgccatccagacattacctggcagctgtggacaagtggttgggagtccttctgcccaagatgaagcctctcctctatcagaatggagggccagttataacagtgcaggcagcaacatcacagatgctttcctaagccagaggaagtgtgagcccaaaggacccttgatcaattctgaattctatactggctggctagatcactggggccaacctcactccacaatcaagaccgaagcagtggcttcctccctctatgatatacttgcccgtggggcgagtgtgaacttgtacatgtttataggtgggaccaattttgcctattggaatggggccaactcaccctatgcagcacagcccaccagctacgactatgatgccccactgagtgaggctggggacctcactgagaagtattttgctctgcgaaacatcatccagaagtttgaaaaagtaccagaaggtcctatccctccatctacaccaaagtttgcatatggaaaggtcactttggaaaagttaaagacagtgggagcagctctggacattctgtgtccctctgggcccatcaaaagcctttatcccttgacatttatccaggtgaaacagcattatgggtttgtgctgtaccggacaacacttcctcaagattgcagcaacccagcacctctctcttcacccctcaatggagtccacgatcgagcatatgttgctgtggatgggatcccccagggagtccttgagcgaaacaatgtgatcactctgaacataacagggaaagctggagccactctggaccttctggtagagaacatgggacgtgtgaactatggtgcatatatcaacgattttaagggtttggtttctaacctgactctcagttccaatatcctcacggactggacgatctttccactggacactgaggatgcagtgtgcagccacctggggggctggggacaccgtgacagtggccaccatgatgaagcctgggcccacaactcatccaactacacgctcccggccttttatatggggaacttctccattcccagtgggatcccagacttgccccaggacacctttatccagtttcctggatggaccaagggccaggtctggattaatggctttaaccttggccgctattggccagcccggggccctcagttgaccttgtttgtgccccagcacatcctgatgacctcggccccaaacaccatcaccgtgctggaactggagtgggcaccctgcagcagtgatgatccagaactatgtgctgtgacgttcgtggacaggccagttattggctcatctgtgacctacgatcatccctccaaacctgttgaaaaaagactcatgcccccacccccgcaaaaaaacaaagattcatggctggaccatgtatgatgatgaaagcctgtgtctttgagggattctaccctgaacatacctcacagatcctccctgtcatgccacatttcactgattggaatgtggaaatggaaaaggaatttaggatgtgcattttcacctgaggtttccctgcatccctgcagtgccaaagccccaccttcagggaccacctggaatgtgtgaggggctgacagcacagtaacgtgcatacatatctgcagggctggaatggaagctttaaaggtggtagtgatttttattttggaagaatcatgttacctttttgttaaataaaatttgtactcaaatg

SEQ ID NO: 50740 - DNA, 1641 bp, Artificial Sequence
  derived and/or modified sequence
atgccagggttcctggtgcgtatcctgcctctgttattggtgctgctgctgctgggtcctacaaggggtctccgcaatgctacgcaacgaatgttcgaaatagactattctcgggattcattcctcaaggatggccagccatttcgctatatcagtggatctatccactattccagagtgcctcggttctactggaaagaccggctccttaagatgaagatggccggtttaaatgcaatccaaaccttgcccggctcctgcgggcaggtggtgggaagccccagtgcccaggatgaggccagtcccctgtccgagtggagagcttcgtacaacagtgccgggagcaacatcactgatgcatttctgtcccagcggaaatgtgaacccaaaggaccactgataaattccgagttctatactgggtggctcgatcactggggccagccccatagcactataaaaactgaggctgtcgcctcaagtctgtacgacatattggcacgcggcgccagcgtgaatctttatatgtttattggcggtactaacttcgcatattggaatggtgccaactcaccttacgccgcacagcccaccagctatgactacgatgccccactgagcgaggccggagatcttaccgagaaatatttcgccctgagaaatatcatccagaagttcgaaaaggtccccgaaggcccaattcctccctcaacaccaaaatttgcatacggtaaggtcaccctcgagaagctgaagaccgttggagccgctcttgacattctgtgccctagcggacctattaagtccctgtaccctctgacattcattcaggttaagcagcattatggtttcgttctttaccgcacgaccctgcctcaggactgctcaaaccctgcacctctgtcctcccctctgaatggggtccacgatcgcgcctatgtcgcagtagatggcatcccccagggagtgcttgaaagaaacaacgtgatcacattaaacatcactgggaaagctggtgccactttggatttgctggtggaaaatatgggacgcgtgaactatggcgcatacataaatgacttcaagggtctggtctccaatctgacactatccagtaacattctcaccgactggaccattttccctctagacactgaagacgcggtgtgctctcatctggggggatggggacaccgggattccggacaccatgacgaagcttgggcccataattcctccaactacacgttgccggcattttatatgggaaatttcagcattccatctggtatcccagacttaccccaagatacttttattcagtttcccggctggacaaagggtcaggtatggattaacgggttcaacttaggccgctactggcctgcccgaggcccccagttgacactgttcgtgccccagcatatcttgatgacctccgctcctaataccattaccgtgctggaactggaatgggccccgtgcagttctgacgatcctgaactctgtgccgtaacttttgtggaccgaccagtgattgggagcagcgtgacctatgaccatccctcgaagcccgtggagaagcgacttatgcctcctccgccacagaagaacaaggatagctggctcgaccatgtgtag

SEQ ID NO: 50741 - DNA, 1641 bp, Artificial Sequence
  derived and/or modified sequence
atgcctggcttcctggtgcgcatcctgcccctgctgctggtgctgctgctgctgggccccacccggggcctgagaaatgccacccagaggatgtttgaaattgactacagccgggacagcttcctgaaggatggccagcccttccgctacatcagcggcagcatccactacagccgggtgccccgcttctactggaaggaccggctgctgaagatgaagatggccggcctgaatgccatccagaccctgcccggcagctgtggccaggtggtgggcagccccagcgcccaggatgaggccagccccctgtctgagtggagggccagctacaacagcgctggcagcaacatcacagatgccttcctgagccagaggaaatgtgagcccaagggccccctcatcaacagcgagttctacacaggctggctggaccactggggccagccccacagcaccatcaagacagaagctgtggccagcagcctgtatgacatcctggcccggggggcctctgtgaacctgtacatgttcatcggcggcaccaactttgcctactggaatggagccaacagcccctatgctgcccagcccaccagctatgactatgatgcccccctgtctgaggccggggacctgacagagaagtactttgccctgaggaacatcatccagaagtttgagaaggtgcctgagggccccatcccccccagcacccccaagtttgcctacggcaaggtgaccctggagaagctgaagacagtgggcgccgccctggacatcctgtgccccagcggccccatcaagagcctgtaccccctgaccttcatccaggtgaagcagcactacggctttgtgctgtaccgcaccaccctgccccaggactgcagcaacccagcccccctgagcagccccctgaatggagtgcatgaccgggcctacgtggccgtggatggcatcccccagggcgtgctggagaggaacaacgtcatcaccctgaacatcaccgggaaggccggggccaccctggacctgctggtggagaacatgggccgggtgaactacggggcctacatcaatgacttcaagggcctggtgagcaacctgaccctgagcagcaacatcctgacagactggaccatcttccccctggacacagaagatgctgtgtgcagccacctgggcggctggggccaccgggacagcggccaccatgatgaggcctgggcccacaacagcagcaactacaccctgcctgccttctacatgggcaacttcagcatccccagcggcatcccagacctgccccaggacaccttcatccagtttcctggctggaccaagggccaggtgtggatcaatggcttcaacctgggccgctactggccagcccggggcccccagctgaccctgtttgtgccccagcacatcctgatgaccagcgcccccaacaccatcaccgtgctggagctggagtgggccccctgcagcagtgatgatcctgagctgtgtgctgtgacctttgtggacaggcctgtgattggcagctctgtgacctatgaccaccccagcaagcctgtggagaagaggctgatgcctcctccaccccagaagaacaaggacagctggctggaccacgtgtag

SEQ ID NO: 50742 - DNA, 1641 bp, Artificial Sequence
  derived and/or modified sequence
atgcccggcttcctggtgcggatcctgcccctgctgctggtgctgctcctcctcggtcccaccagaggtctgagaaacgccacgcagagaatgtttgagatagactactctagagactctttcctgaaggatggacaaccgtttcggtacatatcggggagcatacactattcccgcgtgccgaggttctactggaaagatcggctgctaaagatgaaaatggccggcctgaacgcaatccagactctcccgggctcctgtggacaagtggtgggctctccctcagcacaggacgaggcttcgcctctgtccgagtggagagcttcttacaattctgctggctcaaatatcacagacgcattcctgtcccagaggaaatgcgaacctaagggacccctcatcaactcagagttctacacaggctggcttgaccactgggggcaaccccattcaacaattaagacagaagcagtggccagtagtctttacgacattctcgcaagaggcgctagcgttaatctttatatgtttatcggtggcactaattttgcctattggaatggggcaaattctccctacgcagcccagcccacctcttacgattacgacgctcccttgtcagaagctggtgatctgaccgagaaatatttcgccctgcggaatatcatccagaagttcgagaaggtgcccgagggaccaatccctccttcaacccccaaattcgcctacgggaaagtgaccctggagaaactgaaaactgtaggggctgcactggacatactgtgtccctcaggtcccattaaaagcctttatccactgacttttattcaggtcaaacagcattacgggttcgtcctctaccgaactactctacctcaggactgttcgaatcctgcccccttaagcagccctctaaacggggttcatgaccgcgcctacgtggcggttgatggcattcctcagggcgtgctggaacggaataatgtcatcacactgaacatcacagggaaggccggcgctacacttgatctcctggtcgaaaacatgggacgggtcaattacggcgcatatatcaacgattttaagggtctcgtctccaacctaaccctgagctccaacattctcactgactggacaatcttcccattagacactgaagacgccgtctgcagccatctcggggggtggggacaccgagacagcggccatcacgatgaggcctgggctcacaactcaagcaactacaccctgccggccttttacatgggaaacttcagcataccatctggaatccctgacctgcctcaggatacatttatccagtttcccggatggaccaaggggcaggtgtggattaacggattcaatctgggccgttactggcccgctcgcggacctcagctgacactgttcgtgccacaacacatcctgatgacatccgcccctaatactatcactgtgcttgagctagagtgggcaccttgttcatctgacgaccctgaactttgtgctgtgacctttgttgatagacctgtcattgggtcatctgtaacgtatgaccatccctccaagcctgtggaaaagcgacttatgcctcctcctccacagaaaaacaaggattcctggctcgaccatgtttag

SEQ ID NO: 50743 - DNA, 1641 bp, Artificial Sequence
  derived and/or modified sequence
atgccgggattccttgtccggatactaccgctgctcctagtgcttctacttcttggaccaactagaggcctcagaaacgccacgcaacgaatgttcgagatcgactactccagagacagtttcctgaaggacggtcagcccttcaggtatatcagcgggtctattcactacagccgcgttcctaggttctactggaaggatcgtctactgaagatgaaaatggccggactgaatgcaatccaaaccctgcctggctcttgtgggcaggtagtggggtctccatcagctcaggatgaggcgtctcctctgtcggagtggagagcatcttataattccgctggaagtaacattaccgatgcgtttttgtcccagcgcaagtgcgaacccaaaggccctctaattaatagcgaattctacactggatggctcgaccactggggccagcctcattctactattaaaaccgaagctgtggcctcctccctatacgacatccttgccaggggcgcatctgtcaacctgtatatgttcatagggggaacgaactttgcctattggaatggggctaattcgccctacgccgcacagcccacctcctacgattacgatgccccactgagcgaggccggagacctgacggaaaaatacttcgcactgagaaacatcatccagaagttcgagaaggtgccagagggaccaatccctcccagcacaccaaaatttgcctacggaaaagttactttggaaaagctgaagactgttggtgctgcactggacatcctgtgcccatccgggccaatcaagagtctatacccattaaccttcatccaggtgaagcagcactatgggtttgtcctatacaggaccacgctccctcaggattgttcaaaccccgcaccactctcgtcacccctgaacggtgtccatgaccgagcttatgtggctgtggacggcatcccccaaggcgtcctggagcgaaacaatgtgattacactcaacattaccggcaaggccggagccacattggatctcctggtcgagaacatgggcagggtgaattacggagcatatatcaacgactttaagggtttggtgtcaaacctgaccctgtcttctaatatcctgactgactggactatcttccctttggataccgaggacgcagtctgctcccatcttgggggatggggacatcgagattctggccaccacgatgaggcatgggctcataatagttctaattatacccttccggcattctatatgggaaattttagtatcccatcgggcatacccgatcttccacaggatacatttattcagttccccggttggactaaaggccaggtgtggatcaatggatttaatctgggacggtactggcccgcaaggggcccacaactgacgctgttcgtgccccagcatatccttatgacatctgcaccgaatacaattacagtattggaactggagtgggctccttgcagtagcgatgatcctgagctgtgtgccgtgacttttgttgataggcccgtaatagggtcctcagtgacctacgatcatcctagtaagccagttgaaaaaaggcttatgccacccccaccacagaagaacaaggattcctggctagaccacgtgtag

SEQ ID NO: 50744 - DNA, 1641 bp, Artificial Sequence
  derived and/or modified sequence
atgcccggcttcctggtgagaatcctgcccctgctgctggtgctgctgctgctgggccccaccagaggcctgagaaacgccacccagagaatgttcgagatcgactacagcagagacagcttcctgaaggacggccagcccttcagatacatcagcggcagcatccactacagcagagtgcccagattctactggaaggacagactgctgaagatgaagatggccggcctgaacgccatccagaccctgcccggcagctgcggccaggtggtgggcagccccagcgcccaggacgaggccagccccctgagcgagtggagagccagctacaacagcgccggcagcaacatcaccgacgccttcctgagccagagaaagtgcgagcccaagggccccctgatcaacagcgagttctacaccggctggctggaccactggggccagccccacagcaccatcaagaccgaggccgtggccagcagcctgtacgacatcctggccagaggcgccagcgtgaacctgtacatgttcatcggcggcaccaacttcgcctactggaacggcgccaacagcccctacgccgcccagcccaccagctacgactacgacgcccccctgagcgaggccggcgacctgaccgagaagtacttcgccctgagaaacatcatccagaagttcgagaaggtgcccgagggccccatcccccccagcacccccaagttcgcctacggcaaggtgaccctggagaagctgaagaccgtgggcgccgccctggacatcctgtgccccagcggccccatcaagagcctgtaccccctgaccttcatccaggtgaagcagcactacggcttcgtgctgtacagaaccaccctgccccaggactgcagcaaccccgcccccctgagcagccccctgaacggcgtgcacgacagagcctacgtggccgtggacggcatcccccagggcgtgctggagagaaacaacgtgatcaccctgaacatcaccggcaaggccggcgccaccctggacctgctggtggagaacatgggcagagtgaactacggcgcctacatcaacgacttcaagggcctggtgagcaacctgaccctgagcagcaacatcctgaccgactggaccatcttccccctggacaccgaggacgccgtgtgcagccacctgggcggctggggccacagagacagcggccaccacgacgaggcctgggcccacaacagcagcaactacaccctgcccgccttctacatgggcaacttcagcatccccagcggcatccccgacctgccccaggacaccttcatccagttccccggctggaccaagggccaggtgtggatcaacggcttcaacctgggcagatactggcccgccagaggcccccagctgaccctgttcgtgccccagcacatcctgatgaccagcgcccccaacaccatcaccgtgctggagctggagtgggccccctgcagcagcgacgaccccgagctgtgcgccgtgaccttcgtggacagacccgtgatcggcagcagcgtgacctacgaccaccccagcaagcccgtggagaagagactgatgcccccccccccccagaagaacaaggacagctggctggaccacgtgtag

SEQ ID NO: 50745 - protein, 134 aa, Artificial Sequence
  derived and/or modified sequence
MKSVLLLTTLLVPAHLVAAWSNNYAVDCPQHCDSSECKSSPRCKRTVLDDCGCCRVCAAGRGETCYRTVSGMDGMKCGPGLRCQPSNGEDPFGEEFGICKEHDMASGDGNIVREEVVKENAAGSPVMRKWLNPR

SEQ ID NO: 50746 - DNA, 72 bp, Artificial Sequence
  derived and/or modified sequence
agcagccaacaagcatatgaaataatgctccacaacactcatcatcagagaaatgcaaatcaaaaccaaaat

SEQ ID NO: 50747 - DNA, 405 bp, Artificial Sequence
  derived and/or modified sequence
atgaaatctgtgctactgctcacaacacttcttgtacccgcacatctggttgccgcttggtccaataattacgccgtggattgcccccagcattgtgactcatccgagtgtaagagctcacctcgctgcaagagaacagtattggatgattgcgggtgctgtcgggtatgtgccgcaggacgtggagaaacttgttatcgcactgtttccggtatggacgggatgaaatgcggtccaggcctgaggtgccagcccagcaacggagaggatccgtttggagaggaattcggaatttgtaaggagcacgacatggcctccggagacgggaacatcgtgcgggaggaggtagtgaaggaaaacgcggcaggatctcctgtcatgaggaagtggttaaaccctcggtag

SEQ ID NO: 50748 - DNA, 405 bp, Artificial Sequence
  derived and/or modified sequence
atgaaaagtgtactcctgcttaccacactactggtaccggctcatttggttgcagcctggagtaacaattacgccgtagattgccctcagcattgcgattccagtgagtgtaaaagctccccaagatgcaaacgcaccgtgttggatgactgcggttgttgtcgtgtttgcgccgccggacgcggggagacctgttatagaacggtcagcggtatggatggaatgaaatgcggccccggactgagatgccagccttcaaatggcgaagaccccttcggcgaagaatttggcatttgcaaagaacatgatatggcctctggtgacggcaatatcgtgagagaagaggtggttaaagaaaatgcggccgggagtcccgttatgcgaaaatggcttaatccccgatag

SEQ ID NO: 50749 - DNA, 405 bp, Artificial Sequence
  derived and/or modified sequence
atgaagagtgtgttgttgcttactacgctccttgtgcccgcccatttagtagccgcctggagtaataactatgccgtcgactgtccgcagcattgcgacagctctgaatgcaaatcttccccacgatgcaagcgtaccgtcctggatgattgcggatgctgcagagtctgcgcagctggacggggagaaacgtgctaccgaacagtgtcaggaatggatggaatgaagtgcgggccaggcctaagatgtcaaccgtcaaatggcgaagacccattcggggaagaatttggtatctgcaaagaacacgatatggcgagtggagacgggaacattgtcagagaagaagtggtgaaggaaaatgccgccggaagccctgtaatgcgtaagtggcttaacccaagatag

SEQ ID NO: 50750 - DNA, 405 bp, Artificial Sequence
  derived and/or modified sequence
atgaagagcgtgctgctgctgaccaccctgctggtgcccgcccacctggtggccgcctggagcaacaactacgccgtggactgcccccagcactgcgacagcagcgagtgcaagagcagccccagatgcaagagaaccgtgctggacgactgcggctgctgcagagtgtgcgccgccggcagaggcgagacctgctacagaaccgtgagcggcatggacggcatgaagtgcggccccggcctgagatgccagcccagcaacggcgaggaccccttcggcgaggagttcggcatctgcaaggagcacgacatggccagcggcgacggcaacatcgtgagagaggaggtggtgaaggagaacgccgccggcagccccgtgatgagaaagtggctgaaccccagatag

SEQ ID NO: 50751 - DNA, 405 bp, Artificial Sequence
  derived and/or modified sequence
atgaagagcgtgctgttgttgacaaccctgctggtcccggcacacctggtggctgcatggagcaacaactatgcagttgactgcccgcagcactgtgactcgtcggaatgcaagtcaagtcctcgctgcaaaagaacggtgttggacgactgcgggtgctgtcgggtgtgcgctgctgggcggggagagacttgttataggacggtgtccggaatggacggcatgaaatgtggacctggactcaggtgccagccgagtaacggagaagatcctttcggggaagaatttggcatctgcaaggagcatgacatggcctctggggacggaaacatcgttagggaggaggttgttaaggaaaatgccgccggctctccggtcatgagaaagtggctgaatcctcgctag

SEQ ID NO: 50752 - DNA, 405 bp, Artificial Sequence
  derived and/or modified sequence
atgaagtctgtgctgctgctgaccaccctgctggtgcctgcccacctggtggccgcctggagcaacaactatgctgtggactgcccccagcactgtgacagcagcgagtgcaagagcagcccccgctgcaagaggacagtgctggatgactgtggctgctgccgggtgtgtgccgccggccgcggggagacctgctacagaacagtgtctggcatggatggcatgaagtgtggccctggcctgcgctgccagcccagcaatggagaggacccctttggagaggagtttggcatctgcaaggagcatgacatggccagcggagatggcaacatcgtgcgggaggaggtggtgaaggaaaatgctgctggcagccctgtgatgaggaagtggctgaaccccaggtag

SEQ ID NO: 50753 - DNA, 1326 bp, Artificial Sequence
  derived and/or modified sequence
agctaccagtttggacggctgcttcccaccagcaaagaccacgactggagagccgagccggaggcagctgggaaacatgaagagcgtcttgctgctgaccacgctcctcgtgcctgcacacctggtggccgcctggagcaataattatgcggtggactgccctcaacactgtgacagcagtgagtgcaaaagcagcccgcgctgcaagaggacagtgctcgacgactgtggctgctgccgagtgtgcgctgcagggcggggagaaacttgctaccgcacagtctcaggcatggatggcatgaagtgtggcccggggctgaggtgtcagccttctaatggggaggatccttttggtgaagagtttggtatctgcaaagagcatgacatggcatctggagatggcaatattgtgagagaagaagttgtgaaagagaatgctgccgggtctcccgtaatgaggaaatggttaaatccacgctgatcccggctgtgatttctgagagaaggctctattttcgtgattgttcaacacacagccaacattttaggaactttctagattatagcataaggacatgtaatttttgaagaccaaatgtgatgcatggtggatccagaaaacaaaaagtaggatacttacaatccataacatccatatgactgaacacttgtatgtgtttgttaaatattcgaatgcatgtagatttgttaaatgtgtgtgtatagtaacactgaagaactaaaaatgcaatttaggtaatcttacgtggagacaggtcaaccaaagagggagctaggcaaagctgaagaccgcagtgagtcaaattagttctttgactttgatgtacattaatgttgggatatggaatgaagacttaagagcaggagaagatggggagggggtgggagtgggaaataaaatatttagcccttccttggtaggtagcttctctagaatttaattgtgcttttttttttttttttggctttgggaaaagtcaaaataaaacaaccagaaaacccctgaaggaagtaagatgtttgaagcttatggaaatttgagtaacaaacagctttgaactgagagcaatttcaaaaggctgctgatgtagttcccgggttacctgtatctgaaggacggttctggggcataggaaacacatacacttccataaatagctttaacgtatgccacctcagagataaatctaagaagtattttacccactggtggtttgtgtgtgtatgaaggtaaatatttatatatttttataaataaatgtgttagtgcaagtcatcttccctacccatatttatcatcctctt

SEQ ID NO: 50754 - DNA, 405 bp, Artificial Sequence
  derived and/or modified sequence
atgaagagcgtgctgctgctgaccaccctgctggtgcccgcccacctggtagccgcctggtccaataactatgcggtcgactgcccacaacattgcgactcttccgaatgtaagagctccccaagatgtaagcgaaccgttttggacgactgtggttgttgtcgggtgtgcgccgctggcaggggcgaaacgtgctacagaaccgtttcgggcatggatgggatgaaatgtggccctggactgaggtgtcaaccaagcaatggcgaagacccattcggggaggaattcgggatctgtaaggagcatgatatggcttcaggggatgggaatatcgtgagggaggaagtggtaaaggagaatgctgccgggagcccggttatgcgcaagtggctgaacccacggtag

SEQ ID NO: 50755 - RNA, 405 nt, Artificial Sequence
  derived and/or modified sequence
augaaaaguguacuccugcuuaccacacuacugguaccggcucauuugguugcagccuggaguaacaauuacgccguagauugcccucagcauugcgauuccagugaguguaaaagcuccccaagaugcaaacgcaccguguuggaugacugcgguuguugucguguuugcgccgccggacgcggggagaccuguuauagaacggucagcgguauggauggaaugaaaugcggccccggacugagaugccagccuucaaauggcgaagaccccuucggcgaagaauuuggcauuugcaaagaacaugauauggccucuggugacggcaauaucgugagagaagaggugguuaaagaaaaugcggccgggagucccguuaugcgaaaauggcuuaauccccgauag

SEQ ID NO: 50756 - RNA, 405 nt, Artificial Sequence
  derived and/or modified sequence
augaagaguguguuguugcuuacuacgcuccuugugcccgcccauuuaguagccgccuggaguaauaacuaugccgucgacuguccgcagcauugcgacagcucugaaugcaaaucuuccccacgaugcaagcguaccguccuggaugauugcggaugcugcagagucugcgcagcuggacggggagaaacgugcuaccgaacagugucaggaauggauggaaugaagugcgggccaggccuaagaugucaaccgucaaauggcgaagacccauucggggaagaauuugguaucugcaaagaacacgauauggcgaguggagacgggaacauugucagagaagaaguggugaaggaaaaugccgccggaagcccuguaaugcguaaguggcuuaacccaagauag

SEQ ID NO: 50757 - protein, 759 aa, Artificial Sequence
  derived and/or modified sequence
MGLPALEFSDCCLDSPHFRETLKSHEAELDKTNKFIKELIKDGKSLISALKNLSSAKRKFADSLNEFKFQCIGDAETDDEMCIARSLQEFATVLRNLEDERIRMIENASEVLITPLEKFRKEQIGAAKEAKKKYDKETEKYCGILEKHLNLSSKKKESQLQEADSQVDLVRQHFYEVSLEYVFKVQEVQERKMFEFVEPLLAFLQGLFTFYHHGYELAKDFGDFKTQLTISIQNTRNRFEGTRSEVESLMKKMKENPLEHKTISPYTMEGYLYVQEKRHFGTSWVKHYCTYQRDSKQITMVPFDQKSGGKGGEDESVILKSCTRRKTDSIEKRFCFDVEAVDRPGVITMQALSEEDRRLWMEAMDGREPVYNSNKDSQSEGTAQLDSIGFSIIRKCIHAVETRGINEQGLYRIVGVNSRVQKLLSVLMDPKTASETETDICAEWEIKTITSALKTYLRMLPGPLMMYQFQRSFIKAAKLENQESRVSEIHSLVHRLPEKNRQMLQLLMNHLANVANNHKQNLMTVANLGVVFGPTLLRPQEETVAAIMDIKFQNIVIEILIENHEKIFNTVPDMPLTNAQLHLSRKKSSDSKPPSCSERPLTLFHTVQSTEKQEQRNSIINSSLESVSSNPNSILNSSSSLQPNMNSSDPDLAVVKPTRPNSLPPNPSPTSPLSPSWPMFSAPSSPMPTSSTSSDSSPVSTPFRKAKALYACKAEHDSELSFTAGTVFDNVHPSQEPGWLEGTLNGKTGLIPENYVEFL

SEQ ID NO: 50758 - protein, 286 aa, Artificial Sequence
  derived and/or modified sequence
MDPKTASETETDICAEWEIKTITSALKTYLRMLPGPLMMYQFQRSFIKAAKLENQESRVSEIHSLVHRLPEKNRQMLQLLMNHLANVANNHKQNLMTVANLGVVFGPTLLRPQEETVAAIMDIKFQNIVIEILIENHEKIFNTVPDMPLTNAQLHLSRKKSSDSKPPSCSERPLTLFHTVQSTEKQEQRNSIINSSLESVSSNPNSILNSSSSLQPNMNSSDPDLAVVKPTRPNSLPPNPSPTSPLSPSWPMFSAPSSPMPTSSTSSDSSPRITWSSSNRGPQQNC

SEQ ID NO: 50759 - DNA, 2280 bp, Artificial Sequence
  derived and/or modified sequence
atgggtctgcccgccctggaattcagcgactgttgcctggacagcccccactttagggaaactttgaagtctcacgaagccgaattagataaaacaaataagtttatcaaggaactcatcaaggacggcaagagcctgatcagtgcactgaagaacctgtcgtctgcaaaacgaaagttcgcagacagcctcaacgaatttaagtttcagtgtattggtgatgcagaaactgacgatgaaatgtgcattgccagatccctccaggaatttgccacggtgctgcgcaatttagaagatgaacgaattaggatgatagaaaacgcttcggaggtattgatcacacctttagagaaatttcgtaaggagcaaattggagcagcaaaagaggcaaagaaaaagtatgacaaagagaccgagaaatattgcggcatcctggaaaaacacctcaatcttagttccaagaagaaggagtcacaactacaggaggcagattcccaggtggacctcgtgcggcaacacttctatgaggtgagccttgagtatgtgttcaaggtccaggaagttcaagagcggaagatgttcgagtttgtggaaccgctccttgcattccttcagggactttttacattctaccaccacgggtacgagctggccaaggattttggggacttcaagactcaattgacaatatcaatccagaatacacgtaacaggtttgaagggacaagaagcgaagtggagagccttatgaaaaagatgaaggaaaatccattagaacataaaacgatctctccctacaccatggaaggatatctctatgttcaagagaagcgccattttgggacttcttgggttaaacactattgcacttaccagcgagactccaagcagatcacgatggtgcccttcgatcagaaaagcggcggaaagggcggagaagacgagagcgtgatcctgaagagctgtactaggcggaagactgactctattgaaaaaaggttttgttttgacgtggaggccgtggataggccaggcgttattacgatgcaggccctgagtgaagaagaccggcggctatggatggaggcaatggacgggcgagagcccgtctataacagtaataaggatagccagtctgagggcaccgcacagctggactccattggattctcaataatccggaaatgcatccatgctgtggaaactcgagggatcaatgagcagggcctgtaccgaatcgtgggggtgaactctcgagtgcagaagctgctgagcgtgctcatggatccaaaaaccgcaagtgaaaccgagactgatatctgtgccgaatgggaaattaaaaccatcacctccgcgctcaaaacgtatctcagaatgttgccaggacctctcatgatgtatcaatttcagaggtcatttatcaaagctgctaaactggaaaaccaggaaagcagagtgtcagagatccattctctggtgcaccggctgccagaaaagaaccgccagatgctgcagctgctgatgaaccacctggccaatgtcgctaataaccacaagcagaatctgatgactgtggcaaacttaggagttgtgttcggccccacacttttgcggcctcaagaggagacggtggccgctatcatggacatcaagtttcagaacatcgtgatcgagatcttgattgaaaaccacgaaaagatctttaataccgttcccgatatgcctctgactaacgctcagcttcatttgagcagaaaaaaatcttcagactctaagcccccaagctgttctgaaaggccattgacactgttccacactgttcaatccaccgaaaagcaggaacagcgcaactcaataattaattctagcctggagagcgtttcatccaatcccaatagtatactaaattcaagttccagcttacagcccaacatgaactccagcgatcctgatttggcagtggtgaagcctacccgacctaatagcctgccacctaacccgagccctaccagccctctgtccccatcatggcccatgttttctgcaccaagctcacctatgccaacctcatctacatctagcgactcatcccctgttagcacgccgtttagaaaggctaaggctctctatgcatgcaaagcggagcacgatagcgagctgagcttcacagcggggacagttttcgataacgtgcatccgtcccaggaacccggatggttagagggcaccctgaatggcaagactggcttgattcctgaaaattatgtggaatttctgtag

SEQ ID NO: 50760 - DNA, 1167 bp, Artificial Sequence
  derived and/or modified sequence
tgagctcagctggatagtattggattcagtatcattcgcaaatgcatccatgcagttgagaccagagggattaatgaacagggcttgtatcgcatcgttggcgtgaactcccgggtccaaaaactgctgtccgtcctaatggatcccaaaacagccagcgaaactgagactgatatatgcgcagaatgggagattaaaacaatcacttccgccttgaagacatatctgagaatgttgcctggccccctcatgatgtaccagtttcagcggagcttcattaaagccgccaagctggaaaatcaggaatcacgagtcagcgagattcacagcctcgtgcatcgattgccagaaaaaaacaggcagatgctccagttgctgatgaaccacttggccaacgtggccaataaccataaacagaacctcatgaccgtagctaacttgggagtggtgtttggcccgacactgttgagaccccaagaggagactgtcgcggccatcatggatattaaatttcagaatatcgtaatcgagatcctcattgagaaccacgagaagattttcaataccgtccctgatatgcctctcacgaacgcccagctgcatctttcacgcaagaaatccagcgatagcaaaccccccagctgcagcgagaggcctctgacactctttcacaccgtccaaagcacagagaaacaggagcaaaggaactctatcataaattcatcacttgaaagtgtttcctcaaatccaaacagcatactgaacagttcctcctcactacagcccaacatgaatagttctgatcccgacctcgctgttgttaaaccaacacgtcccaacagcttgccacctaacccatccccaacgtcgcctctgtccccgtcttggcctatgttctctgctcctagttctccaatgccgaccagtagcacgtcatccgatagttccccagtgcggccagaagaagccgtccacgaggattctagcacaccattcagaaaggccaaggcactgtacgcatgcaaagctgagcacgatagcgagctgtcctttaccgccggcacggttttcgacaatgtgcacccctcgcaggagcccggctggctggaaggcactctcaatggaaagacaggcctgatacccgagaattacgtggagtttctctag

SEQ ID NO: 50761 - DNA, 2280 bp, Artificial Sequence
  derived and/or modified sequence
atgggcctgcctgccctggagttcagtgactgctgcctggacagcccccacttccgggagaccctgaagagccatgaagctgagctggacaagaccaacaagttcatcaaggagctgatcaaggatggcaagagcctcatcagcgccctgaagaacctgagcagcgccaagaggaagtttgctgacagcctgaatgagttcaagttccagtgcattggagatgctgagacagatgatgagatgtgcatcgcccggagcctgcaggagtttgccaccgtgctgaggaacctggaggatgagcgcatccgcatgattgaaaatgccagcgaggtgctgatcacccccctggagaagttcaggaaggagcagatcggggccgccaaggaggccaagaagaagtatgacaaggagacagagaagtactgcggcatcctggagaagcacctgaacctgagcagcaagaagaaggagagccagctgcaggaggccgacagccaggtggacctggtgcggcagcacttctatgaggtgtccctggagtatgtgttcaaggtgcaggaggtgcaggagaggaagatgtttgaatttgtggagcccctgctggccttcctgcagggcctcttcaccttctaccaccacggctatgagctggccaaggactttggagacttcaagacccagctgaccatcagcatccagaacaccaggaacagatttgagggcaccaggtctgaggtggagagcctgatgaagaagatgaaggagaaccccctggagcacaagaccatcagcccctacaccatggagggctacctgtatgtgcaggagaagaggcacttcggcacctcctgggtgaagcactactgcacctaccagagggacagcaagcagatcaccatggtgccctttgaccagaagagcggcggcaaaggaggagaagatgagagcgtcatcctgaagagctgcaccaggaggaagacagacagcattgagaagcgcttctgctttgatgtggaggccgtggacaggcctggggtcatcaccatgcaggccctgtctgaagaagatagaaggctgtggatggaggccatggatggccgggagcctgtgtacaacagcaacaaggacagccagagcgagggcacagcccagctggacagcatcggcttcagcatcatcaggaagtgcatccatgctgtggagacccggggcatcaatgagcagggcctgtacagaattgtgggcgtgaacagccgggtgcagaagctgctgtctgtgctgatggaccccaagacagccagcgagacagaaacagacatctgtgccgagtgggagatcaagaccatcaccagcgccctgaagacctacctgaggatgctgcccggccccctgatgatgtaccagttccagaggagcttcatcaaggccgccaagctggagaaccaggagagccgggtgtctgagatccacagcctggtgcaccggctgcctgagaagaaccggcagatgctgcagctgctgatgaaccacctggccaacgtggccaacaaccacaagcagaacctgatgacagtggccaacctgggcgtggtgtttggccccaccctgctgcggccccaggaggagaccgtggccgccatcatggacatcaagttccagaacatcgtgattgagatcctgattgagaaccacgagaagatcttcaacacagtgcctgacatgcccctgaccaatgcccagctgcacctgagcaggaagaagagcagtgacagcaagccacccagctgcagcgagcggcccctgaccctcttccacacagtgcagagcacagagaagcaggagcagaggaacagcatcatcaacagcagcctggagagcgtgagcagcaaccccaacagcatcctgaacagcagcagcagcctgcagcccaacatgaacagcagtgaccctgacctggccgtggtgaagcccacccggcccaacagcctgccccccaaccccagccccaccagccccctgagccccagctggcccatgttttctgcccccagcagccccatgcccaccagcagcaccagcagtgacagcagccctgtgtccacccccttcaggaaggccaaggccctgtatgcctgcaaggccgagcatgacagcgagctgtccttcaccgctggcaccgtgtttgacaacgtgcaccccagccaggagcccggctggctggagggcaccctgaatggcaagacaggcctcatcccagaaaattatgtggagttcctgtag

SEQ ID NO: 50762 - DNA, 1167 bp, Artificial Sequence
  derived and/or modified sequence
tgagcccagctggacagcatcggcttcagcatcatcaggaagtgcatccatgctgtggagacccggggcatcaatgagcagggcctgtaccgcatcgtgggcgtgaacagccgggtgcagaagctgctgtctgtgctgatggaccccaagacagccagcgagacagaaacagacatctgtgccgagtgggagatcaagaccatcaccagcgccctgaagacctacctgaggatgctgcccggccccctgatgatgtaccagttccagaggagcttcatcaaggccgccaagctggagaaccaggagagccgggtgtctgagatccacagcctggtgcaccggctgcctgagaagaaccggcagatgctgcagctgctgatgaaccacctggccaacgtggccaacaaccacaagcagaacctgatgacagtggccaacctgggcgtggtgtttggccccaccctgctgcggccccaggaggagaccgtggccgccatcatggacatcaagttccagaacatcgtcatcgagatcctgattgaaaatcatgagaagatcttcaacacagtgcctgacatgcccctgaccaatgcccagctgcacctgagcaggaagaagagcagtgacagcaagccacccagctgcagcgagcggcccctgaccctcttccacacagtgcagagcacagagaagcaggagcagagaaattccatcatcaacagcagcctggagagcgtgagcagcaaccccaacagcatcctgaacagcagcagcagcctgcagcccaacatgaacagcagtgaccctgacctggccgtggtgaagcccacccggcccaacagcctgccccccaaccccagccccaccagccccctgagccccagctggcccatgttcagcgcccccagcagccccatgcccaccagcagcaccagcagtgacagcagccctgtgcggcctgaggaggccgtgcatgaggacagcagcacccccttcaggaaggccaaggccctgtatgcctgcaaggccgagcatgattctgagctgtccttcaccgctggcaccgtgtttgacaacgtgcaccccagccaggagcccggctggctggagggcaccctgaatggcaagacaggcctcatccctgagaactacgtggagttcctgtag

SEQ ID NO: 50763 - DNA, 2280 bp, Artificial Sequence
  derived and/or modified sequence
atgggcctgcccgccctggagttcagcgactgctgcctggacagcccccacttcagagaaaccctgaagtcacacgaggccgagctagataagactaataaatttatcaaggagctgatcaaggatgggaaaagcttgatttccgccctgaagaatctcagctccgcaaaacggaagttcgccgactccctgaatgagttcaaatttcagtgcatcggggacgctgagaccgacgacgagatgtgtattgctaggtcactgcaggaatttgccacagttctacgaaacctggaagatgagcgaattcggatgatcgagaatgcttctgaggttctgatcacacccctcgaaaaattcaggaaggaacagattggtgctgcaaaggaagctaagaaaaagtacgataaggaaactgagaagtactgcgggattttggagaaacatctaaacctctcttcaaaaaagaaagagagccagcttcaggaagctgattcacaggttgatctggtaaggcagcacttttacgaggtgtccctcgagtatgtgttcaaggtccaggaggtgcaagagcgaaagatgtttgagttcgttgagccgctgttggctttcttacagggcttatttacattctatcaccacgggtacgagctggcaaaagacttcggggatttcaaaacccagttaacgatttcaatccagaatacaagaaatagattcgagggcacacgaagtgaggtggagtccctgatgaagaaaatgaaggaaaaccctctggagcacaagactattagtccatacaccatggaaggctacctctacgtgcaagagaagaggcatttcggaacatcctgggtcaagcattactgcacctatcagcgggattcaaagcagattaccatggtgccattcgaccaaaagtccgggggcaagggcggcgaggatgaatcagttatcttgaagagctgcacgcggcgtaaaacagactcaatagaaaagagattctgttttgacgtggaagctgtggatcggcccggggtcataacaatgcaggccctgagtgaggaggaccgcaggctttggatggaggcgatggatggccgggagcccgtgtataatagcaacaaagacagccagtcagagggaacagctcaactggacagtatcggttttagcatcattagaaagtgcattcatgccgtggagaccaggggaattaatgagcaagggctgtataggattgtcggagtcaacagccgggtacagaaacttctgtcagtcttgatggaccccaagactgctagcgaaaccgagacggatatatgtgcagaatgggagatcaagaccattacctctgcactcaaaacgtacctgcgcatgctgcccggccccttaatgatgtatcaattccagcgcagcttcatcaaggctgccaagctcgagaaccaggagtcccgagtgtccgagattcacagccttgtccatcgattgcccgagaaaaatcggcagatgctccaacttctgatgaatcatctggccaatgtggctaataaccacaagcagaatctcatgacagtcgcgaatctcggcgtggtctttggcccaacccttctcaggccccaagaggaaacagtcgcggcaatcatggatattaaattccagaacattgtgattgaaattctaattgaaaatcacgagaagatcttcaacaccgtgccagacatgccactgacaaatgcacagctgcacctgagtcgcaaaaagtcaagtgactccaaacctccatcatgttcagagcgcccattaacactgttccacaccgttcagagtacagaaaagcaggagcagcgcaattcaatcattaatagtagtctggagagcgtgagctccaacccaaattcaatcctgaattccagttcctccctgcagcctaacatgaacagctcggatccagacttggctgtggtgaagcctacgcgcccaaattccttgccccccaatccaagcccaacgtcccctctttctccttcatggcccatgttttccgccccaagctctccaatgccaacctcttcaactagctctgatagctctcctgtgagcaccccgtttcgaaaggctaaggctctttacgcatgtaaggctgagcacgactcagagctcagctttactgccgggacagtgtttgataacgttcatccaagccaggagcccggatggctggagggaaccctgaatggaaagaccggtcttattccggaaaattacgtagagttcctgtag

SEQ ID NO: 50764 - DNA, 1167 bp, Artificial Sequence
  derived and/or modified sequence
tgagcccagctggacagcatcggcttcagcatcatccggaagtgcatccatgccgttgagaccagaggcataaatgaacaaggactgtaccgcattgtcggggtcaattcacgggtgcaaaagctactgtccgtccttatggacccgaagactgcctcagagaccgaaaccgacatttgcgcagaatgggagattaaaactattacttccgccttgaagacatatttgcggatgctgccaggcccattgatgatgtaccaatttcagagaagtttcattaaggccgccaagctcgagaatcaagaatcacgggttagtgagatccactctctggtccatagactcccagagaaaaacagacagatgctgcagctgcttatgaaccacctggccaatgtggccaataaccacaaacaaaatcttatgaccgtcgccaatctcggcgtggtgtttggtccaaccctgctgagaccccaggaggaaaccgtagctgccattatggacatcaagtttcagaacatcgtgatcgaaatactcattgaaaatcatgagaaaatctttaacaccgtgcctgatatgccacttacaaatgcccaactgcacttaagtaggaagaaatccagtgattccaagcccccatcctgttccgaacggccactcacgctcttccacacagtgcaatctacagagaaacaggaacagcgcaatagtattattaactcaagccttgaaagcgtgtcgagcaaccctaatagtatcttgaacagctcctccagtctccagcccaatatgaattcttcagatcccgacctggccgtggtgaagcctacgcggcccaattcacttccaccaaatccttcccccacctctcctctgtctcctagctggcctatgttctctgctccttcctccccaatgcccacctccagcacatcaagcgattcgtcacctgttcgcccagaggaagccgtgcacgaagacagttccactcccttcagaaaagcaaaggcgctatacgcttgcaaagctgaacatgactcagagttgtcctttaccgcgggcacagtctttgataacgtgcatccgtctcaggagccgggttggctcgagggaacccttaatgggaaaacaggcctgattcccgaaaattatgttgaattcctgtag

SEQ ID NO: 50765 - DNA, 2280 bp, Artificial Sequence
  derived and/or modified sequence
atgggtctcccagctctggaatttagtgattgttgtttggattcaccacactttagggagacactgaaatcacatgaggccgaattagataaaacaaataagtttattaaagaactgataaaggacggcaagagccttatctccgccctaaagaatttgagctccgccaagaggaaatttgctgattctttgaatgagtttaagtttcagtgcattggcgatgccgagacagatgatgagatgtgcattgccaggtcattgcaggaattcgctaccgtgctccgcaacctggaagacgagaggatacggatgatcgaaaacgcgagcgaggtgctgattactcctctggagaagttccggaaggagcagattggagcagccaaggaggcaaaaaagaagtacgacaaagagacggaaaagtattgcggaattttagaaaagcacctgaatttgagttccaagaaaaaagaaagccagcttcaagaggccgacagtcaggtggacttagtgcggcaacacttttacgaggtgagcctggagtacgtgttcaaggtgcaggaggtccaagagaggaaaatgttcgagtttgtagagcccttactcgccttcttgcaggggctttttaccttttaccaccacggctatgagttggccaaagatttcggggacttcaagacgcagctgaccatttccatccagaatacgcgaaaccgctttgagggaacccggagtgaggttgaatctctgatgaagaaaatgaaagagaacccgctggaacacaagacgatatctccatacaccatggaagggtacctgtatgtgcaggagaaacgccattttggcaccagctgggtgaagcactactgcacataccaacgggattcaaagcagatcacaatggtgccatttgaccagaaatccggtgggaaaggcggagaggatgagtccgtgatcctaaagagttgcactagaaggaaaaccgactccattgagaaacgtttctgctttgacgtggaggccgtagaccggccaggcgtgattacaatgcaggctctgagcgaggaggacagacgcctctggatggaggccatggatgggagagagccagtatataactcaaacaaggacagtcagagtgagggaactgctcaactggacagtatcggttttagcatcattcggaagtgcatccacgccgtggaaactcgcggtattaacgaacagggcctgtatcgtattgtgggcgtgaattcacgggttcagaagttactttctgtgctgatggatcccaaaaccgcaagcgagaccgagacagatatttgtgcggagtgggagattaagaccatcaccagcgcattgaaaacctacctcagaatgctgccgggtccgctgatgatgtaccagtttcagcggtcttttattaaagctgctaaattggagaaccaggagagcagagtcagcgagattcactccctagtgcatcgcctgccggaaaaaaaccggcagatgctgcagctgctcatgaatcacctcgcgaatgtagcaaataatcataaacaaaacctgatgacagttgctaatctgggagtggtattcggtcccactctcctaagaccccaggaggagacagtggcggcaatcatggatattaagttccagaatattgttatcgaaatactcattgaaaaccatgagaagatttttaacaccgtcccagatatgcccctgaccaacgcccagctgcatctgtctcgcaaaaagtcttcagattctaaacctccctcttgttctgagcggcctctgactctctttcacaccgtgcagtctacagaaaagcaggagcaaagaaatagtatcatcaacagttccctcgaatctgtttccagcaaccctaattcaattcttaactcatcgtcatcgctgcagcccaacatgaactcctccgacccagatttggctgtagtgaaaccaactaggcccaactcactgccccctaacccaagcccaacctcaccccttagcccaagctggcccatgttttctgctccttcctccccgatgcctacttccagcaccagctccgactcttcccccgtttccaccccatttcggaaggctaaagcactgtatgcctgcaaggctgaacacgacagcgagctcagttttaccgcagggaccgtgtttgataacgtccatcccagccaagagccaggatggctggagggaactctcaacgggaaaaccggcctgattccagaaaactatgtggaatttctatag

SEQ ID NO: 50766 - DNA, 1167 bp, Artificial Sequence
  derived and/or modified sequence
taagctcagctggactcgataggcttcagtataatccgcaagtgcatccacgcagttgaaacgagggggatcaacgaacagggcttataccgtatcgttggcgttaacagccgtgtccagaaactgctttctgtgctgatggaccccaaaactgcttccgaaaccgagactgacatttgtgccgagtgggagataaaaaccattacgtccgccctgaaaacttacctgcgcatgctgccgggacccctgatgatgtaccaattccagcgatcatttattaaggctgcgaaacttgaaaatcaggagagtcgagtgtcagagatccattctctagtgcaccgtcttcctgagaagaatcgccaaatgctgcagctgctgatgaatcaccttgcgaatgtggccaacaaccacaagcagaatctgatgactgtcgcaaacttaggcgtggtgttcggccctactttgctgcgtccacaagaggagactgtcgccgcaatcatggatataaagtttcagaacatagtcatcgagatcctgatagagaatcacgagaaaatcttcaataccgtccctgatatgccactgaccaacgcacaactccacctgtcaagaaaaaagtcctcggactctaaaccaccttcgtgttctgagaggccattaaccttgtttcacacagtacaatccactgagaagcaggagcagcgcaactccataatcaattctagtcttgagtcagtgtcgtcaaatcctaacagcatccttaactccagctcctccttgcagccaaacatgaactctagcgatcctgatctggctgtggtgaagccaacacggccaaactccctgccacccaatcccagccctacctctccgttgtcaccaagttggccgatgttctccgcccctagctcacctatgccgacaagttctacctcatcagattcctcccctgtgagacctgaagaagcggtacacgaggatagcagcacgccattccgaaaagccaaagctctgtacgcttgcaaagctgaacacgattcagagttatccttcactgcgggaacagtgttcgataacgtccatccctcgcaggagcctggttggctcgaggggacgctaaatggcaagacaggcctgattccggaaaactatgtggaattcttgtag

SEQ ID NO: 50767 - DNA, 9200 bp, Artificial Sequence
  derived and/or modified sequence
gagagggcgctcgaggctgccgagagctagctagcgaaggaggcggggaggcggcgtctgcactcgctcgcccgctcgctcgcttcccggcgccgctgcgggtccgcgctgcgtttcctgctcgcgatccgctccgttgcccgcgcccggaacagcagcacctcggccgggtccgagctcggttcgggagtcttgcgcgccggcggacaccgcgcgcggagtgagccagcgccacacctgtggagccggcggccgtcgggggagccggccggggtcccgccgcgtgagtgctctgggcggcgggcggcccgggccccggcggaggcgcgccccccggctgggcgccgcgcgcaccatggggctcccagcgctcgagttcagcgactgctgcctcgatagtccgcacttccgagagacgctcaagtcgcacgaagcagagctggacaagaccaacaaattcatcaaggagctcatcaaggacgggaagtcactcataagcgcgctcaagaatttgtcttcagcgaagcggaagtttgcagattccttaaatgaatttaaatttcagtgcataggagatgcagaaacagatgatgagatgtgtatagcaagatctttgcaggagtttgccactgtcctcaggaatcttgaagatgaacggatacggatgattgagaatgccagcgaggtgctcatcactcccttggagaagtttcgaaaggaacagatcggggctgccaaggaagccaaaaagaagtatgacaaagagacagaaaagtattgtggcatcttagaaaaacacttgaatttgtcttccaaaaagaaagaatctcagcttcaggaggcagacagccaagtggacctggtccggcagcatttctatgaagtatccctggaatatgtcttcaaggtgcaggaagtccaagagagaaagatgtttgagtttgtggagcctctgctggccttcctgcaaggactcttcactttctatcaccatggttacgaactggccaaggatttcggggacttcaagacacagttaaccattagcatacagaacacaagaaatcgctttgaaggcactagatcagaagtggaatcactgatgaaaaagatgaaggagaatccccttgagcacaagaccatcagtccctacaccatggagggatacctctacgtgcaggagaaacgtcactttggaacttcttgggtgaagcactactgtacatatcaacgggattccaaacaaatcaccatggtaccatttgaccaaaagtcaggaggaaaagggggagaagatgaatcagttatcctcaaatcctgcacacggcggaaaacagactccattgagaagaggttttgctttgatgtggaagcagtagacaggccaggggttatcaccatgcaagctttgtcggaagaggaccggaggctctggatggaagccatggatggccgggaacctgtctacaactcgaacaaagacagccagagtgaagggactgcgcagttggacagcattggcttcagcataatcaggaaatgcatccatgctgtggaaaccagagggatcaacgagcaagggctgtatcgaattgtgggtgtcaactccagagtgcagaagttgctgagtgtcctgatggaccccaagactgcttctgagacagaaacagatatctgtgctgaatgggagataaagaccatcactagtgctctgaagacctacctaagaatgcttccaggaccactcatgatgtaccagtttcaaagaagtttcatcaaagcagcaaaactggagaaccaggagtctcgggtctctgaaatccacagccttgttcatcggctcccagagaaaaatcggcagatgttacagctgctcatgaaccacttggcaaatgttgctaacaaccacaagcagaatttgatgacggtggcaaaccttggtgtggtgtttggacccactctgctgaggcctcaggaagaaacagtagcagccatcatggacatcaaatttcagaacattgtcattgagatcctaatagaaaaccacgaaaagatatttaacaccgtgcccgatatgcctctcaccaatgcccagctgcacctgtctcggaagaagagcagtgactccaagcccccgtcctgcagcgagaggcccctgacgctcttccacaccgttcagtcaacagagaaacaggaacaaaggaacagcatcatcaactccagtttggaatctgtctcatcaaatccaaacagcatccttaattccagcagcagcttacagcccaacatgaactccagtgacccagacctggctgtggtcaaacccacccggcccaactcactccccccgaatccaagcccaacttcacccctctcgccatcttggcccatgttctcggcgccatccagccctatgcccacctcatccacgtccagcgactcatcccccgtcagcacaccgttccggaaggcaaaagccttgtatgcctgcaaagctgaacatgactcagaactttcgttcacagcaggcacggtcttcgataacgttcacccatctcaggagcctggctggttggaggggactctgaacggaaagactggcctcatccctgagaattacgtggagttcctctaaccgtgggccccagcagaactgctgagctttacatggtatccatgacaactgctgattccagtgtcgaggccatttctctttgccactgagaaatgcagcgtgactgactctgttgctacctgtcaacatgaatgtttctgtgagctctggtgtcactcatctccatgatcatctcagccaacatgcatcagtactgcaagaaaagaagtcaatcagcagaggagagcatttgataactaagaggaagacttgcaaagccgttttctcatgagtaccctgaatagggggcactcattttgtttcaacggtccaaacgcccaaccttcagaaagaggaagtcagatagaaatagtccctgagagcacactgtgtagctaagcctgctggggctgggtgaagaaattggcgctgagatccaggctggatccattgcttttgtttacaataggcactctctctaccccacctctcagtacttgagacttaaagtgctacaggcagctggatctgtttgcatgcaggatgaagagggttaaaacactgtttatataagatccaatctctcaccatctctaaagcagccgttggcctgtcatcagtgagatacaatccagtcttctcatgcacgggaacacacacaccctgcgtttctccctcccaggctaggaacctctctgccaccaagggctgccatccatcgcctagtaaccacggcaacccaacctactctaaaaccaaaccaaaaaaataaaataacacatcctctttgcatgacacattttttttctcccctttttggtacactttttttgaatggttttctaacaacttgaagcacaggatcaaggaattagggtggtctacttgaggcagatgggatagtagctgggaactgttccctttctgattaatttcagcagcatcggaatatatttggagcacaccctagtaacctcttgagattaaattacatagtcttaatatttctgttcctccatgcaactgatgtttgttttttaaagggtaagatgctgcctcccaatgggtgatgccatctgactggtttccccatgtcctcccattcacccatctctgctcccacccttgcctgcctctaacccaccactggccagcccccttgccctactctgggctgctgaacactggtgctgtggtggttttcaaggttaattcctaggctaaccgtatggcctatagtttaaaagcacatctatgttcactgccactctgaaaaagggaattatttctcagtctttcaaggcttgagactaatataggccattgtgattcaggaagaaacccaaggttggagggtgggatgagtaccctctgaaaaagggaatttgctggtgaaaagaggctggatcttgtggaagactgtcttggatggggaagtactacctggagatttcaaattcacttggcctgcaaacaacagagttatccgtatcttccacatgtgaatgtcattgcaagggtgactctagacaaactacaaaccgatggaccgtcaagctccccaggagccccttggatggcagcgttgcttcagagtgtttcctgtttctggaattccttgttagggaactttaaagaagaaaagaaaaacttgaattgtgttgaattactgtatcttttacttttttttttttgaaaagataaacttgtaaatagagtgatttgaaatactatatggcaaagttttatatttgatattctttaagttagttgctcacacacttaggctttgattgctgaagaagtatgtttaagagggagagaggggaggcaaagctgaagagagtcaaggtcactgtccccgcttcggcctgaaggaaagagaagacatttctatggccttgctctctgctgtcctgttggtgggcacgacacatcagtggtgttcagtctttatgtgtttttaagcatcccttgggctttggatttggagatgggaagagcatctccaggcaatgagtttttcaaagaatgcctacttagtagtaagatgaagctcaggatttaaataagtggggtcaggcattcgagtttttgtctttcttctcaggtgtatttcttggtacccccaagatatcaggccagaaagagatgagtcagttgctgtgctctttacttctttttctccacatcttctgaggctttagaaatgtggacaagctagttttcaaattttgtgtgcgtctgtaagttcttaaagaaccagcttcttagaatgttcagttctcaatgtgctgctgctttcccttctcctaaacattttaaaactcttccctttcacctccaattcccgtgatcccaaaagaagaggaagactccaggaggggtatagattgtgccgtcatagctttacaggtggttttaaagttaacaggggtttgtcatggtgattcactactcagtttatcagctcaaggattatacagctcttttccgggaactcacccaggagcaagcgagacactaccattgaatcagggaatgagaattaagaatggacaggaccaagacagaactcaagaaagccactggggaaaactcgagaagaaagggagtatactagtaggttagatctgtgaacctgaggacaagaagaccttgggaaatggaggcctcaggggatgtgcattcacatactattacgcttctcaaagagagaccaacatcatgcttttaacacatttgatgaggttttttatttgtgtttttgtttgttttttgagatggagtctcactctgtggcccaggctggagtgcagtggcgcaatcttggctcactgcaacctccacctcccaggttcaagtgattctcctgtctcagcctcccaagtagctgggactacaggcatgagccatcacacccagctagttttttgtatttttagtaaagatggggttttgccatgtttgccaggctgatctcgaactcctgacctcaagtgatctgcccacttcagacccccaaagtgctgggattccaggtgtgagccgctgcggccgaccacatttgatgtttgaagttgtaatctgtcccatcataaacttacctggagctcatgtggaggaacagaaggccaagatccttgctttgggggtgcctcacgaagcatccctgtagacatttggccccagcttcactgcttggaagcatgtccctccctcttgagttggctctgatttgaaatcgggagaaacagagctgctgccaatgggatcttttaggtaactccctccctagcttccgtgtgtctgtgcagtgcccatgagctgctgccaatgggatctttcaggtaccccctccccagcttccctgtggctgtgcggtgcccttgacagatggcttctctgtttccctttgcccagccaggctcccctccttcctattagctacaaaactggataaacttcagaatatgagccaatgagtaggaaggaacttgaagactaaagattttactctctcccctatccatgccccctacctctgactctctctgtgtgaacaggaaactttagggcagatgaggagaatgaattggttatcagagtggaagaccatggcccaggatccctgagctttcccagtagcctccagtttcctttgtaagacccagggatcacttagccatagcctgaatcttttaggggtattaaggtcagcctctcactcttccttcaggttactaacaaaatttcgtagctaaagaatgccatggccgggtgcagtggctcacgcctataatcccagcactttgggaggccgaggcgggcggatcacgaggtcaggagattgagaccatcctggctacgacggtgaaaccccgtctctactaaaaatacaaaaaattagccgggtgtggtggcgggcgcctgtagtcccagctactctggaggctgaggcaggagaatggcatgaacccaggaggcagagattgcagtgagccaagatcacgcccctgcactccagcctgggtgacagagccagactccgtctcaaaggaaaaaaaaaaaaaaaaaaaaagaatgccatgccaggagaagacagctggtttcaaatccctgcccccaggcaagtaaaaccctgacttgctcaagacagaagatcttttctcctgtttttcaaaataaacatatatagggatggaccctgtgcattgtggcctgccttggtgtcctagaattggagccagtctttagcttaatgtctgaagtatttatacggccaatatgtgttttcttatgtcagaccacactgtctttttgaatatcagttcatttcctctcaccgagtgcttttcggtgagaggcaaagagaaagaatgaacaatcaagtattgacagactggcattagcaggacagagccatactagtgacaagggcatcccaaggcacttgcccagagctgcagagttgtgtgtgccatacctgcggctcaaagggaaggccttctatcccctgagtttctatcagctgaaaatggcaactgctgtctcagtaaaagctctgtcttgactgcagaggctccaaaagcattcacagttgagggggagaaagacagaaagaagaagccaaagataacctgatccctgcctgtctgttggcacctgtcatcctctggcttctgctcccaaaagcaagtctggatgactgagttttgtggacatggcactcccggagacagcagtggccaccatggcacccagagtttgcccaagtactgaatgttttgtgagcaaccatgttccccaagtaggtagccagcgctgcagaaaccaaacagcctcttagctacctgactttaaaaggaatgacctaggtgttctgccaaaggagttatctatcatctctggcaaacttgacaatcatcacttacctcgacaaccctgccccacatcactttataaagtcagcaggatgtcttctcacccaccctgtgctggtgtctaacaaatttatcttgtcatgctcaaatgtgtttggcagccacaccgatcggctgggtgctgaaccgcctctctgtaattgtagcatcaaaatgacaacagcagcagagcagcgaatcttgcacagccccacagcatgcctgagacaagactccaacaagtaataattagctttttttctcctgccgcctacagtacctgtctaactaaagagcttcccaaagtggagggaaaggccatagaatccaggtgtcattcagagccagtccttgctgaaatgtggtcttccagtggaagcacctgtattattgagaggaaaaagtgttggatgcaaagtaacaccaggactagagagaaagagaaaggtgaaccatcctaaggagctttggatacttttttagaaggataaatattatgcttactgaggagaaaaaaaaaagcgatcacagaaaaatttcacagctaatatttttacaaaagttgtgccagacattacagagtgaaaacgtctctcaaggtggaatgctttagagagcaaaggcttagcatagacctagacccttgtgtgggtatgacatgacatgacatgtccatgtcaaaattcactttagtcagaaccagagtattgataaacaaaatgtcagttacctggagcagtcctggagaggttaagacattctatactgttctacgtcaaccatttctacaaagttgtccagacacctaaaagcagctttcttggttatccagatgccagaatcaaccttgtatctgacaatgcacatctgttgattctaaagtatatttatgtgtgtgtgtatgtgtgtgtatacagcacatatttacatctatgaagacatagacacttacagagacccacatgagctggcactttctgagcctttacagcctttaagactcggaggttgagaattagagacacaagagaggctgtggatggcctattaaaatgattaaagatgtaaattcagtgccattttaaaactgttcatatttatcaaacaattactgtctacagctacattttttgttaacttacttaaagtcatgtcgcaagaaagatcaaacccatgaatgcttagtagctaaggctagtgttcaaaagcactctaaaagacattttgtccacattttggaaaagaaaatatttgcatgtttaattcataatttaggctatctttgagtatactgtaaagtgctgtgtgatataatatcaataaagtacttattaaatggcactttaatgttttcttttaaaataacgcactgttctaaacttcagtattgactattgactcgtgcatagaatccaatgctgtaattagaaagtaatctgtgactagaatagacctttgtccctgttagtagccctgttgccatgttcaggcttttaaaaaatgcttttgtgtcaccaaatatatctataaagaaaacaaaatttctgttcagaggcctctgaaacttggctttcttacatgtggttggtttatgtgacaatccctatgaaatgagtggacgtatgatttttgaattaaatgacttttccatttggtggtatttt

SEQ ID NO: 50768 - DNA, 2870 bp, Artificial Sequence
  derived and/or modified sequence
ctgcgcagttggacagcattggcttcagcataatcaggaaatgcatccatgctgtggaaaccagagggatcaacgagcaagggctgtatcgaattgtgggtgtcaactccagagtgcagaagttgctgagtgtcctgatggaccccaagactgcttctgagacagaaacagatatctgtgctgaatgggagataaagaccatcactagtgctctgaagacctacctaagaatgcttccaggaccactcatgatgtaccagtttcaaagaagtttcatcaaagcagcaaaactggagaaccaggagtctcgggtctctgaaatccacagccttgttcatcggctcccagagaaaaatcggcagatgttacagctgctcatgaaccacttggcaaatgttgctaacaaccacaagcagaatttgatgacggtggcaaaccttggtgtggtgtttggacccactctgctgaggcctcaggaagaaacagtagcagccatcatggacatcaaatttcagaacattgtcattgagatcctaatagaaaaccacgaaaagatatttaacaccgtgcccgatatgcctctcaccaatgcccagctgcacctgtctcggaagaagagcagtgactccaagcccccgtcctgcagcgagaggcccctgacgctcttccacaccgttcagtcaacagagaaacaggaacaaaggaacagcatcatcaactccagtttggaatctgtctcatcaaatccaaacagcatccttaattccagcagcagcttacagcccaacatgaactccagtgacccagacctggctgtggtcaaacccacccggcccaactcactccccccgaatccaagcccaacttcacccctctcgccatcttggcccatgttctcggcgccatccagccctatgcccacctcatccacgtccagcgactcatcccccgtcaggccagaagaagcggtacatgaagactccagcacaccgttccggaaggcaaaagccttgtatgcctgcaaagctgaacatgactcagaactttcgttcacagcaggcacggtcttcgataacgttcacccatctcaggagcctggctggttggaggggactctgaacggaaagactggcctcatccctgagaattacgtggagttcctctaaccgtgggccccagcagaactgctgagctttacatggtatccatgacaactgctgattccagtgtcgaggccatttctctttgccactgagaaatgcagcgtgactgactctgttgctacctgtcaacatgaatgtttctgtgagctctggtgtcactcatctccatgatcatctcagccaacatgcatcagtactgcaagaaaagaagtcaatcagcagaggagagcatttgataactaagaggaagacttgcaaagccgttttctcatgagtaccctgaatagggggcactcattttgtttcaacggtccaaacgcccaaccttcagaaagaggaagtcagatagaaatagtccctgagagcacactgtgtagctaagcctgctggggctgggtgaagaaattggcgctgagatccaggctggatccattgcttttgtttacaataggcactctctctaccccacctctcagtacttgagacttaaagtgctacaggcagctggatctgtttgcatgcaggatgaagagggttaaaacactgtttatataagatccaatctctcaccatctctaaagcagccgttggcctgtcatcagtgagatacaatccagtcttctcatgcacgggaacacacacaccctgcgtttctccctcccaggctaggaacctctctgccaccaagggctgccatccatcgcctagtaaccacggcaacccaacctactctaaaaccaaaccaaaaaaataaaataacacatcctctttgcatgacacattttttttctcccctttttggtacactttttttgaatggttttctaacaacttgaagcacaggatcaaggaattagggtggtctacttgaggcagatgggatagtagctgggaactgttccctttctgattaatttcagcagcatcggaatatatttggagcacaccctagtaacctcttgagattaaattacatagtcttaatatttctgttcctccatgcaactgatgtttgttttttaaagggtaagatgctgcctcccaatgggtgatgccatctgactggtttccccatgtcctcccattcacccatctctgctcccacccttgcctgcctctaacccaccactggccagcccccttgccctactctgggctgctgaacactggtgctgtggtggttttcaaggttaattcctaggctaaccgtatggcctatagtttaaaagcacatctatgttcactgccactctgaaaaagggaattatttctcagtctttcaaggcttgagactaatataggccattgtgattcaggaagaaacccaaggttggagggtgggatgagtaccctctgaaaaagggaatttgctggtgaaaagaggctggatcttgtggaagactgtcttggatggggaagtactacctggagatttcaaattcacttggcctgcaaacaacagagttatccgtatcttccacatgtgaatgtcattgcaagggtgactctagacaaactacaaaccgatggaccgtcaagctccccaggagccccttggatggcagcgttgcttcagagtgtttcctgtttctggaattccttgttagggaactttaaagaagaaaagaaaaacttgaattgtgttgaattactgtatcttttacttttttttttttgaaaagataaacttgtaaatagagtgatttg

SEQ ID NO: 50769 - DNA, 2280 bp, Artificial Sequence
  derived and/or modified sequence
atgggcctgcccgccctggagttcagcgactgctgcctggacagcccccacttcagagagaccctgaagagccacgaggccgagctggacaagaccaacaagttcatcaaggagctgatcaaggacggcaagagcctgatcagcgccctgaagaacctgagcagcgccaagagaaagttcgccgacagcctgaacgagttcaagttccagtgcatcggcgacgccgagaccgacgacgagatgtgcatcgccagaagcctgcaggagttcgccaccgtgctgagaaacctggaggacgagagaatcagaatgatcgagaacgccagcgaggtgctgatcacccccctggagaagttcagaaaggagcagatcggcgccgccaaggaggccaagaagaagtacgacaaggagaccgagaagtactgcggcatcctggagaagcacctgaacctgagcagcaagaagaaggagagccagctgcaggaggccgacagccaggtggacctggtgagacagcacttctacgaggtgagcctggagtacgtgttcaaggtgcaggaggtgcaggagagaaagatgttcgagttcgtggagcccctgctggccttcctgcagggcctgttcaccttctaccaccacggctacgagctggccaaggacttcggcgacttcaagacccagctgaccatcagcatccagaacaccagaaacagattcgagggcaccagaagcgaggtggagagcctgatgaagaagatgaaggagaaccccctggagcacaagaccatcagcccctacaccatggagggctacctgtacgtgcaggagaagagacacttcggcaccagctgggtgaagcactactgcacctaccagagagacagcaagcagatcaccatggtgcccttcgaccagaagagcggcggcaagggcggcgaggacgagagcgtgatcctgaagagctgcaccagaagaaagaccgacagcatcgagaagagattctgcttcgacgtggaggccgtggacagacccggcgtgatcaccatgcaggccctgagcgaggaggacagaagactgtggatggaggccatggacggcagagagcccgtgtacaacagcaacaaggacagccagagcgagggcaccgcccagctggacagcatcggcttcagcatcatcagaaagtgcatccacgccgtggagaccagaggcatcaacgagcagggcctgtacagaatcgtgggcgtgaacagcagagtgcagaagctgctgagcgtgctgatggaccccaagaccgccagcgagaccgagaccgacatctgcgccgagtgggagatcaagaccatcaccagcgccctgaagacctacctgagaatgctgcccggccccctgatgatgtaccagttccagagaagcttcatcaaggccgccaagctggagaaccaggagagcagagtgagcgagatccacagcctggtgcacagactgcccgagaagaacagacagatgctgcagctgctgatgaaccacctggccaacgtggccaacaaccacaagcagaacctgatgaccgtggccaacctgggcgtggtgttcggccccaccctgctgagaccccaggaggagaccgtggccgccatcatggacatcaagttccagaacatcgtgatcgagatcctgatcgagaaccacgagaagatcttcaacaccgtgcccgacatgcccctgaccaacgcccagctgcacctgagcagaaagaagagcagcgacagcaagccccccagctgcagcgagagacccctgaccctgttccacaccgtgcagagcaccgagaagcaggagcagagaaacagcatcatcaacagcagcctggagagcgtgagcagcaaccccaacagcatcctgaacagcagcagcagcctgcagcccaacatgaacagcagcgaccccgacctggccgtggtgaagcccaccagacccaacagcctgccccccaaccccagccccaccagccccctgagccccagctggcccatgttcagcgcccccagcagccccatgcccaccagcagcaccagcagcgacagcagccccgtgagcacccccttcagaaaggccaaggccctgtacgcctgcaaggccgagcacgacagcgagctgagcttcaccgccggcaccgtgttcgacaacgtgcaccccagccaggagcccggctggctggagggcaccctgaacggcaagaccggcctgatccccgagaactacgtggagttcctgtag

SEQ ID NO: 50770 - DNA, 1167 bp, Artificial Sequence
  derived and/or modified sequence
tgagcccagctggacagcatcggcttcagcatcatcagaaagtgcatccacgccgtggagaccagaggcatcaacgagcagggcctgtacagaatcgtgggcgtgaacagcagagtgcagaagctgctgagcgtgctgatggaccccaagaccgccagcgagaccgagaccgacatctgcgccgagtgggagatcaagaccatcaccagcgccctgaagacctacctgagaatgctgcccggccccctgatgatgtaccagttccagagaagcttcatcaaggccgccaagctggagaaccaggagagcagagtgagcgagatccacagcctggtgcacagactgcccgagaagaacagacagatgctgcagctgctgatgaaccacctggccaacgtggccaacaaccacaagcagaacctgatgaccgtggccaacctgggcgtggtgttcggccccaccctgctgagaccccaggaggagaccgtggccgccatcatggacatcaagttccagaacatcgtgatcgagatcctgatcgagaaccacgagaagatcttcaacaccgtgcccgacatgcccctgaccaacgcccagctgcacctgagcagaaagaagagcagcgacagcaagccccccagctgcagcgagagacccctgaccctgttccacaccgtgcagagcaccgagaagcaggagcagagaaacagcatcatcaacagcagcctggagagcgtgagcagcaaccccaacagcatcctgaacagcagcagcagcctgcagcccaacatgaacagcagcgaccccgacctggccgtggtgaagcccaccagacccaacagcctgccccccaaccccagccccaccagccccctgagccccagctggcccatgttcagcgcccccagcagccccatgcccaccagcagcaccagcagcgacagcagccccgtgagacccgaggaggccgtgcacgaggacagcagcacccccttcagaaaggccaaggccctgtacgcctgcaaggccgagcacgacagcgagctgagcttcaccgccggcaccgtgttcgacaacgtgcaccccagccaggagcccggctggctggagggcaccctgaacggcaagaccggcctgatccccgagaactacgtggagttcctgtag

SEQ ID NO: 50771 - protein, 293 aa, Artificial Sequence
  derived and/or modified sequence
MAAAAAAAVAGVGRGGGGAEPRQERSRARGWAGVERSEGRSRMEPGEELEEEGSPGGREDGFTAEHLAAEAMAADMDPWLVFDARTTPATELDAWLAKYPPSQVTRYGDPGSPNSEPVGWIAVYGQGYSPNSGDVQGLQAAWEALQTSGRPITPGTLRQLAITHHVLSGKWLMHLAPGFKLDHAWAGIARAVVEGQLQVAKVSPRAKEGGRQVICVYTDDFTDRLGVLEADSAIRAAGIKCLLTYKPDVYTYLGIYRANRWHLCPTLYESRFQLGGSARGSRVLDRANNVELT

SEQ ID NO: 50772 - DNA, 1619 bp, Artificial Sequence
  derived and/or modified sequence
cggccgctgcggccgctgaggcccgcggctccgccctgtggctgcgcctgtctataaagttgttgttgaggtggcgcggcgctaagatggcggcggcggcggcggcggccgtggcgggggtggggcgcggtggcggtggcgcggagccacggcaggagcggagccgggcccggggctgggccggcgtcgaacgcagcgaaggccggagcaggatggaaccaggtgaggagctggaagaggagggctctccaggtggccgtgaggatggcttcaccgccgagcacctggctgcagaggccatggcagctgacatggacccctggctagtgtttgatgcccgcacaacgcctgccactgagctggatgcctggctggccaagtacccaccatcccaagttacccgctatggggaccccggttcacccaactcagagcctgtgggctggattgcagtgtatgggcagggctacagccccaactccggggacgtgcagggcctgcaggcagcctgggaagctctgcagaccagtgggcggcccatcacaccgggtaccctgcgccagctcgccatcacccaccacgtgctctcgggcaagtggcttatgcatctggcaccgggcttcaagctggaccacgcctgggctggcattgcccgggccgtggttgaaggccagcttcaggtggccaaggtgagcccacgtgccaaggagggtgggcgccaggtcatctgtgtttacacggacgacttcacggaccgcttgggtgtactggaggcggattcagccatccgtgcagcgggcattaagtgcctgctcacctacaagcctgatgtctacacctacctgggcatctaccgggccaatcgctggcacctctgccccactctctatgagagccgtttccagcttgggggtagtgcccgtggctcccgagtgcttgaccgtgccaacaacgtggaactgacctaggggggccaaattggggagactgcccactcccccctccatgctggggttggatcctcctgtcttcctccttgtcctatgaaggccacaccccccagctctggggactcctaggtcacttgggaactacctgcatcttcagtccccttgaacttctgccctctgttcagggctgacacaagccccacaggctggggggctccggttccctgagggatgagccttcagcctccctttgtaatgctgctcctctccactgcccagcaccatgagttgggtgcagacacctagaaggagagacttcttggaacgctcatcccccgctatacctccccttcctcctgcatctccccttctttccttccccctcaggagagagaaaacttagtgcttccagcccttcttggagccttcatggtccaggggtaggggccccactggcctgagcatgccattttgaggggagggtagttgtgcctacttatcccctggcagaggggatgccaggaccatggacatgaggcttgcccatccctgccaacttacacagcctgtaccactgtccccccttccttggctactttgacatgtgcctgctcctggcatttcaataaaacccggcttgggtctgtgtcttgagtgttttttaaaata

SEQ ID NO: 50773 - DNA, 882 bp, Artificial Sequence
  derived and/or modified sequence
atggccgccgccgccgccgccgccgtggccggcgtgggcagaggcggcggcggcgccgagcccagacaggagagaagcagagccagaggctgggccggcgtggagagaagcgagggcagaagcagaatggagcccggcgaggagctggaggaggagggcagccccggcggcagagaggacggcttcaccgccgagcacctggccgccgaggccatggccgccgacatggacccctggctggtgttcgacgccagaaccacccccgccaccgagctggacgcctggctggccaagtacccccccagccaggtgaccagatacggcgaccccggcagccccaacagcgagcccgtgggctggatcgccgtgtacggccagggctacagccccaacagcggcgacgtgcagggcctgcaggccgcctgggaggccctgcagaccagcggcagacccatcacccccggcaccctgagacagctggccatcacccaccacgtgctgagcggcaagtggctgatgcacctggcccccggcttcaagctggaccacgcctgggccggcatcgccagagccgtggtggagggccagctgcaggtggccaaggtgagccccagagccaaggagggcggcagacaggtgatctgcgtgtacaccgacgacttcaccgacagactgggcgtgctggaggccgacagcgccatcagagccgccggcatcaagtgcctgctgacctacaagcccgacgtgtacacctacctgggcatctacagagccaacagatggcacctgtgccccaccctgtacgagagcagattccagctgggcggcagcgccagaggcagcagagtgctggacagagccaacaacgtggagctgacctag

SEQ ID NO: 50774 - DNA, 882 bp, Artificial Sequence
  derived and/or modified sequence
atggcagccgccgccgctgccgccgtggcaggtgtcgggcggggcggtggtggggccgagcctagacaggagaggagcagagcccgcggttgggccggcgtggaacgctccgaagggcggtccaggatggagccaggagaggagctcgaagaagaaggatcgcccggtggccgtgaggatggattcaccgcggagcaccttgccgccgaagctatggccgccgacatggatccgtggcttgtgtttgatgcaagaaccacacctgctactgaactcgacgcatggttggcaaagtaccctccgtcacaggtcaccaggtacggcgacccaggcagtccgaacagcgagccggtaggctggatcgccgtctacgggcagggctattccccaaactccggggatgtgcagggcttacaggctgcatgggaggcactgcagacctcagggcgccctatcactcccggcaccctcagacaactggcaatcacccaccacgttctgagcgggaaatggctcatgcacttggccccaggtttcaagctggatcacgcttgggccggtattgcgagggccgtcgtggagggacaactgcaggtcgccaaagttagtccacgggcaaaagaaggaggacggcaggtgatttgtgtctacaccgacgattttactgatcgtctgggagtcctcgaagccgactcggctattcgcgctgccggaataaaatgcctgctgacttacaaaccagacgtctatacttaccttggcatataccgcgccaataggtggcacctgtgtccaacactctatgagtccagattccagctgggagggtcagcgcgcggtagtcgggtgcttgatcgtgctaacaatgtcgaactgacatag

SEQ ID NO: 50775 - DNA, 882 bp, Artificial Sequence
  derived and/or modified sequence
atggctgctgctgctgctgctgctgtggccggcgtgggccggggcggcggcggcgctgagccccggcaggagaggagccgggcccggggctgggccggcgtggagaggtctgagggccgcagcaggatggagcctggagaggagctggaggaggagggcagccctgggggcagagaagatggcttcaccgctgagcacctggccgctgaggccatggctgctgacatggacccctggctggtgtttgatgcccggaccaccccagccacagagctggatgcctggctggccaagtacccacccagccaggtgaccaggtatggagaccccggcagccccaacagcgagcctgtgggctggattgctgtgtatggccagggctacagccccaacagcggagatgtgcagggcctgcaggccgcctgggaggccctgcagaccagcggccggcccatcaccccaggcaccctgcggcagctggccatcacccaccacgtgctgagcggcaagtggctgatgcacctggcccctggcttcaagctggaccacgcctgggccggcatcgcccgggctgtggtggagggccagctgcaggtggccaaggtgagcccccgggccaaggagggcggccggcaggtgatctgtgtgtacacagatgacttcacagaccggctgggcgtgctggaggccgacagcgccatccgggctgctggcatcaagtgcctgctgacctacaagccagatgtgtacacctacctgggcatctaccgggccaaccgctggcacctgtgccccaccctgtatgagagccgcttccagctgggcggcagcgcccggggcagccgggtgctggaccgggccaacaacgtggagctgacctag

SEQ ID NO: 50776 - DNA, 882 bp, Artificial Sequence
  derived and/or modified sequence
atggccgccgccgccgccgccgccgtggccggcgtgggccggggcgggggaggagcagagccgagacaggaaaggtcacgtgcccgcggatgggctggggtcgaaagatccgaagggcgctcgcgcatggagcccggagaggagctggaagaggaggggtcaccaggcggaagggaagacggcttcaccgctgaacacctagcagcagaggcaatggccgctgacatggacccatggctggtgtttgacgccaggaccacccccgcgaccgagctggacgcctggttagcaaaatacccccccagtcaggttacaaggtacggtgatcctgggtcgcccaactccgagcccgtaggatggattgctgtgtatggccaggggtactctcctaattcaggggatgtgcaaggcttacaggcggcatgggaagctttacagacctctgggcggccaatcacccccggaacactcagacagcttgccattacccaccacgtcctcagcgggaagtggctgatgcatctcgctcctggatttaagcttgaccatgcttgggcaggaatcgcgagggccgtggttgagggtcaactgcaggtagcgaaggtctctcctcgcgccaaagagggcggtcgccaggttatttgcgtgtatacggacgacttcacagaccgattgggtgtcctggaggcagacagtgctattagggcggcggggatcaaatgtctcctaacctacaaacccgacgtctacacatatttggggatataccgcgcaaatcgttggcacctatgccccacactgtatgaaagccgcttccaactcggagggagcgccagggggagcagagtgttggacagggcgaacaatgtcgaactcacctag

SEQ ID NO: 50777 - DNA, 882 bp, Artificial Sequence
  derived and/or modified sequence
atggccgcagcagctgctgcagccgtggccggagtcgggaggggcggaggcggtgccgagcctagacaggaaagaagcagggcaagaggttgggccggagtggagcggagtgagggacgatcacgtatggaaccaggcgaagagctggaagaggagggttctcctggcggtcgcgaggacggttttacggcggagcatctggcggcagaggcaatggccgctgatatggacccatggctcgtattcgacgcaaggacaacacccgcaacagaactggacgcgtggttggccaagtatccaccatctcaggtgactagatatggcgatcccggttctccaaactctgagcccgttggttggattgcagtttacggtcagggttactctcctaattctggggatgttcagggtctccaggccgcttgggaagctctgcagacgtcgggtcgccctattactcctggtacgctgcggcagttagctattactcaccacgttttgagtgggaagtggttgatgcacttggccccagggtttaagttagatcatgcatgggcaggaatcgcccgtgccgtcgtggagggacagctccaggtcgctaaagtatcacctcgcgctaaagagggcggaagacaggttatatgcgtgtacactgatgatttcacggacagattaggcgtactcgaggccgacagcgcgatccgggctgccggaatcaagtgcctgttgacctataaacccgacgtttatacatacctagggatatatcgggcaaacaggtggcacctgtgtccaacgctgtatgaaagtagattccaactcggaggctccgcgaggggttccagggtactggaccgtgccaacaacgtcgagctgacatag

SEQ ID NO: 50778 - protein, 522 aa, Artificial Sequence
  derived and/or modified sequence
MASASSGPSSSVGFSSFDPAVPSCTLSSAASGIKRPMASEVPYASGMPIKKIGHRSVDSSGETTYKKTTSSALKGAIQLGITHTVGSLSTKPERDVLMQDFYVVESIFFPSEGSNLTPAHHYNDFRFKTYAPVAFRYFRELFGIRPDDYLYSLCSEPLIELCSSGASGSLFYVSSDDEFIIKTVQHKEAEFLQKLLPGYYMNLNQNPRTLLPKFYGLYCVQAGGKNIRIVVMNNLLPRSVKMHIKYDLKGSTYKRRASQKEREKPLPTFKDLDFLQDIPDGLFLDADMYNALCKTLQRDCLVLQSFKIMDYSLLMSIHNIDHAQREPLSSETQYSVDTRRPAPQKALYSTAMESIQGEARRGGTMETDDQFVKKLEHSWKALVHDGDTVSVHRPGFYAERFQRFMCNTVFKKIPLKPSPSKKFRSGSSFSRRAGSSGNSCITYQPSVSGEHKAQVTTKAEVEPGVHLGRPDVLPQTPPLEEISEGSPIPDPSFSPLVGETLQMLTTSTTLEKLEVAESEFTH

SEQ ID NO: 50779 - DNA, 1569 bp, Artificial Sequence
  derived and/or modified sequence
atggcgtccgctagcagcggcccctcttcatcagtgggctttagttcctttgacccagcagtccctagctgtaccttgagcagtgctgcatcaggtattaaacggcccatggcctccgaagtaccctacgcctccggaatgcctatcaagaagatcgggcatcgttcagtggactctagcggggagaccacttacaagaaaacaactagttccgccctgaagggagcaattcagctgggcatcacacataccgtaggcagcctctctactaagccagagcgagatgtgctcatgcaggatttctacgtggtggagagcatcttcttccctagcgagggctcaaacctcaccccagctcaccattataacgatttccgattcaagacctacgcccctgtggccttcaggtatttccgggaacttttcggcattcgcccagatgattatctctattcactttgctccgagcctctcatagagctatgctcctctggagcttctggatctctattctacgtttcatccgacgatgagtttatcattaaaactgtccagcacaaagaagcagaatttctgcagaagctcttgccagggtactatatgaacctcaaccaaaaccctcgcactttgcttcccaaattctatggcctgtattgtgttcaagcaggaggtaaaaacataaggattgtagttatgaacaacctgctgcctaggtcggttaaaatgcatattaagtacgatctcaaagggtccacatataagcgtcgcgcatcccaaaaagaaagggaaaaacccctacctaccttcaaggatctggactttctccaggatatcccagacggcctctttctggacgctgatatgtataatgccctgtgcaagactcttcaacgggactgtctggtgctacaaagcttcaaaattatggactatagtttgctgatgtccattcataatattgaccatgctcaaagagagcccctgtcctcagaaacgcagtattccgttgatacaagaaggccggcccctcagaaggccctttacagcacagccatggaaagcatacaaggcgaggctcggaggggtgggaccatggagaccgacgatcagttcgtgaaaaagctcgaacacagctggaaagctttggtacacgacggcgacaccgtctccgtgcaccgccccggcttctacgcggagcgttttcaaaggtttatgtgtaatactgtgttcaagaagatccctctgaagccaagcccctcaaaaaagttccgctctggtagttctttcagcaggcgcgcggggtcgtccggaaattcttgtattacctaccaaccatcagtgtctggtgagcataaggcccaagtgacgaccaaggcagaggttgagccgggtgtgcacctgggacggcccgacgtgctcccccagacgccacctctcgaggagatatccgagggcagtcccattcccgatcccagcttcagtccactggtgggggagaccctgcagatgttaaccacgagcaccacattggaaaaactagaggtcgccgagtcggagtttacccattag

SEQ ID NO: 50780 - DNA, 1569 bp, Artificial Sequence
  derived and/or modified sequence
atggccagcgccagcagcggccccagcagctctgtgggcttcagcagctttgatcctgctgtgcccagctgcaccctgagcagcgctgccagcggcatcaagaggcccatggccagcgaggtgccctatgccagcggcatgcccatcaagaagattggccacaggtctgtggacagcagcggggagaccacctacaagaagaccaccagcagcgccctgaagggggccatccagctgggcatcacccacacagtgggcagcctgagcaccaagccagagagagatgtgctgatgcaggacttctacgtggtggagagcatcttcttccccagcgagggcagcaacctgaccccagcccaccactacaatgacttccgcttcaagacctacgcccctgtggccttccgctacttccgggagctgtttggcatccggccagatgactacctgtacagcctgtgcagcgagcccctgattgagctgtgcagcagcggggccagcggcagcctcttctacgtgtccagtgatgatgagttcatcatcaagacagtgcagcacaaggaggccgagttcctgcagaagctgctgcccggctactacatgaacctgaaccagaaccccaggaccctgctgcccaagttctacggcctgtactgtgtgcaggccggcggcaagaacatcagaattgtggtgatgaacaacctgctgcccaggtctgtgaagatgcacatcaagtatgacctgaagggcagcacctacaagagaagagccagccagaaggagcgggagaagcccctgcccaccttcaaggacctggacttcctgcaggacatcccagatggcctcttcctggatgctgacatgtacaatgccctgtgcaagaccctgcagagggactgcctggtgctgcagagcttcaagatcatggactacagcctgctgatgagcatccacaacatcgaccacgcccagcgggagcccctgagcagcgagacccagtacagcgtggacaccaggaggcctgccccccagaaggccctgtacagcacagccatggagagcatccagggcgaggcccggcggggcggcaccatggagacagatgaccagtttgtgaagaagctggagcacagctggaaggccctggtgcatgatggagacacagtgtctgtgcaccggcccggcttctacgccgagcgcttccagcgcttcatgtgcaacacagtgttcaagaagatccccctgaagcccagccccagcaagaagttccgcagcggcagcagcttcagcagaagagctggcagcagcggcaacagctgcatcacctaccagcccagcgtgtctggagagcacaaggcccaggtgaccaccaaggccgaggtggagcccggggtgcacctgggccgcccagatgtgctgccccagaccccacccctggaggagatcagcgagggcagccccatcccagaccccagcttcagccccctggtgggggagaccctgcagatgctgaccaccagcaccaccctggagaagctggaggtggccgagagcgagttcacccactag

SEQ ID NO: 50781 - DNA, 1569 bp, Artificial Sequence
  derived and/or modified sequence
atggccagcgccagcagcggccccagcagcagcgtgggcttcagctcattcgatccagcagttccttcctgtaccctaagctccgcagcctctgggataaagaggcctatggcctctgaggtcccctatgccagcggcatgccaattaaaaagatcggccaccggtccgttgattctagcggagagaccacatacaagaagaccactagtagcgcgttgaaaggcgctattcagcttggtatcacccatactgtcggatctctttctacaaaacccgagcgggatgtgctgatgcaggatttttacgtcgtcgagtctattttctttccttccgaaggatctaacctgaccccagcacaccactacaacgattttaggttcaagacttatgctcctgtcgctttccgctattttagagaactgttcgggatccggccagatgactacctgtatagtctttgtagcgaacctctgattgaactatgttccagcggcgccagtgggtctctgttttacgtgtcctccgacgacgaatttatcatcaagacggttcaacacaaggaagccgagtttctgcagaagttgctgcctgggtattacatgaatctgaaccagaatcccagaacactgctaccaaaattttacgggctgtactgtgtgcaggccggcggtaaaaatattcggattgtcgtcatgaacaacctgctgcctcgctcagtgaagatgcatattaagtacgacctgaaaggctccacctataagagacgggctagccagaaagagcgagagaaaccattgcctactttcaaagatctagatttcttacaggacatcccggatggactgttcctggacgcagatatgtataatgccctttgtaaaacacttcaacgggattgtctggtgctccagagttttaaaattatggactactccctcttgatgagtattcataacattgatcacgcccagcgtgagccattgtcatccgaaacccagtattccgttgatactcgaaggccagcgccacagaaggccctttactccacagccatggagagtattcagggagaagccagacgaggaggcacaatggagacagatgaccagttcgttaaaaagctcgagcattcgtggaaagccctggttcatgatggtgacacggtctcagtccaccggcccggcttttacgccgagcgcttccagcgattcatgtgtaataccgtatttaagaagatacctctgaaacccagtccatccaaaaagttccggtcgggttcgtcattctccagaagggccggcagcagcggaaacagctgcattacgtatcagccatccgtaagcggtgagcacaaggcccaggtgaccacaaaagccgaagtagagcccggagtgcacctggggcggcccgatgttctgccacagaccccccccttggaggaaattagtgaaggcagcccaatccccgacccatcttttagcccactagtgggcgagactctgcaaatgttaacaacgtcaactacactcgaaaaactcgaagtagccgagtcggagttcacacactag

SEQ ID NO: 50782 - DNA, 2297 bp, Artificial Sequence
  derived and/or modified sequence
attttttgcttggctacccggagtgaagcggccgggttgggcgattaacaggccgtggttaggaaggacggagaaggggcgttcgctcctttgggacttttcatgcctcgtttttttttcagatgtggcttggtctgggcgcaaggtcccagcagccagcttaagcttactcttctgtgaaaggggaaagtatcccctgtggaaagcggttaaacttgtggagggggtgcgggacgtgagttcttccccatgccaggcgaatggtgtggccttgagctggtccaggagccggctcgacgtgtctgagggaggccccggagggggcggggaggtggcccacagaacgcgggttctgtaaagagacgttgggaagattcgattccgagaagaggaagaaccggattgaaagagagccaggccgctgagggggagggggctgctaagatggcgtcggcctcctccgggccgtcgtcttcggtcggtttttcatcctttgatcccgcggtcccttcctgtaccttgtcctcagcagcatctggaatcaagagacccatggcatctgaggtgccttatgcctctggcatgcccatcaagaaaataggccatagaagtgttgattcctcaggagagacaacatataaaaagacaacctcatcagccttgaaaggtgccatccagttaggcattacccacactgtggggagcctgagtaccaaaccagagcgtgatgtcctcatgcaagatttctacgtggttgagagtatcttctttcccagtgaagggagcaacctgacccctgctcatcactacaatgactttcgtttcaagacctatgcacctgttgccttccgctacttccgggagctatttggtatccggcccgatgattacttgtattccctctgcagtgagccgctgattgaactctgtagctctggagctagtggttccctattctatgtgtccagcgacgatgagttcattattaagacagtccaacataaagaggcggaatttctgcagaagctgcttccaggatactacatgaacctcaaccagaaccctcggactttgctgcctaaattctatggactgtactgtgtgcaggcaggtggcaagaacattcggattgtggtgatgaacaatcttttaccaagatcggtaaaaatgcatatcaaatatgacctcaaaggctcaacctacaaacggcgggcttcccagaaagagcgagagaagcctcttcccacatttaaagacctagacttcttacaagacatccctgatggtctttttttggatgctgacatgtacaacgctctctgtaagaccctgcagcgtgactgtttggtgctgcagagcttcaagataatggattacagcctcttgatgtcaatccataatatagatcatgcacaacgagagcccttaagcagtgaaacacagtactcagttgatactcgaagaccggccccccaaaaggctctgtattccacagccatggaatccatccagggagaggctcgacggggtggtaccatggagactgatgaccagtttgttaagaagttggagcactcttggaaagccctggtacatgacggagacactgtctcagtgcatcgcccaggcttctacgctgaacggttccagcgcttcatgtgcaacacagtatttaagaagattcccttgaagccttctccttccaaaaagtttcggtctggctcatctttctctcggcgagcaggctccagtggcaactcctgcattacttaccagccatcggtctctggggaacacaaggcacaagtgacaacaaaggcagaagtggagccaggcgttcaccttggtcgtcctgatgttttacctcagactccacctttggaggaaatcagtgagggctcgcctattcctgaccccagtttctcacctctagttggagagactttgcaaatgctaactacaagtacaaccttggaaaagcttgaagttgcagagtcagagttcacccattaagcgcaaagcctcagaagacctggaacaagattctgccatctctgtgatcccaagatgtcagcccttgccccagcaatgctgaattttcttctacttggtcatcaaaaaaggagtgtaatagaagtgaggggagctgctcctccatcttcttcctgaagaagaaccttctctccttcctcttcctcatgaatgggccttagtgcctcagagagttgaggaccgcagcatcccctccactccagagttgggtggtatggattttcaactggccaaccctttgcctc

SEQ ID NO: 50783 - DNA, 1569 bp, Artificial Sequence
  derived and/or modified sequence
atggcatctgctagttctggccctagtagctccgtcggattcagttctttcgaccccgctgttccttcttgtacattatcctcagccgcatccgggatcaagcgcccaatggcctctgaagtgccatacgcatctggaatgccaatcaaaaagataggtcaccggagtgtcgattcaagcggcgagacaacatacaagaagactacttctagcgcactgaagggtgcaattcagctgggcattacgcacactgtcgggagcctcagcacaaagcctgagcgcgacgtgctgatgcaagacttctacgtcgtcgagagcatttttttcccttctgagggatcaaacctgacacccgcacatcactacaacgattttcggttcaagacctatgccccagtggcttttaggtactttcgagaattgtttggaattcggccagatgattacctctattcactatgctcggagccgctgatcgagctttgcagctcgggtgccagtggatcattattttacgtgtctagcgatgatgagttcatcattaaaaccgttcagcacaaagaagccgaatttcttcagaagctgctgccaggctattatatgaacttaaaccagaatccccgtacgcttctccctaaattctatggactttattgcgtgcaagcaggcggaaaaaatatccgtattgtcgtgatgaacaatctgctgccccgttctgtgaagatgcatattaagtacgacttaaagggctcgacatacaagaggagagcctcacagaaggagcgagagaaacccttgcccacctttaaagacctcgattttttacaagatatcccagacggactgttcctagacgctgacatgtacaacgcgctgtgtaaaaccctacagcgcgattgcctcgtgttgcagagctttaagatcatggattacagtcttctgatgtctatccataatatcgatcacgctcagcgagaacctctttcttccgaaacgcagtacagtgtagacaccaggagacccgctccacagaaagccctctatagcacagcgatggagagcattcagggggaggcaagaaggggtggcaccatggagacagatgaccagttcgttaaaaaactggagcactcgtggaaggccctggttcacgacggcgatacagtcagcgtccaccggccaggtttttatgccgaacgttttcagaggttcatgtgtaacacagtgttcaaaaaaatccctctgaagccatcgccatccaagaaattccgtagcgggagctcattctcacggagagccggatctagtggaaacagctgcattacatatcagccctcagtgagcggagagcataaggcacaggtcaccactaaggccgaggtcgagccaggtgtgcatctggggaggcccgacgtgttaccacaaactccccctcttgaggaaatctcagaggggagccctatacctgatccaagctttagtcccctcgtcggggagacactgcaaatgctgacaacatcaactacgcttgagaagttggaagtcgctgagtccgagtttacccactag

SEQ ID NO: 50784 - DNA, 1569 bp, Artificial Sequence
  derived and/or modified sequence
atggccagcgccagcagcggccccagcagcagcgtgggcttcagcagcttcgaccccgccgtgcccagctgcaccctgagcagcgccgccagcggcatcaagagacccatggccagcgaggtgccctacgccagcggcatgcccatcaagaagatcggccacagaagcgtggacagcagcggcgagaccacctacaagaagaccaccagcagcgccctgaagggcgccatccagctgggcatcacccacaccgtgggcagcctgagcaccaagcccgagagagacgtgctgatgcaggacttctacgtggtggagagcatcttcttccccagcgagggcagcaacctgacccccgcccaccactacaacgacttcagattcaagacctacgcccccgtggccttcagatacttcagagagctgttcggcatcagacccgacgactacctgtacagcctgtgcagcgagcccctgatcgagctgtgcagcagcggcgccagcggcagcctgttctacgtgagcagcgacgacgagttcatcatcaagaccgtgcagcacaaggaggccgagttcctgcagaagctgctgcccggctactacatgaacctgaaccagaaccccagaaccctgctgcccaagttctacggcctgtactgcgtgcaggccggcggcaagaacatcagaatcgtggtgatgaacaacctgctgcccagaagcgtgaagatgcacatcaagtacgacctgaagggcagcacctacaagagaagagccagccagaaggagagagagaagcccctgcccaccttcaaggacctggacttcctgcaggacatccccgacggcctgttcctggacgccgacatgtacaacgccctgtgcaagaccctgcagagagactgcctggtgctgcagagcttcaagatcatggactacagcctgctgatgagcatccacaacatcgaccacgcccagagagagcccctgagcagcgagacccagtacagcgtggacaccagaagacccgccccccagaaggccctgtacagcaccgccatggagagcatccagggcgaggccagaagaggcggcaccatggagaccgacgaccagttcgtgaagaagctggagcacagctggaaggccctggtgcacgacggcgacaccgtgagcgtgcacagacccggcttctacgccgagagattccagagattcatgtgcaacaccgtgttcaagaagatccccctgaagcccagccccagcaagaagttcagaagcggcagcagcttcagcagaagagccggcagcagcggcaacagctgcatcacctaccagcccagcgtgagcggcgagcacaaggcccaggtgaccaccaaggccgaggtggagcccggcgtgcacctgggcagacccgacgtgctgccccagaccccccccctggaggagatcagcgagggcagccccatccccgaccccagcttcagccccctggtgggcgagaccctgcagatgctgaccaccagcaccaccctggagaagctggaggtggccgagagcgagttcacccactag

SEQ ID NO: 50785 - protein, 500 aa, Artificial Sequence
  derived and/or modified sequence
MASASSGPSSSVGFSSFDPAVPSCTLSSASGIKRPMASEVPYASGMPIKKIGHRSVDSSGETTYKKTTSSALKGAIQLGITHTVGSLSTKPERDVLMQDFYVVESIFFPSEGSNLTPAHHYNDFRFKTYAPVAFRYFRELFGIRPDDYLYSLCSEPLIELCSSGASGSLFYVSSDDEFIIKTVQHKEAEFLQKLLPGYYMNLNQNPRTLLPKFYGLYCVQAGGKNIRIVVMNNLLPRSVKMHIKYDLKGSTYKRRASQKEREKPLPTFKDLDFLQDIPDGLFLDADMYNALCKTLQRDCLVLQSFKIMDYSLLMSIHNIDHAQREPLSSETQYSVDTRRPAPQKALYSTAMESIQGEARRGGTMETDDHMGGIPARNSKGERLLLYIGIIDILQSYRFVKKLEHSWKALVHDGDTVSVHRPGFYAERFQRFMCNTVFKKIPCVHLGRPDVLPQTPPLEEISEGSPIPDPSFSPLVGETLQMLTTSTTLEKLEVAESEFTH

SEQ ID NO: 50786 - DNA, 1503 bp, Artificial Sequence
  derived and/or modified sequence
atggccagtgcttccagtggccccagttctagtgttggattttcctctttcgaccccgccgtgccttcatgtacgttgagcagcgcatcgggaatcaagcgtccaatggcctcagaagtcccttatgcttcaggaatgccgattaagaagatcgggcatcgcagcgtcgattcctcgggagagacaacctataagaagactaccagcagtgcgctaaaaggggccatccagctaggaattacccatactgtgggaagcctgagtacaaagccagagcgggatgtactgatgcaggatttttacgtcgttgaaagtatattttttccttcagaaggcagtaatttaactccagcgcatcattataatgacttcagattcaagacctatgctcccgtagcgtttaggtacttccgagagctgtttggtattcgacccgatgactatctctacagtctttgcagtgaaccactgatcgaactgtgctccagcggggcctccggcagccttttctacgtcagtagcgacgatgaatttattattaaaaccgtgcagcacaaggaagccgagtttctacagaagctcctgccaggctattacatgaacctgaatcagaatcccagaacgctccttcctaaattttacgggctctattgcgttcaggccggcggtaagaacatcagaatcgtcgtaatgaataacttgctaccacggagtgtgaagatgcacatcaagtacgacctgaagggtagtacatacaagcggagagcttctcagaaggaaagggaaaagccccttcctactttcaaggacctcgactttctgcaggacatcccagacggtctgtttttagacgccgatatgtacaacgcactttgtaagacactgcagagagactgtcttgttctgcaatcatttaaaatcatggactatagtttgcttatgtccattcataatatagatcatgcccagagggaaccacttagtagtgagacacagtatagtgtggatacgaggcggcccgctcctcagaaagcattgtattctactgcaatggaaagtatccaaggggaggctaggagagggggcacgatggaaacagacgatcatatgggcggaatacctgctcgaaattctaaaggtgagaggctgttactttatattggaattattgatatcttgcagtcttaccggttcgtgaaaaagttggagcattcgtggaaggctttggtgcacgacggagacacagtgtctgtgcaccgacctgggttctacgctgaacggttccagaggttcatgtgtaataccgtttttaaaaagataccctgtgtgcatctggggagacctgatgtgttgccacaaacccctccattggaggagatctctgagggatcccctattcctgacccatcgtttagtccactggtgggtgaaaccctccaaatgttaaccacttctacaacacttgaaaaactcgaggtcgcagaatccgagttcactcactag

SEQ ID NO: 50787 - DNA, 1503 bp, Artificial Sequence
  derived and/or modified sequence
atggccagcgccagcagcggccccagcagctctgtgggcttcagcagctttgatcctgctgtgcccagctgcaccctgagcagcgccagcggcatcaagaggcccatggccagcgaggtgccctatgccagcggcatgcccatcaagaagattggccacaggtctgtggacagcagtggagagaccacctacaagaagaccaccagcagcgccctgaagggggccatccagctgggcatcacccacacagtgggcagcctgagcaccaagccagagagagatgtgctgatgcaggacttctacgtggtggagagcatcttcttccccagcgagggcagcaacctgaccccagcccaccactacaatgacttccgcttcaagacctacgcccctgtggccttccgctacttccgggagctgtttggcatccggccagatgactacctgtacagcctgtgcagcgagcccctcatcgagctgtgcagcagcggggccagcggcagcctcttctacgtgtccagtgatgatgagttcatcatcaagacagtgcagcacaaggaggccgagttcctgcagaagctgctgcccggctactacatgaacctgaaccagaaccccaggaccctgctgcccaagttctacggcctgtactgtgtgcaggccggcggcaagaacatccgcatcgtggtgatgaacaacctgctgcccaggtctgtgaagatgcacatcaagtatgacctgaagggcagcacctacaagaggcgggccagccagaaggagcgggagaagcccctgcccaccttcaaggacctggacttcctgcaggacatcccagatggcctcttcctggatgctgacatgtacaatgccctgtgcaagaccctgcagagggactgcctggtgctgcagagcttcaagatcatggactacagcctgctgatgagcatccacaacatcgaccacgcccagcgggagcccctgagcagcgagacccagtacagcgtggacacccggcggcctgccccccagaaggccctgtacagcacagccatggagagcatccagggcgaggccaggagaggaggcaccatggagacagatgaccacatgggcggcatcccagccaggaacagcaaaggagagcggctgctgctgtacatcggcatcatcgacatcctgcagagctacagatttgtgaagaagctggagcacagctggaaggccctggtgcatgatggagacacagtgtctgtgcacaggcctggcttctatgcagagcgcttccagcgcttcatgtgcaacacagtgttcaagaagatcccctgtgtgcacctgggccgcccagatgtgctgccccagaccccacccctggaggagatcagcgagggcagccccatcccagaccccagcttcagccccctggtgggggagaccctgcagatgctgaccaccagcaccaccctggagaagctggaggtggccgagagcgagttcacccactag

SEQ ID NO: 50788 - DNA, 1503 bp, Artificial Sequence
  derived and/or modified sequence
atggccagcgccagcagcggccccagcagcagcgtgggcttcagcagcttcgaccccgccgtcccttcctgcacactttcgtctgccagcggcataaaacggccgatggccagcgaagttccttatgcatccggcatgccaattaagaaaatcggacaccggagtgtggacagctctggggaaacaacctacaagaaaacaacttcatccgcactgaagggggctattcagctcggcatcacgcacaccgtggggagcctctccaccaaacccgagcgggatgtgctcatgcaagacttctacgtcgtcgagtcaatcttctttccttctgaaggctcgaatttaactccagcgcaccactacaatgacttccgctttaagacatatgcaccggtggctttccgttacttcagagaactgtttggcataagaccagacgattacttgtactcactgtgttcagagcctctcatcgagttatgtagctcaggagcatccggctcgctgttctacgtgagctccgacgatgagttcattattaaaaccgtgcagcacaaggaagctgagttcttgcagaaactacttccaggctactatatgaatttaaatcaaaatccccgtactctcctacccaagttctacggactctattgcgtccaggcagggggaaaaaatatccggattgtggtgatgaacaacctcctgcctagatcagtgaagatgcacatcaagtacgacctgaaaggcagtacatacaaaagacgcgcatctcagaaagagagagagaagcccctccccacctttaaagatttagacttcctgcaggatatccccgacggtctgttcttggatgcggatatgtataatgcactctgcaagacccttcagagagactgcctggtcctccaatcgttcaaaattatggactactcgcttcttatgtctatccataacatcgaccacgctcagcgcgagccactcagttctgagacacaatattctgtggacactcggagacccgccccgcagaaagcactgtacagtactgctatggaatccatccaaggcgaagccagacgtggcggcactatggaaacggatgaccacatgggggggatccccgctagaaactctaaaggcgagcgcttattactctatattgggatcattgatattctccaatcgtaccggttcgtaaaaaaacttgagcattcctggaaggccctggtacatgatggggacaccgtcagtgtacacaggcctgggttctatgcggagagattccagcgctttatgtgtaatacagtatttaaaaaaataccatgtgttcacctgggacggcctgatgtcctcccacagactccacccttagaggagatcagcgaagggtctccaatcccagatccttcattttctcctctggtgggagagaccctccagatgctaacgacctcaacgacactagagaaactcgaagtggcggaaagcgagttcacccattag

SEQ ID NO: 50789 - DNA, 3613 bp, Artificial Sequence
  derived and/or modified sequence
attttttgcttggctacccggagtgaagcggccgggttgggcgattaacaggccgtggttaggaaggacggagaaggggcgttcgctcctttgggacttttcatgcctcgtttttttttcagatgtggcttggtctgggcgcaaggtcccagcagccagcttaagcttactcttctgtgaaaggggaaagtatcccctgtggaaagcggttaaacttgtggagggggtgcgggacgtgagttcttccccatgccaggcgaatggtgtggccttgagctggtccaggagccggctcgacgtgtctgagggaggccccggagggggcggggaggtggcccacagaacgcgggttctgtaaagagacgttgggaagattcgattccgagaagaggaagaaccggattgaaagagagccaggccgctgagggggagggggctgctaagatggcgtcggcctcctccgggccgtcgtcttcggtcggtttttcatcctttgatcccgcggtcccttcctgtaccttgtcctcagcatctggaatcaagagacccatggcatctgaggtgccttatgcctctggcatgcccatcaagaaaataggccatagaagtgttgattcctcaggagagacaacatataaaaagacaacctcatcagccttgaaaggtgccatccagttaggcattacccacactgtggggagcctgagtaccaaaccagagcgtgatgtcctcatgcaagatttctacgtggttgagagtatcttctttcccagtgaagggagcaacctgacccctgctcatcactacaatgactttcgtttcaagacctatgcacctgttgccttccgctacttccgggagctatttggtatccggcccgatgattacttgtattccctctgcagtgagccgctgattgaactctgtagctctggagctagtggttccctattctatgtgtccagcgacgatgagttcattattaagacagtccaacataaagaggcggaatttctgcagaagctgcttccaggatactacatgaacctcaaccagaaccctcggactttgctgcctaaattctatggactgtactgtgtgcaggcaggtggcaagaacattcggattgtggtgatgaacaatcttttaccaagatcggtaaaaatgcatatcaaatatgacctcaaaggctcaacctacaaacggcgggcttcccagaaagagcgagagaagcctcttcccacatttaaagacctagacttcttacaagacatccctgatggtctttttttggatgctgacatgtacaacgctctctgtaagaccctgcagcgtgactgtttggtgctgcagagcttcaagataatggattacagcctcttgatgtcaatccataatatagatcatgcacaacgagagcccttaagcagtgaaacacagtactcagttgatactcgaagaccggccccccaaaaggctctgtattccacagccatggaatccatccagggagaggctcgacggggtggtaccatggagactgatgaccatatgggtggcatccctgcccggaatagtaaaggggaaaggcttctgctttatattggcatcattgacattctacagtcttacaggtttgttaagaagttggagcactcttggaaagccctggtacatgacggagacactgtctcagtgcatcgcccaggcttctacgctgaacggttccagcgcttcatgtgcaacacagtatttaagaagattccctgcgttcaccttggtcgtcctgatgttttacctcagactccacctttggaggaaatcagtgagggctcgcctattcctgaccccagtttctcacctctagttggagagactttgcaaatgctaactacaagtacaaccttggaaaagcttgaagttgcagagtcagagttcacccattaagcgcaaagcctcagaagacctggaacaagattctgccatctctgtgatcccaagatgtcagcccttgccccagcaatgctgaattttcttctacttggtcatcaaaaaaggagtgtaatagaagtgaggggagctgctcctccatcttcttcctgaagaagaaccttctctccttcctcttcctcatgaatgggccttagtgcctcagagagttgaggaccgcagcatcccctccactccagagttgggtggtatggattttcaactggccaaccctttgcctccactattgaatttttttcagacccccattcttcatgctggaaatgggattgctggacttggcagctttctttcccctcgtctttgactaggaaccggactcttaatttcctcaggacagactagctggcacattatccctaccttagttctttctctctgactcctggaagaatactcctgtaatctctgtaaaggtttttgggggataagggtgtttaaccacctcccagctttcttcttctttttttttttctgaaaaaaggaaaaagcacacagcacacaatttcaagccattttcagatcagaactccagaagtgttgacaagatgcctattcgtagagttccctcagaagagccatggtgtttatgaagagaagagtagtgattgctctgccagaagcagctcctctttaaactcctcctctcttgatgaatttcttaaggctgaaggaatgaagagagtgggacatggggtaatctttatcccttttgttaaaacaggaggcagccatgggctgggagatcatagcccttcctaggcagaatcctgttcactgccaggctatagtaattattactattttgcaatttgaaatatattctggttgtttttctaaatgtgaagacttaccaaatgaattttagatcattctccagaggagattttttttgctcttctcatcttttccaacagtgttctcctgtttgtggagctaaggtaaagaggggacacttctgtctgtttaacagacagtccatatctgtgaggccagcaaatattttcttaaactcatggggagacagcagattcttgccttggtgaggtcattgctgtgccatatgtcctacccccctgtcttcatgcagggaagttggaaatgggggctacatatgccctctcctccccgtctacaagagttgtggttttccatctgatccttccactcttgtcaggggaagaagggggcctggtatctcaggcagattgttgaattcctgttctatcccttctctatcccaccctgccttgataatatgttagcccataccccaaataactgtctatattagacacccccagccagtttctggctgcctgtctttgctgccatgttttttacaagaaggaaagaattcttgctatttttttttcataatttactatttatgatgtatttaagtgttttattaaggacagagttctgttaggggtgggagggaatatttgagggagggctgggtcttagggaaaggaatggggaagcaacatttttattaagtgttactatttgcctctactttgtattgttcagaaatggcaaatacaatataaaagtgatatatggttttaatgtaataaactttaatgagttatttaga

SEQ ID NO: 50790 - DNA, 1503 bp, Artificial Sequence
  derived and/or modified sequence
atggcctccgctagctccgggccaagctcatccgttgggttttcctccttcgatcctgccgtaccatcgtgtacactgagctccgcaagcgggataaagcggcctatggcaagcgaggtcccctatgcgtccgggatgcccataaagaaaattggacacagatctgtggatagctctggtgagaccacttacaaaaagactactagctccgccctcaaaggggcaatccagctgggcataacccataccgtggggtccctgtcaacgaagcccgagcgcgatgttctcatgcaggacttttacgtggttgagagcatattcttcccttcggaaggaagcaatcttacacccgcacaccattacaatgacttccggttcaaaacttacgcccctgtggcctttcgatacttccgcgagctgttcgggattaggccagatgactacttgtattctttatgctcagaaccgctaatagagctctgttcatctggagcttctggatcactgttctacgtttcttccgatgatgagtttattatcaagaccgtgcagcacaaggaagccgagttcctgcaaaagctgcttccaggttactatatgaaccttaaccagaaccccagaacgcttctgccgaaattttatgggctatactgtgtgcaggccggaggcaagaacatcagaattgtggtcatgaacaacctgctcccccgatcagtcaaaatgcacatcaaatacgacctgaagggttcgacctacaagaggagggcatctcaaaaggagcgggagaagcctctgccgacctttaaggacctggatttcctccaggatatacctgacgggttgttccttgacgcggacatgtataacgctctgtgcaaaacccttcagcgggattgcttagtgctccagtctttcaagatcatggattactccctgctgatgagcatccataacatcgaccatgcacagcgcgagcctctgagctccgaaacacaatactcagttgatacaagaagaccggctcctcaaaaggctctgtattcgacggctatggagagcatacagggcgaggcacggaggggtggcaccatggaaacagatgatcatatgggtggaatcccagcccgaaatagcaagggagaaaggctcttgctttatataggcattattgatatcctgcagtcataccggttcgtcaaaaaattggaacactcctggaaggctctcgtccacgatggcgataccgtgagcgtgcatagaccaggtttctatgcagagagatttcagcggttcatgtgcaacacagtgttcaagaagatcccgtgtgtccacctgggacgcccagatgtactgcctcagacacctccgctggaagaaatctctgaggggagccctatcccagatccttctttcagccctctcgtgggcgagactctgcagatgctgaccacctcaactactctagagaagttggaagtagcagaatctgaattcacccattag

SEQ ID NO: 50791 - DNA, 1503 bp, Artificial Sequence
  derived and/or modified sequence
atggccagcgccagcagcggccccagcagcagcgtgggcttcagcagcttcgaccccgccgtgcccagctgcaccctgagcagcgccagcggcatcaagagacccatggccagcgaggtgccctacgccagcggcatgcccatcaagaagatcggccacagaagcgtggacagcagcggcgagaccacctacaagaagaccaccagcagcgccctgaagggcgccatccagctgggcatcacccacaccgtgggcagcctgagcaccaagcccgagagagacgtgctgatgcaggacttctacgtggtggagagcatcttcttccccagcgagggcagcaacctgacccccgcccaccactacaacgacttcagattcaagacctacgcccccgtggccttcagatacttcagagagctgttcggcatcagacccgacgactacctgtacagcctgtgcagcgagcccctgatcgagctgtgcagcagcggcgccagcggcagcctgttctacgtgagcagcgacgacgagttcatcatcaagaccgtgcagcacaaggaggccgagttcctgcagaagctgctgcccggctactacatgaacctgaaccagaaccccagaaccctgctgcccaagttctacggcctgtactgcgtgcaggccggcggcaagaacatcagaatcgtggtgatgaacaacctgctgcccagaagcgtgaagatgcacatcaagtacgacctgaagggcagcacctacaagagaagagccagccagaaggagagagagaagcccctgcccaccttcaaggacctggacttcctgcaggacatccccgacggcctgttcctggacgccgacatgtacaacgccctgtgcaagaccctgcagagagactgcctggtgctgcagagcttcaagatcatggactacagcctgctgatgagcatccacaacatcgaccacgcccagagagagcccctgagcagcgagacccagtacagcgtggacaccagaagacccgccccccagaaggccctgtacagcaccgccatggagagcatccagggcgaggccagaagaggcggcaccatggagaccgacgaccacatgggcggcatccccgccagaaacagcaagggcgagagactgctgctgtacatcggcatcatcgacatcctgcagagctacagattcgtgaagaagctggagcacagctggaaggccctggtgcacgacggcgacaccgtgagcgtgcacagacccggcttctacgccgagagattccagagattcatgtgcaacaccgtgttcaagaagatcccctgcgtgcacctgggcagacccgacgtgctgccccagaccccccccctggaggagatcagcgagggcagccccatccccgaccccagcttcagccccctggtgggcgagaccctgcagatgctgaccaccagcaccaccctggagaagctggaggtggccgagagcgagttcacccactag

SEQ ID NO: 50792 - protein, 562 aa, Artificial Sequence
  derived and/or modified sequence
MASASSGPSSSVGFSSFDPAVPSCTLSSAASGIKRPMASEVLEARQDSYISLVPYASGMPIKKIGHRSVDSSGETTYKKTTSSALKGAIQLGITHTVGSLSTKPERDVLMQDFYVVESIFFPSEGSNLTPAHHYNDFRFKTYAPVAFRYFRELFGIRPDDYLYSLCSEPLIELCSSGASGSLFYVSSDDEFIIKTVQHKEAEFLQKLLPGYYMNLNQNPRTLLPKFYGLYCVQAGGKNIRIVVMNNLLPRSVKMHIKYDLKGSTYKRRASQKEREKPLPTFKDLDFLQDIPDGLFLDADMYNALCKTLQRDCLVLQSFKIMDYSLLMSIHNIDHAQREPLSSETQYSVDTRRPAPQKALYSTAMESIQGEARRGGTMETDDHMGGIPARNSKGERLLLYIGIIDILQSYRFVKKLEHSWKALVHDGDTVSVHRPGFYAERFQRFMCNTVFKKIPLKPSPSKKFRSGSSFSRRAGSSGNSCITYQPSVSGEHKAQVTTKAEVEPGVHLGRPDVLPQTPPLEEISEGSPIPDPSFSPLVGETLQMLTTSTTLEKLEVAESEFTH

SEQ ID NO: 50793 - DNA, 1689 bp, Artificial Sequence
  derived and/or modified sequence
atggcgtccgctagtagtgggccttcctcgagtgtgggattctcaagctttgatccggccgtccctagttgtactctctcgagtgccgcaagcgggatcaaaagacccatggcttctgaagtgctcgaagcccgccaggattcctacattagcctggtcccatacgcaagcggtatgccgatcaaaaagatcgggcaccggagtgttgattccagcggggagaccacctataagaaaaccacttcatctgccctgaaaggagcaatccagctgggcatcacacacaccgttggatctttgtcaacaaagcccgagagggatgtgctgatgcaggatttctacgtggttgagtcaatctttttccccagcgaggggagcaatctgactcctgctcaccactataacgacttcaggtttaagacctacgcccccgttgcgtttcggtatttccgcgagttgttcgggatccgcccagacgactacctgtattccttgtgttctgagcctctgattgaactctgttcatccggggcttccggaagtcttttctacgtttcttcagacgatgagtttatcatcaagacggtacagcacaaggaggcggaatttctccagaagctcctccctggttattacatgaatctcaatcagaatcctcggacccttttgcccaaattctacgggttgtactgcgttcaagcgggaggcaagaatatacggatcgttgtgatgaataacctgctacccagatccgtaaagatgcacatcaagtacgatctgaagggctctacatacaagcgaagggcctcacaaaaggagcgtgagaagccactcccaacgtttaaagatttagatttcctgcaggacatccctgacgggctttttctggacgccgatatgtacaatgcactgtgcaaaactctgcaaagggattgtctcgtgttgcaaagctttaagattatggattatagcctccttatgagcatccataatatcgaccacgcacagagagaaccactctctagtgaaacccagtatagcgtcgacacaaggagacccgcaccacagaaggcattgtactcaactgccatggaatctatccaaggcgaggcccgccgaggcgggacaatggagacggacgatcacatgggaggcatcccagcaaggaactccaagggcgagcggttactgctttacatcgggattatcgacatcctgcagtcttacagattcgtaaagaagttggaacactcatggaaggctctggttcacgacggcgacactgtctcagtgcacaggccaggattttacgctgagcgctttcagcggttcatgtgtaatacagtattcaagaagattcctctgaagccttctccaagcaaaaaatttcggtcgggtagctcgttctcaagaagagccgggagcagtggaaacagttgtattacctatcaaccctctgttagcggggaacataaggctcaggtgacaacaaaggctgaagtagaaccgggagtccacctgggccggccagatgttttaccacaaacaccacctcttgaagagatatccgaggggtccccgattcctgacccatctttctcacccttggtcggtgagaccctgcaaatgttgacgactagcactaccctagaaaagctcgaggtcgcggagtccgagtttacgcattag

SEQ ID NO: 50794 - DNA, 1689 bp, Artificial Sequence
  derived and/or modified sequence
atggccagcgccagcagcggccccagcagctctgtgggcttcagcagctttgatcctgctgtgcccagctgcaccctgagcagcgctgccagcggcatcaagaggcccatggccagcgaggtgctggaggcccggcaggacagctacatcagcctggtgccctatgccagcggcatgcccatcaagaagattggccacaggtctgtggacagcagcggggagaccacctacaagaagaccaccagcagcgccctgaagggggccatccagctgggcatcacccacacagtgggcagcctgagcaccaagccagagagagatgtgctgatgcaggacttctacgtggtggagagcatcttcttccccagcgagggcagcaacctgaccccagcccaccactacaatgacttccgcttcaagacctacgcccctgtggccttccgctacttccgggagctgtttggcatccggccagatgactacctgtacagcctgtgcagcgagcccctgattgagctgtgcagcagcggggccagcggcagcctcttctacgtgtccagtgatgatgagttcatcatcaagacagtgcagcacaaggaggccgagttcctgcagaagctgctgcccggctactacatgaacctgaaccagaaccccaggaccctgctgcccaagttctacggcctgtactgtgtgcaggccggcggcaagaacatcagaattgtggtgatgaacaacctgctgcccaggtctgtgaagatgcacatcaagtatgacctgaagggcagcacctacaagagaagagccagccagaaggagcgggagaagcccctgcccaccttcaaggacctggacttcctgcaggacatcccagatggcctcttcctggatgctgacatgtacaatgccctgtgcaagaccctgcagagggactgcctggtgctgcagagcttcaagatcatggactacagcctgctgatgagcatccacaacatcgaccacgcccagcgggagcccctgagcagcgagacccagtacagcgtggacaccaggaggcctgccccccagaaggccctgtacagcacagccatggagagcatccagggcgaggcccggcggggcggcaccatggagacagatgaccacatgggcggcatcccagccaggaacagcaagggggagcggctgctgctgtacatcggcatcatcgacatcctgcagagctacagatttgtgaagaagctggagcacagctggaaggccctggtgcatgatggagacacagtgtctgtgcaccggcccggcttctacgccgagcgcttccagcgcttcatgtgcaacacagtgttcaagaagatccccctgaagcccagccccagcaagaagttccgcagcggcagcagcttcagcagaagagctggcagcagcggcaacagctgcatcacctaccagcccagcgtgtctggagagcacaaggcccaggtgaccaccaaggccgaggtggagcccggggtgcacctgggccgcccagatgtgctgccccagaccccacccctggaggagatcagcgagggcagccccatcccagaccccagcttcagccccctggtgggggagaccctgcagatgctgaccaccagcaccaccctggagaagctggaggtggccgagagcgagttcacccactag

SEQ ID NO: 50795 - DNA, 1689 bp, Artificial Sequence
  derived and/or modified sequence
atggccagcgccagcagcggccccagcagcagcgtgggcttcagctccttcgacccagctgtcccgagctgtacactctcttctgctgcttcagggatcaaacggccgatggcctctgaagtgctggaagctcgtcaagactcgtacatctctttggtcccttacgcaagcgggatgccaatcaaaaagattggccataggtcggtcgactcttctggtgagacaacgtacaaaaagactacttcatctgccttgaagggagctatccagttaggaatcactcacacggtgggaagtctttccactaaacccgagcgagatgtcctcatgcaggacttttatgtggttgaaagtatttttttcccatctgagggatcgaacctgactccagctcatcattataatgattttagatttaagacttacgcgccagtagcctttaggtacttcagagaattatttgggatccgaccggatgactatctgtactcgctgtgtagcgaacccctgatcgaactgtgcagttctggagctagcggttccctcttctacgtttcctccgacgatgagtttatcataaagacagtccagcataaggaagccgagttcctgcagaaactcctacctgggtattacatgaacctgaaccaaaacccgagaacactgcttcctaagttctacggtttatactgcgtccaggcgggtggaaagaacataaggatcgtagtgatgaataacctgcttccacgaagcgtaaagatgcacatcaaatacgacctaaagggttcaacctataagagaagggcttcccagaaagaaagggaaaagcccctgcctaccttcaaggatcttgatttcctgcaggacatacccgacggcttgttcctggatgctgacatgtataacgcattatgcaagacactccaaagagactgccttgtgcttcagagcttcaagataatggattatagcttgctgatgtccatccacaatatagatcacgcgcaaagggaacctctgagtagtgagacacagtattctgttgacacaaggagacctgctccgcagaaagccctgtatagtacagccatggagtccattcaaggcgaagcaaggcggggaggcacaatggagacagacgatcacatgggcggcatacctgccagaaattcaaagggggagagattgctactgtacatagggattatagacattctgcagagctaccgtttcgttaagaagttggagcactcctggaaagccctggtgcacgatggcgacaccgtctcagtccaccgtcccggattctatgccgagaggttccagcgattcatgtgtaacaccgttttcaaaaaaattcccctgaaaccttccccctctaaaaaattccggtccggtagtagtttcagtagaagagcagggtccagcggaaactcctgtatcacttaccagccttccgtgtcaggcgaacataaggctcaagtgacaacaaaagcagaggttgaacctggcgtgcatcttggccgcccggacgttctgccccagacaccaccccttgaagagatatctgagggctcaccaatccctgacccctctttttccccactcgtcggagaaaccctgcagatgctaaccacaagcacaactctggagaagctggaagtggcagagtcagaattcacacactag

SEQ ID NO: 50796 - DNA, 2134 bp, Artificial Sequence
  derived and/or modified sequence
gtgaagcggccgggttgggcgattaacaggccgtggttaggaaggacggagaaggggcgttcgctcctttgggacttttcatgcctcgtttttttttcagatgtggcttggtctgggcgcaaggtcccagcagccagcttaagcttactcttctgtgaaaggggaaagtatcccctgtggaaagcggttaaacttgtggagggggtgcgggacgtgagttcttccccatgccaggcgaatggtgtggccttgagctggtccaggagccggctcgacgtgtctgagggaggccccggagggggcggggaggtggcccacagaacgcgggttctgtaaagagacgttgggaagattcgattccgagaagaggaagaaccggattgaaagagagccaggccgctgagggggagggggctgctaagatggcgtcggcctcctccgggccgtcgtcttcggtcggtttttcatcctttgatcccgcggtcccttcctgtaccttgtcctcagcagcatctggaatcaagagacccatggcatctgaggtcttggaagctagacaggattcttacatctcattggtgccttatgcctctggcatgcccatcaagaaaataggccatagaagtgttgattcctcaggagagacaacatataaaaagacaacctcatcagccttgaaaggtgccatccagttaggcattacccacactgtggggagcctgagtaccaaaccagagcgtgatgtcctcatgcaagatttctacgtggttgagagtatcttctttcccagtgaagggagcaacctgacccctgctcatcactacaatgactttcgtttcaagacctatgcacctgttgccttccgctacttccgggagctatttggtatccggcccgatgattacttgtattccctctgcagtgagccgctgattgaactctgtagctctggagctagtggttccctattctatgtgtccagcgacgatgagttcattattaagacagtccaacataaagaggcggaatttctgcagaagctgcttccaggatactacatgaacctcaaccagaaccctcggactttgctgcctaaattctatggactgtactgtgtgcaggcaggtggcaagaacattcggattgtggtgatgaacaatcttttaccaagatcggtaaaaatgcatatcaaatatgacctcaaaggctcaacctacaaacggcgggcttcccagaaagagcgagagaagcctcttcccacatttaaagacctagacttcttacaagacatccctgatggtctttttttggatgctgacatgtacaacgctctctgtaagaccctgcagcgtgactgtttggtgctgcagagcttcaagataatggattacagcctcttgatgtcaatccataatatagatcatgcacaacgagagcccttaagcagtgaaacacagtactcagttgatactcgaagaccggccccccaaaaggctctgtattccacagccatggaatccatccagggagaggctcgacggggtggtaccatggagactgatgaccatatgggtggcatccctgcccggaatagtaaaggggaaaggcttctgctttatattggcatcattgacattctacagtcttacaggtttgttaagaagttggagcactcttggaaagccctggtacatgacggagacactgtctcagtgcatcgcccaggcttctacgctgaacggttccagcgcttcatgtgcaacacagtatttaagaagattcccttgaagccttctccttccaaaaagtttcggtctggctcatctttctctcggcgagcaggctccagtggcaactcctgcattacttaccagccatcggtctctggggaacacaaggcacaagtgacaacaaaggcagaagtggagccaggcgttcaccttggtcgtcctgatgttttacctcagactccacctttggaggaaatcagtgagggctcgcctattcctgaccccagtttctcacctctagttggagagactttgcaaatgctaactacaagtacaaccttggaaaagcttgaagttgcagagtcagagttcacccattaagcgcaaagcctcagaagacctgg

SEQ ID NO: 50797 - DNA, 1689 bp, Artificial Sequence
  derived and/or modified sequence
atggcttcggcctcttctggtccatcctcctcggtggggttctcatcctttgatcctgctgtcccgagttgcacactgagctccgccgcatccgggatcaagagacccatggctagtgaggtcctagaggccagacaggacagctacatttcactggtgccttatgcgtcgggtatgccaatcaaaaaaatcggacataggtccgtagactcctctggagaaaccacctataagaaaacaacaagctcagccctcaaaggtgctatccagcttggaataactcataccgtgggcagtctgagcacaaaacccgaacgcgatgttctgatgcaggatttctacgtcgtggaatccatcttttttccctcagaggggtctaacctgacacccgcacaccattacaatgacttcagatttaagacctatgcaccagtcgcctttagatacttccgtgaactttttggcattagaccagatgactatctctacagcctgtgtagtgagccacttatcgaattgtgctcctccggcgcttctggatccttgttctatgtgtcatccgatgatgaattcataattaagacagtccaacacaaggaagcagagttcctgcaaaaactcctgccaggttactacatgaacctgaaccaaaacccgaggacactgctgcctaagttttacggactgtattgcgtgcaagctggcggtaagaacatacgaatagtagtcatgaacaatctgcttccacgctctgttaagatgcacataaagtatgacctgaaaggttctacctacaagagacgagcgagtcagaaagagcgggagaagcctcttcccacattcaaagatctggacttccttcaggatataccagatggattattcctggacgccgatatgtataatgctttgtgcaagaccctgcagcgagattgccttgtcctgcagtcctttaaaattatggactactcgcttctgatgagtattcacaacatcgaccacgcacaacgagagcctctcagcagcgaaacacaatactccgtggatacacggcgtccagccccacaaaaagccctctactccaccgctatggagtctatccagggcgaggctcgtaggggcggaacaatggagaccgacgaccacatgggcggaatccccgcacggaattctaagggtgagaggttactgctgtatatcgggataatagacatcctccagtcttaccgttttgtgaagaagctggagcattcctggaaggccctagtacatgacggggataccgtaagcgtccatagaccgggattttatgcagaaagatttcagcgtttcatgtgcaatacagtgtttaaaaagatccccctaaaaccaagccctagcaaaaagttccgctctggctcttctttttcaaggcgcgcaggctcaagcggaaactcatgcataacatatcagcctagcgtgagtggcgagcataaagctcaggtaacaacaaaggccgaggtggagcccggtgttcacttgggccgaccagacgtgttgccacagacccctcctctggaagagattagcgagggctcaccaatacctgaccctagcttctctcccctggtcggcgaaaccctacagatgttgaccaccagcacgaccctggaaaagctcgaggtcgctgagtctgagttcactcattag

SEQ ID NO: 50798 - DNA, 1689 bp, Artificial Sequence
  derived and/or modified sequence
atggccagcgccagcagcggccccagcagcagcgtgggcttcagcagcttcgaccccgccgtgcccagctgcaccctgagcagcgccgccagcggcatcaagagacccatggccagcgaggtgctggaggccagacaggacagctacatcagcctggtgccctacgccagcggcatgcccatcaagaagatcggccacagaagcgtggacagcagcggcgagaccacctacaagaagaccaccagcagcgccctgaagggcgccatccagctgggcatcacccacaccgtgggcagcctgagcaccaagcccgagagagacgtgctgatgcaggacttctacgtggtggagagcatcttcttccccagcgagggcagcaacctgacccccgcccaccactacaacgacttcagattcaagacctacgcccccgtggccttcagatacttcagagagctgttcggcatcagacccgacgactacctgtacagcctgtgcagcgagcccctgatcgagctgtgcagcagcggcgccagcggcagcctgttctacgtgagcagcgacgacgagttcatcatcaagaccgtgcagcacaaggaggccgagttcctgcagaagctgctgcccggctactacatgaacctgaaccagaaccccagaaccctgctgcccaagttctacggcctgtactgcgtgcaggccggcggcaagaacatcagaatcgtggtgatgaacaacctgctgcccagaagcgtgaagatgcacatcaagtacgacctgaagggcagcacctacaagagaagagccagccagaaggagagagagaagcccctgcccaccttcaaggacctggacttcctgcaggacatccccgacggcctgttcctggacgccgacatgtacaacgccctgtgcaagaccctgcagagagactgcctggtgctgcagagcttcaagatcatggactacagcctgctgatgagcatccacaacatcgaccacgcccagagagagcccctgagcagcgagacccagtacagcgtggacaccagaagacccgccccccagaaggccctgtacagcaccgccatggagagcatccagggcgaggccagaagaggcggcaccatggagaccgacgaccacatgggcggcatccccgccagaaacagcaagggcgagagactgctgctgtacatcggcatcatcgacatcctgcagagctacagattcgtgaagaagctggagcacagctggaaggccctggtgcacgacggcgacaccgtgagcgtgcacagacccggcttctacgccgagagattccagagattcatgtgcaacaccgtgttcaagaagatccccctgaagcccagccccagcaagaagttcagaagcggcagcagcttcagcagaagagccggcagcagcggcaacagctgcatcacctaccagcccagcgtgagcggcgagcacaaggcccaggtgaccaccaaggccgaggtggagcccggcgtgcacctgggcagacccgacgtgctgccccagaccccccccctggaggagatcagcgagggcagccccatccccgaccccagcttcagccccctggtgggcgagaccctgcagatgctgaccaccagcaccaccctggagaagctggaggtggccgagagcgagttcacccactag

SEQ ID NO: 50799 - protein, 299 aa, Artificial Sequence
  derived and/or modified sequence
MLGWVQRVLPQPPGTPRKTKMQEEEEVEPEPEMEAEVEPEPNPEEAETESESMPPEESFKEEEVAVADPSPQETKEAALTSTISLRAQGAEISEMNSPSRRVLTWLMKGVEKVIPQPVHSITEDPAQILGHGSTGDTGCTDEPNEALEAQDTRPGLRLLLWLEQNLERVLPQPPKSSEVWRDEPAVATGAASDPAPPGRPQEMGPKLQARETPSLPTPIPLQPKEEPKEAPAPEPQPGSQAQTSSLPPTRDPARLVAWVLHRLEMALPQPVLHGKIGEQEPDSPGICDVQTRVMGAGGL

SEQ ID NO: 50800 - DNA, 900 bp, Artificial Sequence
  derived and/or modified sequence
atgctggggtgggtgcagcgggttcttcctcagccgccggggactccgcggaaaaccaaaatgcaggaggaggaagaggtagagcccgaacccgagatggaagccgaggtcgagcccgaaccaaaccccgaggaggctgagacagaaagcgaaagtatgccccctgaagaaagtttcaaagaagaggaggttgcagtcgctgacccctcaccacaggagacaaaagaagccgctctgacttctacaatctcattacgagcacagggcgcagaaatttccgagatgaactctccatccagacgggtgctaacttggttgatgaaaggagttgagaaagtgatcccacaacccgtgcatagtattactgaggacccggcgcagatcttgggccatggatctaccggggataccggctgtacggacgagccaaatgaggcactggaggcacaggacacgagacctggactacgactgctattgtggctggagcagaatttagaacgtgtgctccctcaacctcctaaaagctccgaagtgtggcgcgatgaacctgcagtggccaccggagcagcttccgaccccgcaccaccggggagaccccaggaaatgggcccaaagttgcaagcccgcgagaccccaagtctccccactccaatccccctgcagcctaaggaggagcctaaagaggcccccgctccagagccccagccggggagtcaggctcaaacctcctccctccctcctacaagggatcctgcaaggctcgtggcctgggtgctgcaccgtttggaaatggctctgcctcagccagtgctgcatggtaagatcggcgaacaggagcccgactccccgggcatttgtgatgtccagacgcgggtcatgggcgctggaggcctgtag

SEQ ID NO: 50801 - DNA, 900 bp, Artificial Sequence
  derived and/or modified sequence
atgctgggctgggtgcagagggtgctgccccagcccccaggcacccccaggaagaccaagatgcaggaggaggaggaggtggagcctgagcctgagatggaggccgaggtggagcctgagcccaaccctgaggaggccgagacagagagcgagagcatgcctcctgaggagagcttcaaggaggaggaggtggccgtggccgaccccagcccccaggagaccaaggaggccgccctgaccagcaccatcagcctgcgggcccagggcgctgagatcagcgagatgaacagccccagccggcgggtgctgacctggctgatgaagggcgtggagaaggtgatcccccagcctgtgcacagcatcacagaagatcctgcccagatcctgggccacggcagcactggagacaccggctgcacagatgagcccaatgaggccctggaggcccaggacacccggcccggcctgcggctgctgctgtggctggagcagaacctggagcgggtgctgccccagccccccaagagcagcgaggtgtggagagatgagcctgctgtggccaccggggccgccagtgaccctgcccctcctggccggccccaggagatgggccccaagctgcaggcccgggagacccccagcctgcccacccccatccccctgcagcccaaggaggagcccaaggaggccccagcccctgagccccagcccggcagccaggcccagaccagcagcctgccccccacccgggaccctgcccggctggtggcctgggtgctgcaccggctggagatggccctgccccagcctgtgctgcacggcaagatcggggagcaggagccagacagccctggcatctgtgatgtgcagaccagggtgatgggcgctgggggcctgtag

SEQ ID NO: 50802 - DNA, 900 bp, Artificial Sequence
  derived and/or modified sequence
atgctgggctgggtgcagcgggtgctgccccagccccccggcacccccagaaaaactaagatgcaagaggaggaggaagttgaacctgagcccgagatggaggctgaggtggaacctgaaccaaacccggaggaagccgaaactgaaagtgagagcatgccacccgaagaaagctttaaagaggaggaggtcgcggtggccgatccctctccgcaagaaactaaagaagccgcactcacttctaccatttctctccgggctcagggagccgaaataagtgagatgaactccccctcccgccgcgtgcttacgtggctaatgaaaggagtagaaaaggttatcccccagcccgtgcactcaatcaccgaagaccccgcccagattctgggtcacggaagcacaggagatacaggctgcacagatgaacctaatgaggcattagaagcccaggatactaggccaggtttacgcctcctcttatggctggagcaaaacttggagagagtgctgccccagccgccaaagtccagtgaggtttggcgcgacgagcctgcagtggccacgggcgcagccagcgacccggctcctcctggcaggcctcaggagatgggacctaaactccaggctcgggagacacctagtctgccaacccctatccctttacaaccaaaggaagagcctaaggaggcaccggccccagagccccaacctgggagtcaggctcagaccagctccctcccacctacaagagatccggccagattggtggcctgggtactccaccgtctcgagatggcactgccccagccggtcctccacggaaagattggcgagcaagaacccgacagccccggtatatgtgatgtgcaaaccagagtgatgggggcaggaggcctgtag

SEQ ID NO: 50803 - DNA, 900 bp, Artificial Sequence
  derived and/or modified sequence
atgctgggatgggtccaacgcgtcctgcctcagcctcctgggaccccaaggaagactaaaatgcaagaagaagaggaagtggagccagaacctgagatggaggccgaggtggaacccgagcccaacccagaagaggccgagaccgagagcgaatctatgccccctgaagagagctttaaagaggaagaagtcgcagtggccgatccttccccacaggagactaaagaagcggctctgactagcacaatttccctccgcgcacagggggctgagattagcgagatgaacagcccatccagaagggtgctgacttggctgatgaagggcgttgaaaaagtcatcccacagccggtgcacagcatcactgaagaccccgcacagattctgggtcacggctctactggggacacggggtgtacggatgaacccaacgaagcactggaggcccaggacacaaggcccggattaagattattgctgtggttggaacagaatctggagcgtgtgctgccacagcctccaaagtcctctgaggtttggagggatgagcccgcagtcgccaccggcgcagcctcagatcccgctccgccaggtcggcctcaggagatgggcccaaagctgcaggcacgcgaaactccatccttacccacccccattccgctgcagccaaaggaagaacctaaggaagcaccagcacccgagcctcagcctggttctcaagcccaaaccagcagcctgcccccaactagagatccagccaggctggtcgcctgggtcctgcatcggttggaaatggctctcccacagcctgttctccacggaaagattggagagcaggagccggacagtcctggaatttgcgatgtccaaaccagggtgatgggagctgggggtctctag

SEQ ID NO: 50804 - DNA, 1630 bp, Artificial Sequence
  derived and/or modified sequence
ccagctacgagtggcagcaagaaggcaattcctggctggcggttggcatctaagcaggcatcaggatgttgggctgggtccagagggtgctgcctcagcccccagggacccctcggaagaccaagatgcaggaggaagaggaagtggaaccagagccagagatggaggcggaggtggaaccagaaccgaatcctgaggaggccgagacagagtccgagtccatgccccccgaagagtcattcaaggaggaggaagtggctgtggcagacccaagccctcaggagaccaaggaggctgcccttacttccaccatatccctccgggcccagggcgctgagatttctgaaatgaatagtcccagccgcagggtactgacctggctcatgaagggcgtagagaaggtgatcccgcagcctgttcacagcatcacggaggacccggctcagatcctggggcatggcagcactggggacacagggtgcacagatgaacccaatgaggcccttgaggcccaagacactaggcctgggctgcggctgcttctgtggctggagcagaatctggaaagagtgcttcctcagccccccaaatcctctgaggtctggagagatgagcctgcagttgctacaggtgctgcctcagacccagcgcctccaggacgcccccaggaaatggggcccaagctgcaggcccgggagaccccctccctgcccacacccatccccctgcagcccaaggaggaacccaaggaggcaccagctccagagccccagcccggctcccaggcccagacctcctccctgccaccaaccagggaccctgccaggctggtggcatgggtcctgcacaggctggagatggccttgccgcagccagtgctacatgggaaaataggggaacaggagcctgactcccctgggatatgtgatgtgcagaccagggtgatgggagctggaggtctctgaaataagggagaagggaatctgggagagctcagatggacacatggatggaaggaaagaaggatgccctgaagagaagaccttcccgggggaggtggccactgacaccccaccctatttgaacagcgaacccctccctctccacacactcccaggcaggacaaggggagccagagtcacctgcaccagccccagagcctcccagaccagaacaaggggaaggccagccatgggcagcctgcaagatttaggctagacagcaggacttacccccagagggctgtggaaaaggcccatagccgggcgtggtggctcacgcctgtaatcccagcactttgggaggctgaggcaggaggattgcttgagccccgaagttcgagaccaccgtgggcaacacagtgagaccctgtctctaaaaaaccttttttaaattaataaattaaaaagccccatggatggaggactcagtattgagcatctctttgagaggacgcgtgcacagcccccagtgtggtacctggcaccgtcagcacctcgacaggatacagtttttcccagaagaggttctccctaggcctggccacactctctccttccaaggcttggggacaccaatgagcagcaacaaatgttttcattaacattaaaagagtgtaaatgagcacatc

SEQ ID NO: 50805 - DNA, 900 bp, Artificial Sequence
  derived and/or modified sequence
atgctgggctgggtgcagagagtgctgccccagccccccggcacccccagaaagaccaagatgcaggaggaggaggaggtggagcccgagcccgagatggaggccgaggtggagcccgagcccaaccccgaggaggccgagaccgagagcgagagcatgccccccgaggagagcttcaaggaggaggaggtggccgtggccgaccccagcccccaggagaccaaggaggccgccctgaccagcaccatcagcctgagagcccagggcgccgagatcagcgagatgaacagccccagcagaagagtgctgacctggctgatgaagggcgtggagaaggtgatcccccagcccgtgcacagcatcaccgaggaccccgcccagatcctgggccacggcagcaccggcgacaccggctgcaccgacgagcccaacgaggccctggaggcccaggacaccagacccggcctgagactgctgctgtggctggagcagaacctggagagagtgctgccccagccccccaagagcagcgaggtgtggagagacgagcccgccgtggccaccggcgccgccagcgaccccgccccccccggcagaccccaggagatgggccccaagctgcaggccagagagacccccagcctgcccacccccatccccctgcagcccaaggaggagcccaaggaggcccccgcccccgagccccagcccggcagccaggcccagaccagcagcctgccccccaccagagaccccgccagactggtggcctgggtgctgcacagactggagatggccctgccccagcccgtgctgcacggcaagatcggcgagcaggagcccgacagccccggcatctgcgacgtgcagaccagagtgatgggcgccggcggcctgtag

SEQ ID NO: 50806 - protein, 467 aa, Artificial Sequence
  derived and/or modified sequence
MASLLQSDRVLYLVQGEKKVRAPLSQLYFCRYCSELRSLECVSHEVDSHYCPSCLENMPSAEAKLKKNRCANCFDCPGCMHTLSTRATSISTQLPDDPAKTTMKKAYYLACGFCRWTSRDVGMADKSVASGGWQEPENPHTQRMNKLIEYYQQLAQKEKVERDRKKLARRRNYMPLAFSQHTIHVVDKYGLGTRLQRPRAGASISTLAGLSLKEGEDQKEIKIEPAQAVDEVEPLPEDYYTRPVNLTEVTTLQQRLLQPDFQPVCASQLYPRHKHLLIKRSLRCRKCEHNLSKPEFNPTSIKFKIQLVAVNYIPEVRIMSIPNLRYMKESQVLLTLTNPVENLTHVTLFECEEGDPDDINSTAKVVVPPKELVLAGKDAAAEYDELAEPQDFQDDPDIIAFRKANKVGIFIKVTPQREEGEVTVCFKMKHDFKNLAAPIRPIEESDQGTEVIWLTQHVELSLGPLLP

SEQ ID NO: 50807 - DNA, 1404 bp, Artificial Sequence
  derived and/or modified sequence
atggccagcctgctgcagagcgacagagtgctgtacctggtgcagggcgagaagaaggtgagagcccccctgagccagctgtacttctgcagatactgcagcgagctgagaagcctggagtgcgtgagccacgaggtggacagccactactgccccagctgcctggagaacatgcccagcgccgaggccaagctgaagaagaacagatgcgccaactgcttcgactgccccggctgcatgcacaccctgagcaccagagccaccagcatcagcacccagctgcccgacgaccccgccaagaccaccatgaagaaggcctactacctggcctgcggcttctgcagatggaccagcagagacgtgggcatggccgacaagagcgtggccagcggcggctggcaggagcccgagaacccccacacccagagaatgaacaagctgatcgagtactaccagcagctggcccagaaggagaaggtggagagagacagaaagaagctggccagaagaagaaactacatgcccctggccttcagccagcacaccatccacgtggtggacaagtacggcctgggcaccagactgcagagacccagagccggcgccagcatcagcaccctggccggcctgagcctgaaggagggcgaggaccagaaggagatcaagatcgagcccgcccaggccgtggacgaggtggagcccctgcccgaggactactacaccagacccgtgaacctgaccgaggtgaccaccctgcagcagagactgctgcagcccgacttccagcccgtgtgcgccagccagctgtaccccagacacaagcacctgctgatcaagagaagcctgagatgcagaaagtgcgagcacaacctgagcaagcccgagttcaaccccaccagcatcaagttcaagatccagctggtggccgtgaactacatccccgaggtgagaatcatgagcatccccaacctgagatacatgaaggagagccaggtgctgctgaccctgaccaaccccgtggagaacctgacccacgtgaccctgttcgagtgcgaggagggcgaccccgacgacatcaacagcaccgccaaggtggtggtgccccccaaggagctggtgctggccggcaaggacgccgccgccgagtacgacgagctggccgagccccaggacttccaggacgaccccgacatcatcgccttcagaaaggccaacaaggtgggcatcttcatcaaggtgaccccccagagagaggagggcgaggtgaccgtgtgcttcaagatgaagcacgacttcaagaacctggccgcccccatcagacccatcgaggagagcgaccagggcaccgaggtgatctggctgacccagcacgtggagctgagcctgggccccctgctgccctag

SEQ ID NO: 50808 - DNA, 1404 bp, Artificial Sequence
  derived and/or modified sequence
atggcttccctcttacagtcagacagggtgctgtacctggtacagggagagaaaaaggttcgagccccgttatcccagttgtacttctgccggtactgcagtgagctacggtctttagagtgtgtttcccacgaagtggatagccactattgcccaagttgtcttgagaacatgccatctgccgaggccaagctgaagaagaacagatgtgctaactgtttcgattgccctgggtgcatgcataccctttccacccgcgctacatcaattagcactcagttaccagatgatcccgccaagacgacaatgaagaaagcttactacctagcatgcgggttctgcagatggacgagtcgagacgtcggaatggccgataagtccgtcgcctcaggaggctggcaggagccggagaacccccacactcagaggatgaacaaactgattgaatattaccagcagctggcacagaaagaaaaagttgagagagatagaaaaaagcttgcacgacggcggaactatatgccacttgctttttctcagcacacgatccacgtggtcgataagtacggactagggacacgactacagcggccccgagctggggccagcattagcaccctggccggactaagcttaaaagagggcgaggaccagaaagaaattaaaattgagccggcacaggccgtagatgaggtggaaccactgccagaagactactacactcgaccagtcaacctcaccgaggtgaccacactccagcagagactgctgcagcccgatttccaaccagtatgtgcatcccagctctatcctcgacataagcatctattaatcaagaggtcgctgcgctgtcgcaagtgtgaacataacctgtccaagcccgagtttaaccctaccagcatcaagttcaagatccaactggtggctgtgaactacattcctgaagtgcgcattatgtcaatcccgaaccttagatatatgaaagagagtcaagtgcttctcacacttacaaatcctgtggagaatcttactcacgtcacgcttttcgaatgtgaagagggggatcctgacgacattaactctacagccaaggttgtggtgcctccaaaggagttggtgctcgctggaaaagatgcagccgcagaatatgacgaacttgctgagccgcaggatttccaggatgatcccgacattatagccttcaggaaagccaataaggtgggcatttttatcaaagtgactcctcagcgagaagaaggagaagtcactgtgtgttttaaaatgaaacacgattttaaaaacttagccgctccaattcggcccatcgaggaatctgatcagggcacggaggtcatctggttgacccaacacgtggaactgtctctgggcccacttctcccatag

SEQ ID NO: 50809 - DNA, 1404 bp, Artificial Sequence
  derived and/or modified sequence
atggccagcctgctgcagagcgacagagtgctgtacctggtgcagggcgagaagaaggtgcgggcccccctgagccagctgtacttctgccgctactgcagcgagctgcggagcctggagtgtgtgtcccatgaggtggacagccactactgccccagctgcctggagaacatgcccagcgctgaggccaagctgaagaagaacagatgtgccaactgctttgactgccccggctgcatgcacaccctgagcacccgggccaccagcatcagcacccagctgcctgatgatcctgccaagaccaccatgaagaaggcctactacctggcctgtggcttctgccgctggaccagcagagatgtgggcatggctgacaagtctgtggccagcggcggctggcaggagcctgagaacccccacacccagaggatgaacaagctgattgagtactaccagcagctggcccagaaggagaaggtggagcgggacaggaagaagctggccaggagaagaaactacatgcccctggccttcagccagcacaccatccacgtggtggacaagtatggcctgggcacccggctgcagaggccccgggccggggccagcatcagcaccctggccggcctgagcctgaaggagggggaggaccagaaggagatcaagattgaaccagcccaggccgtggatgaggtggagcccctgcctgaggactactacaccaggcctgtgaacctgacagaggtgaccaccctgcagcagaggctgctgcagcctgacttccagcctgtgtgtgccagccagctgtaccccaggcacaagcacctgctgatcaagaggagcctgcgctgcaggaaatgtgagcacaacctgagcaagccagagttcaaccccaccagcatcaagttcaagatccagctggtggccgtgaactacatccctgaggtgcgcatcatgagcatccccaacctgcgctacatgaaggagagccaggtgctgctgaccctgaccaaccctgtggagaacctgacccacgtgaccctgtttgaatgtgaggagggggaccctgatgacatcaacagcacagccaaggtggtggtgccccccaaggagctggtgctggccggcaaggatgctgctgctgaatatgatgagctggccgagccccaggacttccaggatgatcctgacatcatcgccttcaggaaggccaacaaggtgggcatcttcatcaaggtgaccccccagcgggaggagggggaggtgacagtgtgcttcaagatgaagcatgacttcaagaacctggccgcccccatccggcccatcgaggagagtgaccagggcacagaggtgatctggctgacccagcacgtggagctgagcctgggccccctgctgccctag

SEQ ID NO: 50810 - DNA, 1404 bp, Artificial Sequence
  derived and/or modified sequence
atggccagcctgctgcagagcgaccgggtgctgtacctggtgcagggtgaaaagaaagttagggcccctctgtcccagctctacttttgcagatattgctcagagctgcggtctctggagtgtgtgagccatgaagtggactcccactactgtccatcatgcctggagaacatgccttctgccgaagcaaagctgaagaagaaccggtgtgccaattgtttcgattgcccggggtgtatgcacaccctatctacaagagcaacatccatatcaacccagctgcccgacgacccggccaagaccaccatgaaaaaagcctattatctggcttgcgggttttgtaggtggacgtcacgagacgtcggcatggccgataagagtgtggcgagtgggggctggcaagagccagagaatccccacactcaaagaatgaataagctcatcgagtattatcagcagctcgcccaaaaagagaaggtggagagggacaggaagaagctggctcgcaggcgtaattatatgccgctggctttttctcagcacaccattcatgtggttgacaagtatgggctcgggactagactgcagagacctagggctggcgcctctatcagcactctcgctggtctgtctctcaaggagggcgaggaccagaaagagatcaagattgaacccgcacaggctgtcgatgaggtggagccattaccggaggattactatacccgtcccgtgaacttgaccgaagtcactacattgcagcaaagactattgcagcccgatttccaacctgtttgtgcgagtcagctctatccccgccacaaacacctactgattaagcgtagcctgagatgcaggaagtgcgagcataatctatcgaaacccgagttcaacccaacttccatcaaattcaagatacagctggtggccgttaactatataccagaggtgcggattatgagtatccctaatttacggtatatgaaggaaagtcaggtgttgctgacgctcaccaaccccgtggaaaacttgacccatgtgaccctgttcgagtgtgaggagggggatcccgacgatatcaacagtactgcgaaagtagtcgtcccgccaaaggagctggttctcgccgggaaggatgccgctgccgagtacgatgagttagcagagccacaagactttcaagacgatcctgatatcattgctttccggaaggccaataaggtgggcatttttataaaggttactccacaaagagaagaaggtgaagtgacagtgtgctttaaaatgaagcatgattttaaaaacctggccgccccaattcgcccaatcgaggaatcggaccagggcacggaggtcatctggttaacacagcacgtcgaactgtctctgggtccactgctgccttag

SEQ ID NO: 50811 - DNA, 1404 bp, Artificial Sequence
  derived and/or modified sequence
atggctagcttattgcagtctgaccgggtgctatatctcgtgcagggcgagaagaaggtccgcgcacccctgtcacagttgtacttctgtcggtactgctccgagctgcgctcactggaatgtgtgagccacgaggtcgactcccattattgtccgagctgcctcgagaacatgccctctgctgaggccaaattaaagaaaaatagatgcgctaattgcttcgactgccccggatgcatgcacactttgtccacacgagcaacaagcatatccacgcagctgcctgacgaccccgcaaaaaccacaatgaagaaggcttattatttggcttgcgggttctgcagatggacgagtcgcgacgtgggcatggcagataagagcgttgccagcggcggatggcaagagcccgaaaacccccatacacagaggatgaataagttaattgaatattaccagcagttagcccaaaaagagaaagtcgagagggacaggaagaaactcgcacgacgtagaaattatatgccactggcatttagccaacacacaatccacgtggtagacaagtacgggttaggaacaagactgcagcgaccacgagctggcgcttctatctccactttggctggtctgagcctgaaggagggagaagatcaaaaagagatcaagattgagccggctcaggctgttgacgaggtggagccccttccagaggactactacacccggccagtcaacctgactgaagtgaccaccctgcagcagagactgctacaacctgactttcagcctgtgtgtgccagtcaactgtatccgagacataaacatttgcttatcaaaaggtcacttagatgcaggaaatgtgaacataacctgtcaaagcccgaatttaaccccacaagcattaagtttaagatacagctcgtggcagtcaactatatccccgaagtacggataatgtcaatacccaacctgcgatacatgaaggagtcccaagtgctgctgactctgacgaaccctgtcgaaaacctcacacacgtaaccctctttgagtgtgaggagggtgatcctgatgatatcaacagtactgccaaggtggtcgtcccacctaaggaactagtcctggccggaaaggacgctgccgcagagtacgacgaactggctgaaccgcaggacttccaagatgaccctgacatcatcgcctttcggaaagccaacaaggttggtatctttataaaggtgacgccccaaagggaagagggagaggttactgtgtgtttcaaaatgaaacacgactttaagaacctcgctgccccaatcaggccaattgaggagagcgaccagggaacggaggtgatatggttgactcagcatgtcgaactgagcctcggaccactgctgccttag

SEQ ID NO: 50812 - DNA, 1737 bp, Artificial Sequence
  derived and/or modified sequence
acgtgatgcgccgggagcgtcatcgcctcctccctccccaagatggcgtccttgctgcagtcggaccgggttctctatctagtccagggagaaaagaaggttcgggccccgctctcgcaactctacttctgccgctattgtagcgaactgcggtcgctggaatgtgtgtctcacgaggtggactcccattattgtcccagttgtttagaaaatatgccatcggctgaagccaaactaaaaaagaatagatgtgccaattgttttgactgtcctggctgcatgcacaccctctctactcgggccacgagcatctccacacagcttccagatgacccagccaagaccaccatgaagaaagcctattacctggcatgtggattttgtcgctggacgtctagagatgtgggcatggcagacaaatctgtagctagtggcggttggcaggaacctgaaaatcctcacacacaacggatgaacaaattgattgaatattaccagcagcttgctcagaaagagaaggttgagcgagatcgcaagaaactggcacgacgtagaaactatatgcctctggctttttcgcaacatactattcatgtagtggacaaatatggtcttggaaccaggcttcagcgaccacgagctggtgcatccatcagtacccttgccggactttcccttaaagaaggagaggatcagaaagagataaagattgagccagctcaggctgtggatgaagtggaacctctacctgaagactattatacaagaccagtaaatttaacagaggtaacaacccttcagcagcgtctgttacagcctgacttccagccagtctgtgcttcacagctctatcctcgccacaaacatcttctgatcaaacggtccctgcgctgccgtaaatgtgaacataatttgagcaagccagaatttaacccaacgtcaatcaaattcaaaatccagctggtcgctgtcaattatattccagaagtgagaatcatgtcaattcccaaccttcgctacatgaaggagagccaggtcctcctgactcttacaaatccagttgagaacctcacccatgtgactctcttcgagtgtgaggagggggaccctgatgatatcaacagcactgctaaggtggtggtgcctcccaaagagctcgttttagctggcaaggatgcagcagcagagtacgatgagttggcagaacctcaagactttcaggacgatcctgacattatagccttcagaaaggccaacaaagtgggtattttcatcaaagttacaccacagcgtgaggagggtgaagtgaccgtgtgcttcaagatgaagcatgattttaaaaacctggcagcccccattcgccccattgaagaaagtgaccagggaacagaagtcatctggctcacccagcatgtggaacttagcttgggcccacttcttccttaaaaggttccactggagggcagatcccaaaggacagtatcaccgtaaacctgcgttaaaatgtggaagctgctgcttcattaggccttgtttataacgatgtacccatgcactacggaattctattgctaagaaagtgggagcataggcaaggcattgggaacacagggtagctgctgttgctcttgctctcacccctgttgacaccagtaagtctgtgtctccctcactgaaccctgcacgttgagtaacagcagcataattccatcctaggaaaggggatgggtgttcctt

SEQ ID NO: 50813 - protein, 403 aa, Artificial Sequence
  derived and/or modified sequence
MPSAEAKLKKNRCANCFDCPGCMHTLSTRATSISTQLPDDPAKTTMKKAYYLACGFCRWTSRDVGMADKSVASGGWQEPENPHTQRMNKLIEYYQQLAQKEKVERDRKKLARRRNYMPLAFSDKYGLGTRLQRPRAGASISTLAGLSLKEGEDQKEIKIEPAQAVDEVEPLPEDYYTRPVNLTEVTTLQQRLLQPDFQPVCASQLYPRHKHLLIKRSLRCRKCEHNLSKPEFNPTSIKFKIQLVAVNYIPEVRIMSIPNLRYMKESQVLLTLTNPVENLTHVTLFECEEGDPDDINSTAKVVVPPKELVLAGKDAAAEYDELAEPQDFQDDPDIIAFRKANKVGIFIKVTPQREEGEVTVCFKMKHDFKNLAAPIRPIEESDQGTEVIWLTQHVELSLGPLLP

SEQ ID NO: 50814 - protein, 134 aa, Artificial Sequence
  derived and/or modified sequence
MPSAEAKLKKNRCANCFDCPGCMHTLSTRATSISTQLPDDPAKTTMKKAYYLACGFCRWTSRDVGMADKSVASGGWQEPENPHTQRMNKLIEYYQQLAQKEKVERDRKKLARRRNYMPLAFSDKYGLGTRLQRP

SEQ ID NO: 50815 - protein, 114 aa, Artificial Sequence
  derived and/or modified sequence
MPSAEAKLKKNRCANCFDCPGCMHTLSTRATSISTQLPDDPAKTTMKKAYYLACGFCRWTSRDVGMADKSVASGGWQEPENPHTQRMNKLIEYYQQLAQKEKVERDRKKLARRR

SEQ ID NO: 50816 - DNA, 1212 bp, Artificial Sequence
  derived and/or modified sequence
atgcccagcgccgaggccaagctgaagaagaacagatgcgccaactgcttcgactgccccggctgcatgcacaccctgagcaccagagccaccagcatcagcacccagctgcccgacgaccccgccaagaccaccatgaagaaggcctactacctggcctgcggcttctgcagatggaccagcagagacgtgggcatggccgacaagagcgtggccagcggcggctggcaggagcccgagaacccccacacccagagaatgaacaagctgatcgagtactaccagcagctggcccagaaggagaaggtggagagagacagaaagaagctggccagaagaagaaactacatgcccctggccttcagcgacaagtacggcctgggcaccagactgcagagacccagagccggcgccagcatcagcaccctggccggcctgagcctgaaggagggcgaggaccagaaggagatcaagatcgagcccgcccaggccgtggacgaggtggagcccctgcccgaggactactacaccagacccgtgaacctgaccgaggtgaccaccctgcagcagagactgctgcagcccgacttccagcccgtgtgcgccagccagctgtaccccagacacaagcacctgctgatcaagagaagcctgagatgcagaaagtgcgagcacaacctgagcaagcccgagttcaaccccaccagcatcaagttcaagatccagctggtggccgtgaactacatccccgaggtgagaatcatgagcatccccaacctgagatacatgaaggagagccaggtgctgctgaccctgaccaaccccgtggagaacctgacccacgtgaccctgttcgagtgcgaggagggcgaccccgacgacatcaacagcaccgccaaggtggtggtgccccccaaggagctggtgctggccggcaaggacgccgccgccgagtacgacgagctggccgagccccaggacttccaggacgaccccgacatcatcgccttcagaaaggccaacaaggtgggcatcttcatcaaggtgaccccccagagagaggagggcgaggtgaccgtgtgcttcaagatgaagcacgacttcaagaacctggccgcccccatcagacccatcgaggagagcgaccagggcaccgaggtgatctggctgacccagcacgtggagctgagcctgggccccctgctgccctag

SEQ ID NO: 50817 - DNA, 405 bp, Artificial Sequence
  derived and/or modified sequence
atgcccagcgccgaggccaagctgaagaagaacagatgcgccaactgcttcgactgccccggctgcatgcacaccctgagcaccagagccaccagcatcagcacccagctgcccgacgaccccgccaagaccaccatgaagaaggcctactacctggcctgcggcttctgcagatggaccagcagagacgtgggcatggccgacaagagcgtggccagcggcggctggcaggagcccgagaacccccacacccagagaatgaacaagctgatcgagtactaccagcagctggcccagaaggagaaggtggagagagacagaaagaagctggccagaagaagaaactacatgcccctggccttcagcgacaagtacggcctgggcaccagactgcagagaccctag

SEQ ID NO: 50818 - DNA, 345 bp, Artificial Sequence
  derived and/or modified sequence
atgcccagcgccgaggccaagctgaagaagaacagatgcgccaactgcttcgactgccccggctgcatgcacaccctgagcaccagagccaccagcatcagcacccagctgcccgacgaccccgccaagaccaccatgaagaaggcctactacctggcctgcggcttctgcagatggaccagcagagacgtgggcatggccgacaagagcgtggccagcggcggctggcaggagcccgagaacccccacacccagagaatgaacaagctgatcgagtactaccagcagctggcccagaaggagaaggtggagagagacagaaagaagctggccagaagaagatag

SEQ ID NO: 50819 - DNA, 1212 bp, Artificial Sequence
  derived and/or modified sequence
atgccttctgctgaggcaaagctcaagaagaataggtgcgcgaactgttttgattgtcctggatgcatgcataccctttccacacgtgcgacctccatttcgactcagcttccagacgacccagcaaagacgaccatgaagaaggcctactatttggcctgcggattctgcagatggacaagcagggatgtcggtatggcagataaaagcgttgcatcaggtggctggcaggaaccggaaaacccccatacacagcgcatgaacaaactgattgaatattaccagcagctcgcccaaaaagaaaaagtcgagagagatcgcaaaaagctggcccgacggcgcaactacatgccactggccttttccgataaatatggcctgggcactcgactccaacgtcctagggccggtgcctctattagtacgttggcggggctgtctctgaaggagggcgaagatcagaaagaaatcaaaattgaacctgcccaggctgtggatgaagtcgagccgctgcctgaagactattacaccagacctgtaaacttaaccgaggttacaaccttgcagcaaagactcttgcagcccgactttcaaccagtgtgtgcgtcacaactctacccgcgccacaaacatctgctgatcaaacgttccttgcgttgccgaaagtgcgagcacaacctgtccaaaccggagttcaacccgacctcaattaagtttaagatccagctcgtggccgttaattacatccctgaggttcgtattatgtctatacccaacttacgctatatgaaagaatcacaagttttgttgaccctgacaaaccctgtggaaaacttaacccacgtgacactgttcgagtgcgaggaaggcgatcccgacgacattaatagtactgcaaaagtggtcgtccctcctaaggaattggtgctcgccggcaaagatgccgccgccgaatacgacgaacttgccgaacctcaggactttcaagatgaccccgacattatagcattccgcaaggctaataaggtgggtatctttatcaaggtcactcctcagagagaggagggggaggtgaccgtgtgcttcaaaatgaagcacgacttcaagaatctcgcagcccctattagaccgattgaggagagtgatcagggcacagaggtgatctggctgacacagcacgtcgagctgtctctgggtccacttctgccctag

SEQ ID NO: 50820 - DNA, 405 bp, Artificial Sequence
  derived and/or modified sequence
atgccatctgctgaggcaaagctgaagaaaaatagatgcgctaactgctttgactgccccgggtgtatgcatacattatctacacgggcaacaagtattagtactcagctgccagacgaccccgcaaagaccaccatgaagaaggcatactacctcgcatgcggcttttgccggtggaccagtcgcgatgtcggaatggcagataagagtgtggctagcggaggctggcaggagcccgaaaacccccacacgcagaggatgaacaagctgatcgaatattaccagcaactggcacaaaaagaaaaagttgaacgggatcgcaagaaattggcaagacggcgaaactacatgcccttggcattcagcgataaatacggcctggggactcgcctacagagaccctag

SEQ ID NO: 50821 - DNA, 345 bp, Artificial Sequence
  derived and/or modified sequence
atgccttccgccgaggcaaagctgaaaaagaatcgatgcgccaattgcttcgattgccccggctgtatgcacacactcagcacacgtgctacctccattagcacacagctgcccgacgaccctgctaaaacgactatgaaaaaggcatattatttagcatgcggtttttgccgctggacgtccagagatgtggggatggcggacaaatccgtcgccagcggtgggtggcaggaacctgaaaatccacatacccaacgcatgaataaacttatcgagtactatcaacagcttgcacagaaagaaaaagtagaacgcgatagaaagaaactggctcgtaggcgctag

SEQ ID NO: 50822 - DNA, 1212 bp, Artificial Sequence
  derived and/or modified sequence
atgcccagcgctgaggccaagctgaagaagaacagatgtgccaactgctttgactgccccggctgcatgcacaccctgagcacccgggccaccagcatcagcacccagctgcctgatgatcctgccaagaccaccatgaagaaggcctactacctggcctgtggcttctgccgctggaccagcagagatgtgggcatggctgacaagtctgtggccagcggcggctggcaggagcctgagaacccccacacccagaggatgaacaagctgattgagtactaccagcagctggcccagaaggagaaggtggagcgggacaggaagaagctggccaggagaagaaactacatgcccctggccttcagtgacaagtatggcctgggcacccggctgcagaggccccgggccggggccagcatcagcaccctggccggcctgagcctgaaggagggggaggaccagaaggagatcaagattgaaccagcccaggccgtggatgaggtggagcccctgcctgaggactactacaccaggcctgtgaacctgacagaggtgaccaccctgcagcagaggctgctgcagcctgacttccagcctgtgtgtgccagccagctgtaccccaggcacaagcacctgctgatcaagaggagcctgcgctgcaggaaatgtgagcacaacctgagcaagccagagttcaaccccaccagcatcaagttcaagatccagctggtggccgtgaactacatccctgaggtgcgcatcatgagcatccccaacctgcgctacatgaaggagagccaggtgctgctgaccctgaccaaccctgtggagaacctgacccacgtgaccctgtttgaatgtgaggagggggaccctgatgacatcaacagcacagccaaggtggtggtgccccccaaggagctggtgctggccggcaaggatgctgctgctgaatatgatgagctggccgagccccaggacttccaggatgatcctgacatcatcgccttcaggaaggccaacaaggtgggcatcttcatcaaggtgaccccccagcgggaggagggggaggtgacagtgtgcttcaagatgaagcatgacttcaagaacctggccgcccccatccggcccatcgaggagagtgaccagggcacagaggtgatctggctgacccagcacgtggagctgagcctgggccccctgctgccctag

SEQ ID NO: 50823 - DNA, 405 bp, Artificial Sequence
  derived and/or modified sequence
atgcccagcgctgaggccaagctgaagaagaacagatgtgccaactgctttgactgccccggctgcatgcacaccctgagcacccgggccaccagcatcagcacccagctgcctgatgatcctgccaagaccaccatgaagaaggcctactacctggcctgtggcttctgccgctggaccagcagagatgtgggcatggctgacaagtctgtggccagcggcggctggcaggagcctgagaacccccacacccagaggatgaacaagctgattgagtactaccagcagctggcccagaaggagaaggtggagcgggacaggaagaagctggccaggagaagaaactacatgcccctggccttcagtgacaagtatggcctgggcacccggctgcagaggccctag

SEQ ID NO: 50824 - DNA, 345 bp, Artificial Sequence
  derived and/or modified sequence
atgcccagcgctgaggccaagctgaagaagaacagatgtgccaactgctttgactgccccggctgcatgcacaccctgagcacccgggccaccagcatcagcacccagctgcctgatgatcctgccaagaccaccatgaagaaggcctactacctggcctgtggcttctgccgctggaccagcagagatgtgggcatggctgacaagtctgtggccagcggcggctggcaggagcctgagaacccccacacccagaggatgaacaagctgattgagtactaccagcagctggcccagaaggagaaggtggagcgggacaggaagaagctggccaggagaagatag

SEQ ID NO: 50825 - DNA, 1212 bp, Artificial Sequence
  derived and/or modified sequence
atgcccagcgccgaggccaagctgaagaagaaccggtgcgccaactgctttgactgccccgggtgtatgcatactttgtccacccgtgccacatccatttctacacagttgcctgatgatccggccaaaactacaatgaaaaaggcctactacctggcttgcggcttctgcagatggacctcccgtgatgtgggtatggccgacaagtcagtggcatccggcgggtggcaggaacccgaaaacccacatacacagagaatgaataagctgatcgaatattaccagcaactggcccaaaaggagaaagtggagagggatcggaagaaactcgcccggcggaggaattatatgcctttggcctttagtgacaagtacgggcttgggactcgactccagagaccccgtgctggcgcatctattagtactctggcagggctttcgctgaaggagggagaagaccagaaggagattaaaatcgaacccgcccaggcagtcgatgaggtggagcctcttccagaggattactatacacggcccgtgaacctcaccgaagtcaccacccttcagcagcgtttgttgcaaccagatttccagccagtctgtgcctcccagttgtacccacgccataaacacttgcttatcaaaaggtcactcagatgtcgtaagtgcgagcacaatctgtccaaacctgaatttaacccgacctcaatcaagtttaagatccagctcgtcgccgtgaactatattcctgaggtacggataatgtcaatccccaatctgagatacatgaaggagtcccaggtcctgttgaccctgaccaaccccgtggaaaatctgacccacgtgacactctttgaatgcgaggagggagaccctgatgacatcaacagcacagccaaagtggtggtcccacctaaagagttggtgctcgccggcaaggatgcagcggcagagtacgatgaactagcagaacctcaagattttcaggatgaccccgacatcatagccttcagaaaggccaacaaggtgggtattttcataaaagtaacaccccagcgggaagaaggagaggttaccgtgtgctttaaaatgaagcatgactttaagaatctcgccgcccccatccgacccatagaggaatcagaccaaggtaccgaagtgatatggctgacacaacatgtggagctgagtctgggacctctcttaccttag

SEQ ID NO: 50826 - DNA, 405 bp, Artificial Sequence
  derived and/or modified sequence
atgcccagcgccgaggccaagctgaagaagaaccggtgcgccaactgcttcgattgccccggatgcatgcacactctgagtactagggccacttcaatctccactcagttgccagacgatcctgcgaagacaacaatgaagaaggcatactacctggcctgtggtttctgtaggtggacatcaagagatgtcgggatggcggacaaatccgtggctagtggtggatggcaggaacctgagaaccctcatacccagcggatgaataagctgatagagtattaccagcaacttgcgcagaaggaaaaggttgagcgcgacagaaagaagctggcgagacggaggaattacatgcctcttgcttttagcgataagtatggtctgggaacaagactgcaacggccctag

SEQ ID NO: 50827 - DNA, 345 bp, Artificial Sequence
  derived and/or modified sequence
atgcccagcgccgaggccaagctgaagaagaaccggtgcgccaactgtttcgattgcccaggatgcatgcacacactctcaaccagagccaccagcatttctactcagctgccagatgatcccgcgaaaaccactatgaaaaaggcgtattatctggcgtgtggcttctgtagatggacgagccgggatgtgggcatggccgataagtccgtggcatccggcggttggcaggaacccgagaacccacacacacagcgcatgaataaactgatagaatattaccaacagctcgcacagaaagagaaggtggagagagatcgcaagaagctcgccaggcgccggtag

SEQ ID NO: 50828 - DNA, 1212 bp, Artificial Sequence
  derived and/or modified sequence
atgcccagcgccgaggctaagctcaaaaagaataggtgcgccaattgttttgattgtccaggttgcatgcataccttatcgacacgggctacaagtatttccacacaactaccagatgatcccgctaaaaccaccatgaagaaagcatattatctggcctgcggcttttgcagatggacgagtcgcgacgttggcatggcagacaagtcagttgcatcaggcggatggcaagagcccgagaacccccacactcagcggatgaataagttgatcgagtactaccagcagctggctcagaaggagaaggtggaaagagaccgaaaaaagcttgccagaaggcggaactatatgccccttgcattctcagataaatacggactgggcacaaggctgcagagacctcgcgctggcgcatccatctcaacccttgcgggtctttccctaaaggagggtgaggatcagaaagagataaaaatagagcctgcacaagccgtggacgaagtggagcctctgcccgaggattattatacaaggcctgtgaacctcactgaggtaactacacttcaacagaggctgctacagccagacttccagccagtttgcgcttctcagctctacccacggcacaagcatctgctgattaaacggtccctacgatgcagaaagtgtgagcacaatctgtccaagcctgaatttaaccctaccagcattaaattcaagatccagctcgttgccgtgaattatatcccagaagtgagaattatgtcaattcctaatctgagatacatgaaagaatcacaagtgctgctaacactaaccaaccctgttgaaaatctcactcacgttaccctgttcgagtgcgaggagggcgaccctgacgacattaattcaactgctaaagtcgtggtgcccccaaaagagcttgtgctcgcgggtaaagacgctgccgcagagtatgacgagcttgccgagccacaggatttccaggacgacccagatataatcgcttttcgcaaggccaacaaggtgggaatcttcatcaaagtgacacctcagcgggaagaaggcgaggtgacagtctgctttaagatgaagcatgacttcaagaacctcgccgcaccaatccgtccaatcgaggaatcagaccagggtacagaggtcatatggctgacgcagcacgtcgaactgtctctaggccctttactgccttag

SEQ ID NO: 50829 - DNA, 405 bp, Artificial Sequence
  derived and/or modified sequence
atgccttcggcagaagctaaactcaagaaaaatcgatgtgctaactgtttcgattgccccggatgcatgcacactcttagcaccagggccacatcaatttccacgcagctgcccgatgacccagcaaaaacaaccatgaagaaggcatattacttggcctgtggcttctgtcgctggacgagtagagatgtcggcatggccgataaaagtgtggcaagcggcggttggcaagaacctgagaacccccatacacaacgaatgaataaactgatcgaatactaccagcaactagcccagaaagagaaggtggagcgggatcgcaaaaaactggcacggagacgaaactatatgcctctggccttttctgacaagtatggattgggcacccgtctgcaaaggccctag

SEQ ID NO: 50830 - DNA, 345 bp, Artificial Sequence
  derived and/or modified sequence
atgccatccgccgaggctaagctcaagaaaaatcgctgcgccaactgtttcgactgccccggatgcatgcacaccttgtctacccgggcaacctccatcagcacccagctgccagatgatcccgcaaagacaacaatgaagaaggcttactatttggcttgcgggttttgtcgctggacgagtagagacgtgggcatggccgacaaaagcgtggccagtgggggttggcaggaaccagagaacccacatacgcaacggatgaataagctgatcgaatattatcagcagctggcacaaaaggaaaaagtggaacgtgatagaaagaagttagctaggagacggtag

SEQ ID NO: 50831 - protein, 1446 aa, Artificial Sequence
  derived and/or modified sequence
MDTTAAAALPAFVALLLLSPWPLLGSAQGQFSAGGCTFDDGPGACDYHQDLYDDFEWVHVSAQEPHYLPPEMPQGSYMIVDSSDHDPGEKARLQLPTMKENDTHCIDFSYLLYSQKGLNPGTLNILVRVNKGPLANPIWNVTGFTGRDWLRAELAVSTFWPNEYQVIFEAEVSGGRSGYIAIDDIQVLSYPCDKSPHFLRLGDVEVNAGQNATFQCIATGRDAVHNKLWLQRRNGEDIPVAQTKNINHRRFAASFRLQEVTKTDQDLYRCVTQSERGSGVSNFAQLIVREPPRPIAPPQLLGVGPTYLLIQLNANSIIGDGPIILKEVEYRMTSGSWTETHAVNAPTYKLWHLDPDTEYEIRVLLTRPGEGGTGLPGPPLITRTKCAEPMRTPKTLKIAEIQARRIAVDWESLGYNITRCHTFNVTICYHYFRGHNESKADCLDMDPKAPQHVVNHLPPYTNVSLKMILTNPEGRKESEETIIQTDEDVPGPVPVKSLQGTSFENKIFLNWKEPLDPNGIITQYEISYSSIRSFDPAVPVAGPPQTVSNLWNSTHHVFMHLHPGTTYQFFIRASTVKGFGPATAINVTTNISAPTLPDYEGVDASLNETATTITVLLRPAQAKGAPISAYQIVVEELHPHRTKREAGAMECYQVPVTYQNAMSGGAPYYFAAELPPGNLPEPAPFTVGDNRTYQGFWNPPLAPRKGYNIYFQAMSSVEKETKTQCVRIATKAAATEEPEVIPDPAKQTDRVVKIAGISAGILVFILLLLVVILIVKKSKLAKKRKDAMGNTRQEMTHMVNAMDRSYADQSTLHAEDPLSITFMDQHNFSPRYENHSATAESSRLLDVPRYLCEGTESPYQTGQLHPAIRVADLLQHINLMKTSDSYGFKEEYESFFEGQSASWDVAKKDQNRAKNRYGNIIAYDHSRVILQPVEDDPSSDYINANYIDIWLYRDGYQRPSHYIATQGPVHETVYDFWRMIWQEQSACIVMVTNLVEVGRVKCYKYWPDDTEVYGDFKVTCVEMEPLAEYVVRTFTLERRGYNEIREVKQFHFTGWPDHGVPYHATGLLSFIRRVKLSNPPSAGPIVVHCSAGAGRTGCYIVIDIMLDMAEREGVVDIYNCVKALRSRRINMVQTEEQYIFIHDAILEACLCGETAIPVCEFKAAYFDMIRIDSQTNSSHLKDEFQTLNSVTPRLQAEDCSIACLPRNHDKNRFMDMLPPDRCLPFLITIDGESSNYINAALMDSYRQPAAFIVTQYPLPNTVKDFWRLVYDYGCTSIVMLNEVDLSQGCPQYWPEEGMLRYGPIQVECMSCSMDCDVINRIFRICNLTRPQEGYLMVQQFQYLGWASHREVPGSKRSFLKLILQVEKWQEECEEGEGRTIIHCLNGGGRSGMFCAIGIVVEMVKRQNVVDVFHAVKTLRNSKPNMVEAPEQYRFCYDVALEYLESS

SEQ ID NO: 50832 - DNA, 4341 bp, Artificial Sequence
  derived and/or modified sequence
atggacacaactgctgccgccgccctcccggcttttgtggctctactgctcttgtccccttggcccctgctcgggtctgcacaggggcagttctccgccggaggttgcacatttgacgatgggcccggagcctgtgactaccaccaggatttgtacgacgatttcgagtgggtgcatgtgagcgcccaagagccccactacctgcctcctgagatgccacaggggtcctatatgatcgttgattcgtcagaccatgaccccggggaaaaggctagactccagctgcccacaatgaaggagaacgacactcattgcatcgacttcagctacctgctgtatagtcaaaagggtctgaaccccggtacacttaatatactggttcgtgtgaacaaaggcccactcgcaaacccaatttggaacgttaccgggtttactggccgggactggcttcgggcagaactggctgtgtctaccttttggccaaacgagtaccaggtgatatttgaggcagaggtgagcggtggcaggtccgggtacatcgctatagatgacattcaggttctcagttacccgtgcgacaagagtcctcactttctgcgactgggcgacgtagaagttaacgcgggccagaacgccacgttccagtgtatagccaccggtcgtgacgccgttcacaataaactttggctgcagcgtagaaatggtgaggacatacctgtcgcgcagaccaagaacatcaatcatagacgcttcgccgcgtcctttcggctgcaggaagtgactaagactgaccaggacctctaccgttgtgtgacacagtctgaacgcggcagtggggtttccaatttcgcacagctgatcgtgagggaaccaccccgacccattgccccaccccaacttctcggggtgggcccgacctaccttcttatccagctgaacgccaactcgattatcggagacggacctattatactgaaggaagttgaatatcggatgacatctggatcctggacggaaacgcacgccgtgaacgcccccacctacaaactgtggcacctcgacccagacaccgagtacgagattcgcgtcctgctgaccaggcccggcgaggggggcacaggcttgcccggaccgccactgattactaggacaaagtgcgctgaaccgatgcgcacacctaaaacactgaaaatcgccgagatccaagctcggagaatcgccgttgactgggagagccttggatacaacattacccgctgtcataccttcaacgtgaccatctgttaccactatttccgtggtcataatgaaagtaaggccgattgccttgatatggatcccaaagctccgcagcatgttgtcaatcaccttcccccctatacaaatgtcagcctgaagatgatcttgactaacccggaggggcgcaaggaatccgaagaaacaattatacagaccgacgaggatgtgcctgggcccgtccccgtaaaaagtctgcagggtacctctttcgagaataagatttttctgaactggaaagaacctcttgacccaaatggcatcattacacagtacgaaatctcatatagttctatccgctcattcgaccctgccgtgcctgtagcaggacccccccagaccgtgtcaaacctctggaatagcacccaccatgtcttcatgcaccttcacccagggacaacatatcagttcttcatccgggcgtctactgtgaaagggttcggacctgccacagcaataaacgtgacaaccaacatctctgcccctacgctgccggactacgaaggcgtggatgcgagccttaatgaaacagccactactatcactgtgctgctcaggccagcccaggccaaaggcgcccccatcagtgcttaccagatagtggttgaggaattgcatccccatcggactaagcgagaggccggtgccatggagtgctaccaggtccccgttacttaccaaaacgccatgagtgggggggctccctactacttcgctgctgagctcccccccggcaacctgcctgagccggctccattcacagttggcgacaataggacctatcagggcttttggaacccacccctggcgcctcgcaaaggttacaacatttattttcaagctatgagcagcgtagaaaaggagacaaagacacaatgcgtgcggatcgccacaaaggctgctgcgacagaagaacccgaagtgattcccgatcccgcaaaacaaacagatcgcgtagtaaaaattgcaggtatttccgctgggattctcgtcttcatactattgctgttagttgtgattttaattgttaagaagagcaagttagccaagaagaggaaggacgccatgggcaacacgcggcaagaaatgacccatatggtgaatgccatggatcggtcttatgctgatcagtctacactacatgctgaggatcctcttagcataacctttatggatcagcacaacttctccccgcggtacgagaaccattccgccactgcggaaagttctaggttgttggatgttccccggtacctctgtgaaggtacagagagtccgtatcagacggggcagctccatccggccatccgtgtggcggacctgttacagcacatcaacttgatgaagacatctgatagctatggtttcaaggaggagtatgaatcctttttcgaagggcagtccgcaagctgggatgttgctaaaaaggatcaaaaccgcgctaaaaaccgctacgggaacattatagcttacgaccacagcagagtcattttacagcctgtggaggacgatccttcttcagactatattaacgctaattacatcgatatctggctctaccgagatggctatcaaagaccaagccactacattgcgactcagggcccagtacatgagacagtgtatgacttttggcgcatgatctggcaagaacagtcagcctgcattgtgatggtgactaatcttgtagaggtgggcagagtgaagtgctataagtattggcctgatgatacagaggtgtacggagatttcaaggtgacctgcgtggaaatggaaccacttgcagaatacgtggtaagaacctttacccttgagaggcggggatacaacgagatacgggaagttaaacaattccacttcactggatggcctgatcatggcgtgccgtaccatgctaccggattattgagttttatacggcgagtcaagctgtctaatccccctagtgcgggacccatcgttgtccactgttctgctggtgcaggccgaacagggtgttatattgtgatcgacattatgctcgacatggcggaacgcgagggcgtggtagatatctacaactgcgtgaaagccctccgttcccgcagaatcaacatggtgcagacagaggaacagtacattttcatacacgacgccatcctcgaagcttgtctatgtggggaaaccgccatccctgtctgcgagttcaaggctgcttacttcgacatgatcaggatagactctcaaaccaacagttctcaccttaaggacgaatttcaaacactcaattccgtgaccccccgactgcaggctgaggattgcagcattgcatgtttacctagaaatcacgacaagaataggttcatggacatgcttccccctgatcgatgtctgcctttcctgattactatcgacggggaatcatctaattacataaatgccgccttgatggacagctatagacaaccagcggcctttatcgtaacacagtacccgctgccaaacaccgttaaagacttctggaggcttgtgtacgattatgggtgcacatccatcgttatgctcaatgaggtggacctctctcagggctgtccccagtactggcccgaggaaggaatgctcagatacgggccgattcaggtggaatgcatgtcctgctctatggactgcgacgtaattaatcgcatctttaggatttgcaacctgacacgtcctcaggaagggtacctaatggtgcaacagttccagtatcttgggtgggccagccacagggaggtgcccgggtccaaaaggagctttctgaaactgattctacaagtagagaagtggcaggaagaatgcgaagagggcgaaggtaggacaattattcattgtcttaatggcggaggcaggagcggcatgttctgtgcaatcgggatcgtggtggagatggtcaaacggcagaacgtggtggacgtgtttcacgcagtaaagacactcagaaactccaaacctaatatggtggaggctcctgaacagtaccgattctgctatgacgtggccctcgaatacctggagtcttcttag

SEQ ID NO: 50833 - DNA, 4341 bp, Artificial Sequence
  derived and/or modified sequence
atggacaccacagctgctgctgccctgcctgcctttgtggccctgctgctgctgagcccctggcccctgctgggcagcgcccagggccagttctctgctgggggctgcacctttgatgatggccctggggcctgtgactaccaccaggacctgtatgatgactttgagtgggtgcacgtgtctgcccaggagccccactacctgcccccagagatgccccagggcagctacatgattgtggacagcagtgaccatgaccctggagagaaggcccggctgcagctgcccaccatgaaggaaaatgacacccactgcatcgacttctcctacctgctgtacagccagaagggcctgaaccctggcaccctgaacatcctggtgcgggtgaacaagggccccctggccaaccccatctggaatgtgacaggcttcaccggccgggactggctgcgggcagagctggccgtgtccaccttctggcccaatgagtaccaggtgatctttgaggccgaggtgtctgggggccgcagcggctacatcgccattgatgacatccaggtgctgagctacccctgtgacaagagcccccacttcctgcggctgggagatgtggaggtgaatgccggccagaatgccaccttccagtgcatcgccaccggcagagatgctgtgcacaacaagctgtggctgcagaggagaaatggagaggacatccctgtggcccagaccaagaacatcaaccacagaagatttgctgccagcttccggctgcaggaggtgaccaagacagaccaggacctgtaccgctgtgtgacccagagcgagcggggcagcggcgtgagcaactttgcccagctgattgtgcgggagcccccccggcccatcgccccaccccagctgctgggcgtgggccccacctacctgctgatccagctgaatgccaacagcatcattggagatggccccatcatcctgaaggaggtggagtacaggatgaccagcggctcctggacagagacccatgctgtgaatgcccccacctacaagctgtggcacctggaccctgacacagaatatgagatccgggtgctgctgaccaggcctggagagggcggcaccggcctgcccggccccccactcatcaccaggaccaagtgtgccgagcccatgaggacccccaagaccctgaagattgctgagatccaggccaggagaattgctgtggactgggagagcctgggctacaacatcacccgctgccacaccttcaacgtgaccatctgctaccactacttccggggccacaatgaaagcaaggctgactgcctggacatggaccccaaggccccccagcacgtggtgaaccacctgcccccctacaccaacgtgtccctgaagatgatcctgaccaaccctgagggcaggaaggagagcgaggagaccatcatccagacagatgaagatgtgcccggccctgtgcctgtgaagagcctgcagggcaccagctttgagaacaagatcttcctgaactggaaggagcccctggaccccaacggcatcatcacccagtatgagatctcctacagcagcatccgcagctttgatcctgctgtgcctgtggccggccccccccagacagtgagcaacctgtggaacagcacccaccacgtgttcatgcacctgcaccctggcaccacctaccagttcttcatccgggccagcacagtgaagggctttggacctgccacagccatcaacgtgaccaccaacatcagcgcccccaccctgcctgactatgaaggagtggatgccagcctgaatgaaacagccaccaccatcaccgtgctgctgcggcctgcccaggccaagggggcccccatcagcgcctaccagatcgtggtggaggagctgcacccccacaggaccaagcgggaggccggggccatggagtgctaccaggtgcctgtgacctaccagaatgccatgtctggaggagccccctactactttgctgctgagctgcccccaggcaacctgcctgagcccgcccccttcaccgtgggggacaacagaacctaccagggcttctggaacccccccctggcccccaggaagggctacaacatctacttccaggccatgagctctgtggagaaggagaccaagacccagtgtgtgcgcatcgccaccaaggctgctgccacagaggagcctgaggtgatcccagaccctgccaagcagacagacagagtggtgaagattgctggcatctctgctggcatcctggtgttcatcctgctgctgctggtggtgatcctgattgtgaagaagagcaagctggccaagaagaggaaggatgccatgggcaacacccggcaggagatgacccacatggtgaatgccatggacaggagctatgctgaccagagcaccctgcacgccgaggaccccctgagcatcaccttcatggaccagcacaacttcagccccaggtatgagaaccacagcgccacagctgagagcagccggctgctggatgtgccccgctacctgtgtgagggcacagagagcccctaccagacaggccagctgcacccagccatccgggtggccgacctgctgcagcacatcaacctgatgaagaccagtgacagctatggcttcaaggaggagtatgagagcttctttgagggccagagcgcctcctgggatgtggccaagaaggaccagaacagagccaagaacagatatggcaacatcatcgcctatgaccacagcagggtcatcctgcagcctgtggaggatgaccccagcagtgactacatcaatgccaactacatcgacatctggctgtacagagatggctaccagaggcccagccactacatcgccacccagggccctgtgcatgagaccgtgtatgacttctggaggatgatctggcaggagcagagcgcctgcatcgtgatggtgaccaacctggtggaggtgggccgggtgaagtgctacaagtactggccagatgacacagaggtgtatggagacttcaaggtgacctgtgtggagatggagcccctggccgagtatgtggtgaggaccttcaccctggagcggcggggctacaatgagatccgggaggtgaagcagttccacttcaccggctggccagaccacggcgtgccctaccacgccaccggcctgctgtccttcatccggcgggtgaagctgagcaaccccccatctgctggccccatcgtggtgcactgcagcgctggagctggccgcacaggctgctacatcgtcatcgacatcatgctggacatggccgagcgggagggcgtggtggacatctacaactgtgtgaaggccctgcggagccgccgcatcaacatggtgcagacagaggagcagtacatcttcatccatgatgccatcctggaggcctgcctgtgtggggagacagccatccctgtgtgtgagttcaaggccgcctactttgacatgatcagaattgacagccagaccaacagcagccacctgaaggatgagttccagaccctgaacagcgtgaccccccggctgcaggccgaggactgcagcatcgcctgcctgcccaggaaccacgacaagaaccgcttcatggacatgctgcccccagaccgctgcctgcccttcctgatcaccattgatggagagagcagcaactacatcaatgctgccctgatggacagctaccggcagcctgctgccttcatcgtgacccagtaccccctgcccaacacagtgaaggacttctggaggctggtgtatgactatggctgcaccagcatcgtgatgctgaatgaggtggacctgagccagggctgcccccagtactggccagaggagggcatgctgcgctatggccccatccaggtggagtgcatgagctgcagcatggactgtgatgtgatcaaccgcatcttccgcatctgcaacctgacccggccccaggagggctacctgatggtgcagcagttccagtacctgggctgggccagccaccgggaggtgcccggcagcaagaggagcttcctgaagctgatcctgcaggtggagaagtggcaggaggagtgtgaggagggggagggccgcaccatcatccactgcctgaatggaggcggccgcagcggcatgttctgtgccatcggcatcgtggtggagatggtgaagaggcagaatgtggtggatgtgttccacgctgtgaagaccctgaggaacagcaagcccaacatggtggaggcccctgagcagtaccgcttctgctatgatgtggccctggagtacctggagagcagctag

SEQ ID NO: 50834 - DNA, 4341 bp, Artificial Sequence
  derived and/or modified sequence
atggacaccaccgccgccgccgccctgcccgccttcgtggccctgctactgctctccccatggcctctgctgggctccgctcagggccagttcagcgctggcggctgtacattcgatgacggtccaggcgcttgcgattatcaccaggatctctacgacgatttcgagtgggtgcacgtatccgctcaagagccacactatttgccccctgagatgccccagggatcttacatgatagtggatagttccgaccacgatccgggggaaaaggccagacttcagttgccgaccatgaaggagaacgacacccactgcattgacttttcttacctgctatacagccaaaagggcctgaaccccggaacactgaatattttggtgcgtgttaacaagggaccccttgctaacccgatatggaatgtgacaggcttcactggcagggactggctccgagccgaactggctgtgtctacattttggccaaacgagtaccaggtgatcttcgaagctgaggtaagcggaggccgctccggctacatcgcaatcgacgatatacaggtactaagctacccctgcgacaaatcccctcacttccttagattgggagatgtagaggtgaatgcgggccaaaacgcgacatttcagtgcattgccacgggtagagatgccgtccacaacaaattgtggctgcagcgaaggaatggcgaagacatccccgttgcccagactaaaaatattaatcataggcgattcgccgcaagctttagattgcaggaagtcacaaaaaccgatcaggatctctacaggtgcgtgacgcagtcagaaaggggatccggggtctccaactttgcacagcttatcgtaagggaacccccccgtcccatcgctccgccgcagttactgggcgtgggcccgacgtatctcctgatacagctgaatgccaattcaattattggcgatggacctatcatcctgaaagaggtagagtataggatgacgtctggatcatggaccgagactcacgccgtcaacgccccaacctacaagttatggcatctcgatccagataccgaatacgaaataagagtgctgctcaccagaccgggggagggtggaaccggattacccgggccccccttgattactcggacaaaatgcgcggaacccatgaggactccaaaaaccttgaagattgccgagatccaggccagaagaatcgctgtggactgggaatcattgggatacaacattacccggtgtcatacttttaacgtcacgatctgctaccactactttcgcgggcacaacgaaagcaaggcagactgtctcgatatggacccgaaggcgcctcaacacgtggtcaaccatctgcccccttatactaacgtcagcctgaaaatgatcctaaccaatccggaggggcgaaaagaaagcgaagaaaccattattcagacggatgaggatgtcccagggcccgtgcccgtgaagtcactccagggtaccagtttcgaaaataaaatctttctgaactggaaagagcctttggatcctaacggtattataacccagtatgagatatcctattccagtatccgcagcttcgaccctgcagtcccagtcgccggacccccccagaccgtatcaaatctgtggaacagcacacaccacgtgttcatgcatctccatccgggtactacttatcagttcttcatccgcgcctccacagtaaaagggttcgggcctgctactgccattaatgtaacgacgaacatatccgccccgactctcccggactacgagggcgttgatgcctctctgaacgaaacagcgaccactattacagtgctcctgcgccccgcacaggccaagggcgcccccatcagcgcttatcaaattgtggtggaggaactgcatccccataggacgaaacgggaggccggcgctatggagtgttatcaggtgcccgttacttatcagaacgctatgagcgggggtgccccgtattattttgccgcagagctccccccagggaacttaccagagcccgctccattcacagtgggagataaccgcacttatcagggtttctggaacccgcctttggctccacgcaaggggtacaatatctactttcaggccatgtcttctgttgaaaaagagaccaaaacacaatgcgtgaggattgcaacaaaggcagccgccacggaagagccagaggtaatccctgacccagctaagcagaccgaccgagtcgttaagatcgctggtattagcgccggaatccttgtttttattctgctgctgttagtggtgatcttaatcgtcaagaagagcaagcttgccaagaagcggaaggatgcaatgggcaacacacgacaggaaatgacccatatggtaaatgctatggacagaagttacgctgatcagtccaccctgcacgctgaggatcctttatccattaccttcatggaccaacataacttttcaccgcggtatgagaatcacagcgccacggccgagtcctcacggttgctggacgtaccgcgctacctctgtgaaggcaccgaatccccttatcagacagggcaactgcacccagccatacgtgtagcagacctgttgcagcatattaacctgatgaagacatcggattcgtacgggtttaaggaggaatatgaaagcttttttgaagggcagtcagcgagctgggatgttgccaagaaagaccagaatagggccaaaaatcggtacggaaacattattgcatatgaccattcaagggtgatcctccagcctgtggaggacgatccctcctcagactacatcaacgccaactacatagacatttggttatacagggatggctaccaaaggccctcacattacatcgcaacccaaggaccagtacacgagacagtgtatgatttctggagaatgatctggcaggaacagtctgcctgcatcgtgatggtcactaaccttgtggaagtgggccgtgttaagtgttataaatactggccagacgacaccgaggtatatggtgactttaaagtcacatgtgtggagatggaaccactcgctgagtatgtggtgcgcactttcacactagagaggagggggtacaatgagatccgagaggtcaaacagttccatttcacgggatggcctgatcacggcgtgccttatcacgccacaggtctgttgtcatttatacgacgcgtgaaactgagtaatcccccaagcgcaggaccaatcgtggtgcattgctctgcaggggctggccggacaggctgttatatagtgatcgacattatgctcgacatggccgagcgcgaaggcgttgtggacatctataactgtgtcaaggcattaagatctcgtcgtatcaacatggtccaaacggaggagcagtacatcttcatccacgatgctatcctggaagcctgcctctgcggagagacagccattccagtctgtgaattcaaggccgcttacttcgatatgatcaggattgacagccagaccaactcatctcacctgaaggacgaatttcagacgctgaactctgtgacacccagacttcaggccgaggactgctctatcgcctgtcttccgcgcaaccatgataagaaccggtttatggacatgctacctcccgacagatgcctgccctttctgattaccatcgacggagaaagctctaactacatcaacgcagctcttatggactcctataggcagcctgccgcttttattgtgacccaatacccactgcctaacacggtgaaggacttctggcggcttgtgtacgactatgggtgcacttccattgtcatgcttaacgaggtcgacctgagccagggctgcccacaatactggcctgaagagggcatgctgcggtacggacctatacaagtcgaatgcatgtcttgtagcatggactgcgatgtaattaaccgtatcttcaggatttgtaatctgacccggccacaagagggatacctgatggtccaacaatttcagtacctgggctgggccagtcaccgcgaggtgcctggaagcaagcgctcatttttgaagcttatccttcaggtggaaaagtggcaggaggagtgtgaggagggcgagggcaggaccattatccactgcctgaatgggggggggcgctcgggtatgttctgtgccataggcatcgtggtggagatggtgaagcgtcagaatgtcgttgatgtgtttcatgccgtcaaaaccctgcgaaacagcaaacccaacatggtcgaggcccctgaacaatatagattctgttacgatgtcgcccttgaatacctggaatcttcttag

SEQ ID NO: 50835 - DNA, 4341 bp, Artificial Sequence
  derived and/or modified sequence
atggataccactgccgctgcagcactaccagcattcgtggccctgttgttgctgagcccatggccacttctcgggtcggcccagggccagttcagcgcgggtgggtgcacatttgacgacggacccggagcctgtgactatcaccaggatctgtacgatgacttcgaatgggtccatgtaagcgcccaggaacctcactacttgccaccagagatgccccaaggtagctacatgattgtggattcttccgaccatgatcccggtgaaaaagctcggctccagctccctacaatgaaggaaaatgacacgcactgtattgatttttcttacttgctttacagtcagaaaggcctgaacccgggaacactaaatatcctggtgcgggtcaataagggacctctcgctaatcctatttggaatgtgaccggatttaccggccgtgattggctccgggcagaattagccgtaagtacattctggccaaacgaatatcaggttatctttgaggcagaggtgtccggagggaggtccggttatattgccattgacgacatccaggtgctgagctacccatgtgacaaaagtcctcattttctgcggctgggcgacgtggaagttaatgccggtcagaacgcgactttccagtgcattgcgacgggcagagatgccgtgcataataaattgtggctgcaaagacgtaatggggaggatattcctgtcgcacagacgaagaacattaatcacagacgcttcgctgcgtcattcagactccaggaggtcacgaagacagaccaggacctttatagatgtgtgacccaatctgaacgcggaagcggggtgtcaaacttcgcccagctgatagtgcgggagccacctcgccctattgccccacctcaactgcttggcgtaggaccaacttacctcttaatccagttgaatgcaaattccatcattggcgacggccctatcattctgaaagaggttgaataccgcatgaccagtggcagttggactgagactcatgctgtcaatgcaccaacgtacaagttgtggcatttagatcctgatacagaatacgagatcagagttctgctgacacgacctggcgaaggaggaacgggcttgccaggacctcccctgataacgagaactaagtgtgcggagcccatgcgcactcccaagacacttaagattgccgagattcaggcaagacgaatcgcagtggattgggaatccttgggatataatatcacacgttgtcatacctttaacgttactatatgctatcattacttccggggacacaacgagtctaaggctgattgcctagacatggatccaaaggcccctcaacacgttgtgaatcatctgccaccttataccaatgtgagtttgaaaatgatactgacaaatcccgaagggcgaaaagaatctgaagagacaatcatacagacagacgaagacgttcccggacctgtgcctgtaaagagcctgcaggggacttcgtttgagaacaagattttcctgaattggaaggagccactcgatccaaatggcatcatcactcagtatgagatcagctattcgagtatacgctcgtttgacccagctgtaccagtcgcagggccaccacagacggtcagcaatctttggaactccacccatcatgtcttcatgcacctacaccctgggacgacgtatcagtttttcattcgtgccagcacagtcaaaggtttcgggccagccacagctatcaacgtgaccaccaatatttctgctcccacgttgcccgattatgagggagttgatgccagcctgaatgagaccgctactaccatcactgtcttattaaggcccgcacaggctaagggggcaccaatctcagcataccagattgttgtggaagaactgcacccccacaggacaaaaagagaagcaggcgcaatggaatgctaccaggtgcccgtcacataccagaatgcaatgtctggcggagccccatactatttcgccgcagagctcccaccaggcaatctgcccgagccagctcccttcactgttggggacaatagaacctatcagggcttttggaatccaccactggctccgaggaagggctataatatttacttccaagcgatgtcttctgtcgagaaggagaccaagacccagtgtgtgcggattgccaccaaagccgctgcgaccgaggaacccgaggtcattccagatcctgctaaacaaacagaccgcgtagtaaagatcgccggtatcagtgcaggcattctcgtatttatactgctactgctggtggtcatacttatcgtaaaaaaaagcaagctggctaaaaagaggaaggatgccatgggaaacacacgacaggaaatgactcacatggtcaatgccatggatcgaagctatgccgatcagtcaaccttgcatgctgaggatcccctgtccataacctttatggatcagcacaacttctcaccaagatacgagaaccatagcgcaacagcagagtcatcaagactcctggatgtgccgagatacctctgcgaaggcaccgaaagcccctatcagacgggacagctgcatcccgctatacgggtggctgacctgctccagcatataaacctgatgaagacatccgactcatacggcttcaaggaggaatacgaatcattctttgaggggcagtcagcatcctgggatgtggcaaaaaaagaccaaaacagggctaagaaccgatatggtaacatcatcgcctacgatcacagtagagtgattctgcagccagtggaagacgacccgtcatccgattacataaatgctaactatattgatatctggttgtaccgtgatggctaccagagaccatcacattacatcgctacgcaagggcctgtgcacgagactgtgtatgatttctggcgaatgatatggcaagagcagagcgcttgcatagtcatggtgaccaacctggtggaggtagggagggtgaagtgctacaagtactggccagacgataccgaggtctacggggactttaaagtaacctgtgtggagatggagccattagctgaatacgtggtgcgcaccttcactctggagaggaggggttataatgagattagggaagtgaaacagtttcactttacgggatggcctgatcatggggtaccctatcacgcgaccggcctcctgagcttcatccgccgagtgaagttaagtaaccctccatcagctgggccaattgttgtgcactgcagcgctggcgctggccgtaccgggtgttacatcgtgattgacatcatgctcgatatggccgagcgggagggagtggtggacatttacaattgcgtgaaggctctgcggagccgcagaataaatatggtacagaccgaagagcagtatattttcatccacgacgcaatcctggaagcgtgtctgtgcggagagaccgccatccccgtctgtgagtttaaggctgcatattttgatatgatccgaatcgatagccagactaattccagccatttaaaagatgagttccagacactgaatagtgtcacaccgagactgcaagcggaggattgctctattgcgtgtctgccccgtaatcacgataaaaatagattcatggatatgttacctccggaccgctgtctcccctttctgattaccatcgacggggagtcatcaaattatatcaatgcagcactgatggacagttaccgccaaccagccgcttttattgtgacgcagtatccattgccgaatactgttaaagacttttggcggttggtctacgactacggctgcacctctatcgtgatgctgaacgaagtggatctgagccagggatgtccacaatactggccagaagagggaatgttgcgttacgggccaatccaggtcgaatgcatgagctgttcaatggattgcgacgtgatcaaccggatcttcagaatttgtaatctgacacgcccacaggaaggctacctcatggtacagcaatttcagtacctgggttgggcgtctcaccgcgaggtgccaggaagtaaaagaagcttcctgaagctgatacttcaggtggagaaatggcaggaggagtgcgaagagggtgaaggacggacaatcatacactgtttaaacggcggaggacggagcgggatgttttgcgcgattggcattgtggtggaaatggtcaaaagacagaatgtcgtggacgttttccacgccgtgaagacactacgaaactctaagcctaacatggtggaggcccctgaacagtatcggttctgttatgacgtggctcttgaatacctcgaaagtagctag

SEQ ID NO: 50836 - DNA, 5816 bp, Artificial Sequence
  derived and/or modified sequence
tccgccgagcatggagagctgccgccgcggccggccggcgacgctggcgacgctttcgcccctgaggtagtttggcgaccgcgaagaaggaaaaagggcgggcgggcggctgtcctctcaccgtcctcaccccgcgaggcccggcccgctcctccgtcgtggatttcgcggcgatccccccggcagctctttgcaaagctgcttgaaacttctcccaaactcggcatggatacgactgcggcggcggcgctgcctgcttttgtggcgctcttgctcctctctccttggcctctcctgggatcggcccaaggccagttctccgcaggtggctgtacttttgatgatggtccaggggcctgtgattaccaccaggatctgtatgatgactttgaatgggtgcatgttagtgctcaagagcctcattatctaccacccgagatgccccaaggttcctatatgatagtggactcttcagatcacgaccctggagaaaaagccagacttcagctgcctacaatgaaggagaacgacactcactgcattgatttcagttacctattatatagccagaaaggactgaatcctggcactttgaacatattagttagggtgaataaaggacctcttgccaatccaatttggaatgtgactggattcacgggtagagattggcttcgggctgagctagcagtgagcaccttttggcccaatgaatatcaggtaatatttgaagctgaagtctcaggagggagaagtggttatattgccattgatgacatccaagtactgagttatccttgtgataaatctcctcatttcctccgtctaggggatgtagaggtgaatgcagggcaaaacgctacatttcagtgcattgccacagggagagatgctgtgcataacaagttatggctccagagacgaaatggagaagatataccagtagcccagactaagaacatcaatcatagaaggtttgccgcttccttcagattgcaagaagtgacaaaaactgaccaggatttgtatcgctgtgtaactcagtcagaacgaggttccggtgtgtccaattttgctcaacttattgtgagagaaccgccaagacccattgctcctcctcagcttcttggtgttgggcctacatatttgctgatccaactaaatgccaactcgatcattggcgatggtcctatcatcctgaaagaagtagagtaccgaatgacatcaggatcctggacagaaacccatgcagtcaatgctccaacttacaaattatggcatttagatccagataccgaatatgagatccgagttctacttacaagacctggtgaaggtggaacggggctcccaggacctccactaatcaccagaacaaaatgtgcagaacctatgagaaccccaaagacattaaagattgctgaaatacaggcaagacggattgctgtggactgggaatccttgggttacaacattacgcgttgccacacttttaatgtcactatctgctaccattacttccgtggtcacaacgagagcaaggcagactgtttggacatggaccccaaagcccctcagcatgttgtgaaccatctgccaccttatacaaatgtcagcctcaagatgatcctaaccaatccagagggaaggaaggagagtgaagagacaattattcaaactgatgaagatgtgcctggtcccgtaccagtaaaatctcttcaaggaacatcctttgaaaataagatcttcttgaactggaaagaacctttggatccaaatggaatcatcactcaatatgagatcagctatagcagtataagatcatttgatcctgcagttccagtggctggacctccccagactgtatcaaatttatggaacagtacacaccatgtctttatgcatctccaccctggaaccacgtaccagtttttcataagagccagcacggtcaaaggctttggtccagccacagccatcaatgtcaccaccaatatctcagctccaactttacctgactatgaaggagttgatgcctctctcaatgaaactgccaccacaataactgtattgttgagaccagcacaagccaaaggtgctcctatcagtgcttatcagattgttgtggaagaactgcacccacaccgaaccaagagagaagccggagccatggaatgctaccaggttcctgtcacataccaaaatgccatgagtgggggtgcaccgtattactttgctgcagaactccccccgggaaacctacctgagcctgccccgttcactgtgggtgacaatcggacctaccaaggcttttggaaccctcctttggctccgcgcaaaggatacaacatctatttccaggcgatgagcagtgtggagaaggaaactaaaacccagtgcgtacgcattgctacaaaagcagcagcaacagaagaaccagaagtgatcccagatcccgccaagcagacagacagagtggtgaaaatagcaggaattagtgctggaattttggtgttcatcctccttctcctagttgtcatattaattgtaaaaaagagcaaacttgctaaaaaacgcaaagatgccatggggaatacccggcaggagatgactcacatggtgaatgcaatggatcgaagttatgctgatcagagcactctgcatgcagaagatcctctttccatcaccttcatggaccaacataactttagtccaagatatgagaaccacagtgctacagcagagtccagtcgccttctagacgtacctcgctacctctgtgaggggacggaatccccttaccagacaggacagctgcatccagccatcagggtagctgatttactgcagcacattaatctcatgaagacatcagacagctatgggttcaaagaggaatatgagagcttttttgaaggacagtcagcatcttgggatgtagctaaaaaagatcaaaatagagcaaaaaaccgatatggaaacattatagcatatgatcactccagagtgattttgcaacccgtagaggatgatccttcctcagattatattaatgccaactatattgatatttggctgtacagggatggctaccagagaccaagtcattacattgcaacccaaggtcccgttcatgaaacagtgtatgatttctggaggatgatttggcaagaacaatctgcttgcattgtgatggttacaaatttagttgaggttggccgggttaaatgctataaatattggcctgatgatactgaagtttatggtgacttcaaagtaacgtgtgtagaaatggaaccacttgctgaatatgtagttaggacattcaccctggaaaggagggggtacaatgaaatccgtgaagttaaacagttccatttcacgggctggcctgaccatggagtgccctaccatgctacagggctgctttcctttatccggcgagtcaagttatcaaaccctcccagtgctggccccatcgttgtacattgcagtgctggtgctggacgaactggctgctacattgtgattgacatcatgctagacatggctgaaagagagggtgttgttgatatttacaattgtgtcaaagccttaagatctcggcgtattaatatggtccagacagaggaacagtacatttttattcatgatgccattttagaagcctgcttatgtggagaaactgccatacctgtctgtgaatttaaagctgcatattttgatatgattagaatagactcccagactaactcttcacatctcaaggatgaatttcagactctgaattcagtcacccctcgactacaagctgaagactgcagtatagcgtgcctgccaaggaaccatgacaagaaccgtttcatggacatgctgccacctgacagatgtctgccttttttaattacaattgatggggagagcagtaactacatcaatgctgctcttatggacagctacaggcaaccagctgctttcatcgtcacacaataccctctgccaaacactgtaaaagacttctggagattagtgtatgattatggctgtacctccattgtgatgttaaacgaagtcgacttgtcccagggctgccctcagtactggccagaggaagggatgctacgatatggccccatccaagtggaatgtatgtcttgttcaatggactgtgatgtgatcaaccggatttttaggatatgcaatctaacaagaccacaggaaggttatctgatggtgcaacagtttcagtacctaggatgggcttctcatcgagaagtgcctggatccaaaaggtcattcttgaaactgatacttcaggtggaaaagtggcaggaggaatgcgaggaaggggaaggccggacgattatccactgcctaaatggtggcgggcgaagtggcatgttctgtgctataggcatcgttgttgaaatggtgaaacggcaaaatgttgtcgatgttttccatgcagtaaagacactgaggaacagcaagccaaacatggtggaagccccggagcaataccgtttctgctatgatgtagctttggagtacctggaatcatcttagttgggtgagactctttaaagtgcatccatgaagaaacctgtccatctattgagccagcagctgttgtacctgttacacttgtgcagaaagattttaatgtggggggtgggagacttttacatttgagaggtaaaagtattttttttatgaagttgtgtatcttaataaaaaggactgaattagtttttattactatattaaagcatcaacatttcatgccacataaattatatttaataagaaccagattgaaatgagaacgtattggtgtttgtacagtgaacatgccaccttttttctcatggtttcagtagagcagctaccacatgttgcatgagttcatactttctacgtggcatttttctccctttctaaaatgaaagctgatgaatcttaaaaggaagaagaaaagaaaagctgtgcaaattcatagtaaagttcgttttttatatgtttccagtgtagcagatctctatataaatatataaatatatataactggcttattttcttttaatgtgcaatgatggctggatcatttaaagttctttttagaaaataacataagccaaagactcaagtgtaaatatgtctatatggagaaagcacattatatttattggttacttacattccttttttgatggctaaaatactaccaccacacaatcatcttttttttcctgaagaaagctttttctttagctaaaatcaattgtaaacgatttttgtagattattttttgtatgttttagtgtaagtagaagataaactttttattcataaaccaggaagcaatgttctttatagtgattctcttgtgtacatgcttgtgaattaaatttgtgtaaaatcccttggcaattgggtcttttaatataggaccaaattaaaacattttgctgaatatgtatagtttttcacaatttcattaggtaaataatggtttggtgatcatacatgagaaatgtacacattaaaaggccttgctgacaacttgcacaatgttgaacatagcctttaagcatcatttaaattttaaaggaatggagtttttcagcctgtggcccagcactggtcaagaaaacaagatggcaacatatatgctttcagggtcaaatttgagcaaactgtaaactgtcagggtgataaaatgtttctcttgatgtttacatgcacaagctttgcgttctgactataaaaagtgtgaacaaatcaatgccagattcctgttttgcgcattgtcatgg

SEQ ID NO: 50837 - DNA, 4341 bp, Artificial Sequence
  derived and/or modified sequence
atggacaccaccgccgccgccgccctgcccgccttcgtggccctgctgctgctgagcccctggcccctgctgggcagcgcccagggccagttcagcgccggcggctgcaccttcgacgacggccccggcgcctgcgactaccaccaggacctgtacgacgacttcgagtgggtgcacgtgagcgcccaggagccccactacctgccccccgagatgccccagggcagctacatgatcgtggacagcagcgaccacgaccccggcgagaaggccagactgcagctgcccaccatgaaggagaacgacacccactgcatcgacttcagctacctgctgtacagccagaagggcctgaaccccggcaccctgaacatcctggtgagagtgaacaagggccccctggccaaccccatctggaacgtgaccggcttcaccggcagagactggctgagagccgagctggccgtgagcaccttctggcccaacgagtaccaggtgatcttcgaggccgaggtgagcggcggcagaagcggctacatcgccatcgacgacatccaggtgctgagctacccctgcgacaagagcccccacttcctgagactgggcgacgtggaggtgaacgccggccagaacgccaccttccagtgcatcgccaccggcagagacgccgtgcacaacaagctgtggctgcagagaagaaacggcgaggacatccccgtggcccagaccaagaacatcaaccacagaagattcgccgccagcttcagactgcaggaggtgaccaagaccgaccaggacctgtacagatgcgtgacccagagcgagagaggcagcggcgtgagcaacttcgcccagctgatcgtgagagagccccccagacccatcgcccccccccagctgctgggcgtgggccccacctacctgctgatccagctgaacgccaacagcatcatcggcgacggccccatcatcctgaaggaggtggagtacagaatgaccagcggcagctggaccgagacccacgccgtgaacgcccccacctacaagctgtggcacctggaccccgacaccgagtacgagatcagagtgctgctgaccagacccggcgagggcggcaccggcctgcccggcccccccctgatcaccagaaccaagtgcgccgagcccatgagaacccccaagaccctgaagatcgccgagatccaggccagaagaatcgccgtggactgggagagcctgggctacaacatcaccagatgccacaccttcaacgtgaccatctgctaccactacttcagaggccacaacgagagcaaggccgactgcctggacatggaccccaaggccccccagcacgtggtgaaccacctgcccccctacaccaacgtgagcctgaagatgatcctgaccaaccccgagggcagaaaggagagcgaggagaccatcatccagaccgacgaggacgtgcccggccccgtgcccgtgaagagcctgcagggcaccagcttcgagaacaagatcttcctgaactggaaggagcccctggaccccaacggcatcatcacccagtacgagatcagctacagcagcatcagaagcttcgaccccgccgtgcccgtggccggccccccccagaccgtgagcaacctgtggaacagcacccaccacgtgttcatgcacctgcaccccggcaccacctaccagttcttcatcagagccagcaccgtgaagggcttcggccccgccaccgccatcaacgtgaccaccaacatcagcgcccccaccctgcccgactacgagggcgtggacgccagcctgaacgagaccgccaccaccatcaccgtgctgctgagacccgcccaggccaagggcgcccccatcagcgcctaccagatcgtggtggaggagctgcacccccacagaaccaagagagaggccggcgccatggagtgctaccaggtgcccgtgacctaccagaacgccatgagcggcggcgccccctactacttcgccgccgagctgccccccggcaacctgcccgagcccgcccccttcaccgtgggcgacaacagaacctaccagggcttctggaacccccccctggcccccagaaagggctacaacatctacttccaggccatgagcagcgtggagaaggagaccaagacccagtgcgtgagaatcgccaccaaggccgccgccaccgaggagcccgaggtgatccccgaccccgccaagcagaccgacagagtggtgaagatcgccggcatcagcgccggcatcctggtgttcatcctgctgctgctggtggtgatcctgatcgtgaagaagagcaagctggccaagaagagaaaggacgccatgggcaacaccagacaggagatgacccacatggtgaacgccatggacagaagctacgccgaccagagcaccctgcacgccgaggaccccctgagcatcaccttcatggaccagcacaacttcagccccagatacgagaaccacagcgccaccgccgagagcagcagactgctggacgtgcccagatacctgtgcgagggcaccgagagcccctaccagaccggccagctgcaccccgccatcagagtggccgacctgctgcagcacatcaacctgatgaagaccagcgacagctacggcttcaaggaggagtacgagagcttcttcgagggccagagcgccagctgggacgtggccaagaaggaccagaacagagccaagaacagatacggcaacatcatcgcctacgaccacagcagagtgatcctgcagcccgtggaggacgaccccagcagcgactacatcaacgccaactacatcgacatctggctgtacagagacggctaccagagacccagccactacatcgccacccagggccccgtgcacgagaccgtgtacgacttctggagaatgatctggcaggagcagagcgcctgcatcgtgatggtgaccaacctggtggaggtgggcagagtgaagtgctacaagtactggcccgacgacaccgaggtgtacggcgacttcaaggtgacctgcgtggagatggagcccctggccgagtacgtggtgagaaccttcaccctggagagaagaggctacaacgagatcagagaggtgaagcagttccacttcaccggctggcccgaccacggcgtgccctaccacgccaccggcctgctgagcttcatcagaagagtgaagctgagcaacccccccagcgccggccccatcgtggtgcactgcagcgccggcgccggcagaaccggctgctacatcgtgatcgacatcatgctggacatggccgagagagagggcgtggtggacatctacaactgcgtgaaggccctgagaagcagaagaatcaacatggtgcagaccgaggagcagtacatcttcatccacgacgccatcctggaggcctgcctgtgcggcgagaccgccatccccgtgtgcgagttcaaggccgcctacttcgacatgatcagaatcgacagccagaccaacagcagccacctgaaggacgagttccagaccctgaacagcgtgacccccagactgcaggccgaggactgcagcatcgcctgcctgcccagaaaccacgacaagaacagattcatggacatgctgccccccgacagatgcctgcccttcctgatcaccatcgacggcgagagcagcaactacatcaacgccgccctgatggacagctacagacagcccgccgccttcatcgtgacccagtaccccctgcccaacaccgtgaaggacttctggagactggtgtacgactacggctgcaccagcatcgtgatgctgaacgaggtggacctgagccagggctgcccccagtactggcccgaggagggcatgctgagatacggccccatccaggtggagtgcatgagctgcagcatggactgcgacgtgatcaacagaatcttcagaatctgcaacctgaccagaccccaggagggctacctgatggtgcagcagttccagtacctgggctgggccagccacagagaggtgcccggcagcaagagaagcttcctgaagctgatcctgcaggtggagaagtggcaggaggagtgcgaggagggcgagggcagaaccatcatccactgcctgaacggcggcggcagaagcggcatgttctgcgccatcggcatcgtggtggagatggtgaagagacagaacgtggtggacgtgttccacgccgtgaagaccctgagaaacagcaagcccaacatggtggaggcccccgagcagtacagattctgctacgacgtggccctggagtacctggagagcagctag

SEQ ID NO: 50838 - protein, 139 aa, Artificial Sequence
  derived and/or modified sequence
MAAAAELSLLEKSLGLSKGNKYSAQGERQIPVLQTNNGPSLTGLTTIAAHLVKQANKEYLLGSTAEEKAIVQQWLEYRVTQVDGHSSKNDIHTLLKDLNSYLEDKVYLTGYNFTLADILLYYGLHRFIIRKLRHTEVGN

SEQ ID NO: 50839 - DNA, 420 bp, Artificial Sequence
  derived and/or modified sequence
atggctgcagccgccgaattgtctttactcgagaaaagtctgggcctaagtaaggggaacaaatattctgcccagggagagagacagatccctgtgctacagacaaacaacggaccgagtctgactggcctcaccaccatcgcggcacatctcgtcaagcaagccaacaaggagtacctgttaggatctactgccgaagagaaggctatagtccagcagtggctggaatatcgagtaactcaggtcgacggacatagctcaaagaatgatatccataccctgctgaaggacctgaattcctacctcgaggacaaggtatacctcactggttataactttactctggcagatattctactttattacggtctgcacaggtttatcattcgcaagctgcgccacacagaggtgggtaattag

SEQ ID NO: 50840 - DNA, 420 bp, Artificial Sequence
  derived and/or modified sequence
atggctgctgctgctgagctgagcctgctggagaagagcctgggcctgagcaagggcaacaagtacagcgcccagggcgagcggcagatccctgtgctgcagaccaacaacggccccagcctgaccggcctgaccaccatcgccgcccacctggtgaagcaggccaacaaggagtacctgctgggcagcacagctgaggagaaggccatcgtgcagcagtggctggagtacagagtgacccaggtggatggccacagcagcaagaatgacatccacaccctgctgaaggacctgaacagctacctggaggacaaggtgtacctgaccggctacaacttcaccctggccgacatcctgctgtactacggcctgcaccgcttcatcatcaggaagctgcggcacacagaggtgggcaactag

SEQ ID NO: 50841 - DNA, 420 bp, Artificial Sequence
  derived and/or modified sequence
atggccgccgccgccgagctgagcctgctggagaagagcctgggcctgagcaaaggtaataaatattctgcccagggggaaaggcagatccctgtgctgcaaaccaacaacggaccctctttgaccggcttaactaccatcgccgcacacttagtgaaacaagctaacaaggaatacttactggggtcgactgccgaggaaaaggctatcgttcagcagtggctcgaataccgcgtgacgcaggtggacggtcattcctcaaagaacgacatccatacgctgctgaaggatctgaatagctacttggaagacaaggtttacttgacgggttataactttactttggccgatattctgctgtattacggacttcacaggtttattataagaaagcttcggcataccgaggtgggaaactag

SEQ ID NO: 50842 - DNA, 420 bp, Artificial Sequence
  derived and/or modified sequence
atggcagcggcagctgagcttagcctgcttgaaaagtctcttggcctctctaagggaaacaagtactcagcacaaggcgaaaggcagattccggtgttgcaaaccaacaacggaccaagtcttacaggcctgactactatagctgctcatcttgtcaagcaggccaacaaagagtatctattggggagtacagctgaggagaaagccatcgttcagcagtggcttgagtatagagtgactcaagttgatgggcactcaagcaaaaacgacatccacacgctgcttaaggacctgaatagctatctagaggataaagtctatctgaccgggtacaattttacattggccgatatcctgctctactacggactgcaccgtttcatcatcagaaaattaaggcacacggaggtcggcaactag

SEQ ID NO: 50843 - DNA, 420 bp, Artificial Sequence
  derived and/or modified sequence
atggccgccgccgccgagctgagcctgctggagaagagcctgggcctgagcaagggcaacaagtacagcgcccagggcgagagacagatccccgtgctgcagaccaacaacggccccagcctgaccggcctgaccaccatcgccgcccacctggtgaagcaggccaacaaggagtacctgctgggcagcaccgccgaggagaaggccatcgtgcagcagtggctggagtacagagtgacccaggtggacggccacagcagcaagaacgacatccacaccctgctgaaggacctgaacagctacctggaggacaaggtgtacctgaccggctacaacttcaccctggccgacatcctgctgtactacggcctgcacagattcatcatcagaaagctgagacacaccgaggtgggcaactag

SEQ ID NO: 50844 - DNA, 562 bp, Artificial Sequence
  derived and/or modified sequence
gcgtctgccaggagctacggccggaagatggcggcggccgcagagttgtcgctactggagaagtccctgggactgagtaaggggaataaatacagtgctcagggcgagcgacagattccagttcttcagacaaacaatggtccaagtctaacaggattgactactatagcagctcatctagtcaagcaagccaacaaagaatatttgctggggagtactgcagaagaaaaagcaatcgttcagcagtggttagaatacagggtcactcaagtagatgggcactccagtaaaaatgacatccacacactgttgaaggatcttaattcatatcttgaagataaagtctaccttacagggtataactttacattagcagatatactattgtactatggacttcatcgctttataataaggaagctgaggcacacagaggtagggaactaacccaacatcatacaaggaactgagatcaaggaactgagattcaaacacaaatgtctggctcaaacttacctgtaaactactctacatggagtgccataaaattctgcttaattaa

SEQ ID NO: 50845 - protein, 102 aa, Artificial Sequence
  derived and/or modified sequence
MAGDLSAGFFMEELNTYRQKQGVVLKYQELPNSGPPHDRRFTFQVIIDGREFPEGEGRSKKEAKNAAAKLAVEILNKEKKAVSPLLLTTTNSSEGLSMGNYI

SEQ ID NO: 50846 - protein, 116 aa, Artificial Sequence
  derived and/or modified sequence
MAGDLSAGFFMEELNTYRQKQGVVLKYQELPNSGPPHDRRFTFQVIIDGREFPEGEGRSKKEAKNAAAKLAVEILNKEKKAVSPLLLTTTNSSEGLSMGNYIGLINRIAQKKRLTV

SEQ ID NO: 50847 - protein, 510 aa, Artificial Sequence
  derived and/or modified sequence
MAGDLSAGFFMEELNTYRQKQGVVLKYQELPNSGPPHDRRFTFQVIIDGREFPEGEGRSKKEAKNAAAKLAVEILNKEKKAVSPLLLTTTNSSEGLSMGNYIGLINRIAQKKRLTVNYEQCASGVHGPEGFHYKCKMGQKEYSIGTGSTKQEAKQLAAKLAYLQILSEETSVKSDYLSSGSFATTCESQSNSLVTSTLASESSSEGDFSADTSEINSNSDSLNSSSLLMNGLRNNQRKAKRSLAPRFDLPDMKETKYTVDKRKAEREVKALAKLDHVNIVHYNGCWDGFDYDPETSDDSLESSDYDPENSKNSSRSKTKCLFIQMEFCDKGTLEQWIEKRRGEKLDKVLALELFEQITKGVDYIHSKKLIHRDLKPSNIFLVDTKQVKIGDFGLVTSLKNDGKRTRSKGTLRYMSPEQISSQDYGKEVDLYALGLILAELLHVCDTAFETSKFFTDLRDGIISDIFDKKEKTLLQKLLSKKPEDRPNTSEILRTLTVWKKSPEKNERHTC

SEQ ID NO: 50848 - DNA, 309 bp, Artificial Sequence
  derived and/or modified sequence
atggccggcgacctgagcgccggcttcttcatggaggagctgaacacctacagacagaagcagggcgtggtgctgaagtaccaggagctgcccaacagcggccccccccacgacagaagattcaccttccaggtgatcatcgacggcagagagttccccgagggcgagggcagaagcaagaaggaggccaagaacgccgccgccaagctggccgtggagatcctgaacaaggagaagaaggccgtgagccccctgctgctgaccaccaccaacagcagcgagggcctgagcatgggcaactacatctag

SEQ ID NO: 50849 - DNA, 351 bp, Artificial Sequence
  derived and/or modified sequence
atggccggcgacctgagcgccggcttcttcatggaggagctgaacacctacagacagaagcagggcgtggtgctgaagtaccaggagctgcccaacagcggccccccccacgacagaagattcaccttccaggtgatcatcgacggcagagagttccccgagggcgagggcagaagcaagaaggaggccaagaacgccgccgccaagctggccgtggagatcctgaacaaggagaagaaggccgtgagccccctgctgctgaccaccaccaacagcagcgagggcctgagcatgggcaactacatcggcctgatcaacagaatcgcccagaagaagagactgaccgtgtag

SEQ ID NO: 50850 - DNA, 1533 bp, Artificial Sequence
  derived and/or modified sequence
atggccggcgacctgagcgccggcttcttcatggaggagctgaacacctacagacagaagcagggcgtggtgctgaagtaccaggagctgcccaacagcggccccccccacgacagaagattcaccttccaggtgatcatcgacggcagagagttccccgagggcgagggcagaagcaagaaggaggccaagaacgccgccgccaagctggccgtggagatcctgaacaaggagaagaaggccgtgagccccctgctgctgaccaccaccaacagcagcgagggcctgagcatgggcaactacatcggcctgatcaacagaatcgcccagaagaagagactgaccgtgaactacgagcagtgcgccagcggcgtgcacggccccgagggcttccactacaagtgcaagatgggccagaaggagtacagcatcggcaccggcagcaccaagcaggaggccaagcagctggccgccaagctggcctacctgcagatcctgagcgaggagaccagcgtgaagagcgactacctgagcagcggcagcttcgccaccacctgcgagagccagagcaacagcctggtgaccagcaccctggccagcgagagcagcagcgagggcgacttcagcgccgacaccagcgagatcaacagcaacagcgacagcctgaacagcagcagcctgctgatgaacggcctgagaaacaaccagagaaaggccaagagaagcctggcccccagattcgacctgcccgacatgaaggagaccaagtacaccgtggacaagagaaaggccgagagagaggtgaaggccctggccaagctggaccacgtgaacatcgtgcactacaacggctgctgggacggcttcgactacgaccccgagaccagcgacgacagcctggagagcagcgactacgaccccgagaacagcaagaacagcagcagaagcaagaccaagtgcctgttcatccagatggagttctgcgacaagggcaccctggagcagtggatcgagaagagaagaggcgagaagctggacaaggtgctggccctggagctgttcgagcagatcaccaagggcgtggactacatccacagcaagaagctgatccacagagacctgaagcccagcaacatcttcctggtggacaccaagcaggtgaagatcggcgacttcggcctggtgaccagcctgaagaacgacggcaagagaaccagaagcaagggcaccctgagatacatgagccccgagcagatcagcagccaggactacggcaaggaggtggacctgtacgccctgggcctgatcctggccgagctgctgcacgtgtgcgacaccgccttcgagaccagcaagttcttcaccgacctgagagacggcatcatcagcgacatcttcgacaagaaggagaagaccctgctgcagaagctgctgagcaagaagcccgaggacagacccaacaccagcgagatcctgagaaccctgaccgtgtggaagaagagccccgagaagaacgagagacacacctgctag

SEQ ID NO: 50851 - DNA, 309 bp, Artificial Sequence
  derived and/or modified sequence
atggctggcgacctttccgccggattcttcatggaggaacttaatacttaccggcaaaaacagggcgtggttttgaaatatcaggagctgcctaactccgggccaccccacgaccgacgcttcacttttcaagtgatcattgacgggcgagagtttccagagggcgaggggcgctccaagaaggaagcaaagaacgccgccgccaaactggccgtagaaatccttaataaagagaaaaaagctgtttctcctctgctgctaaccactacgaatagctcagagggcttgagcatgggcaattatatttag

SEQ ID NO: 50852 - DNA, 351 bp, Artificial Sequence
  derived and/or modified sequence
atggcaggcgacttgagtgcaggattttttatggaggagctcaatacctatcgtcaaaagcagggcgtggtcctcaagtaccaggagttacctaattcaggtcccccccatgacagacgtttcaccttccaggtcattatcgatgggcgcgaatttcccgaaggcgagggtagatcaaaaaaggaggctaaaaatgcagcagccaagttggctgtagaaatactcaataaggaaaagaaggccgtttctcccttactgttgacaactaccaactctagcgagggcctgtccatggggaattacattgggcttattaacagaatcgctcaaaaaaagcgtttgaccgtttag

SEQ ID NO: 50853 - DNA, 1533 bp, Artificial Sequence
  derived and/or modified sequence
atggcgggtgatcttagcgccgggtttttcatggaagagttaaacacgtacagacagaagcagggcgtcgttctgaagtatcaggagttgccaaatagcggaccaccacacgatcggaggttcacctttcaggtcattatcgatggccgcgaatttccggaaggggaggggaggtcaaaaaaagaggctaagaacgcagccgccaagctggcagtggagattctaaacaaggaaaagaaggctgtgtccccgctgctcctgacgacaacaaatagttccgagggcttgagcatgggcaattatattgggctgatcaaccgcatagcccaaaaaaagagactgacagtgaactacgaacagtgtgctagtggggtacatggcccagaagggtttcactacaaatgcaagatgggtcagaaggagtattccattggcacaggttcaaccaaacaggaggctaaacagctcgcagctaaactggcctatctgcaaatcctgtccgaagaaacctctgtgaaaagtgactatctgtcgtcaggcagcttcgctacaacttgtgaatctcagtctaattctctggtgacgtctactctggcttcagagagtagcagcgaaggggacttttccgctgacacttcggaaattaatagcaattccgatagccttaactcatccagcctgttgatgaatggcctaaggaataaccagcgaaaagctaagcggagcctggctcccagatttgatctgccagacatgaaggagactaaatatactgtggataaaaggaaagccgagcgcgaagtaaaagctctcgcgaagctggaccacgtcaacattgtacactacaacgggtgttgggacggattcgactacgaccccgaaacaagcgatgacagtctggaatcctcagactatgaccccgagaactccaagaacagcagcaggtccaagacaaaatgtctgttcatacagatggagttctgtgataaaggaacgctggaacaatggatcgagaagcgccgcggcgaaaaactggataaggtcctggcactggagttgttcgagcagatcactaagggggttgactatattcatagcaagaaactgatccacagggacctgaagccttccaacatctttctcgtcgacactaagcaggttaaaatcggagatttcggtctcgttacaagtctgaaaaacgatggtaaaagaacaaggtctaaaggtactctgcgctacatgtcaccagaacagatatcttctcaggactacggtaaggaggttgatctgtacgcactggggttaatcctcgcagagctgctgcatgtgtgtgacaccgccttcgagactagcaagttttttactgatctccgagacggaatcataagcgatatcttcgataagaaagagaagacactgctgcagaaattactgagtaagaaaccagaagacaggcccaacacttctgagatcctgagaactctgaccgtgtggaagaagagccccgagaagaacgaaaggcacacttgttag

SEQ ID NO: 50854 - DNA, 564 bp, Artificial Sequence
  derived and/or modified sequence
aatttaccccaatcccgtagcagacgagggcttgtgcgagagggggccgggcggctgcagggaaggcggagtccaaggggaaaacgaaactgagaaccagctctcccgaagccgcgggtctccggccggcggcggcggcggcggcggcggcggcgcaggtttgcttctctggcggtcttcagaatcaacatccacacttccgtgattatctgcgtgcattttggacaaagcttccaaccaggatacgggaagaagaaatggctggtgatctttcagcaggtttcttcatggaggaacttaatacataccgtcagaagcagggagtagtacttaaatatcaagaactgcctaattcaggacctccacatgataggaggtttacatttcaagttataatagatggaagagaatttccagaaggtgaaggtagatcaaagaaggaagcaaaaaatgccgcagccaaattagctgttgagatacttaataaggaaaagaaggcagttagtcctttattattgacaacaacgaattcttcagaaggattatccatggggaattacatag

SEQ ID NO: 50855 - DNA, 548 bp, Artificial Sequence
  derived and/or modified sequence
gtgcgagagggggccgggcggctgcagggaaggcggagtccaaggggaaaacgaaactgagaaccagctctcccgaagccgcgggtctccggccggcggcggcggcggcggcggcggcggcgcagaatcaacatccacacttccgtgattatctgcgtgcattttggacaaagcttccaaccaggatacgggaagaagaaatggctggtgatctttcagcaggtttcttcatggaggaacttaatacataccgtcagaagcagggagtagtacttaaatatcaagaactgcctaattcaggacctccacatgataggaggtttacatttcaagttataatagatggaagagaatttccagaaggtgaaggtagatcaaagaaggaagcaaaaaatgccgcagccaaattagctgttgagatacttaataaggaaaagaaggcagttagtcctttattattgacaacaacgaattcttcagaaggattatccatggggaattacataggccttatcaatagaattgcccagaagaaaagactaactgta

SEQ ID NO: 50856 - DNA, 1533 bp, Artificial Sequence
  derived and/or modified sequence
atggctggtgatctttcagcaggtttcttcatggaggaacttaatacataccgtcagaagcagggagtagtacttaaatatcaagaactgcctaattcaggacctccacatgataggaggtttacatttcaagttataatagatggaagagaatttccagaaggtgaaggtagatcaaagaaggaagcaaaaaatgccgcagccaaattagctgttgagatacttaataaggaaaagaaggcagttagtcctttattattgacaacaacgaattcttcagaaggattatccatggggaattacataggccttatcaatagaattgcccagaagaaaagactaactgtaaattatgaacagtgtgcatcgggggtgcatgggccagaaggatttcattataaatgcaaaatgggacagaaagaatatagtattggtacaggttctactaaacaggaagcaaaacaattggccgctaaacttgcatatcttcagatattatcagaagaaacctcagtgaaatctgactacctgtcctctggttcttttgctactacgtgtgagtcccaaagcaactctttagtgaccagcacactcgcttctgaatcatcatctgaaggtgacttctcagcagatacatcagagataaattctaacagtgacagtttaaacagttcttcgttgcttatgaatggtctcagaaataatcaaaggaaggcaaaaagatctttggcacccagatttgaccttcctgacatgaaagaaacaaagtatactgtggacaagaggaaggcggagcgtgaagtaaaagcattggcaaaacttgatcatgtaaatattgttcactacaatggctgttgggatggatttgattatgatcctgagaccagtgatgattctcttgagagcagtgattatgatcctgagaacagcaaaaatagttcaaggtcaaagactaagtgccttttcatccaaatggaattctgtgataaagggaccttggaacaatggattgaaaaaagaagaggcgagaaactagacaaagttttggctttggaactctttgaacaaataacaaaaggggtggattatatacattcaaaaaaattaattcatagagatcttaagccaagtaatatattcttagtagatacaaaacaagtaaagattggagactttggacttgtaacatctctgaaaaatgatggaaagcgaacaaggagtaagggaactttgcgatacatgagcccagaacagatttcttcgcaagactatggaaaggaagtggacctctacgctttggggctaattcttgctgaacttcttcatgtatgtgacactgcttttgaaacatcaaagtttttcacagacctacgggatggcatcatctcagatatatttgataaaaaagaaaaaactcttctacagaaattactctcaaagaaacctgaggatcgacctaacacatctgaaatactaaggaccttgactgtgtggaagaaaagcccagagaaaaatgaacgacacacatgttag

SEQ ID NO: 50857 - DNA, 309 bp, Artificial Sequence
  derived and/or modified sequence
atggccggggacctgtctgctggcttcttcatggaggagctgaacacctaccggcagaagcagggcgtggtgctgaagtaccaggagctgcccaacagcggcccccctcatgaccggcgcttcaccttccaggtgatcattgatggccgggagttccctgagggggagggccgcagcaagaaggaggccaagaatgctgctgccaagctggccgtggagatcctgaacaaggagaagaaggctgtgagccccctgctgctgaccaccaccaacagcagcgagggcctgtccatgggcaactacatctag

SEQ ID NO: 50858 - DNA, 351 bp, Artificial Sequence
  derived and/or modified sequence
atggccggggacctgtctgctggcttcttcatggaggagctgaacacctaccggcagaagcagggcgtggtgctgaagtaccaggagctgcccaacagcggcccccctcatgaccggcgcttcaccttccaggtgatcattgatggccgggagttccctgagggggagggccgcagcaagaaggaggccaagaatgctgctgccaagctggccgtggagatcctgaacaaggagaagaaggctgtgagccccctgctgctgaccaccaccaacagcagcgagggcctgtccatgggcaactacatcggcctcatcaaccgcatcgcccagaagaagaggctgactgtgtag

SEQ ID NO: 50859 - DNA, 1533 bp, Artificial Sequence
  derived and/or modified sequence
atggccggggacctgtctgctggcttcttcatggaggagctgaacacctaccggcagaagcagggcgtggtgctgaagtaccaggagctgcccaacagcggcccccctcatgaccggcgcttcaccttccaggtgatcattgatggccgggagttccctgagggggagggccgcagcaagaaggaggccaagaatgctgctgccaagctggccgtggagatcctgaacaaggagaagaaggctgtgagccccctgctgctgaccaccaccaacagcagcgagggcctgtccatgggcaactacatcggcctcatcaaccgcatcgcccagaagaagaggctgactgtgaactatgagcagtgtgccagcggcgtgcacggccctgagggcttccactacaagtgcaagatgggccagaaggagtacagcatcggcaccggcagcaccaagcaggaggccaagcagctggccgccaagctggcctacctgcagatcctgtctgaggagacctctgtgaagagtgactacctgagcagcggcagctttgccaccacctgtgagagccagagcaacagcctggtgaccagcaccctggccagcgagagcagcagcgagggggacttctctgctgacaccagcgagatcaacagcaacagcgacagcctgaacagcagcagcctgctgatgaatggcctgaggaacaaccagaggaaggccaagaggagcctggcccccaggtttgacctgcctgacatgaaggagaccaagtacacagtggacaagaggaaggccgagcgggaggtgaaggccctggccaagctggaccacgtgaacatcgtgcactacaacggctgctgggatggctttgattatgaccctgagaccagtgatgacagcctggagagcagtgactatgaccctgagaacagcaagaacagcagccgcagcaagaccaagtgcctcttcatccagatggagttctgtgacaagggcaccctggagcagtggattgagaagagaagaggagagaagctggacaaggtgctggccctggagctgtttgagcagatcaccaagggcgtggactacatccacagcaagaagctgatccaccgggacctgaagcccagcaacatcttcctggtggacaccaagcaggtgaagattggagactttggcctggtgaccagcctgaagaatgatggcaagaggaccaggagcaagggcaccctgcgctacatgagccctgagcagatcagcagccaggactatggcaaggaggtggacctgtatgccctgggcctcatcctggccgagctgctgcacgtgtgtgacacagcctttgagaccagcaagttcttcacagacctgagagatggcatcatcagtgacatctttgacaagaaggagaagaccctgctgcagaagctgctgagcaagaagccagaagatcggcccaacaccagcgagatcctgcggaccctgactgtgtggaagaagagccctgagaagaatgaaagacacacctgctag

SEQ ID NO: 50860 - DNA, 309 bp, Artificial Sequence
  derived and/or modified sequence
atggccggcgacctgagcgccggcttcttcatggaggagctgaacacttaccggcagaaacagggagtcgtgctgaaatatcaggagctgcccaactctggccccccccacgaccgacggttcactttccaggtcatcattgacggcagggaatttccagagggggaaggtaggagcaagaaggaggctaagaacgccgcagccaaactggcagtcgagattctcaacaaggaaaagaaggccgtgtcccctcttttgttgaccaccaccaactcctcagagggactcagcatgggaaactacatctag

SEQ ID NO: 50861 - DNA, 351 bp, Artificial Sequence
  derived and/or modified sequence
atggccggcgacctgagcgccggcttcttcatggaggagctgaacacataccggcaaaaacagggagtggtgcttaaataccaggaactgcccaattctggcccaccacatgaccgacgttttactttccaagtgattatcgatggccgcgagttcccagagggagaggggcggtctaaaaaagaagcaaaaaatgctgcggcaaagctggctgtcgagattttgaataaggagaagaaagccgtcagccccctcctcctgacgaccaccaatagttctgagggactgagcatgggaaactacatcggcctgattaaccggattgcccagaagaagagactgactgtatag

SEQ ID NO: 50862 - DNA, 1533 bp, Artificial Sequence
  derived and/or modified sequence
atggccggcgacctgagcgccggcttcttcatggaggagctgaacacctaccggcaaaagcagggggtggttttgaagtatcaagagctgcccaactctggtccaccacatgaccggcgcttcaccttccaggtcataatcgatggtagagaattcccagagggcgaagggagatcgaagaaggaggccaaaaacgctgccgccaaacttgccgtagaaattttgaacaaagaaaagaaggcagtgtctccgctcctgttaaccacaactaacagcagcgaaggtttgagtatgggaaactatatcggactgattaaccgaattgcacagaagaaaaggctcacagttaactacgaacagtgtgcgagcggggtgcacggtcccgaggggtttcactacaagtgcaagatgggacagaaggaatatagtatcgggacggggagcaccaaacaagaagcaaagcagctagcagctaaactggcctatctgcagattcttagtgaggaaacctccgttaaatcagactatctctcatccggctctttcgcgacaacgtgtgagtctcagtctaactccctcgtgacatccacccttgcctctgagagcagctctgagggagattttagtgccgacacttccgaaattaacagtaattccgattcacttaattcatctagtctgctgatgaacggacttcgaaataaccaaagaaaagccaaaaggagtttagccccccgttttgatctgcctgacatgaaggaaaccaagtatacagtcgataagcgcaaagctgaaagggaggtaaaagcgttagcgaaactcgaccatgtgaacatcgtgcattacaacggatgctgggacggcttcgactatgacccagaaacctcggatgactcacttgaatcatcagattatgatcctgagaatagcaaaaacagctcccgatctaaaaccaagtgccttttcatccagatggaattttgcgacaaggggactcttgagcagtggattgagaagcggcgcggcgagaaactggataaagtactcgcccttgaactctttgaacagattacaaaaggagttgactacattcacagcaagaaactgattcatcgtgatctcaaacccagtaatatctttctagtagacaccaagcaagtcaaaatcggcgattttggcttggtgacctccctgaaaaatgacggcaagcggactagaagcaagggcaccctgcggtacatgtcccccgagcagatctcatcacaggattacggaaaggaagtcgatctgtatgctctggggcttatcctggccgagttgctgcacgtctgcgacaccgcctttgagacctccaagttttttacagaccttagagatgggatcatctcagatattttcgacaagaaggagaagacacttctacagaagttgctctcaaagaaacctgaagaccgccctaacacgagcgagattttgcggacacttaccgtgtggaagaagagccctgaaaagaatgagcgtcacacctgctag

SEQ ID NO: 50863 - DNA, 309 bp, Artificial Sequence
  derived and/or modified sequence
atggctggggacctcagtgccggatttttcatggaagagttgaatacatacagacagaaacagggagtggtgcttaagtatcaggagttgccgaatagtggccctcctcatgatagacggtttaccttccaggttataattgatgggcgtgaatttccagagggagaggggaggtcaaagaaagaagccaagaacgcagccgcaaaactcgctgtggagatcttgaataaggagaagaaagctgtgtcacccctcctcctcactacaaccaatagcagtgagggccttagcatgggcaactatatctag

SEQ ID NO: 50864 - DNA, 351 bp, Artificial Sequence
  derived and/or modified sequence
atggccggagatctatctgctggcttctttatggaggagctgaacacctatcgacaaaagcagggcgttgtactgaaataccaggaactgccaaattcaggcccaccccatgaccgccgatttacctttcaggtcatcatcgacggcagggagttccctgaaggggaggggcgatcgaagaaagaagctaaaaacgcagctgccaagctggccgtggaaatcctgaataaagaaaagaaggcagtctcgccattgctgctcaccaccaccaactccagtgagggactctcaatggggaattacataggcctcatcaacagaatagcacagaagaagagattaactgtgtag

SEQ ID NO: 50865 - DNA, 1533 bp, Artificial Sequence
  derived and/or modified sequence
atggccggagatctatccgctggcttcttcatggaggagttgaacacttacagacagaaacaaggggtggtcctgaagtaccaagagctccccaactccggcccaccccatgacaggcgattcacctttcaggtgatcatcgatggcagggaatttccggaaggtgagggtcggtccaaaaaggaggccaagaacgcggcagctaaacttgctgtggagatcctgaacaaggagaaaaaagctgtctcccccctcctacttaccacaaccaattcttccgaaggcctgtccatgggaaactatatagggcttatcaaccggatcgcacagaaaaagcgactaaccgtgaactatgaacagtgtgccagtggagtccatgggccagaaggcttccactacaaatgcaaaatgggacagaaggagtactccataggtactggatcaaccaagcaagaggctaagcagttagccgctaagttggcgtaccttcagatactgtcagaagagacctccgtcaagtctgattatctgtcctctggtagttttgccaccacctgtgaatcacagagtaattctctggtgacttctaccctagcctctgagtcatcctcagaaggggactttagcgctgacacttcagagataaatagtaactcagacagcttaaatagtagctcactgcttatgaatggtctaaggaataaccaacgaaaggctaagcggtcattggcaccaaggttcgacctgccagacatgaaggaaaccaaatacaccgtagacaaaagaaaggctgagagggaagttaaagctctggcaaaactggaccacgtcaatatcgtgcactataacggttgttgggacgggtttgattatgaccccgaaacctctgacgattcgctcgagtctagcgattacgaccccgagaactccaaaaatagtagccgctcaaaaactaagtgtctgttcatccagatggagttctgtgataaaggtacactggaacagtggatcgaaaaaaggcgcggagagaaattggacaaggtgctcgcccttgagttatttgaacaaattactaagggggtagactacatacactccaaaaaacttatccacagggatctgaagccgtcaaatatcttcctcgtggatacaaagcaggtgaaaatcggggattttggattggtaacaagtcttaagaacgatggaaagaggacacgctctaaggggaccctgagatacatgagccccgagcagatctcatcccaggactatggcaaggaagtcgacttgtacgccctgggcctgatcctcgctgagctgctgcacgtgtgtgacaccgcctttgaaacatccaaattcttcaccgatcttcgcgacggtatcatttctgatatattcgataagaaggaaaagacccttctccaaaaactcctgagcaaaaagcctgaggaccgacccaataccagtgaaatcttaagaacacttactgtgtggaagaaatctcccgagaagaacgaacgccacacctgttag

SEQ ID NO: 50866 - protein, 1547 aa, Artificial Sequence
  derived and/or modified sequence
MGTALLQRGGCFLLCLSLLLLGCWAELGSGLEFPGAEGQWTRFPKWNACCESEMSFQLKTRSARGLVLYFDDEGFCDFLELILTRGGRLQLSFSIFCAEPATLLADTPVNDGAWHSVRIRRQFRNTTLFIDQVEAKWVEVKSKRRDMTVFSGLFVGGLPPELRAAALKLTLASVREREPFKGWIRDVRVNSSQVLPVDSGEVKLDDEPPNSGGGSPCEAGEEGEGGVCLNGGVCSVVDDQAVCDCSRTGFRGKDCSQEIKFGLQCVLPVLLHDNDQGKYCCINTAKPLTEKDNNVEGLAHLMMGDQGKSKGKEEYIATFKGSEYFCYDLSQNPIQSSSDEITLSFKTLQRNGLMLHTGKSADYVNLALKNGAVSLVINLGSGAFEALVEPVNGKFNDNAWHDVKVTRNLRQHSGIGHAMVNKLHCSVTISVDGILTTTGYTQEDYTMLGSDDFFYVGGSPSTADLPGSPVSNNFMGCLKEVVYKNNDVRLELSRLAKQGDPKMKIHGVVAFKCENVATLDPITFETPESFISLPKWNAKKTGSISFDFRTTEPNGLILFSHGKPRHQKDAKHPQMIKVDFFAIEMLDGHLYLLLDMGSGTIKIKALLKKVNDGEWYHVDFQRDGRSGTISVNTLRTPYTAPGESEILDLDDELYLGGLPENKAGLVFPTEVWTALLNYGYVGCIRDLFIDGQSKDIRQMAEVQSTAGVKPSCSKETAKPCLSNPCKNNGMCRDGWNRYVCDCSGTGYLGRSCEREATVLSYDGSMFMKIQLPVVMHTEAEDVSLRFRSQRAYGILMATTSRDSADTLRLELDAGRVKLTVNLDCIRINCNSSKGPETLFAGYNLNDNEWHTVRVVRRGKSLKLTVDDQQAMTGQMAGDHTRLEFHNIETGIITERRYLSSVPSNFIGHLQSLTFNGMAYIDLCKNGDIDYCELNARFGFRNIIADPVTFKTKSSYVALATLQAYTSMHLFFQFKTTSLDGLILYNSGDGNDFIVVELVKGYLHYVFDLGNGANLIKGSSNKPLNDNQWHNVMISRDTSNLHTVKIDTKITTQITAGARNLDLKSDLYIGGVAKETYKSLPKLVHAKEGFQGCLASVDLNGRLPDLISDALFCNGQIERGCEGPSTTCQEDSCSNQGVCLQQWDGFSCDCSMTSFSGPLCNDPGTTYIFSKGGGQITYKWPPNDRPSTRADRLAIGFSTVQKEAVLVRVDSSSGLGDYLELHIHQGKIGVKFNVGTDDIAIEESNAIINDGKYHVVRFTRSGGNATLQVDSWPVIERYPAGNNDNERLAIARQRIPYRLGRVVDEWLLDKGRQLTIFNSQATIIIGGKEQGQPFQGQLSGLYYNGLKVLNMAAENDANIAIVGNVRLVGEVPSSMTTESTATAMQSEMSTSIMETTTTLATSTARRGKPPTKEPISQTTDDILVASAECPSDDEDIDPCEPSSGGLANPTRAGGREPYPGSAEVIRESSSTTGMVVGIVAAAALCILILLYAMYKYRNRDEGSYHVDESRNYISNSAQSNGAVVKEKQPSSAKSSNKNKKNKDKEYYV

SEQ ID NO: 50867 - protein, 1548 aa, Artificial Sequence
  derived and/or modified sequence
MGTALLQRGGCFLLCLSLLLLGCWAELGSGLEFPGAEGQWTRFPKWNACCESEMSFQLKTRSARGLVLYFDDEGFCDFLELILTRGGRLQLSFSIFCAEPATLLADTPVNDGAWHSVRIRRQFRNTTLFIDQVEAKWVEVKSKRRDMTVFSGLFVGGLPPELRAAALKLTLASVREREPFKGWIRDVRVNSSQVLPVDSGEVKLDDEPPNSGGGSPCEAGEEGEGGVCLNGGVCSVVDDQAVCDCSRTGFRGKDCSQEIKFGLQCVLPVLLHDNDQGKYCCINTAKPLTEKKDNDFEGLAHLMMGDQAKSKRKEEYIATFKGSEYFCYDLSQNPIQSSSDEITLSFKTLQRNGLMLHTGKSADYVNLALKNGAVSLVINLGSGAFEALVEPVNGKFNDNAWHDVKVTRNLRQHSGIGHAMVNKLHCSVTISVDGILTTTGYTQEDYTMLGSDDFFYVGGSPSTADLPGSPVSNNFMGCLKEVVYKNNDVRLELSRLAKQGDPKMKIHGVVAFKCENVATLDPITFETPESFISLPKWNAKKTGSISFDFRTTEPNGLILFSHGKPRHQKDAKHPQMIKVDFFAIEMLDGHLYLLLDMGSGTIKIKALLKKVNDGEWYHVDFQRDGRSGTISVNTLRTPYTAPGESEILDLDDELYLGGLPENKAGLVFPTEVWTALLNYGYVGCIRDLFIDGQSKDIRQMAEVQSTAGVKPSCSKETAKPCLSNPCKNNGMCRDGWNRYVCDCSGTGYLGRSCEREATVLSYDGSMFMKIQLPVVMHTEAEDVSLRFRSQRAYGILMATTSRDSADTLRLELDAGRVKLTVNLDCIRINCNSSKGPETLFAGYNLNDNEWHTVRVVRRGKSLKLTVDDQQAMTGQMAGDHTRLEFHNIETGIITERRYLSSVPSNFIGHLQSLTFNGMAYIDLCKNGDIDYCELNARFGFRNIIADPVTFKTKSSYVALATLQAYTSMHLFFQFKTTSLDGLILYNSGDGNDFIVVELVKGYLHYVFDLGNGANLIKGSSNKPLNDNQWHNVMISRDTSNLHTVKIDTKITTQITAGARNLDLKSDLYIGGVAKETYKSLPKLVHAKEGFQGCLASVDLNGRLPDLISDALFCNGQIERGCEGPSTTCQEDSCSNQGVCLQQWDGFSCDCSMTSFSGPLCNDPGTTYIFSKGGGQITYKWPPNDRPSTRADRLAIGFSTVQKEAVLVRVDSSSGLGDYLELHIHQGKIGVKFNVGTDDIAIEESNAIINDGKYHVVRFTRSGGNATLQVDSWPVIERYPAGNNDNERLAIARQRIPYRLGRVVDEWLLDKGRQLTIFNSQATIIIGGKEQGQPFQGQLSGLYYNGLKVLNMAAENDANIAIVGNVRLVGEVPSSMTTESTATAMQSEMSTSIMETTTTLATSTARRGKPPTKEPISQTTDDILVASAECPSDDEDIDPCEPSSGGLANPTRAGGREPYPGSAEVIRESSSTTGMVVGIVAAAALCILILLYAMYKYRNRDEGSYHVDESRNYISNSAQSNGAVVKEKQPSSAKSSNKNKKNKDKEYYV

SEQ ID NO: 50868 - DNA, 4644 bp, Artificial Sequence
  derived and/or modified sequence
atgggcaccgccttacttcagcggggcggatgctttctcttgtgtctgagcctgctcctgttgggatgttgggcagagttgggttctggcctcgagtttccaggggctgagggacagtggacaaggttccccaaatggaatgcatgctgtgaatccgagatgtccttccagctaaagacaaggagcgcaaggggcctggtactatactttgacgacgaagggttttgtgactttctcgagttaatcctcacacgaggagggaggttgcaactgtcctttagcatattctgcgcagagcccgctaccctgctggctgacactcccgtcaacgatggcgcctggcatagtgtgcggatccgcaggcagttccgtaataccacactcttcatagatcaagtggaggccaaatgggttgaggtgaaatccaagagaagagatatgactgtgttttcaggtctttttgtcggcggtctcccccctgagctgcgggctgccgccttgaagctgaccctggcaagcgttagggaaagagagccgttcaaagggtggattcgggacgttagagtcaactcaagccaggtgctgccagttgattcaggagaggttaaactggacgatgaaccccctaactcaggtggaggctcaccctgcgaagctggagaggaaggcgagggcggggtatgtttgaacggcggcgtttgttcagtggtggacgatcaggccgtatgtgactgtagccggactggcttccgaggaaaggattgttcacaagaaatcaaatttggactccagtgtgtgctccccgttttgcttcatgataacgaccagggaaaatactgttgtatcaacacagctaagccccttactgagaaagacaacaatgtagaagggttggcacatctgatgatgggagatcaagggaaaagcaaaggaaaagaagaatacatcgctacattcaaaggcagcgaatatttttgttacgatctgtctcagaaccccatccagtcaagctctgatgagattactctctcgtttaagaccttgcaaagaaacggactgatgctgcacacgggcaaaagcgcagactatgtcaaccttgctctcaaaaatggggccgtttcgctggttatcaacctgggctcaggcgcctttgaagccttggtagagcccgtgaacggaaaattcaacgacaacgcatggcatgatgtgaaagtgactcgcaatctgcgccagcacagcggtataggccatgccatggtaaataagctgcattgttctgttacaattagcgttgacggaatcctgactaccacagggtacacacaggaggactacacgatgctcggatcagacgactttttctatgtggggggctcaccatcaaccgccgacctgccaggctcaccagtgtctaataattttatgggctgtctgaaagaggtagtctataagaacaacgatgtaagactggagctgtcaagacttgccaagcagggcgacccaaaaatgaaaattcatggagtggtggcattcaagtgtgagaacgtggcaactctggatccaatcacattcgaaacacctgaatcattcatctctctgcctaagtggaatgctaaaaaaacgggtagtattagctttgacttcaggacaactgaacctaacggcctaatcctcttttcccacggcaagccacggcatcaaaaagatgccaagcatccacagatgattaaggtcgatttctttgccatcgagatgcttgatggccacctgtatctgctgctggatatgggaagcgggactatcaagatcaaagctttgttgaagaaggtaaatgacggtgaatggtaccatgtggactttcagcgggacggtcgaagcggtacaatcagcgtaaacacgcttagaaccccctacaccgcccctggggaatctgaaattctcgatctggatgatgagctgtacctgggcggcctccccgaaaataaagctgggctggttttccctaccgaggtctggactgctctgctcaactatggctacgtcggctgcattcgggatctgttcattgatggacagagcaaagatattaggcagatggccgaggtccagtccacagctggcgtcaagcctagctgcagcaaagaaacagccaagccttgcctctccaatccctgtaagaacaacggaatgtgccgggacggctggaatcgctacgtttgtgactgctctggcaccggttatctgggaaggtcatgcgagagagaggccactgtgttatcttacgatggaagtatgttcatgaaaatccagcttccagtcgtgatgcacacagaggccgaagatgtgagtctgcggtttagatcacagcgcgcgtacggaatcctaatggcgaccacaagtcgcgactcagccgacacacttcgcctggagcttgacgccggaagagttaagctcacagtgaacttagattgcatcagaattaattgcaactcatctaaggggcctgagacgttgttcgcagggtacaatttgaacgacaacgaatggcacacggtgagagtagtgcgccggggcaagtctctgaagcttacagtcgacgatcagcaagcaatgaccgggcagatggcaggcgaccatactcgtctcgaattccataacatcgagacgggtatcatcacagagcggcggtatctgagcagcgtgcctagcaacttcattgggcacctgcagagtctgaccttcaatggcatggcgtacattgacctgtgcaagaatggagatatcgattactgcgagctcaatgccagattcggattcagaaacattatcgccgaccccgttacattcaagaccaaatcttcctatgtggcactggccacacttcaggcctacacatccatgcacttgtttttccagtttaagactactagcctggatgggctgatcctgtacaactccggcgatggaaacgactttatcgttgtagaactggtaaagggatacctccattatgtcttcgatctggggaacggagctaatctgatcaaaggcagcagtaacaagccactcaatgataatcagtggcacaatgtgatgattagcagagacacgtctaatttgcataccgtgaagatcgacacaaagatcactacccaaattactgctggtgcccggaaccttgacctgaaaagtgatttgtacatcggcggcgtcgcaaaggagacttacaaatctttaccaaaacttgtgcatgccaaagaggggttccagggctgcctggctagcgtagaccttaatgggcggctgcccgacctcatctcagacgctctgttttgcaacggccagatcgaacggggatgcgaaggaccttcaacaacttgtcaagaagactcttgcagcaatcagggggtctgccttcagcaatgggatggatttagttgcgattgctctatgacctcttttagcgggcccctgtgtaatgaccccggaactacttatatcttctccaaaggaggcggccagatcacatataaatggccccctaacgatcgaccatccacccgggctgaccgccttgcgattggcttcagtacagtgcagaaggaggcagtcttagtccgagtggattcctcaagtggcttgggggactatctggagctccacatacatcaagggaagatcggcgtgaagttcaatgttgggacagatgacatcgcaattgaggagagcaacgccatcattaacgatggcaaataccacgtggtgaggtttactaggagcggagggaatgccaccctccaggtggatagttggccagtgatcgagaggtatccagctgggaataatgacaacgaacgtctagccattgcccgccaaaggataccctatcgtcttggcagggtagttgacgagtggttgctcgataagggccgccaactaacaattttcaactcccaggccactatcataatcggcggcaaggaacaagggcagcccttccagggtcagctgtctggactgtattacaacggcctgaaagtgttgaacatggcagctgagaacgacgccaatatagccatcgtcggcaacgttaggctcgtcggagaagtcccttccagtatgaccacagaaagtacagcaaccgccatgcaaagtgagatgtcaactagtatcatggagaccaccaccactctggccacatcaactgccagacgcggaaaacccccaacaaaagagcccataagccagaccacagatgacatcttggtcgcaagtgctgagtgtccctctgacgatgaggatatcgatccatgcgagcccagctcaggaggcttagccaaccccacacgcgctggaggacgtgaaccttacccaggatctgctgaagttattagagagtcctcaagtacaactggaatggtagtgggcatcgtcgctgccgccgcgttatgtatcctgattctgttgtacgccatgtacaagtaccggaacagggacgaaggaagttaccacgttgatgagtcaaggaactacatctctaactcggcacaaagcaacggcgccgttgtgaaggagaaacagccgagttctgccaagagcagtaataagaataagaagaacaaagacaaagagtactatgtatag

SEQ ID NO: 50869 - DNA, 4647 bp, Artificial Sequence
  derived and/or modified sequence
atgggtacagcattactgcagcgcgggggttgctttttactttgtctgtctctcctgctcctcggctgttgggccgaattgggatccggtctggagttccctggggcagagggtcagtggactcggtttcccaagtggaacgcgtgttgcgaatctgagatgtccttccagctgaagactcggtccgcccggggactggttttatacttcgacgacgagggcttttgcgatttcttagagcttattttgacaagaggcggccggcttcaacttagcttcagcatcttctgcgcagagcctgcaactctgctggctgatacccccgtgaatgacggcgcctggcatagtgttcgcatccgcaggcagttccggaacaccacgctcttcattgatcaggtcgaagcgaaatgggtggaagtcaagtccaagaggagggatatgacagtgttttcagggctgttcgtcgggggactcccaccggagctgagggcagccgcactgaagctgactctggcgagcgtcagggagcgcgaaccttttaagggctggattagggacgtcagagtgaactcaagccaagttctgccagtcgattccggagaggtcaaattagacgacgaacctccaaactccggtggagggtcaccttgcgaggccggtgaggagggcgaaggcggcgtgtgcttgaatgggggcgtctgctctgtggtagatgatcaagccgtatgcgactgtagcagaacaggctttcgaggaaaggactgtagccaggaaattaaatttggacttcagtgcgttctgcccgttctgttgcatgataacgatcagggcaaatactgctgcatcaacaccgccaagcccctgacagagaaaaaggataacgactttgagggccttgctcatctgatgatgggtgatcaggcaaagagcaagaggaaagaggagtacatagctacatttaaaggctctgaatatttttgttacgatttgagccaaaatcccatacagagttctagcgacgagataacactctctttcaagaccctgcagagaaatgggctgatgttacatactggtaaaagcgctgattacgtcaatctggcactcaaaaacggggctgtcagtctagtgatcaatctgggctccggcgcattcgaggctttggtcgaacctgttaatggaaagtttaacgacaatgcctggcatgacgtcaaggtgacaagaaatctgcggcagcacagcggaattggccacgccatggtcaacaagctccattgttccgtgacaatttccgtggacggcatacttaccacaacaggatatacgcaggaagactacacgatgttggggagcgatgacttcttttacgtcggaggcagtccatctacggctgatctaccggggagtcctgtgtcaaataatttcatggggtgtcttaaagaagtggtctacaaaaataatgatgtgcgcctcgagttaagtaggctcgctaaacagggagaccctaagatgaagattcacggcgtcgtcgctttcaagtgtgaaaatgtcgctactctcgatcccattacctttgagacgcccgaatctttcatttcgctacccaagtggaacgccaaaaaaaccgggtctatttcgtttgactttcggacaaccgaacctaacgggctcatccttttttcccacgggaagcctcgacaccaaaaagatgccaagcacccccagatgatcaaggttgacttctttgccatcgagatgctggacggccatttgtaccttctgcttgatatgggaagtggaaccattaagattaaagctctcttgaaaaaggtaaacgatggcgagtggtaccacgtggacttccagagggacggaagaagcgggacaatttccgttaatacactgcggacgccttacaccgcccccggtgaatctgagatcctggacttggatgacgagctgtatctcggaggattacccgagaacaaagccggccttgttttcccgactgaagtctggaccgccctgctcaactatggctacgtcggttgcatccgggacctctttatcgatgggcagtcaaaagatataagacaaatggcagaggtgcagagcactgcaggcgtaaaacccagctgttccaaagagacagcaaaaccctgtctgtcaaatccgtgtaagaataacggtatgtgtagggacggctggaatagatatgtctgtgattgttccggcacaggctatctcggccgcagctgcgagcgggaggcgaccgtcctctcatacgacggatcaatgttcatgaaaattcaactacccgtcgtcatgcataccgaggctgaggacgtgagcctgcgctttcggagccagcgggcctatggcatcttgatggcaactacctcgcgagatagcgcggacaccttgcggctggaactggacgccggcagagtgaagctgaccgttaatttggattgtatccgaatcaactgtaactccagcaagggtcccgaaacattatttgcaggctataacttaaacgataacgaatggcacaccgttcgcgtggtgcgccggggcaagtcattgaagcttactgttgatgaccagcaagcaatgactgggcagatggctggagatcacaccagactggagttccacaacattgagactggcattataactgagcggagatatctaagctcagtgccctccaatttcataggacatttgcagtccctgacattcaatggaatggcctacatcgacctatgcaaaaacggagatatagactactgcgagctcaacgcccgcttcggtttccgaaatatcatagccgaccccgtgaccttcaaaaccaagagctcatacgtagcactggctactctccaagcatacactagtatgcatctcttttttcagttcaaaacgacctcgctagatggcctcatcctgtataatagcggggatgggaacgatttcattgtggttgagctcgtcaaagggtatttacactatgtctttgacctggggaatggggccaatctcataaagggaagttctaataaacccctgaatgacaatcaatggcacaacgtgatgatatctagagacacaagcaacctgcatactgtgaaaatcgacacaaagataacaactcagataacggctggtgcccgcaacctagacctcaagtcagacctgtacattggaggagtggccaaagaaacctacaagtctctgccaaaactggttcacgccaaagaagggttccagggctgtctggcctcagtcgatctcaacggaaggctgcccgatctgatttccgacgcactgttctgcaatggacaaattgaaagaggatgcgaagggccatccacaacatgccaggaggactcctgttctaatcagggtgtgtgtcttcagcaatgggatggctttagttgcgactgcagcatgaccagtttcagcggaccactctgcaacgacccgggaacaacgtacatattttctaaggggggaggacagattacctacaagtggccaccgaacgatcgaccctccacaagggctgatcgtttggccatcggcttttccaccgtccaaaaggaggccgtactggtacgggttgattcttcatccggattgggcgactatctagagctgcacatccaccagggtaaaatcggtgtaaaatttaacgtgggtacagatgacattgccatagaggaatccaatgccatcatcaacgacgggaaataccatgtagtccgctttacccgatcgggaggcaatgccactctgcaggtcgatagctggccagtgatcgaacggtaccccgcaggaaacaatgataacgagcgtctagccatcgcccggcagagaattccttacagactcggaagggtggtcgacgagtggctgctggacaaaggtaggcagctgacaatcttcaactcacaagctaccatcattataggcggcaaggaacaagggcagccctttcagggccagttgagtgggttatactataacggtctcaaagtccttaacatggcagccgaaaatgacgctaatattgctatagtaggcaacgtgagattggtgggagaagttccgtcttccatgaccacagagagcaccgctaccgcaatgcaatccgagatgtctacaagcattatggagactaccaccacccttgctactagtacggctcggcgcggaaaacctccaaccaaggaacctatcagccagaccacagatgacatactggtggcctcagccgaatgtccgagtgacgacgaagacatagacccctgcgagccatccagtggcgggctggcaaatccgacgcgtgccggggggcgcgagccttaccctggttctgctgaagttataagagagagcagttctacaacaggaatggtggtggggatagtggccgctgcagcgttgtgcatactcatcttgctctacgcaatgtacaagtatcgtaaccgagacgaagggtcctatcacgtggacgagtccagaaattatatatcaaactctgcacaatctaatggagctgttgtgaaggagaaacagccctcgtcagccaaatcctcaaacaaaaacaagaaaaataaagataaagaatattatgtgtag

SEQ ID NO: 50870 - DNA, 4644 bp, Artificial Sequence
  derived and/or modified sequence
atgggcacagccctgctgcagagaggaggctgcttcctgctgtgcctgagcctgctgctgctgggctgctgggccgagctgggcagcggcctggagttccctggagctgagggccagtggacccgcttccccaagtggaatgcctgctgtgagagcgagatgtccttccagctgaagaccaggtctgcccggggcctggtgctgtactttgatgatgagggcttctgtgacttcctggagctgatcctgacccggggcggccgcctgcagctgtccttcagcatcttctgtgccgagcccgccaccctgctggccgacacccctgtgaatgatggagcctggcacagcgtgcgcatccggcggcagttcaggaacaccaccctcttcatcgaccaggtggaggccaagtgggtggaggtgaagagcaagaggcgggacatgaccgtcttcagcggcctgtttgtgggcggcctgcccccagagctgcgggctgctgccctgaagctgaccctggcctctgtgcgggagcgggagcccttcaagggctggatcagagatgtgcgggtgaacagcagccaggtgctgcctgtggacagcggggaggtgaagctggatgatgagccccccaacagcggcggcggcagcccctgtgaggccggggaggagggggagggcggcgtgtgcctgaatggaggagtgtgcagcgtggtggatgaccaggccgtgtgtgactgcagcaggacaggcttccggggcaaggactgcagccaggagatcaagtttggcctgcagtgtgtgctgcctgtgctgctgcatgacaatgaccagggcaagtactgctgcatcaacacagccaagcccctgacagagaaggacaacaacgtggagggcctggcccacctgatgatgggagaccagggcaagagcaagggcaaggaggagtacatcgccaccttcaagggcagcgagtacttctgctatgacctgagccagaaccccatccagagcagcagtgatgagatcaccctgtccttcaagaccctgcagagaaatggcctgatgctgcacacaggcaagtctgctgactatgtgaacctggccctgaagaatggagctgtgtccctggtgatcaacctgggcagcggggcctttgaggccctggtggagcctgtgaatggcaagttcaatgacaatgcctggcatgatgtgaaggtgaccaggaacctgcggcagcacagcggcattggacatgccatggtgaacaagctgcactgcagcgtgaccatctctgtggatggcatcctgaccaccaccggctacacccaggaggactacaccatgctgggcagtgatgacttcttctacgtgggcggcagccccagcacagctgacctgcccggcagccctgtgagcaacaacttcatgggctgcctgaaggaggtggtgtacaagaacaatgatgtgcggctggagctgagccggctggccaagcagggcgaccccaagatgaagatccacggcgtggtggccttcaagtgtgaaaatgtggccaccctggaccccatcacctttgagaccccagagagcttcatcagcctgcccaagtggaatgccaagaagacaggcagcatcagctttgacttccgcaccacagagcccaacggcctcatcctcttcagccacggcaagcccaggcaccagaaggatgccaagcacccccagatgatcaaggtggacttctttgccatcgagatgctggatggccacctgtacctgctgctggacatgggcagcggcaccatcaagatcaaggccctgctgaagaaggtgaatgatggagagtggtaccacgtggacttccagagagatggccgcagcggcaccatctctgtgaacaccctgcggaccccctacacagcccctggagagagcgagatcctggacctggatgatgagctgtacctgggcggcctgcctgagaacaaggccggcctggtgttccccacagaggtgtggacagccctgctgaactacggctacgtgggctgcatccgggacctcttcattgatggccagagcaaggacatccggcagatggccgaggtgcagagcacagctggggtgaagcccagctgcagcaaggagacagccaagccctgcctgagcaacccctgcaagaacaacggcatgtgcagagatggctggaaccgctacgtgtgtgactgcagcggcaccggctacctgggccgcagctgtgagcgggaggccaccgtgctgtcctatgatggctccatgttcatgaagatccagctgcctgtggtgatgcacacagaagcagaagatgtgtccctgcgcttccgcagccagagggcctacggcatcctgatggccaccaccagccgggacagcgctgacaccctgcggctggagctggatgctggccgggtgaagctgactgtgaacctggactgcatccgcatcaactgcaacagcagcaaaggacctgagaccctgtttgctggctacaacctgaatgacaatgagtggcacacagtgcgggtggtgcggcggggcaagagcctgaagctgactgtggatgaccagcaggccatgacaggccagatggccggggaccacacccggctggagttccacaacattgaaacaggcatcatcacagaaagacgctacctgagctctgtgcccagcaacttcatcggccacctgcagagcctgaccttcaacggcatggcctacatcgacctgtgcaagaatggagacatcgactactgtgagctgaatgccaggtttggcttcaggaacatcatcgctgaccctgtgaccttcaagaccaagagcagctatgtggccctggccaccctgcaggcctacacctccatgcacctgttcttccagttcaagaccaccagcctggatggcctcatcctgtacaacagcggagatggaaatgacttcatcgtggtggagctggtgaagggctacctgcactacgtgtttgacctgggcaatggagccaacctgatcaagggcagcagcaacaagcccctgaatgacaaccagtggcacaacgtgatgatcagccgggacaccagcaacctgcacacagtgaagattgacaccaagatcaccacccagatcacagctggggccaggaacctggacctgaagagtgacctgtacatcggcggcgtggccaaggagacctacaagagcctgcccaagctggtgcacgccaaggagggcttccagggctgcctggcctctgtggacctgaatggccgcctgcctgacctgatcagtgatgccctcttctgcaatggccagatcgagcggggctgtgagggccccagcaccacctgccaggaggacagctgcagcaaccagggcgtgtgcctgcagcagtgggatggcttcagctgtgactgcagcatgaccagcttcagcggccccctgtgcaatgaccccggcaccacctacatcttcagcaagggcggcggccagatcacctacaagtggcccccaaatgaccggcccagcaccagggctgaccggctggccatcggcttcagcacagtgcagaaggaggccgtgctggtgcgggtggacagcagcagcggcctgggggactacctggagctgcacatccaccagggcaagattggagtgaagttcaacgtgggcacagatgacatcgccatcgaggagagcaatgccatcatcaatgatggcaagtaccacgtggtgcgcttcaccaggtctggaggaaatgccaccctgcaggtggacagctggcctgtgattgaaagatacccagctggcaacaatgacaatgaaaggctggccatcgcccggcagaggatcccctaccgcctgggccgggtggtggatgagtggctgctggacaagggccggcagctgaccatcttcaacagccaggccaccatcatcatcggcggcaaggagcagggccagcccttccagggccagctgagcggcctgtactacaacggcctgaaggtgctgaacatggccgcagaaaatgatgccaacatcgccatcgtgggcaatgtgcggctggtgggggaggtgcccagctccatgaccacagagagcacagccacagccatgcagagcgagatgagcaccagcatcatggagaccaccaccaccctggccaccagcacagcccggcggggcaagccacccaccaaggagcccatcagccagaccacagatgacatcctggtggccagcgcagaatgtcccagtgatgatgaagatattgacccctgtgagcccagcagcggcggcctggccaaccccaccagggctgggggccgggagccctacccaggcagcgctgaggtgatccgggagagcagcagcaccaccggcatggtggtgggcatcgtggccgctgctgccctgtgcatcctgatcctgctgtatgccatgtacaagtacagaaacagagatgagggcagctaccacgtggatgagagcaggaactacatcagcaacagcgcccagagcaatggagctgtggtgaaggagaagcagcccagcagcgccaagagcagcaacaagaacaagaagaacaaggacaaggagtactacgtgtag

SEQ ID NO: 50871 - DNA, 4647 bp, Artificial Sequence
  derived and/or modified sequence
atgggcacagccctgctgcagagaggaggctgcttcctgctgtgcctgagcctgctgctgctgggctgctgggccgagctgggcagcggcctggagttccctggagctgagggccagtggacccgcttccccaagtggaatgcctgctgtgagagcgagatgtccttccagctgaagaccaggtctgcccggggcctggtgctgtactttgatgatgagggcttctgtgacttcctggagctgatcctgacccggggcggccgcctgcagctgtccttcagcatcttctgtgccgagcccgccaccctgctggccgacacccctgtgaatgatggagcctggcacagcgtgcgcatccggcggcagttcaggaacaccaccctcttcatcgaccaggtggaggccaagtgggtggaggtgaagagcaagaggcgggacatgaccgtcttcagcggcctgtttgtgggcggcctgcccccagagctgcgggctgctgccctgaagctgaccctggcctctgtgcgggagcgggagcccttcaagggctggatcagagatgtgcgggtgaacagcagccaggtgctgcctgtggacagcggggaggtgaagctggatgatgagccccccaacagcggcggcggcagcccctgtgaggccggggaggagggggagggcggcgtgtgcctgaatggaggagtgtgcagcgtggtggatgaccaggccgtgtgtgactgcagcaggacaggcttccggggcaaggactgcagccaggagatcaagtttggcctgcagtgtgtgctgcctgtgctgctgcatgacaatgaccagggcaagtactgctgcatcaacacagccaagcccctgacagagaagaaggacaatgactttgagggcctggcccacctgatgatgggagaccaggccaagagcaagaggaaggaggagtacatcgccaccttcaagggcagcgagtacttctgctatgacctgagccagaaccccatccagagcagcagtgatgagatcaccctgtccttcaagaccctgcagagaaatggcctgatgctgcacacaggcaagtctgctgactatgtgaacctggccctgaagaatggagctgtgtccctggtgatcaacctgggcagcggggcctttgaggccctggtggagcctgtgaatggcaagttcaatgacaatgcctggcatgatgtgaaggtgaccaggaacctgcggcagcacagcggcatcggccacgccatggtgaacaagctgcactgcagcgtgaccatctctgtggatggcatcctgaccaccaccggctacacccaggaggactacaccatgctgggcagtgatgacttcttctacgtgggcggcagccccagcacagctgacctgcccggcagccctgtgagcaacaacttcatgggctgcctgaaggaggtggtgtacaagaacaatgatgtgcggctggagctgagccggctggccaagcagggcgaccccaagatgaagatccatggagtggtggccttcaagtgtgaaaatgtggccaccctggaccccatcacctttgagaccccagagagcttcatcagcctgcccaagtggaatgccaagaagacaggcagcatcagctttgacttccgcaccacagagcccaacggcctcatcctcttcagccacggcaagcccaggcaccagaaggatgccaagcacccccagatgatcaaggtggacttctttgccatcgagatgctggatggccacctgtacctgctgctggacatgggcagcggcaccatcaagatcaaggccctgctgaagaaggtgaatgatggagagtggtaccacgtggacttccagagagatggccgcagcggcaccatctctgtgaacaccctgcggaccccctacacagcccctggagagagcgagatcctggacctggatgatgagctgtacctgggcggcctgcctgagaacaaggccggcctggtgttccccacagaggtgtggacagccctgctgaactacggctacgtgggctgcatccgggacctcttcattgatggccagagcaaggacatccggcagatggccgaggtgcagagcacagctggggtgaagcccagctgcagcaaggagacagccaagccctgcctgagcaacccctgcaagaacaacggcatgtgcagagatggctggaacagatatgtgtgtgactgcagcggcaccggctacctgggccgcagctgtgagcgggaggccaccgtgctgtcctatgatggctccatgttcatgaagatccagctgcctgtggtgatgcacacagaagcagaagatgtgtccctgcgcttccgcagccagagggcctacggcatcctgatggccaccaccagccgggacagcgctgacaccctgcggctggagctggatgctggccgggtgaagctgactgtgaacctggactgcatccgcatcaactgcaacagcagcaagggccctgagaccctgtttgctggctacaacctgaatgacaatgagtggcacacagtgcgggtggtgagaagaggcaagagcctgaagctgactgtggatgaccagcaggccatgacaggccagatggccggggaccacacccggctggagttccacaacatcgagaccggcatcatcacagagcggcgctacctgagctctgtgcccagcaacttcatcggccacctgcagagcctgaccttcaacggcatggcctacatcgacctgtgcaagaatggagacatcgactactgtgagctgaatgcccgcttcggcttcaggaacatcatcgctgaccctgtgaccttcaagaccaagagcagctatgtggccctggccaccctgcaggcctacacctccatgcacctgttcttccagttcaagaccaccagcctggatggcctcatcctgtacaacagcggagatggaaatgacttcatcgtggtggagctggtgaagggctacctgcactacgtgtttgacctgggcaatggagccaacctgatcaagggcagcagcaacaagcccctgaatgacaaccagtggcacaacgtgatgatcagccgggacaccagcaacctgcacacagtgaagattgacaccaagatcaccacccagatcacagctggggccaggaacctggacctgaagagtgacctgtacatcggcggcgtggccaaggagacctacaagagcctgcccaagctggtgcacgccaaggagggcttccagggctgcctggcctctgtggacctgaatggccgcctgcctgacctgatcagtgatgccctcttctgcaatggccagatcgagcggggctgtgagggccccagcaccacctgccaggaggacagctgcagcaaccagggcgtgtgcctgcagcagtgggatggcttcagctgtgactgcagcatgaccagcttcagcggccccctgtgcaatgaccccggcaccacctacatcttcagcaaaggaggcggccagatcacctacaagtggcccccaaatgaccggcccagcaccagggctgaccggctggccatcggcttcagcacagtgcagaaggaggccgtgctggtgcgggtggacagcagcagcggcctgggggactacctggagctgcacatccaccagggcaagattggagtgaagttcaacgtgggcacagatgacatcgccatcgaggagagcaatgccatcatcaatgatggcaagtaccacgtggtgcgcttcaccaggtctggaggaaatgccaccctgcaggtggacagctggcctgtgattgagcgctacccagctggcaacaatgacaatgaaaggctggccatcgcccggcagaggatcccctaccgcctgggccgggtggtggatgagtggctgctggacaagggccggcagctgaccatcttcaacagccaggccaccatcatcattggaggcaaggagcagggccagcccttccagggccagctgagcggcctgtactacaacggcctgaaggtgctgaacatggctgctgaaaatgatgccaacatcgccatcgtgggcaatgtgcggctggtgggggaggtgcccagctccatgaccacagagagcacagccacagccatgcagagcgagatgagcaccagcatcatggagaccaccaccaccctggccaccagcacagcccggcggggcaagccacccaccaaggagcccatcagccagaccacagatgacatcctggtggccagcgctgagtgccccagtgatgatgaggacatcgacccctgtgagcccagcagcggcggcctggccaaccccacccgggccggcggccgggagccctacccaggcagcgctgaggtgatccgggagagcagcagcaccaccggcatggtggtgggcatcgtggccgccgccgccctgtgcatcctgatcctgctgtatgccatgtacaagtacagaaacagagatgagggcagctaccacgtggatgagagcaggaactacatcagcaacagcgcccagagcaatggagctgtggtgaaggagaagcagcccagcagcgccaagagcagcaacaagaacaagaagaacaaggacaaggagtactacgtgtag

SEQ ID NO: 50872 - DNA, 4644 bp, Artificial Sequence
  derived and/or modified sequence
atgggcaccgccctgctgcagcggggcggctgcttcctgctgtgcctctccctgctgctcctgggatgttgggcagaattaggtagcggactcgaatttccgggtgctgaaggccagtggaccaggttcccaaaatggaacgcttgctgcgagtccgaaatgagtttccagctgaagactcggtcagcacgaggcttagtgctgtattttgatgacgaaggcttttgcgactttcttgagctgatcctgacacggggcggccgattgcagctgtctttctcaattttttgtgccgagccagccacgctgctcgccgatacccctgttaacgatggagcttggcattctgtccgaatcaggagacagtttagaaacacaaccctttttatcgatcaggttgaagctaaatgggtggaggtgaagagcaagcggcgcgacatgacggtattcagcggcctgtttgttggcggactcccaccagaactccgagctgctgctctgaaattaactctcgcatcggtacgtgagcgcgagccattcaagggatggattagggatgtccgtgtaaacagcagccaggttctgcctgtcgactccggggaagtaaaactggatgacgagccacctaactccggaggcggaagcccttgtgaggcaggcgaagagggagagggcggagtatgcttaaatggcggcgtttgttccgttgtggacgaccaagccgtgtgcgactgttcacgcacaggcttccgtggaaaggattgctcccaggagattaaattcgggctgcaatgcgtcctgcctgtgctgctccacgacaacgatcaaggaaagtactgttgcatcaacacagcaaagccactcactgagaaggacaacaacgttgaggggctcgcacatcttatgatgggcgatcagggtaaaagtaagggcaaagaggagtacattgccaccttcaaaggcagcgaatatttttgctatgatctatcccagaatcctatacagtccagttcggacgagattactttgtcgttcaagaccttacagcgcaacggcctgatgctccataccggcaaaagcgctgattacgtcaacctcgctctcaagaacggcgccgttagcctcgtgattaatctaggctcaggcgcattcgaagcactagtcgaacccgttaacggtaaatttaatgataacgcctggcatgacgttaaggtgactaggaatctgcgccagcattcagggattggacatgccatggttaataagttgcactgctctgtgacaatctcagtggacggcattctcactacaacaggttatacgcaggaggattatactatgctggggtcagacgactttttctacgtgggcggctccccaagcacagccgacttgcccggatcccccgtgtcgaacaattttatgggatgtctgaaagaagttgtctacaagaacaatgatgttcgcctggagctcagccggcttgccaaacaaggtgatcccaaaatgaagatccatggtgtggtcgctttcaaatgtgaaaatgtcgcaactcttgaccctatcacctttgagactcctgagagcttcattagtctgcctaaatggaacgccaaaaaaaccggctcaatcagttttgacttcagaactaccgagcctaacggacttatacttttctctcacggaaaaccccgccaccagaaggatgccaagcacccccagatgatcaaagttgacttcttcgctatcgagatgctcgatggtcatctgtatctgttactggacatgggatccggtaccatcaaaatcaaagctctgctcaaaaaagtcaatgatggagagtggtaccacgtggactttcagcgcgatggcagatccggtaccatctctgttaacacattgcgcaccccttacacagcccctggggagagcgagatcttagacttagacgatgagctgtatctcggagggcttcctgagaacaaagctggcctggtgttcccgacagaagtgtggaccgctctcctgaattatggatacgtcggttgcatcagggatctcttcattgatgggcaatcaaaagatattcggcagatggccgaggtgcagtcaacggccggcgtgaagcctagttgcagcaaggagacggccaagccttgcctatcgaacccgtgtaaaaacaatggtatgtgtagggatgggtggaacagatatgtatgcgattgcagtggcactgggtatctgggaaggtcatgcgagagagaggccacagtcctttcttacgatggctccatgttcatgaagattcagctgcccgtggtcatgcacacagaggctgaagatgtgagccttcgctttagaagccagcgcgcctatggaatcttaatggccacaactagccgggacagtgcggatacgcttcggctagagctggatgcgggccgcgttaagctaacagtcaacctggactgcatccggattaattgcaacagtagcaaaggccccgagacattgtttgcaggttacaatctgaatgataatgagtggcacaccgtccgggtggtccgacggggcaaaagtttaaaacttacagtggacgaccagcaagccatgacgggacagatggcaggcgaccacactcggctggaatttcacaacattgaaaccggcataattaccgagcggagatatctctccagcgtgccctccaatttcatcgggcacctgcagtcattgacatttaatgggatggcgtacatcgatctctgcaagaacggggacatagactactgcgaacttaacgcaagattcggatttcggaatattattgccgaccctgttactttcaagacaaaatcgagttatgtagcactggcgacactccaagcttatacttcaatgcacctgtttttccaatttaaaacgaccagtctggatggccttatcctctacaacagtggagacggcaacgattttattgtggtcgagttagtcaagggctatttgcactacgtatttgacctcggcaatggggccaatctgattaagggaagctctaataaaccactgaatgacaatcagtggcataacgtcatgatttcaagggacacttctaacttacacaccgtcaaaatcgacaccaagatcactacccagataacggccggggctaggaacttggacctcaaaagtgacttatatatcggcggagttgcaaaagagacgtacaagtccttgcctaaactggtgcatgctaaagaggggttccaagggtgtctggcctccgtcgacctgaacggtcggttgcctgatttgatcagcgatgccctgttttgcaacggacagatcgaaaggggatgcgagggcccttccaccacttgccaggaggactcttgttccaaccagggggtgtgtctacagcaatgggacggttttagctgcgactgttcaatgaccagcttcagcggcccattgtgtaatgatcctggtacaacttatatcttctcaaagggaggaggccagataacttacaagtggccaccgaacgaccggcctagtaccagggcagacaggctagccatcggtttcagcaccgtccaaaaagaggctgtcctagtccgtgtagatagctcttcggggctcggcgattaccttgaactccatatacaccaaggcaaaattggggttaaatttaacgttggcacggatgacatcgccatagaggagtccaacgctattattaatgacggcaagtaccacgtggtgcgctttactcgctcagggggaaatgcaaccctgcaggtcgacagctggccagtaattgagcggtaccctgcaggaaacaacgacaatgagcgcctcgcgatcgccagacaaagaattccctatcgtctggggagggtcgtggacgagtggctgcttgataaggggcgacagttaaccatatttaatagccaagctacaatcattataggcgggaaagagcaaggccagcccttccagggacaactcagcgggctttattacaacggacttaaggtacttaacatggctgctgaaaatgacgctaatattgctatagtgggtaatgtgaggctggtaggagaggtgccttcatcgatgactacggaatctacggccacagccatgcagtccgagatgagtactagtataatggaaacaaccaccaccctagcaacatccacagccagaaggggcaaaccacctactaaggagccaattagtcagacaaccgacgatatcctggtcgccagcgccgagtgtccatccgatgacgaggacattgatccatgtgagccaagctctggaggactcgcaaatcctaccagggcgggcggccgagagccttacccaggaagtgccgaagtgattcgcgaaagctctagcactaccggtatggtggtgggcatcgtggccgcagccgctttatgtattttgatcctgctgtacgccatgtataaatacagaaaccgcgacgagggatcgtaccatgtcgacgagtcgcgaaattacatttctaatagcgcacagtctaacggggccgtcgtgaaagagaagcagccgtccagcgccaagtcgagcaacaagaacaagaaaaacaaggacaaagaatattatgtttag

SEQ ID NO: 50873 - DNA, 4647 bp, Artificial Sequence
  derived and/or modified sequence
atgggcaccgccctgctgcagcggggcggctgcttcctgctgtgcctcagcttactcctgttggggtgttgggctgaactcggtagcggactggaatttccaggtgcggaaggacagtggacccggtttccaaaatggaacgcctgttgtgagagtgagatgtccttccagctgaagacccgcagcgcccgcggcctagttctttattttgatgacgagggcttctgtgactttctcgagctaatactgaccaggggaggtcgactacagctatcctttagcattttctgtgctgaacccgcaacactccttgcagacacaccggtgaacgacggcgcctggcattcagtccgcattcgccggcagttccggaacactactctgtttattgatcaggtggaggccaaatgggtggaagtaaagtccaagagaagagatatgacagtgttttccggcctctttgtaggaggactcccgccggaactgagagctgcagccctcaagctgacactcgcctctgtgagggagcgcgaacctttcaaaggttggatacgggatgtgagggtcaattcaagccaggtgctgcccgtcgattccggggaggtcaaactggacgatgaaccacctaactccggcggaggttccccatgcgaggccggcgaggagggggaagggggcgtgtgtttaaatgggggtgtctgctcagttgtggatgatcaggcagtgtgcgattgtagcaggaccggcttcagaggaaaagactgcagtcaggaaatcaagttcggcctccagtgcgttctgcctgtgctgttacacgacaatgaccagggaaagtactgttgtatcaacactgctaagccgctgacagaaaaaaaggataatgattttgaaggcctcgcgcacttgatgatgggcgatcaagccaaaagcaaaaggaaagaggaatacatcgctacctttaaggggagtgaatacttctgctacgacctgagccagaatccgattcaatcatcttctgacgaaattaccctttccttcaaaactctacagcgtaatggtctgatgctgcacaccgggaaaagtgcagattatgtgaatctcgctcttaaaaacggtgccgtgagtttggtgatcaacctgggctctggcgcctttgaggcactcgtggaacccgtgaacggtaagtttaacgacaacgcatggcacgacgtaaaggtgacccgtaacctcagacagcacagcgggatcgggcatgcgatggtcaacaaattacattgctccgtcactatatccgtcgatggcatactgaccacaacaggctacacccaagaggactacaccatgctgggatccgacgacttcttctacgtcggcggctcaccatctaccgcagacctacctggaagtcctgttagcaacaacttcatgggatgtcttaaggaggtagtgtacaaaaacaatgatgttcgcctggagctcagtcggctggccaagcagggcgacccaaagatgaagatacacggagtggtagcattcaagtgtgaaaatgtcgccacactggacccaatcacttttgaaacccctgaaagtttcatttctctgcctaagtggaatgccaagaaaactgggtcgatttctttcgacttccgcactacagagcccaacgggttaatcctgttctcgcacgggaaacccaggcaccagaaagatgccaaacatccgcagatgatcaaagtagacttcttcgctattgagatgcttgacggacacctctatctccttctcgatatgggtagtggaactatcaagataaaagccctactgaaaaaagttaacgatggagaatggtaccacgtggattttcagagagatggaaggagtggtaccattagtgtgaacacccttagaactccatatacagctcccggtgaatcggagattctcgacctggacgatgagctctatttgggtggcctgcctgaaaataaggcgggactggtgttcccgaccgaagtgtggactgcactgctgaactacggatatgtcggctgcatacgtgatctctttatcgacgggcagtcaaaggacatcagacagatggcagaggtgcaatccaccgcaggggtaaagccatcttgcagtaaagaaaccgcaaagccatgtctaagcaacccttgcaagaacaatgggatgtgtagagatgggtggaatcgatacgtttgcgattgttccggaacggggtatttaggccgctcctgcgagagggaagctaccgtgttgagctacgacggaagcatgtttatgaagattcaactccccgtcgtcatgcacacggaggctgaagacgttagcctccgattccgaagccagagagcctacggtattctgatggcaactacttcaagggactccgctgacacactgagactggaactggatgcaggcagggtcaagctcaccgtaaatctggattgtattcgcatcaattgcaacagctcaaaaggacccgagacgctgttcgctggttataacctgaatgacaatgaatggcacaccgtccgcgtcgtgaggaggggaaagtctctaaagctgaccgtggatgatcaacaagccatgacaggccagatggctggtgaccatacacgactcgagtttcacaacattgagacagggattatcacggagcgccgctatttatcctctgtgccatctaactttattggccatctgcagagcctgacctttaatggaatggcttacattgacctctgcaaaaatggggacatagactattgtgagctgaatgcacgcttcggtttcaggaacatcatcgcagatcctgtgacctttaagaccaagtcttcctacgtggccctggccaccctgcaggcctatactagcatgcacctgttctttcaattcaaaaccaccagtctcgacggactgattctctacaacagtggagacggtaatgactttatagtggtggagcttgtcaagggctacctccactatgtgttcgatcttgggaatggggccaatctgatcaagggctcatctaataaacctctcaatgataatcaatggcataatgttatgatctccagagacacttctaatttgcataccgtgaaaatcgacacgaagattactacacaaattacagctggagcaagaaatctggacttaaaatcagacctgtatattgggggggttgccaaggaaacctataagagtctgccaaagcttgtgcacgccaaggagggatttcagggctgccttgcctccgtcgacctcaacgggagattgccagacttgatatccgatgctttgttctgcaacgggcagattgagcgggggtgcgagggcccatccaccacatgtcaagaggatagctgtagcaaccaaggagtctgcttacagcagtgggacggattttcttgcgattgtagcatgacgagcttcagcggccctctttgtaatgatcctggtaccacctacatattctcaaaagggggtggtcagattacatataaatggcccccgaacgatagaccaagtacacgcgccgacagactcgcaattggattctcaacagtgcagaaagaggcagtcctggtccgcgtggactccagtagcggcctgggtgactacctggagttgcacatccaccagggaaaaatcggcgtcaagtttaatgtgggtactgacgacatcgcgattgaggagtctaatgctatcatcaatgacggtaaatatcacgtggtccggttcacccgctcaggtgggaacgctaccttgcaggtcgacagctggcccgtcatagagcgatatcccgctggaaataatgacaatgaacgactcgccatcgctcgtcaacgaatcccataccgcctcggccgcgtggtggacgaatggctcctggacaaaggtaggcagttaaccatttttaattcccaggcaaccattatcattgggggcaaggaacaaggccagccatttcagggccagctttccggcctctactataatggactcaaggtgttgaacatggctgctgagaatgatgctaacattgctatcgtaggcaatgtgagactcgtgggcgaggtccctagttccatgacgaccgagagcaccgccaccgccatgcagtcagagatgtcgacatccatcatggaaaccaccacgactctggcgacatcgactgctagaagaggtaagcctcccactaaggagcctatttcacagacgaccgacgatatcctggtggctagcgccgaatgtccgtcagacgacgaagacatagacccctgtgaaccttcctctggcgggctagccaacccaacacgcgcgggaggccgggagccctatcctggctcagcagaggtaattcgagaatcttctagcaccaccggtatggtggtcgggattgtggcagctgctgccttgtgtatcctgattctgctgtatgctatgtataaatatcgaaatagggacgaaggcagctatcacgtagatgagagcaggaactatatatccaactccgcacagtctaacggggcagtggtaaaagagaagcagcctagttctgccaagtccagcaacaagaataagaagaataaagacaaggagtactacgtttag

SEQ ID NO: 50874 - DNA, 7578 bp, Artificial Sequence
  derived and/or modified sequence
gcacctcgctccgcagcatccagacctggaggggctgcgaccacgggccgagcccacccattccccagccaaaggacgggcccgccgctctccatggtactgcggagagctcagctccgcccttctctttcagaaggacagcacccggcgtcacgtaacccagccttctcaggctccaccaccgccttttccttcccagctctttccctctcctccccctcctcctccttctcctcctcctcctcctcctgctcccctccgttgcctgttctcccctcccgcactcctggagatagacgctcaagcctgacgcctctgaaaaggcagcagcagtcgccttatccatagacctcaggaaattcgctttgaccgatgcatgcttcaggctctggctcgagctgaggggaataaccgggcagatgtctgagtccttaaaaaagacaagataaaaccaaaatgcatcaccaacacacaaccaattgatgtgctggcatcttagcttggccctgcagaggcagagagaaaagaagaggagctgttgcgatttccacatctaacagcttctggctatttcgcaactgctgggtttgagtcctactgttgccgtggctgaaaagagaagtaaaatccaacttgtgagaccacgcacaaggaattaggctttggctgcagcggtgctgaagcccatgctatgacagaagaagcaggcctttgaagctatcctcgggttaagaaatggtgccctaaagaggcaagcatccctttctccgttctgctgtaagacaccacatctgaaggagacagacttgaggcattcacaagcatccaaggatactggctcactgctggcttcctgtactttcttgagaaaagtgttttctttttactgactctcactgcttccttttggcctggtaccactggtggaacctggcagataatgggatttgaggagttaagtatctgttgacactgcagatactcttaaattagttaatcagactcaaatgggtcagtgctttcccttgatcttttgttgaagccttttccagaacgttgtctccaaagtgcatcctccctttggtctggaagttctgtggctaccctgtaccactggggtcaacgttttccagttggaagaggactacagggagagagggcggggttattggaagaagaagaagaaaaaaagaactagataaaggagggcacatccctctcactcccgcctttccccttacctttctgtctctcgggacccttatttcttcgtcacggtgtccaggaccattttgaccctgtcggccccggcacccccccgccgcaccccagccccgagcatggggacggcgctgctccagcgcgggggctgttttcttctgtgcctctcgctgctgctcctgggctgctgggcggagctgggcagcgggctggagtttccgggcgccgagggccaatggacgcgcttccccaagtggaacgcctgctgcgagagcgagatgagcttccagctcaagactcgcagcgcccgcggcctcgtgctctacttcgacgacgagggcttctgcgacttcctggagctgattctgacgcgcggcggccgcctgcagctcagcttctccatcttctgcgctgagcctgcgacgctcctggccgacacgccggttaacgacggcgcctggcacagcgtgcgcatccgccgccagttccgcaacaccacgctcttcatcgaccaggtggaggccaagtgggtggaggtcaagtccaagcgcagggacatgacggtgttcagcggccttttcgtcggggggctgcccccggaactgcgcgccgcggcgctcaagctcaccctggcctcggtgagggagcgggagcccttcaaggggtggattcgtgacgtgagggtcaactcctcgcaggtcctgcccgtggacagcggcgaggtgaagctggacgatgagccgcccaacagcggcgggggaagcccgtgcgaggcgggcgaggagggcgagggcggggtgtgcctcaacggaggtgtgtgctccgtggtggacgaccaggccgtgtgcgactgctcgcgaaccggcttccgcggcaaggactgcagccaagaaataaaattcggtcttcagtgtgttttgccggtgctgttacatgacaatgaccaaggaaaatactgttgtataaatacagcaaagcctctaacagaaaaagacaacaatgtggaaggtctggcgcacctgatgatgggcgaccaaggtaaaagtaaaggaaaagaagaatatattgccacgttcaaaggatctgaatacttctgctacgacttgtctcaaaaccccattcaaagcagcagtgatgaaataactctgtcatttaaaacccttcagaggaatggactgatgcttcacactgggaaatcggctgattatgtcaatcttgccctgaaaaatggagctgtctctctggtcattaatttgggatcaggggcctttgaagcactagtggagcctgtgaatggaaagtttaatgataatgcctggcatgatgtgaaagtcaccaggaatctgcgtcagcactcaggcattggacacgctatggtaaacaaactacattgttcggtgacaatatcagtggatgggattcttaccacaacgggctacacgcaagaagattataccatgctggggtctgatgactttttctatgttggaggcagtcccagcacagccgaccttccagggtcaccagtcagtaacaactttatgggctgtctcaaagaggttgtatataaaaataatgatgtgaggctggaattatctcgacttgccaagcaaggagatcctaagatgaagatccatggagtggtggcatttaaatgtgagaatgttgcaactttagacccaatcacctttgaaaccccagagtctttcatctctttgcctaaatggaatgcaaagaaaactggctccatatcatttgatttccgtacaacagagccaaatggcctcatcttatttagccatggcaagccaagacatcagaaagatgccaagcacccacagatgataaaggtggacttctttgctattgagatgctagatggccacctctacctcctcctggacatggggtcaggtactataaaaataaaagccctgttgaagaaagtgaatgatggagaatggtatcatgtggacttccagagagacggacggtcaggtaccatttctgtcaacacgttgcgtactccctacactgctcctggtgagagtgagattctggacctggatgatgagttgtacctgggggggctgccagaaaataaagctggccttgtcttccccaccgaggtgtggactgctctgctcaactatggctacgtgggctgcatcagggatttgttcatcgatggccaaagcaaagatatccggcaaatggctgaagttcaaagtactgctggagtgaagccttcctgctcaaaggaaacagcaaaaccgtgccttagcaacccttgcaaaaacaatggcatgtgcagggatgggtggaacagatatgtctgtgattgttccggaacaggctatcttggcaggtcctgtgagagagaggcaacggttttgagctatgatgggagcatgtttatgaaaattcagctccccgtagtcatgcatacggaggctgaggatgtttccttacggttccgatcccagcgtgcatatggcattctgatggcaaccacttctagagactctgctgacaccctccgcctggagctagacgcaggacgtgtgaaactgacggtcaatctagattgtatcaggattaactgtaattccagcaaaggtcccgagactctttttgctggctataacctcaatgataacgagtggcacacagtgcgtgtagttcggcgtggaaaaagtttaaagttaacagtggatgaccaacaggccatgacaggtcaaatggcaggtgatcatactaggctggagttccataacatagagactggcatcatcacagaacgacggtatctttcttctgtcccctccaacttcattggacacctgcagagcttgacatttaatggaatggcatacattgacctgtgtaaaaatggcgacatagattactgtgagcttaatgccagatttggcttcaggaacatcatagcagatcctgtcaccttcaagaccaaatcgagctatgttgccttagctaccttgcaagcctacacttctatgcatctttttttccagttcaagacaacatccctagatggattaattctatataacagtggggatggaaatgactttattgtggttgaattagttaaagggtacttacattacgtgtttgatttgggaaatggtgctaacctcatcaaaggaagctcaaataaacctctcaatgacaatcagtggcacaacgtgatgatatcaagggacaccagcaacctccacactgtaaagattgacacaaaaatcacaacgcaaatcaccgccggagccaggaacttagacctcaagagtgacttatatataggaggagtagctaaagaaacatacaaatccttaccaaaacttgtacatgccaaagaaggctttcaaggctgcctggcatcagttgatttaaatggacggcttccggacctcatctccgatgctcttttctgcaacggacagatcgagagaggatgtgaagggcccagcacaacctgccaagaggactcatgttccaatcaaggtgtgtgcttgcaacaatgggatggcttcagctgtgactgtagtatgacttccttcagtggaccactctgcaatgaccctgggacgacatatatctttagcaaaggtggtggacaaatcacgtataagtggcctcctaatgaccgacccagtacacgagcagacagactggccataggttttagcactgttcagaaagaagccgtattggtgcgagtggacagttcttcaggcttgggtgactacctagaactgcatatacaccagggaaaaattggagttaagtttaatgttgggacagatgacatcgccattgaagaatccaatgcaatcattaatgatgggaaataccatgtagttcgtttcacgaggagtggtggcaatgccacgttgcaggtggacagctggccagtgatcgagcgctaccctgcaggaaacaatgataacgagcgcctggcgattgctagacagcgaattccatatcgacttggtcgagtagttgatgaatggctactcgacaaagggcgtcagctcacaatcttcaatagccaagcaaccataataattggcgggaaagagcagggccagcccttccagggccagctctctgggctgtactacaatggcttgaaagttctgaatatggcagccgaaaacgatgccaacatcgccatagtgggaaatgtgagactggttggtgaagtgccttcctctatgacaactgagtcaacagccactgccatgcaatcagagatgtccacatcaattatggagactaccacgaccctggctactagcacagccagaagaggaaagcccccgacaaaagaacccattagccagaccacagatgacatccttgtggcctcagcagagtgtcccagcgatgatgaggacattgacccctgtgagccgagctcaggtgggttagccaacccaacccgagcaggcggcagagagccgtatccaggctcagcagaagtgatccgggagtccagcagcaccacgggtatggtcgttgggatagtagccgctgccgccctgtgcatccttatcctcctctatgccatgtacaagtacagaaaccgggatgaaggctcataccatgtggacgagagtcgaaactacatcagtaactcagcacagtccaatggggctgttgtaaaggagaaacaacccagcagtgcgaaaagctccaacaaaaataagaaaaacaaggataaagagtattatgtctgatcccaagatcttaaatggacacttgtatagaaatagtcttcattttatctgagacataatataaacttatttactttcctttttatgaagcacatacaaaagaagacagggaatgcaatcaggaaggaaagactttttaaaaaataaaaacaagtatctcatgctcttgtttctcaaaaaagaaaaacaaaaaacaaaaaacaggggccaataaattccctaacatccacagtgttttcatttactctgcttgtctttatgttgctggaacatttctaaaagacagtgatgaccgcacgcattcataaagcaaaggagtactacagcatcaaggcacaacacaaaaaccaacacaaaacataacacaaaaaagaagctacctatgatcctggatttagccaaagtgctagcgctttcctgagaagtcagtccaattgccagagaagactgtccttttgagtgactcaacctgcaaacctttaagagtttgccgcctggtgcaactggagcagtggttggaacttgcatttgaaacaaagtgctggcttttttgaagacttgtgtaggaacacattcaaaaagcccctttctggttgtgagagaggaaaaaaaagtatggaggccttattttcaaaaatgtgaaatataaggcacgttttcacacaaaatttcaaaacaaaaacaagagggcatagatgcaatcattgggaaattttcatgcacgcttattatgttattacatatgtttatataaaatccatctctgtgtgctttctggactgtgataagtgacgttttatagcctgttgtatagaaaatgcaaaatatatctctgctcttcagccatttttggtaaattcaatgttataagtgttgctaagtatagggagttttatgacatcagagcaacaattatttcagttgggtttttctttttttttgccaccattataaattgccacaattacttttattttttaaagaaattacagtgtagtgtttattctaaggaagatatgtatgaatgtatatacaaagactcagctacttcttttcttatatgtacagccttcattctgttgcaattaagttttagtacttgtatgaaaggtgtgaattagaaagtcacatatatacatatgtatcttataatcttttctccctgaaatactcacattcccacatacattcactattttcacacacacacacacacacacacacacacacacacacacacacacacgaatccacagcaatccatcagatatgctggaagatccaaacgtgcatacagtagcaaatatttattgacaaattgaaaagcaggaaggaagagggttgtgccaaggtattgatgacaaatggggtgatttgcttcattgagatcttgctcccaggtaaccttaagaagattttagtccctaaagaaatgaacctttccttatcaaatagaatatcactgatatactgctgcatgaataagaaccattatgtgggcaggttatggaagcaaaattggttaatctacaccttaactctggctgctgcaattgaaaactttctttctaataaaataatatatatatctctg

SEQ ID NO: 50875 - DNA, 4647 bp, Artificial Sequence
  derived and/or modified sequence
atggggacggcgctgctccagcgcgggggctgttttcttctgtgcctctcgctgctgctcctgggctgctgggcggagctgggcagcgggctggagtttccgggcgccgagggccaatggacgcgcttccccaagtggaacgcctgctgcgagagcgagatgagcttccagctcaagactcgcagcgcccgcggcctcgtgctctacttcgacgacgagggcttctgcgacttcctggagctgattctgacgcgcggcggccgcctgcagctcagcttctccatcttctgcgctgagcctgcgacgctcctggccgacacgccggttaacgacggcgcctggcacagcgtgcgcatccgccgccagttccgcaacaccacgctcttcatcgaccaggtggaggccaagtgggtggaggtcaagtccaagcgcagggacatgacggtgttcagcggccttttcgtcggggggctgcccccggaactgcgcgccgcggcgctcaagctcaccctggcctcggtgagggagcgggagcccttcaaggggtggattcgtgacgtgagggtcaactcctcgcaggtcctgcccgtggacagcggcgaggtgaagctggacgatgagccgcccaacagcggcgggggaagcccgtgcgaggcgggcgaggagggcgagggcggggtgtgcctcaacggaggtgtgtgctccgtggtggacgaccaggccgtgtgcgactgctcgcgaaccggcttccgcggcaaggactgcagccaagaaataaaattcggtcttcagtgtgttttgccggtgctgttacatgacaatgaccaaggaaaatactgttgtataaatacagcaaagcctctaacagaaaagaaggacaatgactttgaaggtctggcgcacctgatgatgggcgaccaagcaaagtcaaaaagaaaagaagaatatattgccacgttcaaaggatctgaatacttctgctacgacttgtctcaaaaccccattcaaagcagcagtgatgaaataactctgtcatttaaaacccttcagaggaatggactgatgcttcacactgggaaatcggctgattatgtcaatcttgccctgaaaaatggagctgtctctctggtcattaatttgggatcaggggcctttgaagcactagtggagcctgtgaatggaaagtttaatgataatgcctggcatgatgtgaaagtcaccaggaatctgcgtcagcactcaggcattggacacgctatggtaaacaaactacattgttcggtgacaatatcagtggatgggattcttaccacaacgggctacacgcaagaagattataccatgctggggtctgatgactttttctatgttggaggcagtcccagcacagccgaccttccagggtcaccagtcagtaacaactttatgggctgtctcaaagaggttgtatataaaaataatgatgtgaggctggaattatctcgacttgccaagcaaggagatcctaagatgaagatccatggagtggtggcatttaaatgtgagaatgttgcaactttagacccaatcacctttgaaaccccagagtctttcatctctttgcctaaatggaatgcaaagaaaactggctccatatcatttgatttccgtacaacagagccaaatggcctcatcttatttagccatggcaagccaagacatcagaaagatgccaagcacccacagatgataaaggtggacttctttgctattgagatgctagatggccacctctacctcctcctggacatggggtcaggtactataaaaataaaagccctgttgaagaaagtgaatgatggagaatggtatcatgtggacttccagagagacggacggtcaggtaccatttctgtcaacacgttgcgtactccctacactgctcctggtgagagtgagattctggacctggatgatgagttgtacctgggggggctgccagaaaataaagctggccttgtcttccccaccgaggtgtggactgctctgctcaactatggctacgtgggctgcatcagggatttgttcatcgatggccaaagcaaagatatccggcaaatggctgaagttcaaagtactgctggagtgaagccttcctgctcaaaggaaacagcaaaaccgtgccttagcaacccttgcaaaaacaatggcatgtgcagggatgggtggaacagatatgtctgtgattgttccggaacaggctatcttggcaggtcctgtgagagagaggcaacggttttgagctatgatgggagcatgtttatgaaaattcagctccccgtagtcatgcatacggaggctgaggatgtttccttacggttccgatcccagcgtgcatatggcattctgatggcaaccacttctagagactctgctgacaccctccgcctggagctagacgcaggacgtgtgaaactgacggtcaatctagattgtatcaggattaactgtaattccagcaaaggtcccgagactctttttgctggctataacctcaatgataacgagtggcacacagtgcgtgtagttcggcgtggaaaaagtttaaagttaacagtggatgaccaacaggccatgacaggtcaaatggcaggtgatcatactaggctggagttccataacatagagactggcatcatcacagaacgacggtatctttcttctgtcccctccaacttcattggacacctgcagagcttgacatttaatggaatggcatacattgacctgtgtaaaaatggcgacatagattactgtgagcttaatgccagatttggcttcaggaacatcatagcagatcctgtcaccttcaagaccaaatcgagctatgttgccttagctaccttgcaagcctacacttctatgcatctttttttccagttcaagacaacatccctagatggattaattctatataacagtggggatggaaatgactttattgtggttgaattagttaaagggtacttacattacgtgtttgatttgggaaatggtgctaacctcatcaaaggaagctcaaataaacctctcaatgacaatcagtggcacaacgtgatgatatcaagggacaccagcaacctccacactgtaaagattgacacaaaaatcacaacgcaaatcaccgccggagccaggaacttagacctcaagagtgacttatatataggaggagtagctaaagaaacatacaaatccttaccaaaacttgtacatgccaaagaaggctttcaaggctgcctggcatcagttgatttaaatggacggcttccggacctcatctccgatgctcttttctgcaacggacagatcgagagaggatgtgaagggcccagcacaacctgccaagaggactcatgttccaatcaaggtgtgtgcttgcaacaatgggatggcttcagctgtgactgtagtatgacttccttcagtggaccactctgcaatgaccctgggacgacatatatctttagcaaaggtggtggacaaatcacgtataagtggcctcctaatgaccgacccagtacacgagcagacagactggccataggttttagcactgttcagaaagaagccgtattggtgcgagtggacagttcttcaggcttgggtgactacctagaactgcatatacaccagggaaaaattggagttaagtttaatgttgggacagatgacatcgccattgaagaatccaatgcaatcattaatgatgggaaataccatgtagttcgtttcacgaggagtggtggcaatgccacgttgcaggtggacagctggccagtgatcgagcgctaccctgcaggaaacaatgataacgagcgcctggcgattgctagacagcgaattccatatcgacttggtcgagtagttgatgaatggctactcgacaaagggcgtcagctcacaatcttcaatagccaagcaaccataataattggcgggaaagagcagggccagcccttccagggccagctctctgggctgtactacaatggcttgaaagttctgaatatggcagccgaaaacgatgccaacatcgccatagtgggaaatgtgagactggttggtgaagtgccttcctctatgacaactgagtcaacagccactgccatgcaatcagagatgtccacatcaattatggagactaccacgaccctggctactagcacagccagaagaggaaagcccccgacaaaagaacccattagccagaccacagatgacatccttgtggcctcagcagagtgtcccagcgatgatgaggacattgacccctgtgagccgagctcaggtgggttagccaacccaacccgagcaggcggcagagagccgtatccaggctcagcagaagtgatccgggagtccagcagcaccacgggtatggtcgttgggatagtagccgctgccgccctgtgcatccttatcctcctctatgccatgtacaagtacagaaaccgggatgaaggctcataccatgtggacgagagtcgaaactacatcagtaactcagcacagtccaatggggctgttgtaaaggagaaacaacccagcagtgcgaaaagctccaacaaaaataagaaaaacaaggataaagagtattatgtctga

SEQ ID NO: 50876 - DNA, 4644 bp, Artificial Sequence
  derived and/or modified sequence
atggggacagcactgctgcagaggggcggttgtttccttctctgtcttagtttgttactcctgggctgttgggctgaactggggtcagggttagagttccccggagccgagggccaatggacgcgctttccaaaatggaacgcttgctgcgagtctgaaatgtcattccagctcaagacgcgtagcgcccgaggcttggtgctatattttgacgatgagggcttttgtgactttctagagctgattctgacacgtgggggtagattacagctgtctttctcgatattctgtgccgagccagccaccctgttagcagacactccagtgaatgatggcgcttggcactctgttcggattagacgccagtttagaaatacaactctgttcatcgaccaagtggaggcaaaatgggtcgaggtcaaatctaagcgcagggacatgaccgttttcagcggcctcttcgtgggcggtttgccccctgaactccgagccgctgctctgaaacttaccctggcatccgtacgggagcgtgagccattcaagggctggatccgagatgtgcgggtaaatagctcccaggtgctgcccgtggactcaggcgaagttaaactggatgacgaacctccaaatagcggcggagggagcccatgcgaggcgggagaggaaggcgaggggggagtgtgtctgaatggtggggtttgcagtgtcgtagatgaccaggctgtgtgcgactgcagccggacaggctttagggggaaagactgcagtcaagagattaaattcggcttgcaatgcgtgcttcccgtactgctgcacgacaacgaccaaggtaagtactgctgtataaatacggctaagcccctcacggagaaggacaataacgtcgagggcctcgctcacctcatgatgggagatcaaggcaaatccaagggaaaggaggaatatattgctactttcaaagggagcgaatatttctgttatgatctctcacagaaccccatccagtccagttctgacgagataactttgtcgttcaagactcttcaacggaatggcctaatgctgcacaccggcaagtcagctgactacgtgaatttggcgctgaagaacggagccgtgagcctggttattaatttgggatcaggggctttcgaagccctagtggagccggtgaacggaaagttcaatgacaatgcttggcacgacgtgaaggtgacccggaatctccgacagcattctggcatcggccatgccatggtgaataaacttcactgctccgtgaccatttcagtggacgggattctgaccaccaccggctacacacaggaggactatactatgctgggcagcgacgattttttttacgtgggcggttctccatcaacggctgatctacccggaagcccggtgagcaacaatttcatgggatgccttaaggaagtagtctataaaaataacgacgtgcgattagaactgagcagattagccaaacagggagaccctaaaatgaaaatacacggcgttgtggccttcaaatgtgaaaatgtggccacactggaccccatcaccttcgaaacccctgagagcttcatcagcctgccaaagtggaacgcaaaaaaaacaggctccatctcttttgatttcagaacaacagagcctaacggtctgatcctgttcagccacggcaagcccagacaccagaaggacgcgaaacacccccagatgatcaaggtagattttttcgcaattgaaatgctggatgggcacctctacctcctcttggacatgggaagcggcaccatcaaaataaaagcactgcttaaaaaggtaaatgatggtgagtggtaccacgtggactttcaaagggatgggagaagcggcacgatcagtgtgaatacactccggaccccctacaccgcaccgggtgaatctgaaatactggacctggacgacgagttgtatctggggggactgcccgaaaacaaagccggtctggtgtttccgacagaagtgtggacggcattactgaattatggatacgtgggctgcatcagagatctgtttattgacggccaatcgaaggatattagacaaatggccgaagtacaatccacggctggggtgaaaccctcctgctctaaggaaacagctaagccctgcttgtctaatccatgcaagaacaacggaatgtgtcgggatggctggaacaggtacgtctgtgactgctccggaactgggtacttagggagatcatgtgaaagggaggctacagtgttgagctacgatgggtctatgtttatgaagattcagctgcctgtagtcatgcacaccgaggccgaagatgtcagtttgcggttcaggagtcagagagcctacggaattcttatggccactacaagcagagattccgccgacacccttaggctcgagttagacgctggaagagtgaagctgaccgtgaacttagactgtattcgtattaactgtaattcctccaaaggcccagaaacccttttcgccggatacaatctgaatgacaatgaatggcacacggtacgtgtagtgaggcgaggcaagagccttaagcttactgttgacgaccagcaggccatgaccggacagatggctggagatcacacgaggctggaatttcacaacatcgaaaccggcatcatcaccgaacgccgatatctgagcagtgtgccttctaacttcattgggcacctgcaatccctgactttcaacgggatggcatatatcgacctttgcaagaacggcgacatcgattactgtgaattgaatgcacggttcggctttagaaacatcatcgccgatccggtgactttcaaaaccaagtcatcttatgtggcattggctaccctgcaagcctatacgtccatgcacctgttctttcagttcaagactacaagcctggacggactcattctatataactctggcgacggtaacgacttcatcgtcgtcgaactggtgaaaggttacctacattacgtctttgatttgggcaacggggcaaatctaatcaagggctccagtaataaacccttaaacgacaaccagtggcacaatgtgatgatctctagagacacttctaatctgcatacggtaaagatcgatacgaagattacgacacagatcacagcaggggcaagaaatctggaccttaagtctgatctttatattggaggcgtggccaaagaaacatacaaatccttaccgaagttggtgcatgccaaggaagggttccagggatgcctggccagtgtagaccttaacggcagactcccagacttgatctccgatgcactgttctgcaatggacaaattgaacgcggttgcgaaggtcctagcaccacgtgccaagaggatagttgtagtaatcagggggtatgcctgcagcagtgggatgggttctcctgcgactgctctatgacaagcttttccgggccactgtgtaacgatcctggaactacctatatcttctccaagggaggaggtcaaataacgtacaagtggcccccaaacgatcgccctagcacgagagctgaccgactggctatcggatttagcaccgtgcagaaagaggctgtgcttgtgcgtgtcgatagctccagtgggcttggcgattatctggaattgcatatccatcagggtaagataggcgtcaagtttaacgtaggtacagacgacatcgccattgaagagtcaaatgccattatcaacgatggtaaataccatgtggtgaggtttacaagaagcggcggtaacgctactctgcaggtggactcctggccagtcattgagcggtatcccgctggtaataatgacaacgaacggctcgctatagcaaggcagcgcatcccatatcggctgggtcgggttgttgatgaatggctcctggataaagggaggcagttgacaatcttcaattctcaggcgacgatcatcattggaggcaaggagcagggccagccctttcaaggacagttatcaggcctctactataatgggttgaaggtccttaatatggccgctgaaaacgatgccaacattgccattgtggggaatgtgcgattggtcggtgaggttccttcctccatgaccacggagtctacagccaccgcaatgcagtccgaaatgagtacatcgattatggagaccaccacaaccctggccacctccacagctaggcggggaaaacctcccaccaaggagcccatctctcagacaacagatgacattctcgtggcatctgccgagtgccctagtgatgatgaggacattgatccctgcgaaccgtcctcagggggacttgcaaatcccacacgcgcaggcggaagggagccttatccagggtctgccgaagtcatacgcgagagtagcagcactactgggatggttgtcgggattgtggcagctgccgcactgtgtattctaatcctgctgtacgcaatgtacaaatatagaaacagagatgagggctcttatcacgtggatgaatctagaaattacatcagcaatagtgcacagagtaatggcgctgtggttaaggagaagcagccaagttctgccaagtcctctaataaaaataaaaaaaacaaggacaaggagtattacgtgtag

SEQ ID NO: 50877 - DNA, 4647 bp, Artificial Sequence
  derived and/or modified sequence
atgggtacggccctgctgcagagagggggatgcttcctgctgtgtctgagcctgctgctgctcggctgctgggcagaactcggctccggcctcgaatttcccggtgcagagggccagtggacccgattccctaagtggaacgcatgttgtgagtccgagatgagtttccagcttaaaactcggagtgctcgaggcctggttctctactttgatgacgagggcttctgcgattttttggagctgattttgacgcgaggtgggaggttgcagctcagtttttctattttctgtgctgaaccggctactctgctagctgacacaccggttaacgacggcgcttggcattcagtgcgaattcgtcgccaatttcgcaatacaacattgtttattgatcaggtggaagcaaagtgggtcgaggtgaaatctaaacgaagggacatgaccgttttcagcggcctgttcgtcggaggtctgccccctgaactgagagccgctgctctgaagctaaccctggctagcgtccgggaacgggaaccatttaagggctggattagggatgttagagtcaattcctcccaggttttgcccgtggattcaggcgaggtcaaattggacgacgaaccccctaatagtggcggaggaagtccctgcgaggcgggagaagagggggaagggggagtttgtctgaatggaggcgtatgttcagttgtggacgaccaggcggtctgtgattgcagtcgcactggcttccggggaaaggattgctcacaggagataaaattcggcctgcagtgcgtgctgcctgtcctcctccatgataatgaccaaggcaagtattgctgtataaacacagccaagcctctgaccgagaaaaaggacaacgattttgagggactcgctcacttgatgatgggagaccaggctaagagcaaacggaaggaagagtacatcgcaacgttcaaaggatctgagtatttctgttacgacctgtcccaaaatcctatacagtcgtccagtgatgaaataactctttcctttaaaacgctccagcggaatggcttaatgcttcacacagggaaatccgccgactatgtgaacttggcattgaaaaatggcgcagtatccctggttatcaatttaggaagtggtgctttcgaggctctcgtggagcctgtgaacgggaagtttaacgataatgcctggcatgacgtgaaggtcacgaggaatctgaggcaacacagcggaattggccatgccatggttaataagctccactgttccgtgacaatttcagtggacggaattctgaccactacaggatatactcaggaggattacacgatgctagggtctgacgacttcttctatgtcggcggtagccccagcacagccgacttgcccggatctcccgtgtctaataacttcatgggatgccttaaggaggtggtgtataaaaataacgatgtccggctggagttgtcccgcctggccaaacagggagacccaaagatgaaaatccatggggttgttgcctttaaatgtgagaacgtcgccactttggatcctatcaccttcgaaactcctgaatccttcatttccctccctaagtggaatgcaaagaagactggctcaatctcatttgacttccgcactacagagcccaacggcctcatcttgttctcacacggtaaacctcgacaccagaaggacgccaagcatcctcagatgattaaggtggacttcttcgccatcgaaatgctagacggccacctgtacttattactggatatgggcagcggaactataaaaataaaggctctgttgaagaaagtgaacgacggagaatggtatcacgtggacttccaaagagacgggaggtcaggcacgatctccgtcaatactctgcgaacgccttacacagcaccaggagagtcagagatcctggacctggatgacgaactgtatctgggagggctccctgagaataaggcgggactggtgtttccaacagaggtgtggactgcactgctcaattatgggtacgtaggctgcatcagggatttattcatcgatggccaaagcaaggatattagacagatggccgaagtgcagagtaccgccggtgtgaaacctagttgtagtaaggaaaccgccaaaccatgtttaagtaatccatgcaaaaataatgggatgtgccgggacggatggaacagatatgtttgcgactgtagtggcacaggataccttggtaggagctgcgaacgcgaggcaactgtgctgagctacgatggatcaatgttcatgaagattcagctgcccgtcgtgatgcacaccgaggccgaagatgtatccctgcggtttaggtcacagcgtgcttatggtatccttatggccaccacatcacgagactcagcagacactctgcgcttggagctcgacgctgggagggtgaagctcacggtgaatctcgattgcatccgcatcaattgtaacagctccaaaggcccagagactctgtttgcaggctacaacctgaacgacaacgagtggcacacagttagggtagtacggagaggaaaatctctgaaactaaccgtggacgaccagcaggcgatgaccggccagatggcaggagaccatacccgactggaatttcataatatcgagaccgggattataacggaacggcgttacctctccagcgtgccaagtaacttcattggccatctgcagagcctcacattcaacggaatggcatatatcgatctgtgcaagaacggggatattgactactgtgagctaaacgctcgcttcggtttccgcaacataattgccgaccccgtcactttcaagacgaagtcgtcatacgtagcattagcaaccctgcaggcttacacttccatgcacctctttttccagtttaaaaccacatctctggacgggttaatcctttataactctggggatgggaacgacttcattgtggtggaactagtgaaaggataccttcactacgtctttgacttgggcaatggtgcaaacctcatcaagggaagcagcaataagccattgaacgacaatcaatggcataacgtgatgatttcccgcgacacctcaaaccttcatacggttaagatcgacacaaaaatcacaactcagatcacggccggagctcggaacctggacttaaaaagtgacctttacataggcggagtggctaaagaaacatataagtccctgcctaaactcgtccatgctaaggagggtttccagggctgccttgcaagcgtcgatctcaacgggcgtctccctgaccttattagcgacgctctattctgcaatggccagatagaaagaggctgtgagggcccttccacgacttgccaagaggactcctgttctaaccagggagtatgcttgcagcagtgggatgggttctcgtgcgattgcagcatgacttcattctcgggccctctctgcaacgaccccggtactacttatatcttctcaaaaggaggcggtcagattacatacaaatggcccccaaacgaccgtccgagtacacgagccgatagactcgccattggattttccacagttcagaaggaagcggtcctggtgcgcgtcgacagttcatctggcctcggagactaccttgaactgcatatccatcaaggaaagatcggggttaagtttaatgtggggactgatgacattgccattgaggaatccaacgccattattaatgatggcaagtaccacgtggtccggtttaccagatcagggggtaatgctactcttcaggtggattcatggccggtcattgaaagataccctgccggaaacaacgacaatgagcgtcttgccatcgcgaggcaacgcatcccatataggctaggcagagtggtggatgagtggctgctcgataagggacggcagcttactattttcaacagccaggccacaattatcattggcggaaaagaacagggccaaccttttcaggggcagctgagtggcttgtactacaatggtctgaaagtattaaatatggctgctgaaaacgacgcaaacatcgcaatcgtggggaacgttcggctggttggtgaggtaccttctagcatgaccactgaaagtactgccactgccatgcagtctgagatgagcacttctataatggaaacgaccactactctcgccacctccaccgccaggcggggaaagcctcctaccaaggagcctatttcccagacaacagatgatatattggtggctagcgcagagtgtccatcagacgacgaagatatcgacccgtgtgaaccttcaagtggcggtctggcaaaccctacccgtgcgggaggtagagaaccctatccaggttctgccgaagtgatcagggaatcgtcatctaccaccggtatggttgttggcatagtggcagccgcagcactttgtattttaatactcctgtatgccatgtataaataccgaaatagggacgagggcagttaccatgtagatgagtcccggaattatatcagcaatagcgcacagtccaacggcgctgtggtgaaggagaagcaacccagctcagccaaatctagcaataagaataaaaaaaacaaggacaaagagtattacgtgtag

SEQ ID NO: 50878 - DNA, 4644 bp, Artificial Sequence
  derived and/or modified sequence
atgggcaccgccctgctgcagagaggcggctgcttcctgctgtgcctgagcctgctgctgctgggctgctgggccgagctgggcagcggcctggagttccccggcgccgagggccagtggaccagattccccaagtggaacgcctgctgcgagagcgagatgagcttccagctgaagaccagaagcgccagaggcctggtgctgtacttcgacgacgagggcttctgcgacttcctggagctgatcctgaccagaggcggcagactgcagctgagcttcagcatcttctgcgccgagcccgccaccctgctggccgacacccccgtgaacgacggcgcctggcacagcgtgagaatcagaagacagttcagaaacaccaccctgttcatcgaccaggtggaggccaagtgggtggaggtgaagagcaagagaagagacatgaccgtgttcagcggcctgttcgtgggcggcctgccccccgagctgagagccgccgccctgaagctgaccctggccagcgtgagagagagagagcccttcaagggctggatcagagacgtgagagtgaacagcagccaggtgctgcccgtggacagcggcgaggtgaagctggacgacgagccccccaacagcggcggcggcagcccctgcgaggccggcgaggagggcgagggcggcgtgtgcctgaacggcggcgtgtgcagcgtggtggacgaccaggccgtgtgcgactgcagcagaaccggcttcagaggcaaggactgcagccaggagatcaagttcggcctgcagtgcgtgctgcccgtgctgctgcacgacaacgaccagggcaagtactgctgcatcaacaccgccaagcccctgaccgagaaggacaacaacgtggagggcctggcccacctgatgatgggcgaccagggcaagagcaagggcaaggaggagtacatcgccaccttcaagggcagcgagtacttctgctacgacctgagccagaaccccatccagagcagcagcgacgagatcaccctgagcttcaagaccctgcagagaaacggcctgatgctgcacaccggcaagagcgccgactacgtgaacctggccctgaagaacggcgccgtgagcctggtgatcaacctgggcagcggcgccttcgaggccctggtggagcccgtgaacggcaagttcaacgacaacgcctggcacgacgtgaaggtgaccagaaacctgagacagcacagcggcatcggccacgccatggtgaacaagctgcactgcagcgtgaccatcagcgtggacggcatcctgaccaccaccggctacacccaggaggactacaccatgctgggcagcgacgacttcttctacgtgggcggcagccccagcaccgccgacctgcccggcagccccgtgagcaacaacttcatgggctgcctgaaggaggtggtgtacaagaacaacgacgtgagactggagctgagcagactggccaagcagggcgaccccaagatgaagatccacggcgtggtggccttcaagtgcgagaacgtggccaccctggaccccatcaccttcgagacccccgagagcttcatcagcctgcccaagtggaacgccaagaagaccggcagcatcagcttcgacttcagaaccaccgagcccaacggcctgatcctgttcagccacggcaagcccagacaccagaaggacgccaagcacccccagatgatcaaggtggacttcttcgccatcgagatgctggacggccacctgtacctgctgctggacatgggcagcggcaccatcaagatcaaggccctgctgaagaaggtgaacgacggcgagtggtaccacgtggacttccagagagacggcagaagcggcaccatcagcgtgaacaccctgagaaccccctacaccgcccccggcgagagcgagatcctggacctggacgacgagctgtacctgggcggcctgcccgagaacaaggccggcctggtgttccccaccgaggtgtggaccgccctgctgaactacggctacgtgggctgcatcagagacctgttcatcgacggccagagcaaggacatcagacagatggccgaggtgcagagcaccgccggcgtgaagcccagctgcagcaaggagaccgccaagccctgcctgagcaacccctgcaagaacaacggcatgtgcagagacggctggaacagatacgtgtgcgactgcagcggcaccggctacctgggcagaagctgcgagagagaggccaccgtgctgagctacgacggcagcatgttcatgaagatccagctgcccgtggtgatgcacaccgaggccgaggacgtgagcctgagattcagaagccagagagcctacggcatcctgatggccaccaccagcagagacagcgccgacaccctgagactggagctggacgccggcagagtgaagctgaccgtgaacctggactgcatcagaatcaactgcaacagcagcaagggccccgagaccctgttcgccggctacaacctgaacgacaacgagtggcacaccgtgagagtggtgagaagaggcaagagcctgaagctgaccgtggacgaccagcaggccatgaccggccagatggccggcgaccacaccagactggagttccacaacatcgagaccggcatcatcaccgagagaagatacctgagcagcgtgcccagcaacttcatcggccacctgcagagcctgaccttcaacggcatggcctacatcgacctgtgcaagaacggcgacatcgactactgcgagctgaacgccagattcggcttcagaaacatcatcgccgaccccgtgaccttcaagaccaagagcagctacgtggccctggccaccctgcaggcctacaccagcatgcacctgttcttccagttcaagaccaccagcctggacggcctgatcctgtacaacagcggcgacggcaacgacttcatcgtggtggagctggtgaagggctacctgcactacgtgttcgacctgggcaacggcgccaacctgatcaagggcagcagcaacaagcccctgaacgacaaccagtggcacaacgtgatgatcagcagagacaccagcaacctgcacaccgtgaagatcgacaccaagatcaccacccagatcaccgccggcgccagaaacctggacctgaagagcgacctgtacatcggcggcgtggccaaggagacctacaagagcctgcccaagctggtgcacgccaaggagggcttccagggctgcctggccagcgtggacctgaacggcagactgcccgacctgatcagcgacgccctgttctgcaacggccagatcgagagaggctgcgagggccccagcaccacctgccaggaggacagctgcagcaaccagggcgtgtgcctgcagcagtgggacggcttcagctgcgactgcagcatgaccagcttcagcggccccctgtgcaacgaccccggcaccacctacatcttcagcaagggcggcggccagatcacctacaagtggccccccaacgacagacccagcaccagagccgacagactggccatcggcttcagcaccgtgcagaaggaggccgtgctggtgagagtggacagcagcagcggcctgggcgactacctggagctgcacatccaccagggcaagatcggcgtgaagttcaacgtgggcaccgacgacatcgccatcgaggagagcaacgccatcatcaacgacggcaagtaccacgtggtgagattcaccagaagcggcggcaacgccaccctgcaggtggacagctggcccgtgatcgagagataccccgccggcaacaacgacaacgagagactggccatcgccagacagagaatcccctacagactgggcagagtggtggacgagtggctgctggacaagggcagacagctgaccatcttcaacagccaggccaccatcatcatcggcggcaaggagcagggccagcccttccagggccagctgagcggcctgtactacaacggcctgaaggtgctgaacatggccgccgagaacgacgccaacatcgccatcgtgggcaacgtgagactggtgggcgaggtgcccagcagcatgaccaccgagagcaccgccaccgccatgcagagcgagatgagcaccagcatcatggagaccaccaccaccctggccaccagcaccgccagaagaggcaagccccccaccaaggagcccatcagccagaccaccgacgacatcctggtggccagcgccgagtgccccagcgacgacgaggacatcgacccctgcgagcccagcagcggcggcctggccaaccccaccagagccggcggcagagagccctaccccggcagcgccgaggtgatcagagagagcagcagcaccaccggcatggtggtgggcatcgtggccgccgccgccctgtgcatcctgatcctgctgtacgccatgtacaagtacagaaacagagacgagggcagctaccacgtggacgagagcagaaactacatcagcaacagcgcccagagcaacggcgccgtggtgaaggagaagcagcccagcagcgccaagagcagcaacaagaacaagaagaacaaggacaaggagtactacgtgtag

SEQ ID NO: 50879 - DNA, 4647 bp, Artificial Sequence
  derived and/or modified sequence
atgggcaccgccctgctgcagagaggcggctgcttcctgctgtgcctgagcctgctgctgctgggctgctgggccgagctgggcagcggcctggagttccccggcgccgagggccagtggaccagattccccaagtggaacgcctgctgcgagagcgagatgagcttccagctgaagaccagaagcgccagaggcctggtgctgtacttcgacgacgagggcttctgcgacttcctggagctgatcctgaccagaggcggcagactgcagctgagcttcagcatcttctgcgccgagcccgccaccctgctggccgacacccccgtgaacgacggcgcctggcacagcgtgagaatcagaagacagttcagaaacaccaccctgttcatcgaccaggtggaggccaagtgggtggaggtgaagagcaagagaagagacatgaccgtgttcagcggcctgttcgtgggcggcctgccccccgagctgagagccgccgccctgaagctgaccctggccagcgtgagagagagagagcccttcaagggctggatcagagacgtgagagtgaacagcagccaggtgctgcccgtggacagcggcgaggtgaagctggacgacgagccccccaacagcggcggcggcagcccctgcgaggccggcgaggagggcgagggcggcgtgtgcctgaacggcggcgtgtgcagcgtggtggacgaccaggccgtgtgcgactgcagcagaaccggcttcagaggcaaggactgcagccaggagatcaagttcggcctgcagtgcgtgctgcccgtgctgctgcacgacaacgaccagggcaagtactgctgcatcaacaccgccaagcccctgaccgagaagaaggacaacgacttcgagggcctggcccacctgatgatgggcgaccaggccaagagcaagagaaaggaggagtacatcgccaccttcaagggcagcgagtacttctgctacgacctgagccagaaccccatccagagcagcagcgacgagatcaccctgagcttcaagaccctgcagagaaacggcctgatgctgcacaccggcaagagcgccgactacgtgaacctggccctgaagaacggcgccgtgagcctggtgatcaacctgggcagcggcgccttcgaggccctggtggagcccgtgaacggcaagttcaacgacaacgcctggcacgacgtgaaggtgaccagaaacctgagacagcacagcggcatcggccacgccatggtgaacaagctgcactgcagcgtgaccatcagcgtggacggcatcctgaccaccaccggctacacccaggaggactacaccatgctgggcagcgacgacttcttctacgtgggcggcagccccagcaccgccgacctgcccggcagccccgtgagcaacaacttcatgggctgcctgaaggaggtggtgtacaagaacaacgacgtgagactggagctgagcagactggccaagcagggcgaccccaagatgaagatccacggcgtggtggccttcaagtgcgagaacgtggccaccctggaccccatcaccttcgagacccccgagagcttcatcagcctgcccaagtggaacgccaagaagaccggcagcatcagcttcgacttcagaaccaccgagcccaacggcctgatcctgttcagccacggcaagcccagacaccagaaggacgccaagcacccccagatgatcaaggtggacttcttcgccatcgagatgctggacggccacctgtacctgctgctggacatgggcagcggcaccatcaagatcaaggccctgctgaagaaggtgaacgacggcgagtggtaccacgtggacttccagagagacggcagaagcggcaccatcagcgtgaacaccctgagaaccccctacaccgcccccggcgagagcgagatcctggacctggacgacgagctgtacctgggcggcctgcccgagaacaaggccggcctggtgttccccaccgaggtgtggaccgccctgctgaactacggctacgtgggctgcatcagagacctgttcatcgacggccagagcaaggacatcagacagatggccgaggtgcagagcaccgccggcgtgaagcccagctgcagcaaggagaccgccaagccctgcctgagcaacccctgcaagaacaacggcatgtgcagagacggctggaacagatacgtgtgcgactgcagcggcaccggctacctgggcagaagctgcgagagagaggccaccgtgctgagctacgacggcagcatgttcatgaagatccagctgcccgtggtgatgcacaccgaggccgaggacgtgagcctgagattcagaagccagagagcctacggcatcctgatggccaccaccagcagagacagcgccgacaccctgagactggagctggacgccggcagagtgaagctgaccgtgaacctggactgcatcagaatcaactgcaacagcagcaagggccccgagaccctgttcgccggctacaacctgaacgacaacgagtggcacaccgtgagagtggtgagaagaggcaagagcctgaagctgaccgtggacgaccagcaggccatgaccggccagatggccggcgaccacaccagactggagttccacaacatcgagaccggcatcatcaccgagagaagatacctgagcagcgtgcccagcaacttcatcggccacctgcagagcctgaccttcaacggcatggcctacatcgacctgtgcaagaacggcgacatcgactactgcgagctgaacgccagattcggcttcagaaacatcatcgccgaccccgtgaccttcaagaccaagagcagctacgtggccctggccaccctgcaggcctacaccagcatgcacctgttcttccagttcaagaccaccagcctggacggcctgatcctgtacaacagcggcgacggcaacgacttcatcgtggtggagctggtgaagggctacctgcactacgtgttcgacctgggcaacggcgccaacctgatcaagggcagcagcaacaagcccctgaacgacaaccagtggcacaacgtgatgatcagcagagacaccagcaacctgcacaccgtgaagatcgacaccaagatcaccacccagatcaccgccggcgccagaaacctggacctgaagagcgacctgtacatcggcggcgtggccaaggagacctacaagagcctgcccaagctggtgcacgccaaggagggcttccagggctgcctggccagcgtggacctgaacggcagactgcccgacctgatcagcgacgccctgttctgcaacggccagatcgagagaggctgcgagggccccagcaccacctgccaggaggacagctgcagcaaccagggcgtgtgcctgcagcagtgggacggcttcagctgcgactgcagcatgaccagcttcagcggccccctgtgcaacgaccccggcaccacctacatcttcagcaagggcggcggccagatcacctacaagtggccccccaacgacagacccagcaccagagccgacagactggccatcggcttcagcaccgtgcagaaggaggccgtgctggtgagagtggacagcagcagcggcctgggcgactacctggagctgcacatccaccagggcaagatcggcgtgaagttcaacgtgggcaccgacgacatcgccatcgaggagagcaacgccatcatcaacgacggcaagtaccacgtggtgagattcaccagaagcggcggcaacgccaccctgcaggtggacagctggcccgtgatcgagagataccccgccggcaacaacgacaacgagagactggccatcgccagacagagaatcccctacagactgggcagagtggtggacgagtggctgctggacaagggcagacagctgaccatcttcaacagccaggccaccatcatcatcggcggcaaggagcagggccagcccttccagggccagctgagcggcctgtactacaacggcctgaaggtgctgaacatggccgccgagaacgacgccaacatcgccatcgtgggcaacgtgagactggtgggcgaggtgcccagcagcatgaccaccgagagcaccgccaccgccatgcagagcgagatgagcaccagcatcatggagaccaccaccaccctggccaccagcaccgccagaagaggcaagccccccaccaaggagcccatcagccagaccaccgacgacatcctggtggccagcgccgagtgccccagcgacgacgaggacatcgacccctgcgagcccagcagcggcggcctggccaaccccaccagagccggcggcagagagccctaccccggcagcgccgaggtgatcagagagagcagcagcaccaccggcatggtggtgggcatcgtggccgccgccgccctgtgcatcctgatcctgctgtacgccatgtacaagtacagaaacagagacgagggcagctaccacgtggacgagagcagaaactacatcagcaacagcgcccagagcaacggcgccgtggtgaaggagaagcagcccagcagcgccaagagcagcaacaagaacaagaagaacaaggacaaggagtactacgtgtag

SEQ ID NO: 50880 - protein, 131 aa, Artificial Sequence
  derived and/or modified sequence
MTRLYYRDASACVIMFDVTNATTFSNSQRWKQDLDSKLTLPNGEPVPCLLLANKCDLSPWAVSRDQIDRFSKENGFTGWTETSVKENKNINEAMRVLIEKMMRNSTEDIMSLSTQGDYINLQTKSSSWSCC

SEQ ID NO: 50881 - protein, 179 aa, Artificial Sequence
  derived and/or modified sequence
MGSRDHLFKVLVVGDAAVGKTSLVQRYSQDSFSKHYKSTVGGQERFTSMTRLYYRDASACVIMFDVTNATTFSNSQRWKQDLDSKLTLPNGEPVPCLLLANKCDLSPWAVSRDQIDRFSKENGFTGWTETSVKENKNINEAMRVLIEKMMRNSTEDIMSLSTQGDYINLQTKSSSWSCC

SEQ ID NO: 50882 - DNA, 540 bp, Artificial Sequence
  derived and/or modified sequence
atggggtcccgcgatcaccttttcaaggttctggtagtgggcgatgccgctgtcggcaagacatccttggtgcaacgctactcacaagactccttctcaaagcactacaagtctaccgtggggggacaggagcggtttacatccatgactaggctatattatcgcgatgcctctgcatgcgtcattatgttcgacgtgaccaatgccaccaccttctcaaattcacagcgatggaagcaggacctggactcaaagctaactctgcctaacggagaaccagtaccgtgcctcctgcttgctaacaagtgcgatctctccccatgggccgttagtcgcgatcagattgatcgattttctaaagaaaatggtttcacgggttggaccgaaaccagcgtgaaagaaaacaaaaatatcaacgaggctatgcgtgttctgattgagaagatgatgagaaattctaccgaagacattatgtctctgagcacccagggtgactatatcaatctccaaactaagtcatcctcctggtcttgctgttag

SEQ ID NO: 50883 - DNA, 540 bp, Artificial Sequence
  derived and/or modified sequence
atgggcagccgggaccacctgttcaaggtgctggtggtgggagatgctgctgtgggcaagaccagcctggtgcagcgctacagccaggacagcttcagcaagcactacaagagcacagtgggcggccaggagcgcttcacctccatgacccggctgtactacagagatgccagcgcctgcgtcatcatgtttgatgtgaccaatgccaccaccttcagcaacagccagcgctggaagcaggacctggacagcaagctgaccctgcccaacggggagcctgtgccctgcctgctgctggccaacaagtgtgacctgagcccctgggccgtgtcccgggaccagattgaccgcttcagcaaagaaaatggcttcaccggctggacagagacctctgtgaaggagaacaagaacatcaatgaggccatgagggtgctgattgagaagatgatgaggaacagcacagaggacatcatgagcctgagcacccagggcgactacatcaacctgcagaccaagagcagctcctggagctgctgctag

SEQ ID NO: 50884 - DNA, 540 bp, Artificial Sequence
  derived and/or modified sequence
atgggcagccgggaccacctgttcaaggtgctggtggtgggcgacgccgccgtgggaaagactagcctggtccagcgctatagccaggattccttctccaaacattacaagtccactgtgggaggacaggaacggttcacctccatgactaggctgtactaccgagacgcttccgcttgtgttatcatgtttgatgttaccaatgcaaccactttcagtaattcacagagatggaaacaagacctggacagtaaacttactctaccaaatggggaacccgtcccttgcctcttgctcgccaacaagtgtgatctgtcaccctgggctgtcagcagagatcagatagatcgcttcagtaaagaaaacgggttcactggatggacagagaccagtgtgaaagaaaataaaaatatcaatgaagccatgcgcgtgctgattgagaagatgatgagaaattctactgaagatatcatgtctttgagtacgcagggtgactatataaacctacaaacaaagagcagtagttggtcttgctgctag

SEQ ID NO: 50885 - DNA, 540 bp, Artificial Sequence
  derived and/or modified sequence
atgggttctagggaccatctgtttaaggtacttgtggtgggagacgcagcggttggcaaaacctctcttgtgcaaaggtactcccaggattctttcagcaagcactataagagcacagtcggagggcaggagagatttaccagcatgacacgcttgtattaccgcgatgcgagtgcctgtgtgattatgtttgatgtcactaacgccacaacattttcaaattcccagagatggaagcaggatctcgactctaagctaaccctgcccaatggagagcccgttccctgtcttttactggccaacaaatgcgatcttagcccgtgggcagtcagtagagatcagatcgacaggttcagcaaagagaacggcttcacgggatggaccgagacctctgtcaaggagaacaagaacataaacgaggcaatgagggtgctgattgagaagatgatgcgaaacagtacagaggacattatgagcctctcaacccagggcgattacataaaccttcagaccaagtcatcatcttggagctgttgctag

SEQ ID NO: 50886 - DNA, 1441 bp, Artificial Sequence
  derived and/or modified sequence
agtcaggccaggagggggtggggaaggtgcgaacagccgggggctcggagctcgcgccctgcgccccacccaggttgcggccgcccggggaggaagcgcgtataggttgagtgcaaagtttccttttttgctttctcgtcagagcagcccagacaggcggtgggtgggaatgcctcacttcagtttgaagagggtccggatccaaaggggttaaaacgagcgacccccgatccccgaccacacttcccgcctccctaaaacgcacaccccgctagccatgggcagccgcgaccacctgttcaaagtgctggtggtgggggacgccgcagtgggcaagacgtcgctggtgcagcgatattcccaggacagcttcagcaaacactacaagtccacggtgggagggcaggagcgcttcacctctatgacacgattgtattatcgggatgcctctgcctgtgttattatgtttgacgttaccaatgccactaccttcagcaacagccagaggtggaaacaggacctagacagcaagctcacactacccaatggagagccggtgccctgcctgctcttggccaacaagtgtgatctgtccccttgggcagtgagccgggaccagattgaccggttcagtaaagagaacggtttcacaggttggacagaaacatcagtcaaggagaacaaaaatattaatgaggctatgagagtcctcattgaaaagatgatgagaaattccacagaagatatcatgtctttgtccacccaaggggactacatcaatctacaaaccaagtcctccagctggtcctgctgctagtagtgtttggcttattttccatcccagttctgggaggtcttttaagtctcttccctttggttgcccacctgacaattttattaagtacatttgaattgtctcctgactactgtccagtaaggaggcccattgtcacttagaaaagacacctggaacccatgtgcatttctgcatctcctggattagcctttcacatgttgctggctcacattagtgccagttagtgccttcggtgtaagatcttctcatcagccctcaatttgtgatccggaattttatgagaaggattagaaatcagcacctgcgttttagagatcataattctcacctacttctgagcttatttttccatttgatattcattgatatcatgacttccaattgagaggaaaatgagatcaaatgtcatttcccaaatttcttgtaggccgttgtttcagattctttctgtcttggaatgtaaacatctgattctggaatgcagaaggagggggtctgggcatctgtggatttttggctactagaagtgtcccagaagtcactgtatttttgaaacttctaacgtcataattaagtttctcttgtcttggcatcaagaatagtcaagttttttggccgggcatg

SEQ ID NO: 50887 - DNA, 540 bp, Artificial Sequence
  derived and/or modified sequence
atgggcagcagagaccacctgttcaaggtgctggtggtgggcgacgccgccgtgggcaagaccagcctggtgcagagatacagccaggacagcttcagcaagcactacaagagcaccgtgggcggccaggagagattcaccagcatgaccagactgtactacagagacgccagcgcctgcgtgatcatgttcgacgtgaccaacgccaccaccttcagcaacagccagagatggaagcaggacctggacagcaagctgaccctgcccaacggcgagcccgtgccctgcctgctgctggccaacaagtgcgacctgagcccctgggccgtgagcagagaccagatcgacagattcagcaaggagaacggcttcaccggctggaccgagaccagcgtgaaggagaacaagaacatcaacgaggccatgagagtgctgatcgagaagatgatgagaaacagcaccgaggacatcatgagcctgagcacccagggcgactacatcaacctgcagaccaagagcagcagctggagctgctgctag

SEQ ID NO: 50888 - protein, 631 aa, Artificial Sequence
  derived and/or modified sequence
MKFAEHLSAHITPEWRKQYIQYEAFKDMLYSAQDQAPSVEVTDEDTVKRYFAKFEEKFFQTCEKELAKINTFYSEKLAEAQRRFATLQNELQSSLDAQKESTGVTTLRQRRKPVFHLSHEERVQHRNIKDLKLAFSEFYLSLILLQNYQNLNFTGFRKILKKHDKILETSRGADWRVAHVEVAPFYTCKKINQLISETEAVVTNELEDGDRQKAMKRLRVPPLGAAQPAPAWTTFRVGLFCGIFIVLNITLVLAAVFKLETDRSIWPLIRIYRGGFLLIEFLFLLGINTYGWRQAGVNHVLIFELNPRSNLSHQHLFEIAGFLGILWCLSLLACFFAPISVIPTYVYPLALYGFMVFFLINPTKTFYYKSRFWLLKLLFRVFTAPFHKVGFADFWLADQLNSLSVILMDLEYMICFYSLELKWDESKGLLPNNSEERGHSDTMVFFYLWIVFYIISSCYTLIWDLKMDWGLFDKNAGENTFLREEIVYPQKAYYYCAIIEDVILRFAWTIQISITSTTLLPHSGDIIATVFAPLEVFRRFVWNFFRLENEHLNNCGEFRAVRDISVAPLNADDQTLLEQMMDQDDGVRNRQKNRSWKYNQSISLRRPRLASQSKARDTKVLIEDTDDEANT

SEQ ID NO: 50889 - DNA, 1896 bp, Artificial Sequence
  derived and/or modified sequence
atgaagttcgccgagcacctgagcgcccacatcacccccgagtggagaaagcagtacatccagtacgaggccttcaaggacatgctgtacagcgcccaggaccaggcccccagcgtggaggtgaccgacgaggacaccgtgaagagatacttcgccaagttcgaggagaagttcttccagacctgcgagaaggagctggccaagatcaacaccttctacagcgagaagctggccgaggcccagagaagattcgccaccctgcagaacgagctgcagagcagcctggacgcccagaaggagagcaccggcgtgaccaccctgagacagagaagaaagcccgtgttccacctgagccacgaggagagagtgcagcacagaaacatcaaggacctgaagctggccttcagcgagttctacctgagcctgatcctgctgcagaactaccagaacctgaacttcaccggcttcagaaagatcctgaagaagcacgacaagatcctggagaccagcagaggcgccgactggagagtggcccacgtggaggtggcccccttctacacctgcaagaagatcaaccagctgatcagcgagaccgaggccgtggtgaccaacgagctggaggacggcgacagacagaaggccatgaagagactgagagtgccccccctgggcgccgcccagcccgcccccgcctggaccaccttcagagtgggcctgttctgcggcatcttcatcgtgctgaacatcaccctggtgctggccgccgtgttcaagctggagaccgacagaagcatctggcccctgatcagaatctacagaggcggcttcctgctgatcgagttcctgttcctgctgggcatcaacacctacggctggagacaggccggcgtgaaccacgtgctgatcttcgagctgaaccccagaagcaacctgagccaccagcacctgttcgagatcgccggcttcctgggcatcctgtggtgcctgagcctgctggcctgcttcttcgcccccatcagcgtgatccccacctacgtgtaccccctggccctgtacggcttcatggtgttcttcctgatcaaccccaccaagaccttctactacaagagcagattctggctgctgaagctgctgttcagagtgttcaccgcccccttccacaaggtgggcttcgccgacttctggctggccgaccagctgaacagcctgagcgtgatcctgatggacctggagtacatgatctgcttctacagcctggagctgaagtgggacgagagcaagggcctgctgcccaacaacagcgaggagagaggccacagcgacaccatggtgttcttctacctgtggatcgtgttctacatcatcagcagctgctacaccctgatctgggacctgaagatggactggggcctgttcgacaagaacgccggcgagaacaccttcctgagagaggagatcgtgtacccccagaaggcctactactactgcgccatcatcgaggacgtgatcctgagattcgcctggaccatccagatcagcatcaccagcaccaccctgctgccccacagcggcgacatcatcgccaccgtgttcgcccccctggaggtgttcagaagattcgtgtggaacttcttcagactggagaacgagcacctgaacaactgcggcgagttcagagccgtgagagacatcagcgtggcccccctgaacgccgacgaccagaccctgctggagcagatgatggaccaggacgacggcgtgagaaacagacagaagaacagaagctggaagtacaaccagagcatcagcctgagaagacccagactggccagccagagcaaggccagagacaccaaggtgctgatcgaggacaccgacgacgaggccaacacctag

SEQ ID NO: 50890 - DNA, 1896 bp, Artificial Sequence
  derived and/or modified sequence
atgaagtttgcggagcatctatccgcgcacatcaccccggaatggaggaaacaatacatccagtacgaagcctttaaggatatgctgtattctgcacaagatcaagcgccttccgtggaagtgaccgatgaggatacagtgaaaaggtactttgccaagtttgaggagaaattctttcaaacgtgcgagaaggaactggccaaaataaatactttctatagcgagaagctggctgaagcccagcgacgtttcgcgacactgcagaacgaactgcagagtagcctcgacgctcaaaaggaaagtactggcgtgactactctgaggcagcgccgaaagccagtgtttcacctgtcccatgaagaaagagttcagcataggaatattaaggatctgaagttggcattctcagagttttatctgagcctcatcctactgcagaattaccagaaccttaatttcactggatttcggaagatactgaagaaacatgataagattttggaaaccagccggggtgccgactggcgcgtggcccacgttgaagtggcgcccttctacacatgtaaaaagattaatcagctgattagtgagaccgaggcggtggtcaccaacgaactcgaagacggggataggcaaaaggccatgaagaggctgcgggtcccgcccctcggggccgcccagccggcgccagcctggacaacattccgcgtgggactgttctgtggcatctttatcgtattgaatatcactctcgtccttgcagccgtgtttaaactggagactgaccggagcatctggccccttatccggatctatcgcggcggctttttgctcatcgagttcctatttctccttggcatcaacacctacggatggagacaggccggggtcaatcacgtcctgattttcgaactaaacccgcgtagtaatttaagtcaccagcacttgtttgaaattgctggattcctgggtattctctggtgtctctctctgctggcttgtttcttcgcaccgattagcgtgatacctacatacgtttacccacttgccctgtacgggttcatggtcttcttcctcattaatccaacaaagaccttttactacaaatccagattttggcttcttaagctgttgtttagggttttcactgcccctttccacaaggtgggcttcgcagatttttggttggcggatcagcttaattccctgagtgtgattctcatggacctggaatatatgatctgtttttattccctggaactaaagtgggacgaaagtaaaggtctgcttcccaataattctgaagaacgcggtcactccgataccatggtcttcttctacctttggattgtgttctacattatctctagctgttataccctcatctgggacctaaagatggattgggggctgttcgataagaatgcaggggagaacaccttcctgcgcgaggaaatcgtgtaccctcaaaaagcatactattactgcgctatcatcgaggacgtgatcctgagatttgcctggactattcagatctcaattacctctacaacactgctccctcattccggcgatattatcgctaccgtttttgcgccgttagaggttttccgtcggtttgtgtggaacttcttcaggttggaaaatgaacatctaaacaattgtggtgaattcagggcggtgcgagatattagtgtagcccccctgaacgctgacgaccaaactctactggagcagatgatggatcaggacgatggagtacgtaatcgccagaagaaccgcagctggaagtataaccagtctatttctctgagacgaccacgtctggcctcccagtccaaggcccgagataccaaggtactgattgaagatactgatgacgaggcgaatacctag

SEQ ID NO: 50891 - DNA, 1896 bp, Artificial Sequence
  derived and/or modified sequence
atgaagtttgctgagcacctgagcgcccacatcaccccagagtggaggaagcagtacatccagtatgaggccttcaaggacatgctgtacagcgcccaggaccaggcccccagcgtggaggtgacagatgaggacacagtgaagcgctactttgccaagtttgaggagaagttcttccagacctgtgagaaggagctggccaagatcaacaccttctacagcgagaagctggccgaggcccagaggagatttgccaccctgcagaatgagctgcagagcagcctggatgcccagaaggagagcactggagtgaccaccctgcggcagaggaggaagcctgtgttccacctgagccatgaggagcgggtgcagcacaggaacatcaaggacctgaagctggccttcagcgagttctacctgagcctcatcctgctgcagaactaccagaacctgaacttcaccggcttcaggaagatcctgaagaagcatgacaagatcctggagaccagcagaggagctgactggagggtggcccacgtggaggtggcccccttctacacctgcaagaagatcaaccagctgatcagcgagacagaggccgtggtgaccaatgagctggaggatggagaccggcagaaggccatgaagaggctgcgggtgccccccctgggcgccgcccagcctgccccagcctggaccaccttccgggtgggcctcttctgtggcatcttcatcgtgctgaacatcaccctggtgctggccgctgtgttcaagctggagacagacaggagcatctggcccctcatccgcatctaccggggcggcttcctgctgattgagttcctgttcctgctgggcatcaacacctacggctggaggcaggccggcgtgaaccacgtgctgatctttgagctgaaccccaggagcaacctgagccaccagcacctgtttgaaattgctggcttcctgggcatcctgtggtgcctgagcctgctggcctgcttctttgcccccatcagcgtcatccccacctacgtgtaccccctggccctgtatggcttcatggtgttcttcctgatcaaccccaccaagaccttctactacaagagccgcttctggctgctgaagctgctcttccgggtcttcaccgcccccttccacaaggtgggctttgctgacttctggctggccgaccagctgaacagcctgagcgtcatcctgatggacctggagtacatgatctgcttctacagcctggagctgaagtgggatgagagcaagggcctgctgcccaacaacagcgaggagcggggccacagcgacaccatggtgttcttctacctgtggatcgtgttctacatcatcagcagctgctacaccctcatctgggacctgaagatggactggggcctgtttgacaagaatgctggggagaacaccttcctgcgggaggagatcgtgtacccccagaaggcctactactactgtgccatcattgaagatgtgatcctgcgctttgcctggaccatccagatcagcatcaccagcaccaccctgctgccccacagcggggacatcatcgccaccgtgtttgcccccctggaggtgttccgccgctttgtgtggaacttcttccggctggagaatgagcacctgaacaactgtggggagttccgggctgtgcgggacatctctgtggcccccctgaatgctgatgaccagaccctgctggagcagatgatggaccaggatgatggagtgaggaaccggcagaagaacagatcctggaagtacaaccagagcatcagcctgcggcggccccggctggccagccagagcaaggcccgggacaccaaggtgctgattgaggacacagatgatgaggccaacacctag

SEQ ID NO: 50892 - DNA, 1896 bp, Artificial Sequence
  derived and/or modified sequence
atgaagttcgccgagcacctgagcgcccacatcacccccgagtggcggaaacagtatattcagtacgaggcgttcaaggatatgttatactccgcccaggaccaagcgcctagcgtggaggtgaccgacgaagatacggtgaagagatatttcgccaaatttgaagaaaagttcttccagacttgcgaaaaggaactggcgaagatcaacactttctacagcgagaaactggccgaggcgcaaagacggtttgccacgctccaaaatgaactgcagagtagcctcgatgctcagaaggagtctacaggagtgactacactccgtcaacgccgcaagccagtcttccacctgtctcatgaggaacgggtacagcaccgaaatattaaggatcttaagcttgctttttccgaattctatctctccctcatcttactgcagaactaccaaaacctgaatttcaccggtttccgtaagatcctgaaaaaacacgataaaatcttggaaacctcgagaggggcagattggcgcgtggctcacgtggaggtagcacccttctacacctgtaagaaaattaatcaactgatttccgagaccgaagccgttgtgacaaacgagctggaggacggggaccggcagaaagccatgaaacgcctgcgagtcccccctctcggggccgctcagcccgccccagcttggaccactttcagagttgggttgttttgtggtatcttcatagtgctaaacataacactggtcctcgctgctgtgtttaagctagagacagatcggtcgatctggcctctgatacgcatctacagaggtggatttcttcttattgagtttctgttcttattgggcatcaacacgtacggctggagacaagcgggagtcaatcacgtacttatctttgaactgaatccacgcagcaatttatcccaccaacatctgtttgaaatagcaggcttcttaggaatcttatggtgtctttctctcctggcatgcttcttcgcgccaatttctgtcattcccacctatgtgtaccctcttgcactgtacggcttcatggttttcttcctcataaatcctaccaagacgttttactacaaaagtcgcttctggctactcaagctgctctttagagtttttacagcaccctttcataaggtcggatttgctgacttctggctcgctgaccaactgaacagcctgtccgtcatcctgatggatctggaatatatgatctgtttctattctctggaactgaaatgggacgaatccaaaggactgctccccaataacagcgaagaacgggggcacagtgatacgatggtctttttctacctctggattgtcttctacatcatttccagctgctataccctaatctgggacttgaaaatggactgggggctgttcgacaagaacgctggcgaaaatactttcctgcgcgaagaaatagtctatccacaaaaggcctactactactgcgccatcattgaggatgttatactgagattcgcatggactatacagatttctatcacctcaacgactttgttgccacactctggcgatattatagcaacggtcttcgcgccgctcgaggttttccgtaggtttgtctggaatttctttcgtttggaaaatgaacacctgaacaactgcggggagttcagggccgttcgagacatctctgttgctcctctgaacgctgatgaccaaacactcctggagcaaatgatggatcaggacgacggcgtgcgaaaccggcagaagaaccgcagctggaaatataaccagagtattagcttgcgaagacctagactggcatcacagtccaaggcccgggatacgaaggtgctgatcgaagacaccgacgacgaggccaacacttag

SEQ ID NO: 50893 - DNA, 1896 bp, Artificial Sequence
  derived and/or modified sequence
atgaagttcgccgagcacctgagtgcccacataaccccagagtggcggaaacagtatatacagtacgaggcctttaaggacatgctgtactcagctcaggaccaggcaccttctgtggaagtcaccgacgaggatactgtaaagcgttacttcgccaaatttgaggaaaagttctttcagacatgtgagaaagaattggctaaaatcaatacgttttactcagagaagcttgctgaggcccagcggaggttcgccaccctccagaatgagttgcagtcatcactggacgcacagaaagaatctacaggagttacgaccctgcgtcagaggagaaagcccgtttttcacctatcgcatgaagagcgggtgcaacatcgcaatataaaggatctgaaacttgccttctctgagttttatctgagtttgattctgctgcaaaactatcagaatcttaactttaccgggttccgaaagattctgaaaaaacatgataagatcttagaaacaagcaggggcgctgactggcgggtggcccatgtcgaggttgctcctttctacacttgtaaaaaaataaaccagctgattagtgagacagaggctgtggtgactaacgaacttgaagacggggatcggcagaaggcaatgaaacgattaagggtcccgccactgggggcagcccagcctgcccctgcttggactacttttagagtcgggctgttttgcgggatctttatcgttctcaacattacgctggtcctggccgcagtctttaaactcgagactgatagatcaatttggcctttgataagaatctatagaggtggcttcttgctgatcgaatttttgtttctactgggcataaatacatatgggtggagacaggccggagtaaaccatgttctgatcttcgagttgaaccccaggtccaatctgagtcaccagcatctgtttgagatagctggctttcttgggattctgtggtgtctttctctcctggcctgctttttcgcccctataagcgtgatccccacttacgtgtaccctctggccctgtatgggttcatggtcttcttcttaatcaatccaacgaaaactttctattacaagagtcggttctggttacttaagttgctgttcagggtatttacagccccttttcataaggtcggattcgcagacttttggctggccgaccagttgaactctctgagtgtaatcctgatggaccttgagtacatgatttgcttctactccctcgaactaaaatgggacgagagtaagggacttctccccaataacagtgaagaaagagggcactctgacaccatggtgttcttctatctatggatagtcttctacattatcagctcctgttatacacttatttgggaccttaagatggactggggactgtttgacaagaacgccggtgagaacacttttctaagagaggaaatagtttaccctcagaaggcgtactattactgcgcaatcatcgaggacgtcatcctgcggtttgcttggaccatccagattagcattacaagtactacactgctgccccattccggcgatatcatagccaccgtttttgcccctcttgaggtgtttaggaggtttgtgtggaactttttccgcctggagaacgagcacttgaataattgcggggagttccgggctgtaagggatataagcgtcgccccactgaacgccgacgatcagacattactcgaacagatgatggatcaggatgatggtgtcaggaatagacagaaaaataggtcgtggaaatacaaccaatccatctctctccggagaccaaggctcgcctcccagtcgaaagctagggataccaaggtgttgatagaggacaccgacgatgaagccaatacatag

SEQ ID NO: 50894 - DNA, 4126 bp, Artificial Sequence
  derived and/or modified sequence
ggaggaagatggcgggcgggctgctctgaagagacctcggcggcggcggaggaggagagaagcgcagcgccgcgccgcgccggggcccatgtggggaggagtcggagtcgctgttgccgccgccgcctgtagctgctggacccgagtgggagtgagggggaaacggcaggatgaagttcgccgagcacctctccgcgcacatcactcccgagtggaggaagcaatacatccagtatgaggctttcaaggatatgctgtattcagctcaggaccaggcaccttctgtggaagttacagatgaggacacagtaaagaggtattttgccaagtttgaagagaagtttttccaaacctgtgaaaaagaacttgccaaaatcaacacattttattcagagaagctcgcagaggctcagcgcaggtttgctacacttcagaatgagcttcagtcatcactggatgcacagaaagaaagcactggtgttactacgctgcgacaacgcagaaagccagtcttccacttgtcccatgaggaacgtgtccaacatagaaatattaaagaccttaaactggccttcagtgagttctacctcagtctaatcctgctgcagaactatcagaatctgaattttacagggtttcgaaaaatcctgaaaaagcatgacaagatcctggaaacatctcgtggagcagattggcgagtggctcacgtagaggtggccccattttatacatgcaagaaaatcaaccagcttatctctgaaactgaggctgtagtgaccaatgaacttgaagatggtgacagacaaaaggctatgaagcgtttacgtgtcccccctttgggagctgctcagcctgcaccagcatggactacttttagagttggcctattttgtggaatattcattgtactgaatattacccttgtgcttgccgctgtatttaaacttgaaacagatagaagtatatggcccttgataagaatctatcggggtggctttcttctgattgaattcctttttctactgggcatcaacacgtatggttggagacaggctggagtaaaccatgtactcatctttgaacttaatccgagaagcaatttgtctcatcaacatctctttgagattgctggattcctcgggatattgtggtgcctgagccttctggcatgcttctttgctccaattagtgtcatccccacatatgtgtatccacttgccctttatggatttatggttttcttccttatcaaccccaccaaaactttctactataaatcccggttttggctgcttaaactgctgtttcgagtatttacagcccccttccataaggtaggctttgctgatttctggctggcggatcagctgaacagcctgtcagtgatactgatggacctggaatatatgatctgcttctacagtttggagctcaaatgggatgaaagtaagggcctgttgccaaataattcagaagaacgaggtcactcggacactatggtgttcttttacctgtggattgtcttttatatcatcagttcctgctataccctcatctgggatctcaagatggactggggtctcttcgataagaatgctggagagaacactttcctccgggaagagattgtatacccccaaaaagcctactactactgtgccataatagaggatgtgattctgcgctttgcttggactatccaaatctcgattacctctacaactttgttgcctcattctggggacatcattgctactgtctttgccccacttgaggttttccggcgatttgtgtggaacttcttccgcctggagaatgaacatctgaataactgtggtgaattccgtgctgtgcgggacatctctgtggcccccctgaacgcagatgatcagactctcctagaacagatgatggaccaggatgatggggtacgaaaccgccagaagaatcggtcatggaagtacaaccagagcatatccctgcgccggcctcgcctcgcttctcaatccaaggctcgtgacactaaggtattgatagaagacacagatgatgaagctaacacttgaattttctgaagtctagcttaacatctttggttttcctactctacaatcctttcctcgaccaacgcaacctctagtacctttccagccgaaaacaggagaaaacacataacacattttccgagctcttccggatcggatcctatggactccaaacaagctcactgtgtttcttttcttttcttctggtttaattttaattttctattttcaaaacaaatatttacttcatttgccaatcagaggatgttttaagaaacaaaacatagtatcttatggattgtttacaatcacaaggacatagatacctatcaggatgaagaacaggcattgcaaggaccctctgatgggacggtactgagatatctcggcttccgctcagcccggttttgactggttgaaaccggacattggtttttaaattttttgtcagtttatgtggagaatttttttctttccttcatacccagcgcaaaggcactggccgcacttgcaggaaaagtgcaacttaaagcagtaccttcattcatgaagctactttttaatttgatgtaacttttcttattttgggaagggttgctgggtgggtgggaaatatgatgtatttgttacacatagttttctcattatttatgaaacttaaccatacagaatgatataactcctgtgcaatgaaggtgataacagtaaaagaaggcaggggaaacttacgttggatgacatttatgagggtcagtcccacatacctctttcaggagacaacttgcaccagtttgaccttttcttttctttgtttttattttaagccaaagtttcattgctaacttcttaagttgctgctgctttagagtcctgagcatatctctcataacaaggaatcccacacttcacaccaccggctgaatttcatggaagaggttctgataatttttttaactttttaaggaacagatgtggaatacactggcccatatttcaaccttaacagctgaagctatgccttattatgcatccacatgtatggtccctgtagcgtgacctttactagctctgaatcagaagacagagctatttcagaggctctgtgtgccctcactagatagtttttcttctgggttcaaccactttagccagaatttgatcaaattaaaagtctgtcatggggaaactatatttttgagcacatggaacaaattatacttcctcattcatattatgttgatacaaaagaccttggcagccatttctcccagcagttttaaaggatgaacattggatttcatgccatcccatagaaaacctgttttaaaattttagggatctttacttggtcatacatgaaaagtacactgcttagaaattatagactattatgatctgtccacagtgcccattgtcacttctttgtctcatttcttccctttgttccttagtcatccaaataagcctgaaaaccataagagatattactttattgaatatggttggcattaaatttagcatttcattatctaacaaaattaatataaattccaggacatggtaaaatgtgttttaataacccccagacccaaatgaaaatttcaaagtcaataccagcagattcatgaaagtaaatttagtcctataattttcagcttaattataaacaaaggaacaaataagtggaagggcagctattaccattcgcttagtcaaaacattcggttactgccctttaatacactcctatcatcagcacttccaccatgtattacaagtcttgacccatccctgtcgtaactccagtaaaagttactgttactagaaaatttttatcaattaactgacaaatagtttctttttaaagtagtttcttccatctttattctgactagcttccaaaatgtgttccctttttgaatcgaggtttttttgttttgttttgttttctgaaaaaatcatacaactttgtgcttctattgcttttttgtgttttgttaagcatgtcccttggcccaaatggaagaggaaatgtttaattaatgctttttagtttaaataaattgaatcatttataataa

SEQ ID NO: 50895 - protein, 195 aa, Artificial Sequence
  derived and/or modified sequence
MLSATRRACQLLLLHSLFPVPRMGNSASNIVSPQEALPGRKEQTPVAAKHHVNGNRTVEPFPEGTQMAVFEKTGHAEVVRVVYQPEHMSFEELLKVFWENHDPTQGMRQGNDHGTQYRSAIYPTSAKQMEAALSSKENYQKVLSEHGFGPITTDIREGQTFYYAEDYHQQYLSKNPNGYCGLGGTGVSCPVGIKK

SEQ ID NO: 50896 - DNA, 588 bp, Artificial Sequence
  derived and/or modified sequence
atgctgagcgccaccagaagagcctgccagctgctgctgctgcacagcctgttccccgtgcccagaatgggcaacagcgccagcaacatcgtgagcccccaggaggccctgcccggcagaaaggagcagacccccgtggccgccaagcaccacgtgaacggcaacagaaccgtggagcccttccccgagggcacccagatggccgtgttcgagaagaccggccacgccgaggtggtgagagtggtgtaccagcccgagcacatgagcttcgaggagctgctgaaggtgttctgggagaaccacgaccccacccagggcatgagacagggcaacgaccacggcacccagtacagaagcgccatctaccccaccagcgccaagcagatggaggccgccctgagcagcaaggagaactaccagaaggtgctgagcgagcacggcttcggccccatcaccaccgacatcagagagggccagaccttctactacgccgaggactaccaccagcagtacctgagcaagaaccccaacggctactgcggcctgggcggcaccggcgtgagctgccccgtgggcatcaagaagtag

SEQ ID NO: 50897 - DNA, 588 bp, Artificial Sequence
  derived and/or modified sequence
atgctgtcagcaacacgcagggcttgccaactcctcctactccactccctgttccccgtgccacgcatggggaactcagcgtccaatattgtttcgccacaggaggccctgccaggacgcaaggagcagacacccgtggctgccaagcatcatgtgaacggcaatcggaccgtggagccattcccggagggtactcagatggcagtgtttgaaaaaacggggcacgcagaagttgtcagggtagtgtaccagcctgagcatatgtcttttgaggagcttttgaaggtgttctgggagaatcatgaccctacccagggcatgaggcagggcaatgaccatggcacccagtatcggtccgcaatctatcctacgtctgctaagcagatggaggccgcactgtcaagtaaagagaactaccaaaaggtactgagtgaacacggatttgggcctataacaactgacatacgagaagggcagacgttctattatgccgaagactaccatcaacagtacttgagcaagaatcccaacggctactgtggcctcggcggaactggggtttcatgtcctgtggggattaagaagtag

SEQ ID NO: 50898 - DNA, 588 bp, Artificial Sequence
  derived and/or modified sequence
atgctgagcgccacccggcgggcctgccagctgctgctgctgcacagcctcttccctgtgcccaggatgggcaacagcgccagcaacatcgtgagcccccaggaggccctgcccggcaggaaggagcagacccctgtggccgccaagcaccacgtgaatggaaacagaacagtggagcccttccctgagggcacccagatggctgtgtttgagaagacaggccacgccgaggtggtgcgggtggtgtaccagcctgagcacatgagctttgaggagctgctgaaggtgttctgggagaaccacgaccccacccagggcatgaggcagggcaatgaccacggcacccagtacagaagtgccatctaccccaccagcgccaagcagatggaggccgccctgagcagcaaagaaaactaccagaaggtgctgtctgagcacggcttcggccccatcaccacagacatccgggagggccagaccttctactatgcagaggactaccaccagcagtacctgagcaagaaccccaacggctactgcggcctgggcggcactggagtgtcctgccctgtgggcatcaagaagtag

SEQ ID NO: 50899 - DNA, 588 bp, Artificial Sequence
  derived and/or modified sequence
atgctgagcgccacccggcgggcctgccagctgctgctgctgcactcccttttccctgttccacgtatgggcaactcagcttctaatatagtgtcgccccaggaagccctcccaggacgaaaggagcagactccagtggctgcaaaacaccatgtcaatgggaacaggactgtggagccattcccggagggtacccaaatggctgtctttgaaaagacaggccacgctgaggtagttagagtcgtgtatcaaccagagcacatgtcattcgaagagctattgaaggtgttctgggagaaccacgatcctacgcaaggcatgaggcaggggaatgatcacggcacccaataccgttctgcgatctatccgacttctgccaagcagatggaggcggccctgtctagcaaggaaaactaccagaaggtgttaagtgagcatggcttcgggcctattactacagatatccgggaggggcagaccttctactacgctgaagactatcaccagcagtacctctccaaaaatccaaatgggtattgcggtctaggcggcactggggtctcctgtcctgtgggtatcaaaaagtag

SEQ ID NO: 50900 - DNA, 788 bp, Artificial Sequence
  derived and/or modified sequence
gccccgccagcagcgccccgcgcccgcccgcccgcgcccctgccgccccccggttccggccgcggaccccactctctgccgttccggctgcggctccgctgccggtagcgccgtcccccgggaccacccttcggctggcgccctcccatgctctcggccacccggagggcttgccagctcctcctcctccacagcctctttcccgtcccgaggatgggcaactcggcctcgaacatcgtcagcccccaggaggccttgccgggccggaaggaacagacccctgtagcggccaaacatcatgtcaatggcaacagaacagtcgaacctttcccagagggaacacagatggctgtatttgaaaaaactggccatgcagaagtcgtccgagtggtgtaccagccagaacacatgagttttgaggaactgctcaaggtcttctgggagaatcacgacccgacccaaggtatgcgccaggggaacgaccatggcactcagtaccgctcggccatctacccgacctctgccaagcaaatggaggcagccctgagctccaaagagaactaccaaaaggttctttcagagcacggcttcggccccatcactaccgacatccgggagggacagactttctactatgcggaagactaccaccagcagtacctgagcaagaaccccaatggctactgcggccttgggggcaccggcgtgtcctgcccagtgggtattaaaaaataatttctccccacatggtgggcctttgaggttccagtaaaaatgctttcaacaaa

SEQ ID NO: 50901 - DNA, 588 bp, Artificial Sequence
  derived and/or modified sequence
atgcttagcgccaccagaagagcttgccagctgctccttctgcattccctgttccccgttccacgtatgggcaattctgcttccaacatcgtctcacctcaggaggcacttccaggcagaaaagaacagacccctgtggccgctaagcaccacgttaatggcaaccggactgtggaaccgttccccgagggcacgcagatggccgtttttgaaaagaccggccacgccgaggttgttagagttgtgtaccagcctgagcacatgtcttttgaagagctgctgaaagttttctgggaaaatcacgatcccacccagggaatgcgacaaggcaacgatcacgggacccaataccgctcagccatttacccaacgagcgccaagcagatggaagcagccttgtccagcaaggaaaactaccagaaagtgttatccgaacatggtttcggacctataaccacagacatccgggagggacagaccttctattacgcagaggactaccaccaacagtatctcagcaagaatcccaatggatattgtgggctggggggtacgggtgtaagctgcccggtgggcatcaagaagtag

SEQ ID NO: 50902 - protein, 192 aa, Artificial Sequence
  derived and/or modified sequence
MCSEPKHHVNGNRTVEPFPEGTQMAVFGMGCFWGAERKFWVLKGVYSTQVGFAGGYTSNPTYKEVCSEKTGHAEVVRVVYQPEHMSFEELLKVFWENHDPTQGMRQGNDHGTQYRSAIYPTSAKQMEAALSSKENYQKVLSEHGFGPITTDIREGQTFYYAEDYHQQYLSKNPNGYCGLGGTGVSCPVGIKK

SEQ ID NO: 50903 - DNA, 579 bp, Artificial Sequence
  derived and/or modified sequence
atgtgcagcgagcccaagcaccacgtgaacggcaacagaaccgtggagcccttccccgagggcacccagatggccgtgttcggcatgggctgcttctggggcgccgagagaaagttctgggtgctgaagggcgtgtacagcacccaggtgggcttcgccggcggctacaccagcaaccccacctacaaggaggtgtgcagcgagaagaccggccacgccgaggtggtgagagtggtgtaccagcccgagcacatgagcttcgaggagctgctgaaggtgttctgggagaaccacgaccccacccagggcatgagacagggcaacgaccacggcacccagtacagaagcgccatctaccccaccagcgccaagcagatggaggccgccctgagcagcaaggagaactaccagaaggtgctgagcgagcacggcttcggccccatcaccaccgacatcagagagggccagaccttctactacgccgaggactaccaccagcagtacctgagcaagaaccccaacggctactgcggcctgggcggcaccggcgtgagctgccccgtgggcatcaagaagtag

SEQ ID NO: 50904 - DNA, 579 bp, Artificial Sequence
  derived and/or modified sequence
atgtgttctgaacccaagcaccacgtcaatggcaaccgcaccgtggaaccctttccagaagggactcaaatggctgtgttcggtatggggtgcttttggggggcagagcgcaagttttgggtgctgaagggagtctactccacacaagtcggatttgccggtggatatacttccaacccaacctataaagaggtgtgcagcgagaaaaccgggcacgcggaggtggtccgcgtagtgtatcaaccggaacacatgagttttgaggaattattaaaagttttctgggagaaccatgaccccacacagggaatgagacaaggcaatgatcacggcactcagtataggagtgcgatatatcccactagcgctaagcaaatggaagccgcactgtcctcaaaggaaaactatcagaaggtcctatccgagcacggttttgggccgattaccactgatataagggaaggacaaaccttctattacgctgaggattatcatcagcagtatctgtcaaagaaccctaacgggtattgcggactggggggcactggcgtgtcgtgccccgtcggtattaaaaaatag

SEQ ID NO: 50905 - DNA, 579 bp, Artificial Sequence
  derived and/or modified sequence
atgtgcagcgagcccaagcaccacgtgaatggaaacagaacagtggagcccttccctgagggcacccagatggctgtgtttggcatgggctgcttctggggcgctgagaggaagttctgggtgctgaagggcgtgtacagcacccaggtgggctttgctgggggctacaccagcaaccccacctacaaggaggtgtgcagcgagaagacaggccatgctgaggtggtgcgggtggtgtaccagcctgagcacatgagctttgaggagctgctgaaggtgttctgggagaaccacgaccccacccagggcatgaggcagggcaatgaccacggcacccagtaccgcagcgccatctaccccaccagcgccaagcagatggaggccgccctgagcagcaaggagaactaccagaaggtgctgtctgaacatggcttcggccccatcaccacagacatccgggagggccagaccttctactatgcagaggactaccaccagcagtacctgagcaagaaccccaacggctactgcggcctgggcggcaccggggtgtcctgccctgtgggcatcaagaagtag

SEQ ID NO: 50906 - DNA, 579 bp, Artificial Sequence
  derived and/or modified sequence
atgtgcagcgagcccaagcaccacgtgaacggcaaccggaccgtggagcctttccctgaaggaacacagatggctgtgttcggcatgggttgtttctggggggccgaacgtaaattttgggttctgaagggagtctactccacccaagtgggttttgctggcggatatacatccaaccccacctacaaagaagtgtgctcagagaagaccgggcatgctgaggtcgtgcgggtcgtctatcagccggagcacatgtcatttgaggaacttctaaaggtcttttgggagaaccatgatcccacccaagggatgagacagggaaacgatcacgggacacagtaccgctcagcaatataccccacatcagcaaagcagatggaagcagcattgtcctcaaaagagaattaccagaaagttcttagcgaacacggtttcgggccgatcacgactgatataagggaagggcaaaccttctactacgctgaggattaccatcagcagtatctttctaaaaatcccaatgggtactgtgggctcggcggcacgggcgtgtcttgtcccgtcggtatcaaaaaatag

SEQ ID NO: 50907 - DNA, 1460 bp, Artificial Sequence
  derived and/or modified sequence
aaacttagaaggctttttaagtctcttgggctatttgaaagtgttggtacatacaatgacgtttagtcaccagtattaagggaaataaaagcctttttcaaaacgaagcttccatagtgtccatgcatttgggaaatactatatttgattttttgcatgtatgattataccatgagagacaggattaatatagaagatggcaaggcaaatttctaattagagggaatattaattttctacaaaataaagtttgttcatcaatacaaacctgctttcaaatcaaatcagaaagacatccttcggaatgtgttcagaacccaaacatcatgtcaatggcaacagaacagtcgaacctttcccagagggaacacagatggctgtatttggaatgggatgtttctggggagctgaaaggaaattctgggtcttgaaaggagtgtattcaactcaagttggttttgcaggaggctatacttcaaatcctacttataaagaagtctgctcagaaaaaactggccatgcagaagtcgtccgagtggtgtaccagccagaacacatgagttttgaggaactgctcaaggtcttctgggagaatcacgacccgacccaaggtatgcgccaggggaacgaccatggcactcagtaccgctcggccatctacccgacctctgccaagcaaatggaggcagccctgagctccaaagagaactaccaaaaggttctttcagagcacggcttcggccccatcactaccgacatccgggagggacagactttctactatgcggaagactaccaccagcagtacctgagcaagaaccccaatggctactgcggccttgggggcaccggcgtgtcctgcccagtgggtattaaaaaataatttctccccacatggtgggcctttgaggttccagtaaaaatgctttcaacaaattgggcaatgcttgtgtgattcacaatcgtggcatttaaagtgcacaaagtacaaaggaatttatacagattgggtttaccgaagtataatctataggaggcgcgatggcaagttgataaaatgtgacttatctcctaataagttatggtgggagtggagctgtgcagtttcctgtgtcttctggggtctgagtgaagatagcagggatgctgtgttcacccttcttggtagaagctaaggtgtgagctgggaggttgctggacaggatgggggaccccagaagtcctttatctgtgctctctgcccgccagtgccttacaatttgcaaacgtgtatagcctcagtgactcattcgctgaaatccttcgctttaccaaatctagacatacataaggggctttctctcccttttcagccctctctgtgcagagaaaagatgtgagtccgcttgatgaattctaatgctttgcttagagctatgagaaatgtttgttttaataaaaacctacagtccaataatgcc

SEQ ID NO: 50908 - DNA, 1706 bp, Artificial Sequence
  derived and/or modified sequence
gagtgagagagagaaagagggagagagagaggcagagggagagctgaggaaagaaaaaaaggcaagacttggcacagctcagtcaaatcagcttcttttgtctgctttctcggcttgagcttcaggaaagaaaaccgtcctggggtacagaaaaactcagaactttttggttttcaaacttagaaggctttttaagtctcttgggctatttgaaagtgttggtacatacaatgacgtttagtcaccagtattaagggaaataaaagcctttttcaaaacgaagcttccatagtgtccatgcatttgggaaatactatatttgattttttgcatgtatgattataccatgagagacaggattaatatagaagatggcaaggcaaatttctaattagagggaatattaattttctacaaaataaagtttgttcatcaatacaaacctgctttcaaatcaaatcagaaagacatccttcggaatgtgttcagaaccaattagtgacaacactgaagaccagaaaggcaagctgaagacaccagacttcgcttgaagggcaaacaagaaatccaaacatcatgtcaatggcaacagaacagtcgaacctttcccagagggaacacagatggctgtatttggaatgggatgtttctggggagctgaaaggaaattctgggtcttgaaaggagtgtattcaactcaagttggttttgcaggaggctatacttcaaatcctacttataaagaagtctgctcagaaaaaactggccatgcagaagtcgtccgagtggtgtaccagccagaacacatgagttttgaggaactgctcaaggtcttctgggagaatcacgacccgacccaaggtatgcgccaggggaacgaccatggcactcagtaccgctcggccatctacccgacctctgccaagcaaatggaggcagccctgagctccaaagagaactaccaaaaggttctttcagagcacggcttcggccccatcactaccgacatccgggagggacagactttctactatgcggaagactaccaccagcagtacctgagcaagaaccccaatggctactgcggccttgggggcaccggcgtgtcctgcccagtgggtattaaaaaataatttctccccacatggtgggcctttgaggttccagtaaaaatgctttcaacaaattgggcaatgcttgtgtgattcacaatcgtggcatttaaagtgcacaaagtacaaaggaatttatacagattgggtttaccgaagtataatctataggaggcgcgatggcaagttgataaaatgtgacttatctcctaataagttatggtgggagtggagctgtgcagtttcctgtgtcttctggggtctgagtgaagatagcagggatgctgtgttcacccttcttggtagaagctaaggtgtgagctgggaggttgctggacaggatgggggaccccagaagtcctttatctgtgctctctgcccgccagtgccttacaatttgcaaacgtgtatagcctcagtgactcattcgctgaaatccttcgctttaccaaatctagacatacataaggggctttctctcccttttcagccctctctgtgcagagaaaagatgtgagtccgcttgatgaattctaatgctttgcttagagctatgagaaatgtttgttttaataaaaacctacagtccaataa

SEQ ID NO: 50909 - DNA, 579 bp, Artificial Sequence
  derived and/or modified sequence
atgtgtagtgaacctaagcaccacgtgaatggcaatagaactgtggaacccttccccgagggcacacagatggccgtctttggtatgggctgtttttggggcgctgagagaaagttttgggtgctcaaaggagtgtatagcactcaagtaggttttgcagggggttacacatcaaatccaacttacaaggaggtgtgctccgaaaagacaggacacgctgaggtagtgcgagttgtctatcaacccgaacacatgtcttttgaagaactattgaaggtgttttgggagaaccatgacccaactcaaggaatgcgtcagggcaatgatcatgggacacagtaccggagcgctatataccctacatccgccaaacagatggaggccgctctgagttctaaggaaaattatcagaaggtgcttagcgaacatggatttggccctatcactaccgatatccgcgagggccagacattctattacgcggaggattaccaccagcagtatctgagcaaaaatccgaatgggtactgtggccttggcggtaccggggtctcttgtccagttggcatcaaaaagtag

SEQ ID NO: 50910 - protein, 583 aa, Artificial Sequence
  derived and/or modified sequence
MAEGDEAARGQQPHQGLWRRRRTSDPSAAVNHVSSTTSLGENYEDDDLVNSDEVMKKPCPVQIVLAHEDDHNFELDEEALEQILLQEHIRDLNIVVVSVAGAFRKGKSFLLDFMLRYMYNKDSQSWIGGNNEPLTGFTWRGGCERETTGIQVWNEVFVIDRPNGTKVAVLLMDTQGAFDSQSTIKDCATVFALSTMTSSVQVYNLSQNIQEDDLQHLQLFTEYGRLAMEEIYQKPFQTLMFLIRDWSYPYEHSYGLEGGKQFLEKRLQVKQNQHEELQNVRKHIHNCFSNLGCFLLPHPGLKVATNPSFDGRLKDIDEDFKRELRNLVPLLLAPENLVEKEISGSKVTCRDLVEYFKAYIKIYQGEELPHPKSMLQATAEANNLAAVAGARDTYCKSMEQVCGGDKPYIAPSDLERKHLDLKEVAIKQFRSVKKMGGDEFCRRYQDQLEAEIEETYANFIKHNDGKNIFYAARTPATLFAVMFAMYIISGLTGFIGLNSIAVLCNLVMGLALIFLCTWAYVKYSGEFREIGTVIDQIAETLWEQVLKPLGDNLMEENIRQSVTNSIKAGLTDQVSHHARLKTD

SEQ ID NO: 50911 - DNA, 1752 bp, Artificial Sequence
  derived and/or modified sequence
atggctgagggtgacgaagcagcccgagggcagcagccccaccaggggttatggaggcggcgtcggacttccgacccctcggccgcagtgaatcacgttagttctaccacttcactgggtgagaactacgaagatgatgatttggttaacagcgacgaggtgatgaagaagccctgtcccgtgcagatcgtgctcgcacatgaggatgaccataatttcgagctggatgaagaggcgttggaacaaatcctgctgcaggagcacattcgggacctcaatatcgtggtggtgtcagttgccggtgcatttaggaaggggaagagcttcctgctcgattttatgctgagatatatgtataacaaagacagccagtcatggatcggtggaaataatgagccactgacaggctttacgtggcgggggggctgtgaacgagagacgactggcatccaagtgtggaacgaagtttttgtgattgacagacctaacggtaccaaggtcgccgtcttgctcatggatactcagggcgctttcgacagccaatccaccatcaaggattgcgctactgtatttgcgctcagcacgatgacctctagtgtgcaggtgtacaacctttctcagaatatccaggaagacgatctacagcacctgcagctctttactgaatatggacgtctggctatggaggaaatctaccagaaaccttttcagacattaatgttcctgattcgagattggagctatccctatgagcactcgtatggcctggaaggagggaaacagtttcttgagaaacggttacaggttaaacagaaccagcatgaggagcttcagaatgtgagaaagcacatacacaactgcttctctaatctgggatgtttcctcctgcctcaccctgggctcaaggttgcgactaacccttctttcgatgggcgcctgaaggacattgacgaggattttaagcgagaattgcggaatctggtgccgcttttgctggccccagagaaccttgtcgaaaaggaaatttcaggctctaaagtgacttgtagagacttagtcgagtactttaaggcctacataaagatttaccagggtgaggaactcccacaccccaaaagtatgctccaggccaccgccgaagcgaataacctggccgcggttgctggcgctagggatacctattgtaagagtatggagcaggtgtgcgggggagacaagccttatatcgccccgtccgatctggagcgaaagcacttggatctaaaggaagtcgccattaagcaatttagatctgttaagaaaatgggcggggatgaattttgccggcgctatcaggatcagctcgaggccgaaatagaagagacatacgcaaatttcatcaagcataacgacggtaaaaacatattctatgccgctcgtacacccgctactctctttgccgtcatgtttgctatgtatatcatcagtggcctcacaggatttataggtctaaatagtatcgccgtgctctgcaacctggtgatgggacttgcgctcatctttctgtgtacatgggcctacgtgaaatactccggtgaatttcgggagatcggcaccgtgattgatcagatcgccgagactttgtgggagcaagttctgaagcccctcggcgataacctgatggaagagaatataaggcagtctgtcaccaattcgattaaggccggactgacagaccaagttagtcatcatgcccggttgaagacggattag

SEQ ID NO: 50912 - DNA, 1752 bp, Artificial Sequence
  derived and/or modified sequence
atggccgagggagatgaagctgcccggggccagcagccccaccagggcctgtggaggagaagaaggaccagtgaccccagcgctgctgtgaaccacgtgagcagcaccaccagcctgggagaaaattatgaagatgatgacctggtgaacagtgatgaggtgatgaagaagccctgccctgtgcagatcgtgctggcccatgaagatgaccacaactttgagctggatgaggaggccctggagcagatcctgctgcaggagcacatccgggacctgaacatcgtggtggtgtctgtggccggggccttcaggaagggcaagagcttcctgctggacttcatgctgcgctacatgtacaacaaggacagccagagctggattggaggcaacaatgagcccctgaccggcttcacctggaggggcggctgtgagcgggagaccaccggcatccaggtgtggaatgaggtgtttgtgattgaccggcccaacggcaccaaggtggccgtgctgctgatggacacccagggcgcctttgacagccagagcaccatcaaggactgtgccaccgtgtttgccctgagcaccatgaccagctctgtgcaggtgtacaacctgagccagaacatccaggaggatgacctgcagcacctgcagctgttcacagaatatggccgcctggccatggaggagatctaccagaagcccttccagaccctgatgttcctgatccgggactggagctacccctatgagcacagctatggcctggagggcggcaagcagttcctggagaagaggctgcaggtgaagcagaaccagcacgaggagctgcagaatgtgaggaagcacatccacaactgcttcagcaacctgggctgcttcctgctgccccaccctggcctgaaggtggccaccaaccccagctttgatggccgcctgaaggacattgatgaggacttcaagcgggagctgaggaacctggtgcccctgctgctggcccctgagaacctggtggagaaggagatcagcggcagcaaggtgacctgccgggacctggtggagtacttcaaggcctacatcaagatctaccagggcgaggagctgccccaccccaagtccatgctgcaggccacagctgaggccaacaacctggccgctgtggccggggcccgggacacctactgcaagtccatggagcaggtgtgtggcggggacaagccctacatcgcccccagcgacctggagaggaagcacctggacctgaaggaggtggccatcaagcagttccgctctgtgaagaagatgggaggagatgagttctgccgccgctaccaggaccagctggaggccgagattgaggagacctacgccaacttcatcaagcacaatgatggcaagaacatcttctatgctgcccggaccccagccaccctgtttgctgtgatgtttgccatgtacatcatcagcggcctgaccggcttcatcggcctgaacagcattgctgtgctgtgcaacctggtgatgggcctggccctgatcttcctgtgcacctgggcctacgtgaagtacagcggggagttccgggagatcggcaccgtcatcgaccagattgctgagaccctgtgggagcaggtgctgaagcccctgggggacaacctgatggaggagaacatccggcagagcgtgaccaacagcatcaaggccggcctgacagaccaggtgagccaccacgcccggctgaagacagactag

SEQ ID NO: 50913 - DNA, 1752 bp, Artificial Sequence
  derived and/or modified sequence
atggccgagggcgacgaggccgcccggggccagcagccccaccagggactgtggagacgtagacgaaccagcgacccttccgccgcagtgaatcatgtgagtagcactacatccttaggcgagaactatgaggacgatgatctggtaaattccgatgaagtcatgaagaaaccctgtcccgtccagattgttctggctcacgaggatgatcataattttgagctggatgaggaagccctggaacagatcctgttgcaggaacacatcagggacctcaatatcgttgtggtctctgttgctggcgccttcagaaaaggcaagtccttcctgcttgatttcatgctgaggtacatgtataataaagattcccagtcttggatcggaggcaacaacgagcccctcacaggattcacctggcgcggtggatgcgagcgcgagactaccggtatccaggtatggaatgaagtgtttgtgatcgacagacccaacggtacaaaggtggccgtgctgctgatggacacacagggtgcgtttgattcccagagtacgattaaagactgtgccacagttttcgcccttagtaccatgaccagttccgtgcaggtgtataacctgagccagaatattcaagaagatgacctacaacatctgcaactattcactgagtacggcaggctggctatggaggagatttatcaaaagccctttcagacactaatgtttttgattcgtgattggtcatatccctatgagcacagctacggcctggagggagggaaacagttcctggaaaaacgtctccaggtcaaacagaatcaacacgaagagttgcagaatgttaggaagcatattcacaactgtttttccaatttagggtgttttctcctgccccacccaggcctgaaagtagccaccaaccccagtttcgacggtcggctgaaagacatcgatgaggactttaaaagagagcttaggaatctagttccgctgctactcgctcctgaaaatctcgtagagaaagagatcagcgggtcgaaggtgacctgcagggacctggtggagtacttcaaggcatatattaagatatatcagggtgaagaactcccacacccgaaatccatgctgcaggcaaccgctgaggccaacaatctagcagccgtggcgggagctcgggacacatactgcaagagtatggaacaggtgtgcggcggcgacaagccttacatcgctccctccgacctggagaggaagcacctagacctcaaggaggttgctattaaacagttcaggtccgtgaagaaaatggggggcgatgagttctgcaggcggtatcaagatcagttggaggcagagatcgaggagacatatgccaatttcatcaaacacaatgacggtaagaatatcttctacgcagctagaacacccgccactctgttcgccgtgatgttcgccatgtatattatctctggtctgactggctttattgggttgaatagtatagccgtcctgtgtaacctagtaatgggattggctctaatatttctgtgtacatgggcatatgtgaaatacagtggggaatttcgagagattggaacagtgatcgaccagatcgccgaaacactctgggaacaagtgctgaaaccactcggtgacaatctgatggaggagaacatccgacagtctgtcactaactctataaaggcagggctgactgatcaggtgagccatcacgctcgccttaaaacagactag

SEQ ID NO: 50914 - DNA, 1752 bp, Artificial Sequence
  derived and/or modified sequence
atggctgagggcgacgaagccgcacgaggtcagcaacctcaccagggactatggaggagaagaaggacgtcagacccatctgctgcagtgaatcacgtatcgtcaacaaccagcttgggtgaaaactacgaagacgacgacctggtgaatagtgatgaggtaatgaagaagccctgtccagtgcagattgtgctcgcgcatgaggatgaccataacttcgagctcgatgaagaggcgcttgaacaaattctcctacaggagcatattcgcgatttgaatatcgtggttgtgtccgttgcgggagccttcaggaaaggaaaatcttttctattagactttatgctgcgctatatgtataacaaagacagccagagctggataggtggaaacaacgagcctctgactgggtttacatggcgaggcggatgcgagcgtgaaacgactggcattcaggtttggaacgaggtctttgtcatagaccggcctaacggaacaaaagtcgccgttttgctcatggatacacagggagcatttgactcacagagcaccatcaaagactgtgccactgtgttcgcgttgtcaaccatgacttccagtgtccaggtttacaatttatcacagaatattcaagaagacgaccttcagcacttgcagctatttacggaatatggccgactggcgatggaggagatttaccagaaaccgtttcagacattaatgtttctgattcgcgactggtcttacccatacgaacattcctacggccttgaaggcggaaaacagttcctagagaaacggctgcaggtaaagcagaatcagcacgaagaactccagaacgtaagaaagcacatccacaactgctttagtaatctgggatgttttcttctgccacatccaggcttgaaggtcgccacaaacccctccttcgacgggcgactgaaggacatcgacgaggattttaaaagagaactgcggaatcttgtccccctcctgctggcgccagaaaatcttgtggagaaggaaatcagtggttcaaaggtgacatgcagagatctagtcgagtactttaaagcctatatcaaaatctatcagggcgaagagctccctcacccgaagtccatgttgcaagccactgcagaagcaaataacctggcggcagttgccggtgcccgtgacacgtattgtaaaagcatggaacaggtgtgcggcggagataaaccatacattgcgcctagtgatctggaacgtaaacatttagatctcaaagaggtggccatcaagcagtttcggagtgtcaaaaaaatggggggagacgaattttgtcgacgataccaggaccagctcgaagcggagatcgaggaaacctatgcaaattttatcaaacacaacgatggaaaaaatattttttacgccgctaggactccagctactctctttgcagtgatgttcgctatgtatattattagcggactgacaggattcattgggctgaactccatcgccgtattatgcaatctcgtcatgggcctggctttgatctttctctgtacctgggcatatgtcaagtattcgggggaatttagggagataggcacagtgatcgaccagattgcagagaccctgtgggagcaggttctgaaaccgctcggcgacaatctaatggaggagaatatccgacagtcagtcactaactctataaaagctggccttactgatcaagtgtctcaccacgcacgattaaagaccgactag

SEQ ID NO: 50915 - DNA, 2868 bp, Artificial Sequence
  derived and/or modified sequence
agatggcggagggggacgaggcagcgcgagggcagcaaccgcaccaggggctgtggcgccggcgacggaccagcgacccaagcgccgcggttaaccacgtctcgtccacgacctccctaggtgagaattatgaagatgatgacctagtaaattctgatgaggttatgaagaaaccatgtccagtacagattgttcttgctcatgaagatgaccataactttgaacttgatgaagaagctttggagcagatattgctacaggagcacatacgagatcttaacatagtagtggtatctgtggcaggagcttttcgtaaagggaagtcatttctactggacttcatgcttagatacatgtataacaaggattctcaaagttggattggtggaaacaatgaaccattgacaggctttacatggcgaggtggctgtgaaagagaaacaacaggcatacaagtttggaatgaagtatttgtgattgacagacctaatggaactaaagttgctgtgctgcttatggatacccagggtgcctttgatagccagtcaactatcaaagactgtgcaacggtgtttgctctgagcactatgactagctctgtccaggtatataatctgtctcagaatattcaagaagatgatcttcaacatttgcaattatttacagagtatggaagacttgcgatggaagaaatctaccagaaaccatttcagacattaatgtttttgattcgagattggagctatccttatgaacattcatatggtttggaaggtggaaagcaatttcttgaaaagagattacaggtaaaacaaaatcaacatgaagagcttcagaatgtaaggaagcacatacacaattgtttctcaaatcttggttgcttccttttgccacatcctggtcttaaagttgcaactaatcctagttttgatgggagattgaaagatattgatgaagactttaaacgagagcttcgaaatctggttccattgctgcttgcccctgaaaatttggtagaaaaagagataagtggatctaaagtcacttgtagagatcttgtagaatattttaaggcttacatcaaaatctatcaaggagaagaacttccacatccaaagtccatgcttcaggcaacagctgaagctaataatcttgctgcagtagcaggagcaagagatacctattgtaaaagtatggaacaggtatgtggaggggacaagccttacattgcaccttcagatctggagcgaaaacacttggatctcaaggaagtggcgataaaacaatttcgttcagtaaaaaagatgggtggagatgagttctgccgtcgttatcaggaccagcttgaagctgaaattgaagaaacctatgcaaattttataaagcacaatgatggcaaaaatatcttctatgctgctcgtaccccagccacactgtttgcggtcatgtttgctatgtatataatctcaggactgactggcttcattggcctaaactctatagctgtcttgtgtaaccttgtcatggggttagcactgatatttctttgtacttgggcatatgttaaatactctggggagttcagagaaattggaacagtgattgatcagattgctgaaacactatgggaacaggtattgaagcccctgggtgataatttgatggaggaaaacataaggcagtctgtaacaaactctatcaaagcaggcctgactgaccaggtgtctcatcatgccagattaaagacagactgacagttcatctcctcacggactccactctctttttttttcatgcttgctgtacaatgagaactcaaataaaaataaaccaaagtttacaatcaactgtagaagtagtttagtgtaactggcttcacagatggctgccacagagtgtgaagattgtttgttagttttaagcattcttttaatggctcctaagacatgcagatggactgaggagcattggttaatcatgcacctttgtgccatgtttaactcttttatttctttttacttaatctaatgttagtgaatttgtcttatgtaaaaggatatttcagggaaatattttcagaaatctatttagagtctctttaacacagtgtcccattgaaattttaatttttagagaatttatgaatcactgtttcaagaaccagattggaaagacaatgaagcctttattgagccactacattaaaagtatatattgctttactgccttcaataccagtattacatcaatgcatgtatcagaaacttcacagaaattacatggcaactcttgtagctaagaaagtaattctgaggtgtacatttgtcttgcctttttaaatttataaacttgccctaaaaggagatgcatatctgggaaactgaactgtctttttgcagtttagccttcatgtatataaaatatgccattaattttattggggaagaaattccatccaaaaatgttgcctacagctatgagttaagagtgtctgtacagtgtgtagcttttattttctaaaatcacagatagggcatgtatatgacttataaatatataaatacgattttgtattaaaagttttgtagtttatggcaaaatctggtcctgtggtaggctaaataagtactgtccctgtgaaaggaatgtttgtggctcatgtcagtgtgtgaatgcatagacaatttgaagtttttgatatatttgtgatatttatcttgagcactgcaatctcaccccccccccgcccaccaagggaattcaatgggaatgtttattgtgactttgtcctctgttgcattttaaagttatttcctgtaatttattttcagtacataattaaaaatttgttgtatatataaaatgaaa

SEQ ID NO: 50916 - DNA, 1883 bp, Artificial Sequence
  derived and/or modified sequence
actgtggtgcgaattgatcgcatgaaatcctgattgaaaattttgatggtacttaagaaaggcataaagttttttcaaaggcttataaatagtaaaagcctacgatttggattctcaaagttggattggtggaaacaatgaaccattgacaggctttacatggcgaggtggctgtgaaagagaaacaacaggcatacaagtttggaatgaagtatttgtgattgacagacctaatggaactaaagttgctgtgctgcttatggatacccagggtgcctttgatagccagtcaactatcaaagactgtgcaacggtgtttgctctgagcactatgactagctctgtccaggtatataatctgtctcagaatattcaagaagatgatcttcaacatttgcaattatttacagagtatggaagacttgcgatggaagaaatctaccagaaaccatttcagacattaatgtttttgattcgagattggagctatccttatgaacattcatatggtttggaaggtggaaagcaatttcttgaaaagagattacaggtaaaacaaaatcaacatgaagagcttcagaatgtaaggaagcacatacacaattgtttctcaaatcttggttgcttccttttgccacatcctggtcttaaagttgcaactaatcctagttttgatgggagattgaaagatattgatgaagactttaaacgagagcttcgaaatctggttccattgctgcttgcccctgaaaatttggtagaaaaagagataagtggatctaaagtcacttgtagagatcttgtagaatattttaaggcttacatcaaaatctatcaaggagaagaacttccacatccaaagtccatgcttcaggcaacagctgaagctaataatcttgctgcagtagcaggagcaagagatacctattgtaaaagtatggaacaggtatgtggaggggacaagccttacattgcaccttcagatctggagcgaaaacacttggatctcaaggaagtggcgataaaacaatttcgttcagtaaaaaagatgggtggagatgagttctgccgtcgttatcaggaccagcttgaagctgaaattgaagaaacctatgcaaattttataaagcacaatgatggcaaaaatatcttctatgctgctcgtaccccagccacactgtttgcggtcatgtttgctatgtatataatctcaggactgactggcttcattggcctaaactctatagctgtcttgtgtaaccttgtcatggggttagcactgatatttctttgtacttgggcatatgttaaatactctggggagttcagagaaattggaacagtgattgatcagattgctgaaacactatgggaacaggtattgaagcccctgggtgataatttgatggaggaaaacataaggcagtctgtaacaaactctatcaaagcaggcctgactgaccaggtgtctcatcatgccagattaaagacagactgacagttcatctcctcacggactccactctctttttttttcatgcttgctgtacaatgagaactcaaataaaaataaaccaaagtttacaatcaactgtagaagtagtttagtgtaactggcttcacagatggctgccacagagtgtgaagattgtttgttagttttaagcattcttttaatggctcctaagacatgcagatggactgaggagcattggttaatcatgcacctttgtgccatgtttaactcttttatttctttttacttaatctaatgttagtgaatttgtcttatgtaaaaggatatttcagggaaatattttcagaaatctatttagagtctctttaacacagtgtcccattgaaattttaatttttagagaatt

SEQ ID NO: 50917 - DNA, 1700 bp, Artificial Sequence
  derived and/or modified sequence
aaatcggtacaagatggcggagggggacgaggcagcgcgagggcagcaaccgcaccaggggctgtggcgccggcgacggaccagcgacccaagcgccgcggttaaccacgtctcgtccacgacctccctaggattctcaaagttggattggtggaaacaatgaaccattgacaggctttacatggcgaggtggctgtgaaagagaaacaacaggcatacaagtttggaatgaagtatttgtgattgacagacctaatggaactaaagttgctgtgctgcttatggatacccagggtgcctttgatagccagtcaactatcaaagactgtgcaacggtgtttgctctgagcactatgactagctctgtccaggtatataatctgtctcagaatattcaagaagatgatcttcaacatttgcaattatttacagagtatggaagacttgcgatggaagaaatctaccagaaaccatttcagacattaatgtttttgattcgagattggagctatccttatgaacattcatatggtttggaaggtggaaagcaatttcttgaaaagagattacaggtaaaacaaaatcaacatgaagagcttcagaatgtaaggaagcacatacacaattgtttctcaaatcttggttgcttccttttgccacatcctggtcttaaagttgcaactaatcctagttttgatgggagattgaaagatattgatgaagactttaaacgagagcttcgaaatctggttccattgctgcttgcccctgaaaatttggtagaaaaagagataagtggatctaaagtcacttgtagagatcttgtagaatattttaaggcttacatcaaaatctatcaaggagaagaacttccacatccaaagtccatgcttcaggcaacagctgaagctaataatcttgctgcagtagcaggagcaagagatacctattgtaaaagtatggaacaggtatgtggaggggacaagccttacattgcaccttcagatctggagcgaaaacacttggatctcaaggaagtggcgataaaacaatttcgttcagtaaaaaagatgggtggagatgagttctgccgtcgttatcaggaccagcttgaagctgaaattgaagaaacctatgcaaattttataaagcacaatgatggcaaaaatatcttctatgctgctcgtaccccagccacactgtttgcggtcatgtttgctatgtatataatctcaggactgactggcttcattggcctaaactctatagctgtcttgtgtaaccttgtcatggggttagcactgatatttctttgtacttgggcatatgttaaatactctggggagttcagagaaattggaacagtgattgatcagattgctgaaacactatgggaacaggtattgaagcccctgggtgataatttgatggaggaaaacataaggcagtctgtaacaaactctatcaaagcaggcctgactgaccaggtgtctcatcatgccagattaaagacagactgacagttcatctcctcacggactccactctctttttttttcatgcttgctgtacaatgagaactcaaataaaaataaaccaaagtttacaatcaactgtagaagtagtttagtgtaactggcttcacagatggctgccacagagtgtgaagattgtttgttagttttaagcattcttttaat

SEQ ID NO: 50918 - DNA, 1752 bp, Artificial Sequence
  derived and/or modified sequence
atggccgagggcgacgaggccgccagaggccagcagccccaccagggcctgtggagaagaagaagaaccagcgaccccagcgccgccgtgaaccacgtgagcagcaccaccagcctgggcgagaactacgaggacgacgacctggtgaacagcgacgaggtgatgaagaagccctgccccgtgcagatcgtgctggcccacgaggacgaccacaacttcgagctggacgaggaggccctggagcagatcctgctgcaggagcacatcagagacctgaacatcgtggtggtgagcgtggccggcgccttcagaaagggcaagagcttcctgctggacttcatgctgagatacatgtacaacaaggacagccagagctggatcggcggcaacaacgagcccctgaccggcttcacctggagaggcggctgcgagagagagaccaccggcatccaggtgtggaacgaggtgttcgtgatcgacagacccaacggcaccaaggtggccgtgctgctgatggacacccagggcgccttcgacagccagagcaccatcaaggactgcgccaccgtgttcgccctgagcaccatgaccagcagcgtgcaggtgtacaacctgagccagaacatccaggaggacgacctgcagcacctgcagctgttcaccgagtacggcagactggccatggaggagatctaccagaagcccttccagaccctgatgttcctgatcagagactggagctacccctacgagcacagctacggcctggagggcggcaagcagttcctggagaagagactgcaggtgaagcagaaccagcacgaggagctgcagaacgtgagaaagcacatccacaactgcttcagcaacctgggctgcttcctgctgccccaccccggcctgaaggtggccaccaaccccagcttcgacggcagactgaaggacatcgacgaggacttcaagagagagctgagaaacctggtgcccctgctgctggcccccgagaacctggtggagaaggagatcagcggcagcaaggtgacctgcagagacctggtggagtacttcaaggcctacatcaagatctaccagggcgaggagctgccccaccccaagagcatgctgcaggccaccgccgaggccaacaacctggccgccgtggccggcgccagagacacctactgcaagagcatggagcaggtgtgcggcggcgacaagccctacatcgcccccagcgacctggagagaaagcacctggacctgaaggaggtggccatcaagcagttcagaagcgtgaagaagatgggcggcgacgagttctgcagaagataccaggaccagctggaggccgagatcgaggagacctacgccaacttcatcaagcacaacgacggcaagaacatcttctacgccgccagaacccccgccaccctgttcgccgtgatgttcgccatgtacatcatcagcggcctgaccggcttcatcggcctgaacagcatcgccgtgctgtgcaacctggtgatgggcctggccctgatcttcctgtgcacctgggcctacgtgaagtacagcggcgagttcagagagatcggcaccgtgatcgaccagatcgccgagaccctgtgggagcaggtgctgaagcccctgggcgacaacctgatggaggagaacatcagacagagcgtgaccaacagcatcaaggccggcctgaccgaccaggtgagccaccacgccagactgaagaccgactag

SEQ ID NO: 50919 - protein, 107 aa, Artificial Sequence
  derived and/or modified sequence
MAGGYGVMGDDGSIDYTVHEAWNEATNVYLIVILVSFGLFMYAKRNKRRIMRIFSVPPTEETLSEPNFYDTISKIRLRQQLEMYSISRKYDYQQPQNQADSVQLSLE

SEQ ID NO: 50920 - DNA, 793 bp, Artificial Sequence
  derived and/or modified sequence
gtaaccgtttcccgcgcgcccggccccgactccggggtaaagagccccggagcggagcagcgctggccgcgtgccgcctccggagccggcagcccccatggctgggggttatggagtgatgggtgacgatggttctattgattatactgttcacgaagcctggaatgaagccaccaatgtttacttgatagttatccttgttagcttcggtctcttcatgtatgccaaaaggaacaaaaggagaattatgaggatattcagtgtgccacctacagaggaaactttgtcagagcccaacttttatgacacgataagcaagattcgtttaagacaacaactggaaatgtattccatttcaagaaagtacgactatcagcagccacaaaaccaagctgacagtgtgcaactctcattggaatgaaacctcagaaaaagagcaacagaagtaattgtttcaagctcctgattctttctactaaatcatgaacagctttaaaaacatttctgtctgcataaaattattttacttgtaacttttccccaattgttctgtgcattgttttgcctttttaaattacatctccaagtggctcaaaaggccttgacacagggaacctgcacatatccaggatatgtgtaaccagcgatggtgacttgaccttgccaagacctgtgattccttcaggatacaatcagtgagaaataaaaacacatcttgggaagtgggaatcctggagtttatgccatttgcaatattaaaaaataaaaatgcaagttattatttcaataataa

SEQ ID NO: 50921 - DNA, 324 bp, Artificial Sequence
  derived and/or modified sequence
atggccggcggctacggcgtgatgggcgacgacggcagcatcgactacaccgtgcacgaggcctggaacgaggccaccaacgtgtacctgatcgtgatcctggtgagcttcggcctgttcatgtacgccaagagaaacaagagaagaatcatgagaatcttcagcgtgccccccaccgaggagaccctgagcgagcccaacttctacgacaccatcagcaagatcagactgagacagcagctggagatgtacagcatcagcagaaagtacgactaccagcagccccagaaccaggccgacagcgtgcagctgagcctggagtag

SEQ ID NO: 50922 - DNA, 324 bp, Artificial Sequence
  derived and/or modified sequence
atggctggggggtacggagtgatgggcgatgatggcagcatcgattatacggtgcacgaagcatggaatgaggccacaaacgtgtacttaatcgtaatccttgtgtcctttggtctcttcatgtatgcgaagaggaataagagacgcattatgcggatattttctgtccctccgacagaagagaccctgtcggagccaaacttctatgatacgatatctaagattcggttacgacagcagctcgagatgtactccatctcacgaaaatatgactatcagcagccccagaatcaggcagactctgtccaactgtcgctggaatag

SEQ ID NO: 50923 - DNA, 324 bp, Artificial Sequence
  derived and/or modified sequence
atggccggcgggtacggcgtcatgggcgatgatggcagtatagattacaccgtccatgaggcctggaacgaagccacgaacgtgtacctgattgtcattctagtgagtttcgggctttttatgtacgcaaaacggaacaaaaggcgcatcatgaggatcttctcggtgccccctactgaggagacgctgtccgagccaaacttttatgatacaatttccaagattagacttcgacaacagctcgagatgtactcaataagccggaagtatgactaccagcagccccagaaccaggctgattcagttcaactgtccttagagtag

SEQ ID NO: 50924 - DNA, 324 bp, Artificial Sequence
  derived and/or modified sequence
atggctggtgggtacggcgtaatgggcgacgacggaagtatagactacactgtccatgaggcttggaacgaggcaactaacgtttatctgatcgttatactcgtaagtttcgggcttttcatgtacgcgaaaagaaacaagcgaagaatcatgcgcatcttctccgttcctcccaccgaggagacgctgtctgaaccaaacttttacgatactatttctaagatacgccttcggcagcaacttgagatgtacagtatatccaggaagtacgattaccagcaaccgcagaatcaggcagattctgtacaactgagcctggaatag

SEQ ID NO: 50925 - DNA, 324 bp, Artificial Sequence
  derived and/or modified sequence
atggccggtggttacggggttatgggcgacgatggatccatcgattataccgtccacgaagcctggaacgaagctactaatgtgtaccttattgttatactcgtgtccttcgggctgttcatgtatgccaagcgaaataaacgacggattatgcgcatcttttccgtaccgccaaccgaagagacgctgagcgagccaaatttctatgatacaatatctaagattcggctacgccagcagctggagatgtattcaatctctcggaaatatgactaccagcaaccccagaaccaagcagactctgtgcagctctcactggaatag

SEQ ID NO: 50926 - DNA, 324 bp, Artificial Sequence
  derived and/or modified sequence
atggccggaggatacggcgtgatgggggacgatggatccatcgactataccgtgcacgaggcctggaatgaggccaccaacgtgtatctaatcgtcattttagtcagtttcggcctgtttatgtacgcaaagaggaataagcggcggattatgagaattttttccgtgccaccaaccgaggaaacactaagcgagccgaatttttatgacacaatctctaagatcaggctgagacaacagctggagatgtacagtatatccaggaagtacgattatcagcagcctcaaaaccaggccgatagcgtacagttatctttggaatag

SEQ ID NO: 50927 - DNA, 324 bp, Artificial Sequence
  derived and/or modified sequence
atggccggcggctatggagtgatgggagatgatggcagcattgactacacagtgcatgaggcctggaatgaggccaccaacgtgtacctgattgtcatcctggtgtcctttggcctcttcatgtatgccaagaggaacaagaggcgcatcatgaggatcttctctgtgcccccaacagaggagaccctgtctgagcccaacttctatgacaccatcagcaagatccggctgcggcagcagctggagatgtacagcatcagcaggaaatatgactaccagcagccccagaaccaggccgacagcgtgcagctgagcctggagtag

SEQ ID NO: 50928 - DNA, 324 bp, Artificial Sequence
  derived and/or modified sequence
atggccggcggctacggcgtgatgggcgacgacggcagcatcgactataccgttcatgaggcatggaacgaggccactaatgtgtatctgattgtgattttggtgagcttcgggctctttatgtatgccaagaggaacaaaagacgcatcatgagaatcttctcagtgcctcccaccgaagagacattgtcagagccaaacttttatgatacaatctcaaaaatccgcttacggcagcagcttgaaatgtacagcatctctaggaagtacgattaccagcaacctcagaatcaggctgacagcgtccagctgagcctggagtag

SEQ ID NO: 50929 - DNA, 324 bp, Artificial Sequence
  derived and/or modified sequence
atggccggcggctacggcgtgatgggcgacgacggcagcatcgactatacggttcacgaggcctggaacgaggctaccaacgtgtacctcattgtcatcctggtgagtttcggactgttcatgtacgcaaagaggaataaaaggaggataatgcgaatcttcagcgtgcctccaacagaggagacgttgagcgaacccaatttttacgatactataagcaaaatccgcctgcgtcaacagcttgaaatgtattccatcagtaggaaatacgattaccagcagccccaaaaccaggcggactcagtccagctgagcttagagtag

SEQ ID NO: 50930 - DNA, 324 bp, Artificial Sequence
  derived and/or modified sequence
atggccggcggctacggcgtgatgggcgacgacggcagcatcgactatactgtgcacgaagcctggaatgaggccaccaacgtttacttaatcgtcattctggtctcttttggccttttcatgtacgcaaaacgtaataagcgccgcattatgcggattttctctgtgccccctacagaggagacccttagtgagccgaacttttacgacacaatatccaaaattaggctgcggcagcagctcgaaatgtattccatttccaggaagtatgactaccaacagcctcagaaccaggctgactccgtccagctgagtctggaatag

SEQ ID NO: 50931 - DNA, 324 bp, Artificial Sequence
  derived and/or modified sequence
atggccggcggctacggcgtgatgggcgacgacggcagcatcgactacaccgtgcatgaggcctggaacgaagccactaatgtgtatttaattgtcatcttagtttccttcggcctgttcatgtatgccaagagaaacaaacgccggattatgaggatcttctctgtcccacccaccgaagaaacgctgtcagaacctaacttctacgataccatttctaagatccgactaaggcagcagctggaaatgtactcaatttctcgtaagtatgactaccagcagccccagaatcaggccgactctgtgcaactaagcctggagtag

SEQ ID NO: 50932 - DNA, 324 bp, Artificial Sequence
  derived and/or modified sequence
atggccggcggctacggcgtgatgggcgacgacggcagcatcgactacaccgtccatgaggcttggaacgaagcaacaaacgtctatctgattgttattctagttagtttcggccttttcatgtacgccaagcgaaacaagaggaggatcatgaggattttcagcgtgccacccaccgaagagaccctgagcgagcctaacttttatgatacaatatccaagatacggctccgccagcagctcgagatgtactcaatttcacgcaaatatgactaccagcagccccagaatcaggccgattcagttcagctgtctctggagtag

SEQ ID NO: 50933 - DNA, 324 bp, Artificial Sequence
  derived and/or modified sequence
atggccggaggatatggagtgatgggcgatgatggctccatcgattacactgtccacgaggcatggaatgaggcgaccaacgtctatctgatagttattctggttagtttcggcctgttcatgtacgcaaagcgtaataagcgcaggattatgcgaattttcagtgtcccaccgacggaggaaacgctgtcagaaccaaatttttatgacactatttcaaagattagactccgccagcagctggagatgtattctatttctaggaagtacgactaccaacagccccagaatcaggctgactccgtgcaactttcccttgagtag

SEQ ID NO: 50934 - DNA, 324 bp, Artificial Sequence
  derived and/or modified sequence
atggccggtggctacggtgttatgggcgacgacggaagtatcgactacaccgtacacgaggcttggaacgaggcaaccaatgtgtacttaatcgtgattctcgtcagttttggcttattcatgtacgccaagagaaataagcgaagaatcatgcggattttttctgtacctcctactgaagagactctcagtgagcccaacttctatgatactatctccaaaattcgactgcgtcaacaactggaaatgtacagcatctcccgcaaatacgattaccagcagccccagaatcaggcggactcagtgcagctcagcttggagtag

SEQ ID NO: 50935 - DNA, 324 bp, Artificial Sequence
  derived and/or modified sequence
atggccggaggctacggcgtcatgggagacgatggatccatcgactataccgttcatgaagcctggaatgaggcaaccaatgtctatttaatcgtaatactcgtctcctttggcctttttatgtatgccaagcggaataagaggcgaatcatgcggattttttcagtgccacccacagaggagaccttatcggagcctaatttttatgataccatatctaagatacggctgaggcagcagttggagatgtacagtatttccaggaagtacgactatcaacagccgcagaaccaggctgattctgtacagctgagtttagaatag

SEQ ID NO: 50936 - DNA, 324 bp, Artificial Sequence
  derived and/or modified sequence
atggctggtggatatggcgttatgggcgatgacgggtctattgactacactgtacacgaggcttggaatgaagccaccaacgtgtaccttatcgtcatcctagtgtcctttgggctgttcatgtatgctaagaggaataagcgacgcattatgaggatttttagcgtacctcctaccgaggagaccctgagtgaacctaatttctatgacacaatttccaagatcagacttagacagcagcttgagatgtacagtatctcaagaaagtacgactaccagcaaccacagaaccaggcggatagtgtgcagctgtccctggaatag

SEQ ID NO: 50937 - DNA, 324 bp, Artificial Sequence
  derived and/or modified sequence
atggccggtgggtatggagtgatgggcgacgacggttccatcgactacactgtccacgaggcatggaacgaggcaaccaacgtctatttaatcgtaatattggtgtcgttcggcttgttcatgtatgccaagcgcaacaagaggcgcattatgagaatcttcagtgtgcccccaactgaggagacactgagcgagcctaacttttacgataccatctccaagatcagattgcggcagcagctcgaaatgtactctatttccaggaagtatgattaccagcagccacagaatcaggctgactcagtgcaactttccctcgaatag

SEQ ID NO: 50938 - protein, 734 aa, Artificial Sequence
  derived and/or modified sequence
MGCWGQLLVWFGAAGAILCSSPGSQETFLRSSPLPLASPSPRDPKVSAPPSILEPASPLNSPGTEGSWLFSTCGASGRHGPTQTQCDGAYAGTSVVVTVGAAGQLRGVQLWRVPGPGQYLISAYGAAGGKGAKNHLSRAHGVFVSAIFSLGLGESLYILVGQQGEDACPGGSPESQLVCLGESRAVEEHAAMDGSEGVPGSRRWAGGGGGGGGATYVFRVRAGELEPLLVAAGGGGRAYLRPRDRGRTQASPEKLENRSEAPGSGGRGGAAGGDASETDNLWADGEDGVSFIHPSSELFLQPLAVTENHGEVEIRRHLNCSHCPLRDCQWQAELQLAECLCPEGMELAVDNVTCMDLHKPPGPLVLMVAVVATSTLSLLMVCGVLILGGAWPGPVLASATRCHRGFPSQCYSAQTLPELCSPQDELDFLMEALIISKFRHQNIVRCVGLSLRATPRLILLELMSGGDMKSFLRHSRPHLGQPSPLVMRDLLQLAQDIAQGCHYLEENHFIHRDIAARNCLLSCAGPSRVAKIGDFGMARDIYRASYYRRGDRALLPVKWMPPEAFLEGIFTSKTDSWSFGVLLWEIFSLGYMPYPGRTNQEVLDFVVGGGRMDPPRGCPGPVYRIMTQCWQHEPELRPSFASILERLQYCTQDPDVLNSLLPMELGPTPEEEGTSGLGNRSLECLRPPQPQELSPEKLKSWGGSPLGPWLSSGLKPLKSRGLQPQNLWNPTYRS

SEQ ID NO: 50939 - DNA, 2205 bp, Artificial Sequence
  derived and/or modified sequence
atgggctgctggggccagcttctagtttggtttggggctgccggggcaatcctgtgcagcagcccggggtcccaagagacctttctgagatctagcccgcttccgctggcttctccatcacccagagaccctaaagtcagtgcccccccttctattctggagcccgcttcaccgcttaactcgcccggaacagagggttcttggctgttttccacatgcggagccagcggtagacatgggccgactcagacacagtgcgacggggcatacgccggtaccagtgtcgtggtgactgtcggagccgctggtcagcttaggggggtgcagctttggcgcgttcctggccccggtcagtacctgatttctgcatacggcgccgccgggggcaaaggggctaagaatcatttgagtcgggcccatggggtttttgtctccgcaatcttctctctgggactgggcgaatctctctacatccttgtgggacagcagggcgaggatgcctgccccggcgggagcccggaaagccagctagtgtgcctgggcgagagccgcgcagtggaagagcatgccgccatggatggctctgagggtgtgccaggctcccggcggtgggccggtggaggcggagggggaggaggagccacctacgtattcagggtgcgcgcaggcgagctagagcctctacttgtcgctgcaggcggggggggacgagcctatttaaggcctcgggacaggggccgaactcaagcaagtcccgagaaacttgagaatcgctccgaggctcccggcagtggcggtagagggggtgccgccgggggcgatgctagcgagaccgacaatttgtgggccgacggggaggatggcgtttcatttatacatccatcaagcgaattattcctacagcctcttgcagtgacagagaatcatggagaggtggagatcagaagacatcttaactgtagccactgcccccttcgcgattgtcaatggcaggcggagttgcagctggctgagtgcctctgtcctgaagggatggagcttgctgtggacaacgtgacctgcatggacctgcataagcctcctgggcccctcgtattgatggttgcggtcgtggccacaagtacgttgtcactcttaatggtgtgcggcgtactgatcctggggggcgcctggccagggcccgtgctagcctccgctacccgttgtcaccggggatttccatcccaatgttattccgctcagactctgcccgaattgtgctctccccaggatgagttagactttctcatggaggctttaattatcagtaaattcagacaccaaaatatcgtgaggtgcgtgggattgagccttagggccaccccacgattgattctgctggaactcatgagcgggggtgacatgaagagttttttacgtcacagtagaccgcatttaggtcaacccagcccattggtgatgagggacctgcttcagctggcccaggatatcgcccaggggtgccactacctggaagagaaccattttatccaccgcgatatcgccgctaggaactgcctcctcagctgtgccgggccttcccgcgtggccaagataggcgactttggcatggcaagagatatctacagggccagctattacaggaggggcgatcgagccctgctgcctgtgaagtggatgcctccagaagccttcctcgaaggcattttcaccagcaaaactgactcctggtcttttggagttctgctgtgggagatcttctctctgggttacatgccttacccaggcaggacaaaccaggaggttctagatttcgtcgtgggggggggccgtatggatccacctaggggctgccccggcccggtgtaccgaatcatgacccaatgttggcagcacgagcctgaactgcggccgtcgtttgcctcaatcctcgagaggctgcagtactgcacccaagatccggatgtcctgaactcgttgttgcccatggaactggggcctacccccgaggaagagggcaccagtggactcggaaataggtcgttagagtgcttgcgcccaccgcagccccaggagctgtcacccgagaagctgaagtcctggggtggctctccactcggcccgtggctttcatcaggcctcaagccactgaagagtcgcggcctgcagccacagaatctctggaaccccacatatcgctcatag

SEQ ID NO: 50940 - DNA, 2205 bp, Artificial Sequence
  derived and/or modified sequence
atgggctgctggggccagctgctggtgtggtttggagctgctggggccatcctgtgcagcagccctggcagccaggagaccttcctgcggagcagccccctgcccctggccagccccagcccccgggaccccaaggtgtctgcccctccttccatcctggagcccgccagccccctgaacagccctggaacagagggctcctggctgttcagcacctgtggggccagcggcagacatggccccacccagacccagtgtgatggagcctatgccggcacctctgtggtggtgacagtgggcgccgccggccagctgcggggcgtgcagctgtggagggtgcccggccctggccagtacctgatcagcgcctacggggctgctgggggcaagggggccaagaaccacctgagccgggcccacggcgtgtttgtgtctgccatcttcagcctgggcctgggggagagcctgtacatcctggtgggccagcagggagaagatgcctgccctgggggcagccctgagagccagctggtgtgcctgggggagagcagagctgtggaggagcacgccgccatggatggcagcgagggcgtgcccggcagccgccgctgggccggcggcggcggcggcggcggcggggccacctacgtgttccgggtgcgggccggggagctggagcccctgctggtggccgccggcggcggcggccgggcctacctgcggccccgggaccggggccgcacccaggccagccctgagaagctggagaacagaagtgaggcccctggcagcggcggccggggcggcgctgctggaggagatgccagcgagacagacaacctgtgggcagatggagaagatggagtgtccttcatccaccccagcagcgagctgttcctgcagcccctggccgtgacagaaaatcatggagaggtggagatcagaagacacctgaactgcagccactgccccctgcgggactgccagtggcaggccgagctgcagctggccgagtgcctgtgcccagagggcatggagctggccgtggacaacgtgacctgcatggacctgcacaagcccccaggccccctggtgctgatggtggccgtggtggccaccagcaccctgagcctgctgatggtgtgtggggtgctgatcctgggcggggcctggccaggccctgtgctggccagcgccacccgctgccaccggggcttccccagccagtgctacagcgcccagaccctgcctgagctgtgcagcccccaggatgagctggacttcctgatggaggccctgatcatcagcaagttccgccaccagaacatcgtgcgctgtgtgggcctgagcctgcgggccacccccaggctcatcctgctggagctgatgtctggaggagacatgaagagcttcctgcggcacagccggccccacctgggccagcccagccccctggtgatgagggacctgctgcagctggcccaggacatcgcccagggctgccactacctggaggagaaccacttcatccaccgggacattgctgccaggaactgcctgctgagctgtgccggccccagccgggtggccaagatcggggactttggcatggcccgggacatctaccgggccagctactaccgccgcggggaccgggccctgctgcctgtgaagtggatgcctcctgaggccttcctggagggcatcttcaccagcaagacagacagctggagctttggagtgctgctgtgggagatcttcagcctgggctacatgccctacccaggccgcaccaaccaggaggtgctggactttgtggtgggcggcggccgcatggaccccccccggggctgccccggccctgtgtaccgcatcatgacccagtgctggcagcacgagcctgagctgcggcccagctttgccagcatcctggagcggctgcagtactgcacccaggaccctgatgtgctgaacagcctgctgcccatggagctgggccccaccccagaggaggagggcaccagcggcctgggcaacagaagcctggagtgcctgcggcccccccagccccaggagctgagccctgagaagctgaagtcctggggcggcagccccctgggcccctggctgagcagcggcctgaagcccctgaagagccggggcctgcagccccagaacctgtggaaccccacctaccgctcctag

SEQ ID NO: 50941 - DNA, 2737 bp, Artificial Sequence
  derived and/or modified sequence
ggggtctgaggtgggcgtggccagaccagctttaggtccggggagtgtctcgccagcggcagcacacccctgtaagtggtggccagggctgccgtggcaaaatgagctgtcaactttaggttgacaggggtgtggccgcgaccgcaagggcttttgttgccgggtggacccaacagggatgggctgctggggacagctgctggtgtggttcggagccgcgggcgccattctctgctctagcccggggtcccaggagacttttctgcggtcctcgcccctgccgctggcaagtcccagcccccgggacccgaaagtcagcgccccgcctagtatcttggagccagcctccccgctgaattctccgggcaccgaggggtcttggctgttttctacctgcggggccagcggccggcatgggcccacacagacacaatgtgacggggcgtacgcggggaccagcgtggtggtgaccgtgggggccgccgggcagctgagaggcgtgcagctgtggcgcgtgccgggccctggccagtatctgatctcagcctacggagccgcgggcggcaaaggcgccaagaaccacctgtcgcgggcgcatggcgtcttcgtctcagcaatcttctccctcggtctcggggagtcgctgtacatcctggtggggcagcagggagaggacgcctgtcccggaggtagcccggagagccagctcgtctgcctcggggagtctcgagccgttgaagagcacgcggcgatggatgggagcgaaggggtcccggggtcgcggcgctgggcgggaggtggcgggggtggcgggggcgccacctacgttttccgggtgcgcgctggcgagctggaaccgttgctggtggcggccggaggcggcggtcgggcctacctgaggccgcgggaccgaggccggactcaggcctcccccgagaaactggagaaccgctcggaggcgcccgggagcggcgggagaggcggggcggcagggggcgacgcttcagagactgacaacctctgggctgatggggaagatggagtatccttcatacaccccagcagcgagctcttcctgcagcctctggcagtcaccgagaaccacggagaggtagagatccgaaggcacctcaactgcagtcactgccctttgagagactgccaatggcaggcagagctccagctggctgaatgcctgtgcccagaaggcatggagctagctgtggataacgtcacctgcatggacctgcacaagcccccaggccctctggttctgatggtggctgtggtggcaacctcaacactgagcctccttatggtgtgtggggtcctgattctgggtggggcttggcccggcccagtcctggcctctgccaccaggtgtcaccgaggtttccccagccaatgttactctgctcagaccctgccagaactctgctcgcctcaggatgagctggatttcctcatggaggccctcatcatcagcaagtttcgccatcagaacattgtgcggtgtgtggggctcagcctcagggccacccctcgcctcattctgctggaactgatgtctggaggggacatgaagagtttcctgaggcacagtcggccacacctgggccagccatcacctctggtcatgcgggacctgctgcaactggcccaggacatagcccagggctgccactacctggaggaaaatcacttcatccacagggatattgccgcccggaactgcctgctgagctgcgctggacccagccgagtggccaagattggggactttgggatggcacgagatatctaccgggccagttattaccgcaggggggaccgggccttgctcccagtcaagtggatgcccccagaggccttcctggagggcatcttcacatccaagacagattcctggtcttttggggtgctgctctgggagatcttctcactgggctacatgccctatcctgggcgcaccaaccaggaggtgctggacttcgtcgttggaggaggccggatggaccctcctaggggctgcccagggcctgtgtaccgcatcatgacccagtgttggcagcacgagcctgagctccgccctagctttgccagcatcttggagcgtctgcagtactgcactcaggacccggatgtgctgaattcactcctgccaatggagctggggcccaccccagaggaggaagggacttctgggctggggaacagatctttggagtgcctaagacccccacagccccaggaactgagtccagagaagttgaaaagctggggaggtagccctcttggcccctggctgtcctctggcctcaagcccctcaaatccaggggcctccaacctcagaacctttggaatcccacttatcgctcctgagccccaaggggccctgagggtaaggactgaggcactgagggtccctccctatactcctcaggctcctgggtggcctgttatgccagcggcctctgttccctgcagtctgtgctgtgtgtctgggcctgtctcggggctggcctggcagcgctgcacttgccatgctggaaaccagcccaggcctcccagggaagggcccagccacttccagcttttgatcttggggccagaggccgccttacacacaccccaggtgtccatggggagcactggattgctctcccattatgagcatccttcatctgggcagaccccccaccctgcagatgcttctaataaaaagctcttctcatc

SEQ ID NO: 50942 - DNA, 2205 bp, Artificial Sequence
  derived and/or modified sequence
atgggctgctggggccagctgctggtgtggttcggcgccgccggcgccatcctgtgcagttctcctggcagtcaagaaaccttcttgagatcgtcacctctcccacttgcgtctcccagccctagggacccaaaagtgtccgcaccaccatcgatactggaacccgccagccccctgaatagtcccggcactgaggggtcatggttattttcgacctgtggagcctccgggaggcacgggcctacccagacccagtgcgacggcgcctacgcagggacttctgtcgttgtgaccgtgggcgctgctgggcaactgagaggggtgcagttgtggagggtccctgggccgggacagtatttgatttcagcctacggagctgctggcggaaagggcgctaaaaaccatttgagccgtgcccacggggtgtttgtctcagccattttttccttgggactgggggagtccctctacattctagtgggtcagcaaggagaggatgcctgccctggaggttctcccgaatcacagttggtgtgcctcggagaaagccgagctgtggaggaacacgcagcaatggacggttccgagggcgtgcctggtagccgtcgatgggccgggggtggcggaggtggcgggggagcgacctacgtgttcagagtacgtgcaggcgagcttgagcctctcttagtggcagcgggaggtggcgggcgagcgtacctgcgcccgcgtgatagagggaggacacaggctagcccagaaaaactggaaaacagatcagaggctccaggctctggcggacggggcggagccgctggaggcgatgcatcagagactgataatttgtgggcagacggcgaggacggcgtttctttcatccatccatcttctgagctattcctgcagcccctcgcggtgacggaaaatcacggagaagtcgagattcgaaggcatttaaactgttcacattgcccactccgggactgccaatggcaggcggagctgcagcttgcagagtgtctgtgcccagaagggatggagctcgcagttgataacgtcacctgcatggacctgcacaagcctcccggcccattggtgctgatggtcgccgtggtggcgacctccacattatccctgctcatggtatgcggcgtattgatcttggggggcgcttggcctggtccagtcctcgcgtctgctacccggtgtcaccggggcttcccaagccaatgctactccgcccaaacacttcctgagctatgtagcccccaggatgaactggactttctcatggaggctctcatcatttccaaattcaggcatcagaatatagtacgatgcgtcggactcagtctgcgtgcgaccccccggctcatcctcctggagcttatgtcagggggcgatatgaagtccttccttaggcactcaagaccacatttaggccagccgtccccgctcgtaatgagggatcttctgcagttggctcaggatatcgcccaggggtgtcattatcttgaggagaatcacttcatccatcgcgacattgcggctagaaactgtctcctgtcatgtgctgggccatctcgcgtcgctaagattggcgactttggaatggccagggacatctatagagcttcctattaccgcaggggcgaccgggctctgctccccgtcaaatggatgcctccagaggcattcttagaggggatcttcacttcgaagaccgatagttggagtttcggcgtgctgctatgggagattttctccttggggtacatgccatacccaggtaggaccaatcaagaagtgttggacttcgtggtgggggggggacgcatggaccctccccggggatgcccaggcccagtgtaccgtatcatgactcaatgttggcaacacgaacccgagctgcgcccctcctttgcaagtatcctggaaagactccagtattgcactcaggacccagacgtgctgaatagcttgctaccaatggaactggggcccacaccggaggaagaaggcacctccgggttgggtaatcggtctttagagtgtcttcgcccaccccagccccaggagctcagccccgagaagttgaagtcctggggcgggtctccattgggcccctggctcagctcagggctgaagcccctgaagtcccggggactgcaaccccagaatctgtggaacccaacttatcggagctag

SEQ ID NO: 50943 - DNA, 2205 bp, Artificial Sequence
  derived and/or modified sequence
atgggttgttggggacaactcctagtctggttcggcgctgctggagctatcttatgttcaagtccaggctctcaggaaacctttttaagaagcagccctttaccccttgcctctcctagccctagagatccaaaagtgtctgcacccccatctattctagagcctgcttccccacttaatagccctggcacggaaggtagttggctcttctccacctgcggcgcttccggccgtcatggtccaacacagacccaatgtgatggcgcatatgcaggcacaagcgtcgtagttactgttggcgcagcaggacaactgagaggagtgcagttgtggagagtgccaggcccaggacaatacctgatcagcgcctatggagctgccggaggaaaaggagcaaaaaatcatctgtcaagggcgcatggggtattcgtctctgccatcttttcattgggcctcggtgagtctctctatattctagtgggacaacaaggcgaagacgcctgccccggaggttctcctgagagccagctagtctgccttggagaaagccgcgctgtcgaggaacatgccgctatggacggcagcgagggggtacctgggagtcgcaggtgggccggtggcggaggcggtggcggtggtgcaacgtacgtgtttagggtgagagccggagagcttgaaccactgttagtcgctgccggtggcggtggcagagcgtatctgagaccacgagatcgcggtcggactcaagcaagcccagagaaacttgagaacaggagtgaggcccctggcagtggcggtcgcggtggtgcggctggcggtgatgcttcggaaaccgacaacctgtgggctgacggcgaggacggcgtgtctttcatccacccatcatctgagttgttcctgcaacctttggccgtgaccgagaaccacggcgaggttgaaatcaggcgacatctaaactgctcccactgccctctccgggattgccaatggcaggcggaactccaattagccgaatgcctttgtcccgaaggtatggaactcgccgtagacaatgttacctgtatggatctacataaaccaccaggcccactcgtcttgatggttgcagtggtggcaactagtaccttgagtctgctcatggtctgtggggtgttaattttgggaggcgcatggcctggaccggtcctggcaagtgcgactaggtgccatcggggttttccaagtcagtgctattctgcccagacacttcccgagctgtgttccccgcaggacgaattggactttttgatggaggctttgatcatttccaagtttaggcaccagaatatcgttcgatgcgtgggcttgtctcttcgcgctactcctcggcttatactgctggaactgatgtctggaggtgacatgaaaagctttctgcggcactcccggccacatctgggccagccatctccccttgtgatgcgagacctccttcagctggcacaggacatcgcgcagggctgtcactatctagaggaaaaccattttatccatagagacatcgccgctagaaactgtttgctgagctgcgccggtcctagtcgggtcgctaagattggagactttggaatggctagagatatttacagggcctcctactaccggaggggagacagagccctgttaccggtgaagtggatgcctcctgaggcttttctcgagggcatctttacatcgaaaaccgatagctggtctttcggggtgctcctctgggagatcttctccttggggtatatgccatatcctggcagaacaaaccaggaggtcctagacttcgtggtcgggggtggacgaatggaccccccacgcggatgcccagggcctgtgtaccgcatcatgacccagtgctggcagcatgagccggagcttaggccttcattcgcctccatactggaacggttgcagtattgcactcaggatcccgacgtgctgaattcattgctccctatggagctcggcccaaccccagaggaagaagggacaagcggactcggtaatcggtccttggaatgtctgaggcccccacagccacaggaattaagcccagaaaagctgaaaagttggggcggtagccccctcggcccttggctctctagcggacttaaacccctaaaatctagaggtctgcagccacaaaatctgtggaatcctacctaccgcagttag

SEQ ID NO: 50944 - DNA, 2205 bp, Artificial Sequence
  derived and/or modified sequence
atgggctgctggggccagctgctggtgtggttcggcgccgccggcgccatcctgtgcagcagccccggcagccaggagaccttcctgagaagcagccccctgcccctggccagccccagccccagagaccccaaggtgagcgccccccccagcatcctggagcccgccagccccctgaacagccccggcaccgagggcagctggctgttcagcacctgcggcgccagcggcagacacggccccacccagacccagtgcgacggcgcctacgccggcaccagcgtggtggtgaccgtgggcgccgccggccagctgagaggcgtgcagctgtggagagtgcccggccccggccagtacctgatcagcgcctacggcgccgccggcggcaagggcgccaagaaccacctgagcagagcccacggcgtgttcgtgagcgccatcttcagcctgggcctgggcgagagcctgtacatcctggtgggccagcagggcgaggacgcctgccccggcggcagccccgagagccagctggtgtgcctgggcgagagcagagccgtggaggagcacgccgccatggacggcagcgagggcgtgcccggcagcagaagatgggccggcggcggcggcggcggcggcggcgccacctacgtgttcagagtgagagccggcgagctggagcccctgctggtggccgccggcggcggcggcagagcctacctgagacccagagacagaggcagaacccaggccagccccgagaagctggagaacagaagcgaggcccccggcagcggcggcagaggcggcgccgccggcggcgacgccagcgagaccgacaacctgtgggccgacggcgaggacggcgtgagcttcatccaccccagcagcgagctgttcctgcagcccctggccgtgaccgagaaccacggcgaggtggagatcagaagacacctgaactgcagccactgccccctgagagactgccagtggcaggccgagctgcagctggccgagtgcctgtgccccgagggcatggagctggccgtggacaacgtgacctgcatggacctgcacaagccccccggccccctggtgctgatggtggccgtggtggccaccagcaccctgagcctgctgatggtgtgcggcgtgctgatcctgggcggcgcctggcccggccccgtgctggccagcgccaccagatgccacagaggcttccccagccagtgctacagcgcccagaccctgcccgagctgtgcagcccccaggacgagctggacttcctgatggaggccctgatcatcagcaagttcagacaccagaacatcgtgagatgcgtgggcctgagcctgagagccacccccagactgatcctgctggagctgatgagcggcggcgacatgaagagcttcctgagacacagcagaccccacctgggccagcccagccccctggtgatgagagacctgctgcagctggcccaggacatcgcccagggctgccactacctggaggagaaccacttcatccacagagacatcgccgccagaaactgcctgctgagctgcgccggccccagcagagtggccaagatcggcgacttcggcatggccagagacatctacagagccagctactacagaagaggcgacagagccctgctgcccgtgaagtggatgccccccgaggccttcctggagggcatcttcaccagcaagaccgacagctggagcttcggcgtgctgctgtgggagatcttcagcctgggctacatgccctaccccggcagaaccaaccaggaggtgctggacttcgtggtgggcggcggcagaatggacccccccagaggctgccccggccccgtgtacagaatcatgacccagtgctggcagcacgagcccgagctgagacccagcttcgccagcatcctggagagactgcagtactgcacccaggaccccgacgtgctgaacagcctgctgcccatggagctgggccccacccccgaggaggagggcaccagcggcctgggcaacagaagcctggagtgcctgagacccccccagccccaggagctgagccccgagaagctgaagagctggggcggcagccccctgggcccctggctgagcagcggcctgaagcccctgaagagcagaggcctgcagccccagaacctgtggaaccccacctacagaagctag

SEQ ID NO: 50945 - protein, 29 aa, Artificial Sequence
  derived and/or modified sequence
FAEPLPSEEEGESYSKEVPEMEKRYGGFM

SEQ ID NO: 50946 - protein, 29 aa, Artificial Sequence
  derived and/or modified sequence
FAEPTBSEEEGESYSKEVPEMEKRYGGFM

SEQ ID NO: 50947 - protein, 267 aa, Artificial Sequence
  derived and/or modified sequence
MARFLTLCTWLLLLGPGLLATVRAECSQDCATCSYRLVRPADINFLACVMECEGKLPSLKIWETCKELLQLSKPELPQDGTSTLRENSKPEESHLLAKRYGGFMKRYGGFMKKMDELYPMEPEEEANGSEILAKRYGGFMKKDAEEDDSLANSSDLLKELLETGDNRERSHHQDGSDNEEEVSKRYGGFMRGLKRSPQLEDEAKELQKRYGGFMRRVGRPEWWMDYQKRYGGFLKRFAEALPSDEEGESYSKEVPEMEKRYGGFMRF

SEQ ID NO: 50948 - protein, 105 aa, Artificial Sequence
  derived and/or modified sequence
MARFLTLCTWLLLLGPGLLATVRAECSQDCATCSYRLVRPADINFLACVMECEGKLPSLKIWETCKELLQLSKPELPQDGTSTLRENSKPEESHLLAKRYGGFMK

SEQ ID NO: 50949 - protein, 189 aa, Artificial Sequence
  derived and/or modified sequence
MARFLTLCTWLLLLGPGLLATVRAECSQDCATCSYRLVRPADINFLACVMECEGKLPSLKIWETCKELLQLSKPELPQDGTSTLRENSKPEESHLLAKRYGGFMKRYGGFMKKMDELYPMEPEEEANGSEILAKRYGGFMKKDAEEDDSLANSSDLLKELLETGDNRERSHHQDGSDNEEEKKKKKRKE

SEQ ID NO: 50950 - DNA, 804 bp, Artificial Sequence
  derived and/or modified sequence
atggcccgtttcctcaccctgtgcacttggttactgctgctgggtcccgggctgttggccacagtcagagctgaatgctcccaggattgtgccacttgttcttaccggctcgtgcgccctgccgacattaacttccttgcttgcgtgatggaatgtgaaggaaagctcccctctctcaagatttgggagacttgtaaagaactgctgcagctttcgaagccagagctaccccaagacggcacgtccactctgcgcgagaatagcaagccagaggaaagtcatctgttagctaagcgatacggcggcttcatgaaaaggtacgggggcttcatgaagaaaatggacgaactctatcccatggagcccgaggaagaggcaaacgggagtgaaattctggccaaacgctacggcggcttcatgaaaaaagatgccgaggaggatgactccctagcaaactcctccgacttgcttaaagaattgctagaaacaggggataatcgagaacgaagtcaccaccaggacggttctgacaatgaagaggaggtgtcaaaacggtatgggggcttcatgcgcgggttaaagagaagcccgcagctcgaagacgaggccaaggagctgcagaaacgatacggcggcttcatgcgacgagtcggcagaccagagtggtggatggactaccaaaagcggtatggaggtttcctcaaaaggttcgcggaggccctacccagcgatgaggagggggaatcttactccaaggaggtgccagagatggagaagcgatacggcgggttcatgcggttttag

SEQ ID NO: 50951 - DNA, 804 bp, Artificial Sequence
  derived and/or modified sequence
atggcacgcttcctcacactgtgcacatggctgctcctgctaggacccgggctcctggcgacagtgagggccgagtgttcccaagactgcgccacctgcagttacaggctggtacggcccgccgatatcaattttctagcgtgtgttatggagtgcgaaggtaaattgccatcactgaaaatatgggaaacctgcaaggagcttctccagctgtccaaacccgagctcccacaggacgggacaagcaccctaagggaaaatagcaaacccgaggagagtcacctgcttgcgaaaagatacggaggattcatgaagcgctacggaggctttatgaaaaagatggatgaactctaccctatggagcccgaggaagaagcaaacggctctgagatccttgcaaaaagatacggaggtttcatgaagaaagatgccgaagaagacgattccctagctaactcttctgacctcctgaaggagctattagagaccggtgataacagggagcgcagtcaccatcaggacggtagtgacaatgaagaggaggtcagcaaacgttatgggggcttcatgcggggacttaaaagatcgcctcaactggaggatgaagccaaggaactccaaaaaagatatggcggcttcatgcggcgcgtgggccgtccggagtggtggatggactatcagaagaggtacggcggctttctcaagagatttgctgaggccttgcctagcgatgaggaaggggagagttattccaaagaagttcccgagatggagaaacggtatggcggattcatgaggttttag

SEQ ID NO: 50952 - DNA, 318 bp, Artificial Sequence
  derived and/or modified sequence
atggcccggttcctgaccctgtgtacgtggcttctcttgctgggccccgggctgctggccaccgttagggctgagtgctcccaggactgtgcaacctgcagttatcggctggtgaggcctgccgacattaacttccttgcctgtgtaatggagtgcgagggcaaattgccgagtctgaagatatgggagacgtgtaaggaactgctccagctgagtaaacccgagctcccacaagatgggacaagtaccctccgagaaaattcaaagcctgaagaaagccatttgctcgctaaaaggtacggcggtttcatgaagtag

SEQ ID NO: 50953 - DNA, 570 bp, Artificial Sequence
  derived and/or modified sequence
atggctaggttcctcaccctgtgtacctggctgttgctgctggggcctggcctcctggctaccgtgagggctgagtgttcccaagattgcgctacctgtagctatcgtctagtgaggcccgccgacataaactttctcgcttgcgtaatggagtgtgaaggtaaactgccgagcctgaagatctgggagacttgtaaagagctgctccagctttcaaaacctgagctgccacaggacggcacctctactcttagagagaattctaagcccgaggaaagccatctgctggctaagcggtacgggggcttcatgaaacgctatggggggttcatgaaaaaaatggatgaactctaccccatggaaccagaagaagaagccaacgggtccgaaatccttgctaaacggtacggaggcttcatgaaaaaggacgccgaggaggacgacagtctcgccaactccagcgatctgctgaaggaattacttgaaacaggggataaccgcgagcggagccaccaccaggatggatctgacaacgaagaggaaaaaaagaagaagaaaagaaaggaatag

SEQ ID NO: 50954 - DNA, 804 bp, Artificial Sequence
  derived and/or modified sequence
atggcccgcttcctgaccctgtgcacctggctgctgctgctgggccctggcctgctggccaccgtgcgggcagaatgttcccaggactgtgccacctgcagctaccgcctggtgcggcctgctgacatcaacttcctggcctgtgtgatggagtgtgagggcaagctgcccagcctgaagatctgggagacctgcaaggagctgctgcagctgagcaagccagagctgccccaggacggcaccagcaccctgcgggagaacagcaagccagaggagagccacctgctggccaagagatatggaggcttcatgaagagatatggaggcttcatgaagaagatggatgagctgtaccccatggagcctgaggaggaggccaatggaagtgagatcctggccaagagatatggaggcttcatgaagaaggatgctgaggaggatgacagcctggccaacagcagtgacctgctgaaggagctgctggagactggagacaaccgggagaggagccaccaccaggacggcagtgacaatgaggaggaggtgtccaagagatatggaggcttcatgaggggcctgaagaggagcccccagctggaggatgaggccaaggagctgcagaagagatatggaggcttcatgagaagagtgggccggcctgagtggtggatggactaccagaagagatatggaggcttcctgaagagatttgctgaggccctgcccagtgatgaggagggggagagctacagcaaggaggtgcctgagatggagaagagatatggaggcttcatgaggttctag

SEQ ID NO: 50955 - DNA, 318 bp, Artificial Sequence
  derived and/or modified sequence
atggcccgcttcctgaccctgtgcacctggctgctgctgctgggccctggcctgctggccaccgtgcgggcagaatgttcccaggactgtgccacctgcagctaccgcctggtgcggcctgctgacatcaacttcctggcctgtgtgatggagtgtgagggcaagctgcccagcctgaagatctgggagacctgcaaggagctgctgcagctgagcaagccagagctgccccaggacggcaccagcaccctgcgggagaacagcaagccagaggagagccacctgctggccaagagatatggaggcttcatgaagtag

SEQ ID NO: 50956 - DNA, 570 bp, Artificial Sequence
  derived and/or modified sequence
atggcccgcttcctgaccctgtgcacctggctgctgctgctgggccctggcctgctggccaccgtgcgggcagaatgttcccaggactgtgccacctgcagctaccgcctggtgcggcctgctgacatcaacttcctggcctgtgtgatggagtgtgagggcaagctgcccagcctgaagatctgggagacctgcaaggagctgctgcagctgagcaagccagagctgccccaggacggcaccagcaccctgcgggagaacagcaagccagaggagagccacctgctggccaagagatatggaggcttcatgaagagatatggaggcttcatgaagaagatggatgagctgtaccccatggagcctgaggaggaggccaatggaagtgagatcctggccaagagatatggaggcttcatgaagaaggatgctgaggaggatgacagcctggccaacagcagtgacctgctgaaggagctgctggagactggagacaaccgggagaggagccaccaccaggacggcagtgacaatgaggaggagaagaagaagaagaagaggaaggagtag

SEQ ID NO: 50957 - DNA, 804 bp, Artificial Sequence
  derived and/or modified sequence
atggcccggttcctgaccctgtgcacctggctgctgctgctgggccctggattacttgccacagtgagggctgagtgctcccaggactgcgctacttgctcgtacagactcgtaaggcctgccgacatcaactttttggcgtgtgtgatggagtgcgagggcaagctgccttctctcaaaatttgggaaacttgcaaggaattgttgcagctcagtaaacctgagttgccgcaggatggaacctccaccctcagggagaatagcaaacccgaagagtcacacctcctagccaaacggtacggcggtttcatgaaaagatacggtgggtttatgaagaagatggacgaactgtaccccatggagcccgaagaagaagcaaacggtagcgagattcttgccaaacgttatggtggtttcatgaaaaaagacgccgaggaggatgattccctggcaaactcttctgacctgctcaaggagctgctcgaaacaggtgacaatagagagagaagccaccaccaggacggttctgataatgaggaagaggtatctaagcgatacggcgggttcatgcgcggcctgaagcgaagcccacagttggaggatgaggccaaagagctgcagaagcgctacggagggtttatgcgccgggtcggtcgccccgaatggtggatggactaccagaagcggtatggaggcttcctgaagcggttcgcagaggcccttccttctgacgaggaaggcgagagttatagcaaggaggtaccggagatggagaagagatacggtggtttcatgcgcttttag

SEQ ID NO: 50958 - DNA, 804 bp, Artificial Sequence
  derived and/or modified sequence
atggcccggttcctgaccctgtgcacctggctgctgctgctgggccctggactccttgcaaccgttcgcgccgagtgcagccaagattgcgcaacctgctcgtacaggctggtgagacctgccgacatcaacttcctagcttgcgtcatggagtgcgaaggaaagctgccctccctgaagatctgggagacgtgtaaggagctcttgcagctttccaagcctgagctgccacaggatggaacctctacactcagagagaacagtaaaccagaggagagccacctgctggcgaaaaggtatgggggttttatgaagcggtacggagggtttatgaaaaagatggatgaactgtaccctatggaacccgaagaggaagcaaacgggagtgagatactggctaagcgctatggtggatttatgaaaaaagacgccgaggaagatgattcattggcaaacagctcagacctgctcaaggaactacttgagactggggacaatcgagaacggtcgcatcaccaggacgggtcagataatgaagaagaagtgtcaaagcgatacggaggttttatgcgtggccttaaaaggtccccacagctggaggatgaagctaaggaactacaaaaacgatacgggggttttatgagaagagtgggcagacccgaatggtggatggattatcagaagcgatacggaggcttcctcaaacggttcgctgaggcactcccttcagacgaggagggggaaagttacagtaaggaggtgcctgagatggagaagcgctacgggggcttcatgcggttttag

SEQ ID NO: 50959 - DNA, 318 bp, Artificial Sequence
  derived and/or modified sequence
atggcccggttcctgaccctgtgcacctggctgctgctgctgggccctggtctacttgccacagtccgggcagagtgcagccaggactgtgcaacctgtagttatcgtctggttaggccagcagacatcaactttctcgcatgtgtgatggagtgcgaaggaaaacttccctcactcaaaatatgggaaacctgtaaggaactcttacagttatccaaaccagagctgccgcaagacggcacatcgacgctgagagagaacagcaaacctgaagaatcccatttgcttgcgaaacgctacggggggttcatgaaatag

SEQ ID NO: 50960 - DNA, 570 bp, Artificial Sequence
  derived and/or modified sequence
atggcccggttcctgaccctgtgcacctggctgctgctgctgggccctgggctactcgcaacagtgagagctgagtgtagccaagactgcgccacctgtagttacagactggtccgacctgccgatataaattttttagcttgcgtgatggagtgtgaggggaaactgcctagtctgaagatctgggaaacatgtaaggagctgctgcagctgtctaagcctgaactcccccaggatggaactagtaccttgcgggagaactcaaagccggaggaatctcacctactcgctaaaaggtacggcggtttcatgaaacgatatggcgggtttatgaagaagatggatgaactttaccctatggagcctgaggaagaggccaatggatccgagattctagcaaaacgctatggtggcttcatgaaaaaagacgctgaagaggacgacagcctggctaatagtagtgacctgctcaaggagctcctcgagactggggataaccgggagcgatcccaccaccaggatggctccgataatgaagaggagaagaagaaaaaaaagagaaaagagtag

SEQ ID NO: 50961 - DNA, 804 bp, Artificial Sequence
  derived and/or modified sequence
atggcccgttttctcaccctgtgcacttggttgctgctcctgggcccagggcttctggcaactgtgcgtgcagagtgcagccaggactgcgcaacttgttcttatcgtcttgtccggccagcagacatcaactttcttgcctgtgttatggagtgtgagggaaaattgccatcactgaaaatttgggagacctgcaaggaactgctccaactcagcaaaccggaactgccccaggacggtacctcaaccctcagggaaaactccaagccggaagagagccacttgctcgcaaagcggtacggtggctttatgaaaagatatggcggatttatgaagaaaatggacgaactgtaccccatggaacccgaggaggaggccaatggaagcgaaattctggccaaaagatatggcggattcatgaagaaagacgccgaagaggatgattcattggcgaactcttcagaccttttgaaggagctgttggagacgggagataatcgggaacgttcacatcaccaggacggctctgataacgaggaagaagtgtcaaagcgttacggaggctttatgaggggcctcaagaggtcaccgcagctcgaagatgaggccaaggaattacagaaaaggtatgggggatttatgaggcgcgtaggaagacctgagtggtggatggattaccagaaaaggtacgggggattccttaaaagatttgcagaggctttgcccagtgatgaggaaggtgaaagttattccaaggaggtaccagagatggagaagcgctacgggggattcatgcgcttctag

SEQ ID NO: 50962 - DNA, 804 bp, Artificial Sequence
  derived and/or modified sequence
atggcaaggtttttgacgttgtgcacatggcttcttctgctagggccagggcttctggctactgtgagggctgagtgctcacaagactgtgccacatgtagctaccgtttagttagaccagccgatattaactttcttgcatgcgtaatggaatgcgaagggaagctgcctagtctgaagatctgggaaacttgcaaggagctcttgcagctgtctaaacccgaacttccacaggatgggacttccactttaagggaaaatagcaagccggaagagtcacacctgctggcaaagagatacggtggctttatgaagaggtatggcggatttatgaaaaaaatggatgaactgtacccgatggagccggaagaagaggctaatggatctgaaatccttgcaaagagatacggagggttcatgaaaaaagatgcggaggaggacgatagcctggccaatagttctgacctgttgaaggagttgctcgagactggtgataacagggaaagaagccatcaccaggatggaagtgacaatgaggaggaggtgagtaaacgatacgggggattcatgcgcggactcaagaggtcccctcagctggaagacgaggcaaaagagctacagaagcgctacggcggtttcatgcgcagagtcggcagaccggaatggtggatggactaccagaaaaggtatgggggttttctgaagcgctttgcggaagccctgccaagcgacgaagaaggcgagtcctattcgaaagaggttcctgaaatggagaaacgttatggaggattcatgaggttttag

SEQ ID NO: 50963 - DNA, 318 bp, Artificial Sequence
  derived and/or modified sequence
atggccagattcttaacactgtgcacctggcttctgctgctagggcctggtctgctggctaccgttagagccgagtgcagccaggattgcgctacttgctcataccgcctggttcgtcccgctgacattaacttcctagcgtgcgttatggagtgtgaaggcaagttgccaagcttaaaaatctgggagacctgcaaagaactgctgcagttgtcaaagccagagttgccacaggatggaactagcacattgagagaaaattctaagcccgaggaatctcatcttctcgccaagcgatatggcggattcatgaaatag

SEQ ID NO: 50964 - DNA, 570 bp, Artificial Sequence
  derived and/or modified sequence
atggcacgtttcctgaccctctgtacatggttgctactgctcggtccaggcttgctcgccactgtcagggccgagtgttcccaggactgcgctacatgctcctatcgcctggtgcgccctgcagacattaacttcttggcttgcgttatggagtgcgaaggaaagctgcccagcctaaagatctgggaaacatgcaaagaattgctccagctttcaaagcctgagttgccccaggatggtactagcaccctgcgcgagaatagtaagcctgaggagtctcacctgctggccaaacgatacgggggtttcatgaagaggtacggcggattcatgaaaaagatggatgagctctacccgatggagcctgaagaagaagcgaatggctcagagattttagccaagagatacggcggatttatgaagaaggacgctgaggaagacgactcactcgctaatagttcagaccttcttaaggagttactggagacaggggacaatagagaacggagccaccaccaagatggttccgacaacgaggaggaaaaaaaaaagaaaaagcgcaaagagtag

SEQ ID NO: 50965 - DNA, 1199 bp, Artificial Sequence
  derived and/or modified sequence
cggcgagggtcctgccgagggaccccgttctgcgcccaggcaggctcgaagcacgcgtccctctctcctcgcagtccatggcgcggttcctgacactttgcacttggctgctgttgctcggccccgggctcctggcgaccgtgcgggccgaatgcagccaggattgcgcgacgtgcagctaccgcctagtgcgcccggccgacatcaacttcctggcttgcgtaatggaatgtgaaggtaaactgccttctctgaaaatttgggaaacctgcaaggagctcctgcagctgtccaaaccagagcttcctcaagatggcaccagcaccctcagagaaaatagcaaaccggaagaaagccatttgctagccaaaaggtatgggggcttcatgaaaaggtatggaggcttcatgaagaaaatggatgagctttatcccatggagccagaagaagaggccaatggaagtgagatcctcgccaagcggtatgggggcttcatgaagaaggatgcagaggaggacgactcgctggccaattcctcagacctgctaaaagagcttctggaaacaggggacaaccgagagcgtagccaccaccaggatggcagtgataatgaggaagaagtgagcaagagatatgggggcttcatgagaggcttaaagagaagcccccaactggaagatgaagccaaagagctgcagaagcgatatgggggcttcatgagaagagtaggtcgcccagagtggtggatggactaccagaaacggtatggaggtttcctgaagcgctttgccgaggctctgccctccgacgaagaaggcgaaagttactccaaagaagttcctgaaatggaaaaaagatacggaggatttatgagattttaatatcttttcccactagtggccccaggccccagcaagcctccctccatcctccagtgggaaactgttgatggtgttttattgtcatgtgttgcttgccttgtatagttgacttcattgtctggataactatacaacctgaaaactgtcatttcaggttctgtgctctttttggagtctttaagctcagtattagtctattgcagctatctcgttttcatgctaaaatagtttttgttatcttgtctcttatttttgacaaacatcaataaatgcttacttgtatatagagataataaacctattaccccaagtgcataa

SEQ ID NO: 50966 - DNA, 1029 bp, Artificial Sequence
  derived and/or modified sequence
ctgcgtcagctgcagcccgccggcgattggggcgcgcgcgcctccttcggtttggggctaattataaagtggctccagcagccgttaagccccgggacggcgaggcaggcgctcagagccccgcagcctggcccgtgaccccgcagagacgctgaggaccgcgacgagtcgtgtctgaacccggcttttccaattggcctgctccatccgaacagcgtcaactccatggcgcggttcctgacactttgcacttggctgctgttgctcggccccgggctcctggcgaccgtgcgggccgaatgcagccaggattgcgcgacgtgcagctaccgcctagtgcgcccggccgacatcaacttcctggcttgcgtaatggaatgtgaaggtaaactgccttctctgaaaatttgggaaacctgcaaggagctcctgcagctgtccaaaccagagcttcctcaagatggcaccagcaccctcagagaaaatagcaaaccggaagaaagccatttgctagccaaaaggtatgggggcttcatgaaaaggtatggaggcttcatgaagaaaatggatgagctttatcccatggagccagaagaagaggccaatggaagtgagatcctcgccaagcggtatgggggcttcatgaagaaggatgcagaggaggacgactcgctggccaattcctcagacctgctaaaagagcttctggaaacaggggacaaccgagagcgtagccaccaccaggatggcagtgataatgaggaagaagtgagcaagagatatgggggcttcatgagaggcttaaagagaagcccccaactggaagatgaagccaaagagctgcagaagcgatatgggggcttcatgagaagagtaggtcgcccagagtggtggatggactaccagaaacggtatggaggtttcctgaagcgctttgccgaggctctgccctccgacgaagaaggcgaaagttactccaaagaagttcctgaaatggaaaaaagatacggaggatttatgagattttaa

SEQ ID NO: 50967 - DNA, 467 bp, Artificial Sequence
  derived and/or modified sequence
gacggtgaggccctacgtccgccagcacacccgggcccgcttctccccgacgcccgccctcctcacacttgccttcttctcttccctctagagtcgtgtctgaacccggcttttccaattggcctgctccatccgaacagcgtcaactccatggcgcggttcctgacactttgcacttggctgctgttgctcggccccgggctcctggcgaccgtgcgggccgaatgcagccaggattgcgcgacgtgcagctaccgcctagtgcgcccggccgacatcaacttcctggcttgcgtaatggaatgtgaaggtaaactgccttctctgaaaatttgggaaacctgcaaggagctcctgcagctgtccaaaccagagcttcctcaagatggcaccagcaccctcagagaaaatagcaaaccggaagaaagccatttgctagccaaaaggtatgggggcttcatgaaaag

SEQ ID NO: 50968 - DNA, 781 bp, Artificial Sequence
  derived and/or modified sequence
gcagcccgccggcgattggggcgcgcgcgcctccttcggtttggggctaattataaagtggctccagcagccgttaagccccgggacggcgaggcaggcgctcagagccccgcagcctggcccgtgaccccgcagagacgctgaggaccgcgacgagtcgtgtctgaacccggcttttccaattggcctgctccatccgaacagcgtcaactccatggcgcggttcctgacactttgcacttggctgctgttgctcggccccgggctcctggcgaccgtgcgggccgaatgcagccaggattgcgcgacgtgcagctaccgcctagtgcgcccggccgacatcaacttcctggcttgcgtaatggaatgtgaaggtaaactgccttctctgaaaatttgggaaacctgcaaggagctcctgcagctgtccaaaccagagcttcctcaagatggcaccagcaccctcagagaaaatagcaaaccggaagaaagccatttgctagccaaaaggtatgggggcttcatgaaaaggtatggaggcttcatgaagaaaatggatgagctttatcccatggagccagaagaagaggccaatggaagtgagatcctcgccaagcggtatgggggcttcatgaagaaggatgcagaggaggacgactcgctggccaattcctcagacctgctaaaagagcttctggaaacaggggacaaccgagagcgtagccaccaccaggatggcagtgataatgaggaagaaaaaaaaaaaaaaaaaagaaaagaa

SEQ ID NO: 50969 - DNA, 804 bp, Artificial Sequence
  derived and/or modified sequence
atggccagattcctgaccctgtgcacctggctgctgctgctgggccccggcctgctggccaccgtgagagccgagtgcagccaggactgcgccacctgcagctacagactggtgagacccgccgacatcaacttcctggcctgcgtgatggagtgcgagggcaagctgcccagcctgaagatctgggagacctgcaaggagctgctgcagctgagcaagcccgagctgccccaggacggcaccagcaccctgagagagaacagcaagcccgaggagagccacctgctggccaagagatacggcggcttcatgaagagatacggcggcttcatgaagaagatggacgagctgtaccccatggagcccgaggaggaggccaacggcagcgagatcctggccaagagatacggcggcttcatgaagaaggacgccgaggaggacgacagcctggccaacagcagcgacctgctgaaggagctgctggagaccggcgacaacagagagagaagccaccaccaggacggcagcgacaacgaggaggaggtgagcaagagatacggcggcttcatgagaggcctgaagagaagcccccagctggaggacgaggccaaggagctgcagaagagatacggcggcttcatgagaagagtgggcagacccgagtggtggatggactaccagaagagatacggcggcttcctgaagagattcgccgaggccctgcccagcgacgaggagggcgagagctacagcaaggaggtgcccgagatggagaagagatacggcggcttcatgagattctag

SEQ ID NO: 50970 - DNA, 318 bp, Artificial Sequence
  derived and/or modified sequence
atggccagattcctgaccctgtgcacctggctgctgctgctgggccccggcctgctggccaccgtgagagccgagtgcagccaggactgcgccacctgcagctacagactggtgagacccgccgacatcaacttcctggcctgcgtgatggagtgcgagggcaagctgcccagcctgaagatctgggagacctgcaaggagctgctgcagctgagcaagcccgagctgccccaggacggcaccagcaccctgagagagaacagcaagcccgaggagagccacctgctggccaagagatacggcggcttcatgaagtag

SEQ ID NO: 50971 - DNA, 570 bp, Artificial Sequence
  derived and/or modified sequence
atggccagattcctgaccctgtgcacctggctgctgctgctgggccccggcctgctggccaccgtgagagccgagtgcagccaggactgcgccacctgcagctacagactggtgagacccgccgacatcaacttcctggcctgcgtgatggagtgcgagggcaagctgcccagcctgaagatctgggagacctgcaaggagctgctgcagctgagcaagcccgagctgccccaggacggcaccagcaccctgagagagaacagcaagcccgaggagagccacctgctggccaagagatacggcggcttcatgaagagatacggcggcttcatgaagaagatggacgagctgtaccccatggagcccgaggaggaggccaacggcagcgagatcctggccaagagatacggcggcttcatgaagaaggacgccgaggaggacgacagcctggccaacagcagcgacctgctgaaggagctgctggagaccggcgacaacagagagagaagccaccaccaggacggcagcgacaacgaggaggagaagaagaagaagaagagaaaggagtag

SEQ ID NO: 50972 - protein, 263 aa, Artificial Sequence
  derived and/or modified sequence
MAETLFWTPLLVVLLAGLGDTEAQQTTLHPLVGRVFVHTLDHETFLSLPEHVAVPPAVHITYHAHLQGHPDLPRWLRYTQRSPHHPGFLYGSATPEDRGLQVIEVTAYNRDSFDTTRQRLVLEIGDPEGPLLPYQAEFLVRSHDAEEVLPSTPASRFLSALGGLWEPGELQLLNVTSALDRGGRVPLPIEGRKEGLKRDLATSDIQMVHHCTIHGNTEELRQMAASREVPRPLSTLPMFNVHTGERLPPRVDSAQVPLILDQH

SEQ ID NO: 50973 - protein, 263 aa, Artificial Sequence
  derived and/or modified sequence
MAETLFWTPLLVVLLAGLGDTEAQQTTLHPLVGRVFVHTLDHETFLSLPEHVAVPPAVHITYHAHLQGHPDLPRWLRYTQRSPHHPGFLYGSATPEDRGLQVIEVTAYNRDSFDTTRQRLVLEIGDPEGPLLPYQAEFLVRSHDAEEVLPSTPASRFLSALGGLWEPGELQLLNVTSALDRGGRVPLPIEGRKEVLLRHLGTPLIQMVHHCTIHGNTEELRQMAASREVPRPLSTLPMFNVHTGERLPPRVDSAQVPLILDQH

SEQ ID NO: 50974 - DNA, 792 bp, Artificial Sequence
  derived and/or modified sequence
atggctgaaactttgttctggactcccttgttggtagtccttctagccggcctgggcgacacagaagctcagcagacaacactccaccctctggttgggcgggtgttcgttcatactcttgatcatgaaacttttctctccttgcccgagcatgttgctgtgccacccgccgtgcacataacataccatgcacatctccagggacacccagacctgccacgctggttgaggtacacacagaggagcccccatcatcccggctttctttacggctcggcgacaccggaagatcgggggctgcaagtgattgaggttaccgcgtacaatcgggactcctttgatacaacacggcagcgcttggtgctagaaattggcgaccccgagggcccacttctgccctaccaggctgagtttcttgtgcggtcccatgatgccgaggaagtgctgccttccacaccagcttcgcggttcctgagcgctttgggtggcctgtgggagccaggagagcttcaattgttaaacgtcaccagcgccttagaccgaggagggcgcgtacctctgcccattgagggccgtaaggaaggcctgaagagggatctcgccacatctgacattcagatggtgcaccattgtaccatacatgggaacaccgaagagctgcgccagatggctgctagtagagaggtcccaagacccctgtccactctcccaatgttcaacgtccacacaggagagaggctacctcctcgagtggattctgctcaggttcctcttattttggaccagcactag

SEQ ID NO: 50975 - DNA, 792 bp, Artificial Sequence
  derived and/or modified sequence
atggcagaaactttattctggacacccctgttagtcgttcttctggcagggcttggggacaccgaggcacaacagaccacactccatcctcttgtggggcgcgtctttgtccacacactggaccacgaaacatttttgtccctgccagagcacgtagccgtgccgcccgctgtgcatatcacataccacgcgcatctgcaagggcacccagatttgcctcgatggttgcgctacacacagaggagtccacatcatcctgggtttctttacggaagcgccacacccgaggacagaggactacaggtgatcgaggtgacagcctacaacagagattcattcgacaccacccgccagcgcctggtcctggaaatcggggatcccgaaggcccactcttgccataccaggccgagttcctcgtcagaagccacgacgccgaagaggttcttccctctacaccagcatctagattcttatcagccctcgggggtctttgggagccaggcgagttgcagctgcttaacgttacctcggccctggatcgtggggggcgcgtgcccctccctatcgagggtaggaaggaggtgcttctcaggcacttagggactcccttaatccaaatggtccatcactgcaccattcatggaaatactgaggagctgagacagatggctgcctcccgagaagtcccccggccactctccaccctaccgatgtttaacgttcacacgggtgagcgcttacctcccagggttgattccgcgcaggtgccccttatattggatcaacactag

SEQ ID NO: 50976 - DNA, 792 bp, Artificial Sequence
  derived and/or modified sequence
atggccgagaccctcttctggacccccctgctggtggtgctgctggccggcctgggggacacagaggcccagcagaccaccctgcaccccctggtgggccgggtgtttgtgcacaccctggaccacgagaccttcctgagcctgcctgagcacgtggccgtgcccccagctgtgcacatcacctaccacgcccacctgcagggccacccagacctgccccgctggctgcgctacacccagaggagcccccaccaccctggcttcctgtatggcagcgccaccccagaggaccggggcctgcaggtgattgaggtgacagcctacaacagagacagctttgacaccacccggcagaggctggtgctggagatcggggaccctgagggccccctgctgccctaccaggccgagttcctggtgcgcagccatgatgctgaggaggtgctgcccagcaccccagccagccgcttcctgagcgccctgggcggcctgtgggagcctggagagctgcagctgctgaatgtgaccagcgccctggaccggggcggccgggtgcccctgcccatcgagggcaggaaggagggcctgaagagggacctggccaccagtgacatccagatggtgcaccactgcaccatccacggcaacacagaggagctgcggcagatggccgccagccgggaggtgccccggcccctgagcaccctgcccatgttcaacgtgcacactggagagcggctgcccccccgggtggacagcgcccaggtgcccctcatcctggaccagcactag

SEQ ID NO: 50977 - DNA, 792 bp, Artificial Sequence
  derived and/or modified sequence
atggccgagaccctcttctggacccccctgctggtggtgctgctggccggcctgggggacacagaggcccagcagaccaccctgcaccccctggtgggccgggtgtttgtgcacaccctggaccacgagaccttcctgagcctgcctgagcacgtggccgtgcccccagctgtgcacatcacctaccacgcccacctgcagggccacccagacctgccccgctggctgcgctacacccagaggagcccccaccaccctggcttcctgtatggcagcgccaccccagaggaccggggcctgcaggtgattgaggtgacagcctacaacagagacagctttgacaccacccggcagaggctggtgctggagatcggggaccctgagggccccctgctgccctaccaggccgagttcctggtgcgcagccatgatgctgaggaggtgctgcccagcaccccagccagccgcttcctgagcgccctgggcggcctgtgggagcctggagagctgcagctgctgaatgtgaccagcgccctggaccggggcggccgggtgcccctgcccatcgagggcaggaaggaggtgctgctgcggcacctgggcacccccctcatccagatggtgcaccactgcaccatccacggcaacacagaggagctgcggcagatggccgccagccgggaggtgccccggcccctgagcaccctgcccatgttcaacgtgcacactggagagcggctgcccccccgggtggacagcgcccaggtgcccctcatcctggaccagcactag

SEQ ID NO: 50978 - DNA, 792 bp, Artificial Sequence
  derived and/or modified sequence
atggccgagaccctgttctggacccccctgctggtggtgctgctggctggactcggggacactgaggcacagcagacaaccctgcacccactcgtgggtcgggtgtttgttcacaccctcgaccatgaaacatttctgagccttccagaacatgttgctgtgcctccagcagtccatattacttatcatgctcatctccagggacacccagatttgcccagatggttaagatatacacagcgaagtccccaccatccagggtttctctatggctctgctacacctgaagaccggggcctccaggtaatcgaggtgaccgcttacaaccgagatagttttgataccacaaggcaacgtctcgttcttgagataggcgatcccgagggaccactgctaccataccaggccgagttcctcgtaaggtcacacgatgctgaagaagtcctccctagtacccctgcctcccgcttcctgagcgcactcggaggcctttgggagcccggcgagcttcagcttctcaatgtgacaagcgcactggacaggggaggaagggtccctcttcctatcgagggaaggaaagaagggctgaagagggatctggcaacttcagatattcagatggtgcaccattgtactattcacggaaacaccgaggaactgaggcaaatggcggccagcagggaggtgcctcgcccgcttagcacactgccaatgttcaatgtgcacacaggcgaacgtctgcctcctcgggtggacagcgcccaggtgcccttgatcctagaccagcactag

SEQ ID NO: 50979 - DNA, 792 bp, Artificial Sequence
  derived and/or modified sequence
atggccgagaccctgttctggacccccctgctggtggtgctgctggcaggactgggggacaccgaagcacagcagaccacgctccacccactcgtcgggagagtgtttgtccacacactagatcatgagacattcctgagcttgcctgaacatgtagctgtgccaccagcggtgcatattacataccatgcacatctgcagggacatcccgatctgccacgctggctccggtatacacagagaagccctcaccacccggggttcctgtacggatctgctactcccgaggatcggggcctgcaggtaattgaagtcacggcctataaccgggacagctttgacacaacccggcagcgccttgtgctggagattggagaccccgaaggccccctcctgccataccaggccgagttccttgtgcgctcccacgacgctgaagaagtgctaccttccacgcccgcatcacgatttttgtctgcgctgggtgggctttgggagcccggtgaactgcagctgcttaatgtcaccagcgccttggaccgggggggacgggtgcctctgccaatagaggggcggaaagaagtcctgctcagacacctgggaacacccctcatccagatggtgcaccattgtaccatccacggcaatactgaagagttgcgacagatggctgcttcccgggaggtcccccggcctctgagcaccctcccaatgtttaacgtgcacacaggagagagactccccccgcgggtggacagcgcacaggtgcccctgatactggaccaacactag

SEQ ID NO: 50980 - DNA, 792 bp, Artificial Sequence
  derived and/or modified sequence
atggccgagacgctgttctggacgccgcttcttgtggttctgctcgccggactgggggatactgaagctcagcagaccacgctacacccgctggtcggcagagtcttcgtgcacactcttgaccatgagaccttcctttccttgcccgagcacgtcgcggtccctcccgcagtgcatatcacctatcacgcccatctgcagggccatcctgatttacccagatggctgcgctacacacagcggagcccacaccaccccggattcctgtacggcagcgccactccagaggatagaggtttgcaggtcatcgaagtcactgcctataacagggattcgttcgacaccaccagacagcggcttgtgctggagattggcgaccccgaaggaccactcctaccatatcaggctgaatttctggtgcgatcccacgacgcagaggaagtcctgcctagcacacccgcaagccggttcctcagcgccctcgggggactgtgggaaccaggcgagcttcagctgttgaacgtcacctccgctttggatcgcggtggccgtgtccccttaccaattgagggaagaaaagagggtttaaagcgcgatctcgccaccagtgacattcagatggtgcaccactgcactatacacggcaataccgaggagctgaggcaaatggcggcttcacgggaggttcctaggcctcttagcacccttcctatgttcaacgtgcataccggcgagaggctgcctcctcgagtggattccgctcaggtgcctctaatactggaccagcattag

SEQ ID NO: 50981 - DNA, 792 bp, Artificial Sequence
  derived and/or modified sequence
atggcagagacgctcttctggacgccactgctggtcgtgctgctggctggcctgggggacactgaggcccaacaaacaacacttcacccactggtgggaagggtgttcgtccatactctggatcacgaaacgtttctcagtttgccagagcacgtggcagtgccaccagccgtgcatatcacttaccatgctcacttacagggacaccctgacttaccaaggtggctcagatatacccagcggtcaccacaccaccccggattcctgtatggaagtgcaactccagaggatagaggactgcaggtgattgaggtcactgcatacaaccgagatagctttgacactacccgtcagagactagtcctcgagattggggaccctgaaggaccactgctgccctaccaagccgaattcctcgtccgaagccatgatgccgaggaggtgttgccatccactcccgcatcccgttttctgagtgctctgggcggtctctgggagcccggagaactgcagctgctcaacgtgacgagcgcacttgatcgcggtggtagggtcccactgcctatagaggggagaaaagaggttttgttgcgccacttaggaacaccgctcattcagatggttcaccactgtaccatacatggcaacactgaggagctccgtcagatggcggctagtcgcgaagttccccgacctctatccaccctgcccatgttcaacgttcacacaggagaaaggctgccaccaagagttgactctgcgcaggtccctctcatattagatcagcactag

SEQ ID NO: 50982 - DNA, 1057 bp, Artificial Sequence
  derived and/or modified sequence
ctctgtcactcaccgggcgggccaggccgggcagccatggctgagacactcttctggactcctctcctcgtggttctcctggcagggctgggggacaccgaggcccagcagaccacgctacacccacttgtgggccgtgtctttgtgcacaccttggaccatgagacgtttctgagccttcctgagcatgtcgctgtcccacccgctgtccacatcacctaccacgcccacctccagggacacccagacctgccccggtggctccgctacacccagcgcagcccccaccaccctggcttcctctacggctctgccaccccagaagatcgtgggctccaggtcattgaggtcacagcctacaatcgggacagctttgataccactcggcagaggctggtgctggagattggggacccagaaggccccctgctgccataccaagccgagttcctggtgcgcagccacgatgcggaggaggtgctgccctcaacacctgccagccgcttcctctcagccttggggggactctgggagcccggagagcttcagctgctcaacgtcacctctgccttggaccgtgggggccgtgtcccccttcccattgagggccgaaaagaagggctgaagagagacctggctacctccgacatccagatggtccaccactgcaccatccacgggaacacagaggagctgcggcagatggcggccagccgcgaggtgccccggccactctccaccctgcccatgttcaatgtgcacacaggtgagcggctgcctccccgcgtggacagcgcccaggtgcccctcattctggaccagcactgacagcctagccagtggttccaggtccagccctgacttcatcctcccttctctgtccacaccacgagtggcacatcccacctgctgattccagctcctggccctcctggaacccaggctctaaacaagcagggagagggggtggggtggggtgagagtgtgtggagtaaggacattcagaataaatatctgctgctctgctcaccaattgctgctggcagcctctcccgtc

SEQ ID NO: 50983 - DNA, 1060 bp, Artificial Sequence
  derived and/or modified sequence
ctctgtcactcaccgggcgggccaggccgggcagccatggctgagacactcttctggactcctctcctcgtggttctcctggcagggctgggggacaccgaggcccagcagaccacgctacacccacttgtgggccgtgtctttgtgcacaccttggaccatgagacgtttctgagccttcctgagcatgtcgctgtcccacccgctgtccacatcacctaccacgcccacctccagggacacccagacctgccccggtggctccgctacacccagcgcagcccccaccaccctggcttcctctacggctctgccaccccagaagatcgtgggctccaggtcattgaggtcacagcctacaatcgggacagctttgataccactcggcagaggctggtgctggagattggggacccagaaggccccctgctgccataccaagccgagttcctggtgcgcagccacgatgcggaggaggtgctgccctcaacacctgccagccgcttcctctcagccttggggggactctgggagcccggagagcttcagctgctcaacgtcacctctgccttggaccgtgggggccgtgtcccccttcccattgagggccgaaaagaagtcttgctacgacaccttggcaccccactcatccagatggtccaccactgcaccatccacgggaacacagaggagctgcggcagatggcggccagccgcgaggtgccccggccactctccaccctgcccatgttcaatgtgcacacaggtgagcggctgcctccccgcgtggacagcgcccaggtgcccctcattctggaccagcactgacagcctagccagtggttccaggtccagccctgacttcatcctcccttctctgtccacaccacgagtggcacatcccacctgctgattccagctcctggccctcctggaacccaggctctaaacaagcagggagagggggtggggtggggtgagagtgtgtggagtaaggacattcagaataaatatctgctgctctgctcaccaattgctgctggcagcctctcccgtcctc

SEQ ID NO: 50984 - DNA, 789 bp, Artificial Sequence
  derived and/or modified sequence
atggccgagaccctgttctggacccccctgctggtggtgctgctggccggcctgggcgacaccgaggcccagcagaccaccctgcaccccctggtgggccgcgtgttcgtgcacaccctggaccacgagaccttcctgagcctgcccgagcacgtggccgtgccccccgccgtgcacatcacctaccacgcccacctgcagggccaccccgacctgccccgctggctgcgctacacccagcgcagcccccaccaccccggcttcctgtacggcagcgccacccccgaggaccgcggcctgcaggtgatcgaggtgaccgcctacaaccgcgacagcttcgacaccacccgccagcgcctggtgctggagatcggcgaccccgagggccccctgctgccctaccaggccgagttcctggtgcgcagccacgacgccgaggaggtgctgcccagcacccccgccagccgcttcctgagcgccctgggcggcctgtgggagcccggcgagctgcagctgctgaacgtgaccagcgccctggaccgcggcggccgcgtgcccctgcccatcgagggccgcaaggagggcctgaagcgcgacctggccaccagcgacatccagatggtgcaccactgcaccatccacggcaacaccgaggagctgcgccagatggccgccagccgcgaggtgccccgccccctgagcaccctgcccatgttcaacgtgcacaccggcgagcgcctgcccccccgcgtggacagcgcccaggtgcccctgatcctggaccagcac

SEQ ID NO: 50985 - DNA, 789 bp, Artificial Sequence
  derived and/or modified sequence
atggccgagaccctgttctggacccccctgctggtggtgctgctggccggcctgggcgacaccgaggcccagcagaccaccctgcaccccctggtgggccgcgtgttcgtgcacaccctggaccacgagaccttcctgagcctgcccgagcacgtggccgtgccccccgccgtgcacatcacctaccacgcccacctgcagggccaccccgacctgccccgctggctgcgctacacccagcgcagcccccaccaccccggcttcctgtacggcagcgccacccccgaggaccgcggcctgcaggtgatcgaggtgaccgcctacaaccgcgacagcttcgacaccacccgccagcgcctggtgctggagatcggcgaccccgagggccccctgctgccctaccaggccgagttcctggtgcgcagccacgacgccgaggaggtgctgcccagcacccccgccagccgcttcctgagcgccctgggcggcctgtgggagcccggcgagctgcagctgctgaacgtgaccagcgccctggaccgcggcggccgcgtgcccctgcccatcgagggccgcaaggaggtgctgctgcgccacctgggcacccccctgatccagatggtgcaccactgcaccatccacggcaacaccgaggagctgcgccagatggccgccagccgcgaggtgccccgccccctgagcaccctgcccatgttcaacgtgcacaccggcgagcgcctgcccccccgcgtggacagcgcccaggtgcccctgatcctggaccagcac

SEQ ID NO: 50986 - DNA, 792 bp, Artificial Sequence
  derived and/or modified sequence
atggccgagaccctgttctggacccccctgctggtggtgctgctggccggcctgggcgacaccgaggcccagcagaccaccctgcaccccctggtgggcagagtgttcgtgcacaccctggaccacgagaccttcctgagcctgcccgagcacgtggccgtgccccccgccgtgcacatcacctaccacgcccacctgcagggccaccccgacctgcccagatggctgagatacacccagagaagcccccaccaccccggcttcctgtacggcagcgccacccccgaggacagaggcctgcaggtgatcgaggtgaccgcctacaacagagacagcttcgacaccaccagacagagactggtgctggagatcggcgaccccgagggccccctgctgccctaccaggccgagttcctggtgagaagccacgacgccgaggaggtgctgcccagcacccccgccagcagattcctgagcgccctgggcggcctgtgggagcccggcgagctgcagctgctgaacgtgaccagcgccctggacagaggcggcagagtgcccctgcccatcgagggcagaaaggagggcctgaagagagacctggccaccagcgacatccagatggtgcaccactgcaccatccacggcaacaccgaggagctgagacagatggccgccagcagagaggtgcccagacccctgagcaccctgcccatgttcaacgtgcacaccggcgagagactgccccccagagtggacagcgcccaggtgcccctgatcctggaccagcactag

SEQ ID NO: 50987 - DNA, 792 bp, Artificial Sequence
  derived and/or modified sequence
atggccgagaccctgttctggacccccctgctggtggtgctgctggccggcctgggcgacaccgaggcccagcagaccaccctgcaccccctggtgggcagagtgttcgtgcacaccctggaccacgagaccttcctgagcctgcccgagcacgtggccgtgccccccgccgtgcacatcacctaccacgcccacctgcagggccaccccgacctgcccagatggctgagatacacccagagaagcccccaccaccccggcttcctgtacggcagcgccacccccgaggacagaggcctgcaggtgatcgaggtgaccgcctacaacagagacagcttcgacaccaccagacagagactggtgctggagatcggcgaccccgagggccccctgctgccctaccaggccgagttcctggtgagaagccacgacgccgaggaggtgctgcccagcacccccgccagcagattcctgagcgccctgggcggcctgtgggagcccggcgagctgcagctgctgaacgtgaccagcgccctggacagaggcggcagagtgcccctgcccatcgagggcagaaaggaggtgctgctgagacacctgggcacccccctgatccagatggtgcaccactgcaccatccacggcaacaccgaggagctgagacagatggccgccagcagagaggtgcccagacccctgagcaccctgcccatgttcaacgtgcacaccggcgagagactgccccccagagtggacagcgcccaggtgcccctgatcctggaccagcactag

SEQ ID NO: 50988 - protein, 245 aa, Artificial Sequence
  derived and/or modified sequence
MDKNELVQKAKLAEQAERYDDMAACMKSVTEQGAELSNEERNLLSVAYKNVVGARRSSWRVVSSIEQKTEGAEKKQQMAREYREKIETELRDICNDVLSLLEKFLIPNASQAESKVFYLKMKGDYYRYLAEVAAGDDKKGIVDQSQQAYQEAFEISKKEMQPTHPIRLGLALNFSVFYYEILNSPEKACSLAKTAFDEAIAELDTLSEESYKDSTLIMQLLRDNLTLWTSDTQGDEAEAGEGGEN

SEQ ID NO: 50989 - protein, 168 aa, Artificial Sequence
  derived and/or modified sequence
MAREYREKIETELRDICNDVLSLLEKFLIPNASQAESKVFYLKMKGDYYRYLAEVAAGDDKKGIVDQSQQAYQEAFEISKKEMQPTHPIRLGLALNFSVFYYEILNSPEKACSLAKTAFDEAIAELDTLSEESYKDSTLIMQLLRDNLTLWTSDTQGDEAEAGEGGEN

SEQ ID NO: 50990 - protein, 98 aa, Artificial Sequence
  derived and/or modified sequence
MDKNELVQKAKLAEQAERYDDMAACMKSVTEQGAELSNEERNLLSVAYKNVVGARRSSWRVVSSIEQKTEGAEKKQQMAREYREKIETELRDICNDVL

SEQ ID NO: 50991 - protein, 92 aa, Artificial Sequence
  derived and/or modified sequence
MDKNELVQKAKLAEQAERYDDMAACMKSVTEQGAELSNEERNLLSVAYKNVVGARRSSWRVVSSIEQKTEGAEKKQQMAREYREKIETELRD

SEQ ID NO: 50992 - protein, 125 aa, Artificial Sequence
  derived and/or modified sequence
MKGDYYRYLAEVAAGDDKKGIVDQSQQAYQEAFEISKKEMQPTHPIRLGLALNFSVFYYEILNSPEKACSLAKTAFDEAIAELDTLSEESYKDSTLIMQLLRDNLTLWTSDTQGDEAEAGEGGEN

SEQ ID NO: 50993 - protein, 137 aa, Artificial Sequence
  derived and/or modified sequence
MDKNELVQKAKLAEQAERYDDMAACMKSVTEQGAELSNEERNLLSVAYKNVVGARRSSWRVVSSIEQKTEGAEKKQQMAREYREKIETELRDICNDVLSLLEKFLIPNASQAESKVFYLKMKGDYYRYLAEVAAGDD

SEQ ID NO: 50994 - protein, 246 aa, Artificial Sequence
  derived and/or modified sequence
MDKNELVQKAKLAEQAERYDDMAACMKSVTEQGAELSNEERNLLSVAYKNVVGARRSSWRVVSSIEQKTEGAEKKQQMAREYREKIETELRDICNDVLSLLEKFLIPNASQAESKVFYLKMKGDYYRYLAEVAAGDDKKVRFGVSYPGIVDQSQQAYQEAFEISKKEMQPTHPIRLGLALNFSVFYYEILNSPEKACSLAKTAFDEAIAELDTLSEESYKDSTLIMQLLRDNLTLWTSDTQGDEAE

SEQ ID NO: 50995 - protein, 170 aa, Artificial Sequence
  derived and/or modified sequence
MSQPCRKLWRHNYETSSCIEFLKSLLEKFLIPNASQAESKVFYLKMKGDYYRYLAEVAAGDDKKGIVDQSQQAYQEAFEISKKEMQPTHPIRLGLALNFSVFYYEILNSPEKACSLAKTAFDEAIAELDTLSEESYKDSTLIMQLLRDNLTLWTSDTQGDEAEAGEGGEN

SEQ ID NO: 50996 - protein, 75 aa, Artificial Sequence
  derived and/or modified sequence
MDKNELVQKAKLAEQAERYDDMAACMKSVTEQGAELSNEERNLLSVAYKNVVGARRSSWRVVSSIEQKTEGAEKK

SEQ ID NO: 50997 - protein, 130 aa, Artificial Sequence
  derived and/or modified sequence
VFYLKMKGDYYRYLAEVAAGDDKKGIVDQSQQAYQEAFEISKKEMQPTHPIRLGLALNFSVFYYEILNSPEKACSLAKTAFDEAIAELDTLSEESYKDSTLIMQLLRDNLTLWTSDTQGDEAEAGEGGEN

SEQ ID NO: 50998 - protein, 52 aa, Artificial Sequence
  derived and/or modified sequence
MDKNELVQKAKLAEQAERYDDMAACMKSVTEQGAELSNEERNLLSVAYKNVV

SEQ ID NO: 50999 - DNA, 738 bp, Artificial Sequence
  derived and/or modified sequence
atggacaagaacgagctggtgcagaaggccaagctggccgagcaggccgagagatacgacgacatggccgcctgcatgaagagcgtgaccgagcagggcgccgagctgagcaacgaggagagaaacctgctgagcgtggcctacaagaacgtggtgggcgccagaagaagcagctggagagtggtgagcagcatcgagcagaagaccgagggcgccgagaagaagcagcagatggccagagagtacagagagaagatcgagaccgagctgagagacatctgcaacgacgtgctgagcctgctggagaagttcctgatccccaacgccagccaggccgagagcaaggtgttctacctgaagatgaagggcgactactacagatacctggccgaggtggccgccggcgacgacaagaagggcatcgtggaccagagccagcaggcctaccaggaggccttcgagatcagcaagaaggagatgcagcccacccaccccatcagactgggcctggccctgaacttcagcgtgttctactacgagatcctgaacagccccgagaaggcctgcagcctggccaagaccgccttcgacgaggccatcgccgagctggacaccctgagcgaggagagctacaaggacagcaccctgatcatgcagctgctgagagacaacctgaccctgtggaccagcgacacccagggcgacgaggccgaggccggcgagggcggcgagaactag

SEQ ID NO: 51000 - DNA, 507 bp, Artificial Sequence
  derived and/or modified sequence
atggccagagagtacagagagaagatcgagaccgagctgagagacatctgcaacgacgtgctgagcctgctggagaagttcctgatccccaacgccagccaggccgagagcaaggtgttctacctgaagatgaagggcgactactacagatacctggccgaggtggccgccggcgacgacaagaagggcatcgtggaccagagccagcaggcctaccaggaggccttcgagatcagcaagaaggagatgcagcccacccaccccatcagactgggcctggccctgaacttcagcgtgttctactacgagatcctgaacagccccgagaaggcctgcagcctggccaagaccgccttcgacgaggccatcgccgagctggacaccctgagcgaggagagctacaaggacagcaccctgatcatgcagctgctgagagacaacctgaccctgtggaccagcgacacccagggcgacgaggccgaggccggcgagggcggcgagaactag

SEQ ID NO: 51001 - DNA, 297 bp, Artificial Sequence
  derived and/or modified sequence
atggacaagaacgagctggtgcagaaggccaagctggccgagcaggccgagagatacgacgacatggccgcctgcatgaagagcgtgaccgagcagggcgccgagctgagcaacgaggagagaaacctgctgagcgtggcctacaagaacgtggtgggcgccagaagaagcagctggagagtggtgagcagcatcgagcagaagaccgagggcgccgagaagaagcagcagatggccagagagtacagagagaagatcgagaccgagctgagagacatctgcaacgacgtgctgtag

SEQ ID NO: 51002 - DNA, 279 bp, Artificial Sequence
  derived and/or modified sequence
atggacaagaacgagctggtgcagaaggccaagctggccgagcaggccgagagatacgacgacatggccgcctgcatgaagagcgtgaccgagcagggcgccgagctgagcaacgaggagagaaacctgctgagcgtggcctacaagaacgtggtgggcgccagaagaagcagctggagagtggtgagcagcatcgagcagaagaccgagggcgccgagaagaagcagcagatggccagagagtacagagagaagatcgagaccgagctgagagactag

SEQ ID NO: 51003 - DNA, 378 bp, Artificial Sequence
  derived and/or modified sequence
atgaagggcgactactacagatacctggccgaggtggccgccggcgacgacaagaagggcatcgtggaccagagccagcaggcctaccaggaggccttcgagatcagcaagaaggagatgcagcccacccaccccatcagactgggcctggccctgaacttcagcgtgttctactacgagatcctgaacagccccgagaaggcctgcagcctggccaagaccgccttcgacgaggccatcgccgagctggacaccctgagcgaggagagctacaaggacagcaccctgatcatgcagctgctgagagacaacctgaccctgtggaccagcgacacccagggcgacgaggccgaggccggcgagggcggcgagaactag

SEQ ID NO: 51004 - DNA, 414 bp, Artificial Sequence
  derived and/or modified sequence
atggacaagaacgagctggtgcagaaggccaagctggccgagcaggccgagagatacgacgacatggccgcctgcatgaagagcgtgaccgagcagggcgccgagctgagcaacgaggagagaaacctgctgagcgtggcctacaagaacgtggtgggcgccagaagaagcagctggagagtggtgagcagcatcgagcagaagaccgagggcgccgagaagaagcagcagatggccagagagtacagagagaagatcgagaccgagctgagagacatctgcaacgacgtgctgagcctgctggagaagttcctgatccccaacgccagccaggccgagagcaaggtgttctacctgaagatgaagggcgactactacagatacctggccgaggtggccgccggcgacgactag

SEQ ID NO: 51005 - DNA, 741 bp, Artificial Sequence
  derived and/or modified sequence
atggacaagaacgagctggtgcagaaggccaagctggccgagcaggccgagagatacgacgacatggccgcctgcatgaagagcgtgaccgagcagggcgccgagctgagcaacgaggagagaaacctgctgagcgtggcctacaagaacgtggtgggcgccagaagaagcagctggagagtggtgagcagcatcgagcagaagaccgagggcgccgagaagaagcagcagatggccagagagtacagagagaagatcgagaccgagctgagagacatctgcaacgacgtgctgagcctgctggagaagttcctgatccccaacgccagccaggccgagagcaaggtgttctacctgaagatgaagggcgactactacagatacctggccgaggtggccgccggcgacgacaagaaggtgagattcggcgtgagctaccccggcatcgtggaccagagccagcaggcctaccaggaggccttcgagatcagcaagaaggagatgcagcccacccaccccatcagactgggcctggccctgaacttcagcgtgttctactacgagatcctgaacagccccgagaaggcctgcagcctggccaagaccgccttcgacgaggccatcgccgagctggacaccctgagcgaggagagctacaaggacagcaccctgatcatgcagctgctgagagacaacctgaccctgtggaccagcgacacccagggcgacgaggccgagtag

SEQ ID NO: 51006 - DNA, 513 bp, Artificial Sequence
  derived and/or modified sequence
atgagccagccctgcagaaagctgtggagacacaactacgagaccagcagctgcatcgagttcctgaagagcctgctggagaagttcctgatccccaacgccagccaggccgagagcaaggtgttctacctgaagatgaagggcgactactacagatacctggccgaggtggccgccggcgacgacaagaagggcatcgtggaccagagccagcaggcctaccaggaggccttcgagatcagcaagaaggagatgcagcccacccaccccatcagactgggcctggccctgaacttcagcgtgttctactacgagatcctgaacagccccgagaaggcctgcagcctggccaagaccgccttcgacgaggccatcgccgagctggacaccctgagcgaggagagctacaaggacagcaccctgatcatgcagctgctgagagacaacctgaccctgtggaccagcgacacccagggcgacgaggccgaggccggcgagggcggcgagaactag

SEQ ID NO: 51007 - DNA, 228 bp, Artificial Sequence
  derived and/or modified sequence
atggacaagaacgagctggtgcagaaggccaagctggccgagcaggccgagagatacgacgacatggccgcctgcatgaagagcgtgaccgagcagggcgccgagctgagcaacgaggagagaaacctgctgagcgtggcctacaagaacgtggtgggcgccagaagaagcagctggagagtggtgagcagcatcgagcagaagaccgagggcgccgagaagaagtag

SEQ ID NO: 51008 - DNA, 393 bp, Artificial Sequence
  derived and/or modified sequence
gtgttctacctgaagatgaagggcgactactacagatacctggccgaggtggccgccggcgacgacaagaagggcatcgtggaccagagccagcaggcctaccaggaggccttcgagatcagcaagaaggagatgcagcccacccaccccatcagactgggcctggccctgaacttcagcgtgttctactacgagatcctgaacagccccgagaaggcctgcagcctggccaagaccgccttcgacgaggccatcgccgagctggacaccctgagcgaggagagctacaaggacagcaccctgatcatgcagctgctgagagacaacctgaccctgtggaccagcgacacccagggcgacgaggccgaggccggcgagggcggcgagaactag

SEQ ID NO: 51009 - DNA, 159 bp, Artificial Sequence
  derived and/or modified sequence
atggacaagaacgagctggtgcagaaggccaagctggccgagcaggccgagagatacgacgacatggccgcctgcatgaagagcgtgaccgagcagggcgccgagctgagcaacgaggagagaaacctgctgagcgtggcctacaagaacgtggtgtag

SEQ ID NO: 51010 - DNA, 738 bp, Artificial Sequence
  derived and/or modified sequence
atggataagaatgaacttgtccagaaggcaaaacttgctgaacaagcagaacgctacgacgatatggcagcttgcatgaagtctgtgaccgagcagggtgcagagttaagcaatgaagagaggaaccttctttctgtggcctacaaaaatgtcgtgggcgcaaggcggagttcatggcgagtagtgagctcgatcgagcagaagacagaaggggcagaaaaaaagcagcagatggcgcgtgagtacagagagaagatagaaactgaattgcgagatatctgtaatgacgtcctgagcctgctagagaagtttctaatacctaacgcctcacaagcagaaagcaaggtattttatctaaagatgaagggggattattacaggtacctggccgaagtggctgctggggacgacaagaagggtattgtggaccagagtcagcaggcttaccaggaggcattcgagatttctaaaaaggagatgcagcccacccacccgattcggctaggactcgccctgaatttctccgtattctattatgaaatccttaacagcccagagaaagcatgttcattggccaagacggcttttgatgaggccattgccgagctcgatacgcttagtgaagaatcttacaaggactcaaccctgataatgcaacttctgcgggacaatcttaccttatggacatccgatacacagggggacgaggctgaggccggagaaggtggcgaaaactag

SEQ ID NO: 51011 - DNA, 507 bp, Artificial Sequence
  derived and/or modified sequence
atggcccgggagtatcgggagaaaattgagacagagctccgggacatttgcaacgatgttttatcgctccttgaaaagtttttaatccctaatgcatcccaggcagagtctaaggtgttctatctgaaaatgaagggcgactattaccgctatctagccgaggtggcagctggcgacgataaaaaggggatcgtggaccaatcccagcaggcttatcaggaagctttcgaaatcagtaaaaaggagatgcaaccgacacatcctatccgcctggggcttgctctgaatttcagcgtgttctattatgaaatactcaatagtccagagaaagcctgttctctggctaagacggcatttgatgaagctattgcagaactggataccctcagcgaagagtcatataaggactccacactgattatgcagctcctgcgtgacaatttgaccctttggacatctgacacccagggcgatgaagccgaggcaggcgaaggaggagagaactag

SEQ ID NO: 51012 - DNA, 738 bp, Artificial Sequence
  derived and/or modified sequence
atggacaagaatgaactggtccaaaaggcgaaactcgcggagcaggccgaacggtacgacgacatggccgcctgtatgaagtcagtgacagaacagggagccgagttgtcaaacgaggagcgtaacctcttatctgtcgcttacaaaaacgtggtgggagccaggagatcaagttggcgcgtggtgagcagcatcgagcaaaagaccgaaggagctgaaaaaaagcagcaaatggcaagggagtatagagagaagattgaaacggagctgcgcgatatttgcaacgacgtgttaagtctcctcgaaaagtttcttatccctaatgccagccaagccgaatctaaggttttttaccttaagatgaagggcgactactatcggtacttggcagaagtggccgctggagatgacaagaaggggatagtggaccagtcacagcaggcataccaagaggcgttcgaaatctctaagaaagagatgcaacccacccaccccattaggttaggactggctctgaatttcagcgtgttctattacgaaatcctgaacagccctgagaaagcctgttccttggctaaaactgcctttgatgaagcgatcgcagagctcgacacactgagcgaggagagttataaggattccaccctgatcatgcagcttctcagagataacctgactctctggacctccgatacacaaggagacgaggccgaagcaggtgaaggaggcgagaactag

SEQ ID NO: 51013 - DNA, 738 bp, Artificial Sequence
  derived and/or modified sequence
atggataagaatgaattggttcagaaagccaagctggcagagcaagcagagcgctatgacgacatggccgcttgcatgaagtccgtcactgaacagggtgccgagctgtctaatgaggagaggaacttgctgagcgttgcatacaagaacgtagtgggcgcaaggcgcagcagctggcgtgtggtatcctctatcgaacaaaagaccgagggggccgagaaaaagcagcaaatggccagagaataccgggagaaaatcgagacggaactgagggatatatgcaacgacgtgctgtccctgctggaaaagttcctgatccctaacgcatctcaggcagaaagcaaagtcttttatctgaagatgaaaggggactattacagatacctggccgaggtagctgccggcgacgacaagaaggggatcgtcgatcagtcacagcaggcataccaagaagcatttgagataagcaaaaaagaaatgcagccaacccaccccatccgcctgggactcgccctgaatttctccgtgttttactatgagatattaaattcaccagaaaaggcgtgttctttagctaaaactgcttttgacgaggcgatcgccgagctggacacgctgtctgaagagtcgtacaaggatagcaccctcatcatgcagttactccgcgacaacctgactctgtggacatcagacactcagggagacgaggcagaggccggcgaaggaggagagaactag

SEQ ID NO: 51014 - DNA, 738 bp, Artificial Sequence
  derived and/or modified sequence
atggacaaaaatgagcttgtacaaaaggcgaaactggctgagcaggctgagcgctatgacgatatggccgcatgtatgaagagtgtcacagagcaaggcgcggaactgagcaacgaggagcggaacttgctaagtgtcgcttacaaaaatgtggtgggcgcacggagatcatcctggagagttgtcagcagtatcgagcagaagacggaaggggcggagaagaagcagcaaatggcccgggagtatagggaaaaaatcgaaacagaactgagagacatctgcaacgacgtcctgagtttacttgaaaaattcctcattcccaacgcttcccaggccgaaagcaaagtattctatctcaaaatgaaaggcgactattatcggtacctcgctgaggtagctgccggggacgataagaagggcattgtcgaccagtcacaacaggcctaccaggaagcctttgagatcagcaaaaaagagatgcagcccacccaccccatccgcttgggattggctctcaacttcagtgtgttctactacgagatcctgaactcacctgagaaggcttgcagcttagccaaaaccgcttttgacgaggctattgccgagttggacacacttagcgaagagagttacaaggatagtacccttatcatgcagctgttgcgcgacaacctgacgctgtggacttctgatacacagggcgacgaggccgaagcaggggaaggtggcgagaattag

SEQ ID NO: 51015 - DNA, 738 bp, Artificial Sequence
  derived and/or modified sequence
atggacaagaatgagcttgtgcagaaggctaaactggccgagcaggccgagcggtacgatgatatggctgcgtgtatgaagtccgtgacagagcagggagctgagcttagtaacgaagagcgaaacctgctctcagtcgcctataagaacgtggtcggtgcccgcaggagcagctggcgggtggttagcagcattgagcaaaaaactgagggagccgagaagaaacaacaaatggctagagagtatcgggaaaaaatcgaaactgaactgcgtgatatctgcaatgacgtgctttcacttctggagaagttcttgatcccaaacgcaagtcaggctgaatctaaagtcttctaccttaaaatgaaaggagactactaccggtatcttgctgaagtggctgcaggtgatgacaagaaaggaatcgtggaccagtcacaacaagcgtaccaagaggcttttgaaatctcaaaaaaggagatgcaacctactcaccccatccgcttagggttggccctgaatttttccgtcttttattacgagattctgaactcacctgaaaaggcctgctcgcttgcgaagacagccttcgacgaagccatcgccgaactggacaccctgtcggaggagtcttataaggactccactttgatcatgcagctgctgcgggataacctcacactttggacatcggatacacaaggagacgaagctgaagcaggggaaggcggggaaaattag

SEQ ID NO: 51016 - DNA, 738 bp, Artificial Sequence
  derived and/or modified sequence
atggataagaatgagttggttcagaaggccaagttagcagagcaggccgagcgctacgatgacatggcagcatgcatgaagtccgtgacagaacaaggcgcagagttaagcaacgaggagcggaacctcctgtctgtggcctataagaatgttgttggagcacggcgctcctcatggagggttgtgtccagtatagagcagaagacagaaggagccgaaaaaaagcagcaaatggctagggagtatagagagaaaattgaaaccgaactgcgagacatctgcaatgacgtgctatccctgctcgagaaattcctcattcctaatgccagccaggcagagtcaaaagtgttttatctaaaaatgaaaggtgactactaccgttacttggctgaggtagcggcaggggatgataaaaagggcatagtcgatcaaagccagcaagcttaccaggaagcctttgaaatttcaaagaaggagatgcagccaactcacccaattcgtctgggactcgcgctgaattttagcgttttttactatgagatcctcaacagtcctgaaaaggcatgttctctggcaaaaaccgcctttgatgaggcaattgccgaactagacactttgagcgaggaaagctacaaggattccactcttatcatgcaattacttcgagacaacctgacgttgtggacctctgatacgcagggcgacgaagctgaggcaggcgaaggaggagaaaactag

SEQ ID NO: 51017 - DNA, 297 bp, Artificial Sequence
  derived and/or modified sequence
atggataaaaatgagctcgtgcaaaaggcaaaacttgccgaacaggcagagcggtacgatgatatggcggcctgtatgaaaagcgtcaccgagcaaggggccgagctcagtaatgaggagaggaatctgctctctgtggcatataagaacgtggtaggcgctaggcgctcgagttggcgcgtggtgtcctccatcgagcaaaagacagaaggggctgaaaagaaacaacagatggcccgcgaatacagagagaagattgagacggagttgcgcgatatttgcaatgatgtgttgtag

SEQ ID NO: 51018 - DNA, 738 bp, Artificial Sequence
  derived and/or modified sequence
atggacaagaacgaattagtccagaaagcaaaactggccgaacaggcagaaagatacgacgacatggcagcctgtatgaaatcagtcaccgaacagggcgctgaactcagcaacgaggaaagaaacctgctctccgtggcttacaagaatgtagtgggagctcggcgctccagttggcgggtggtttcgagtatcgaacagaagaccgagggggccgaaaagaagcagcagatggcacgcgagtatcgggaaaagattgagaccgaactgcgggacatctgtaacgacgtcctcagtctgctcgagaaatttttgatcccaaatgctagccaggctgagtccaaagtcttctatctcaagatgaagggcgattattaccggtacttggccgaagtcgcagccggagatgacaaaaagggaatcgtcgatcagtctcaacaggcctaccaggaggccttcgaaatatccaaaaaagagatgcagcctacacatccgattaggctgggactggcccttaattttagtgttttttactacgagattctcaactcccctgaaaaggcttgttctctcgcaaaaaccgcatttgatgaggcaatcgccgagctcgacacactctcggaagaaagctataaagactccactctgatcatgcaactgttgagggataatctcactctgtggactagtgatacccagggcgacgaggccgaagctggagaaggcggggagaattag

SEQ ID NO: 51019 - DNA, 279 bp, Artificial Sequence
  derived and/or modified sequence
atggataagaatgaactggtgcagaaggcaaaactggccgaacaggctgaaagatacgatgatatggcggcctgcatgaagagcgtgaccgagcagggggccgagcttagcaacgaagagagaaatttattaagcgtggcatacaagaatgtggttggcgcacgtaggagtagctggcgggttgtgtccagcattgagcaaaaaactgagggggctgagaaaaagcagcagatggcccgggagtacagagaaaaaatcgagacagaactgcgtgactag

SEQ ID NO: 51020 - DNA, 738 bp, Artificial Sequence
  derived and/or modified sequence
atggacaagaacgagctggtgcaaaaggctaaattagccgagcaggcagagagatatgatgacatggcggcctgtatgaagtccgtgaccgaacaaggggctgaactgagcaatgaagaacgaaatttgctgtcagtggcctacaagaacgttgtaggcgcgcgacgctcttcttggcgggtggtcagctcaattgagcaaaaaaccgagggggccgaaaagaaacagcagatggcgcgagagtaccgcgaaaagatagaaactgagctgcgcgatatttgcaacgacgtcctgagtctcctagaaaagttcctcattcccaatgcttcgcaggcagagagtaaggttttttatctcaaaatgaaaggcgactactaccggtaccttgctgaggtggctgcaggggacgacaagaagggcatcgttgatcagagtcagcaagcctaccaagaagcctttgagatcagtaagaaagagatgcaacccacgcaccccatccgcctaggcctggctctcaacttcagcgtgttttattacgagatactaaacagccccgaaaaggcctgttctttagctaaaacagcttttgacgaagctattgccgaactggatacattgtccgaagaatcgtacaaggattccaccctaattatgcagctgttgagagataacctgactctgtggaccagtgatactcagggcgatgaggcggaggccggcgagggcggtgaaaactag

SEQ ID NO: 51021 - DNA, 507 bp, Artificial Sequence
  derived and/or modified sequence
atggcccgcgagtatcgggagaagatagagaccgaattgcgggacatttgtaatgatgtcctgtccttgctcgagaagtttctcatcccgaatgcgtctcaggccgagagtaaggtgttctatcttaagatgaagggcgattattatcgctacctggccgaggtggccgccggcgacgacaagaaaggtattgtcgaccagtctcaacaggcatatcaggaagcattcgagatcagcaaaaaggagatgcaaccaacacatccgatcaggctggggctggctctgaacttcagcgtgttttattacgagattcttaactcacctgaaaaggcatgctccttggccaaaacagcgtttgacgaagcaatcgctgaactcgacactctctccgaagaatcttataaggactctacccttattatgcagcttctaagggacaatctaaccctgtggacgagtgatactcagggtgacgaagcggaggccggcgagggcggggagaactag

SEQ ID NO: 51022 - DNA, 378 bp, Artificial Sequence
  derived and/or modified sequence
atgaaaggagactactaccgctacctggcagaagtcgccgcgggcgacgacaaaaaaggcattgtggatcagtctcagcaggcataccaagaggccttcgaaatctccaagaaagaaatgcagcctacacaccccattcggctgggactagctctaaacttctccgtgttctattacgagatcctgaatagtccagaaaaggcgtgctcactcgcaaagacagctttcgatgaggccatcgctgagctcgatactctgtctgaggaatcctataaggacagtacgttgatcatgcaactgctgcgcgataatttgacactctggactagcgacacacagggggatgaagccgaggctggggaaggcggagagaattag

SEQ ID NO: 51023 - DNA, 414 bp, Artificial Sequence
  derived and/or modified sequence
atggacaaaaacgagctcgttcaaaaggctaagttggccgagcaggcggaacgctacgacgacatggctgcgtgtatgaagtccgtcaccgaacagggggcagagttgtcgaatgaggagcggaacctgttgtccgtcgcctataagaatgtggtgggggctaggaggtccagttggagggtggtcagcagtatcgagcaaaagactgaaggcgctgagaaaaagcagcagatggctagggagtatcgtgaaaagatcgagacggaactgagagatatttgtaacgatgttctgtccctgctcgagaaattcctgatccctaacgcgtcccaggccgaaagtaaggtgttttacctgaagatgaagggagactactatcgatacttggccgaggttgccgctggcgatgattag

SEQ ID NO: 51024 - DNA, 741 bp, Artificial Sequence
  derived and/or modified sequence
atggacaagaatgagctcgtacagaaagcgaagctagccgaacaggcggagcggtacgatgatatggctgcctgcatgaagtccgtgactgaacagggggctgagctgtctaatgaagaacgaaacctcctttccgtggcttataagaatgtggtgggtgcccggaggagttcctggcgtgtcgtgtcctccattgaacagaaaaccgagggcgcggagaagaaacagcagatggctagggagtacagggagaagattgagacagaactcagagatatatgcaacgacgttctgtctttactagagaagtttcttattcctaacgcttctcaagcagaatcaaaagttttctatctgaaaatgaagggtgactattaccgatatctcgccgaagtggcggctggtgatgacaagaaagtgcgttttggtgtatcctacccgggcattgtcgaccagtcacagcaggcctaccaagaagccttcgaaataagcaagaaagaaatgcagcccacccatccgattcggctgggcttagcactgaactttagcgtgttttattacgagatactgaattcacctgaaaaggcttgttcccttgctaagactgcatttgacgaagcaattgctgaactggacactctgtcggaggagtcatataaggactcaaccctgatcatgcagctgctccgcgacaatctcacgctgtggacatccgacacccaaggggatgaggcagaatag

SEQ ID NO: 51025 - DNA, 513 bp, Artificial Sequence
  derived and/or modified sequence
atgagtcaaccatgtagaaaactgtggaggcacaactacgaaaccagtagttgtatagagtttctgaagtcgctgctcgagaaatttctcattccgaacgccagccaggctgagtcaaaagtgttttatctgaagatgaagggcgactattatcgctacttggcggaggtcgctgccggggacgacaaaaagggaatcgtcgaccagtcccaacaggcctaccaggaggccttcgaaattagcaagaaggaaatgcagccaacgcaccccattagactgggtcttgctcttaatttttccgtgttttactacgagattctgaacagcccggaaaaagcgtgctccctcgccaagactgcatttgacgaagcaattgctgaactcgatactctgagcgaggaatcgtacaaggacagtacgctgatcatgcagctgctcagagacaatcttactctgtggacatccgacactcaaggggacgaggcggaggctggggaagggggtgagaattag

SEQ ID NO: 51026 - DNA, 378 bp, Artificial Sequence
  derived and/or modified sequence
atgaagggggattattatcgatatttagccgaggttgcagctggagacgacaagaaaggaattgtggaccagtctcagcaggcctatcaggaggcctttgagattagcaaaaaggagatgcagcccacgcatccaatacggctgggcctcgctctcaacttttcggtcttctactacgagatcttgaattctcccgagaaggcctgttcgcttgccaagactgccttcgacgaggccatcgcggagttagacacccttagcgaggagagctataaggactcaacactgataatgcagctgttacgcgataatctgaccctttggacatccgacacacagggcgatgaagccgaggccggagagggtggtgagaactag

SEQ ID NO: 51027 - DNA, 228 bp, Artificial Sequence
  derived and/or modified sequence
atggataaaaacgaactggttcaaaaggctaagcttgccgaacaagcagagcgatacgacgatatggcagcctgtatgaagagtgtgactgagcagggagccgaactgagcaacgaggaacggaatctacttagcgttgcatataaaaatgtcgtcggagccaggcgctcctcctggcgggtggttagttcgattgaacagaagacagagggagctgagaagaagtag

SEQ ID NO: 51028 - DNA, 393 bp, Artificial Sequence
  derived and/or modified sequence
gtcttttaccttaagatgaagggagactattacagatatcttgcagaagtggccgctggagacgacaagaaaggaatcgttgaccaatctcagcaggcttaccaggaggccttcgaaatcagcaaaaaggagatgcaacctacccaccctataaggttagggctagccttgaatttttccgtgttctactacgaaatcctgaattcccccgaaaaggcgtgtagccttgccaagacagcattcgacgaggctatcgcggagctggatacgttgagcgaggagtcgtataaggacagcacactgataatgcagctgttgcgcgacaacctcactctctggactagtgatactcagggagacgaggctgaggctggagaggggggagagaattag

SEQ ID NO: 51029 - DNA, 159 bp, Artificial Sequence
  derived and/or modified sequence
atggacaaaaatgaattggtccaaaaggccaagctagcagaacaggccgaacggtacgacgacatggccgcttgcatgaaaagcgtaaccgagcagggcgctgaactctctaatgaggagagaaaccttctcagcgtggcctacaaaaatgtggtgtag

SEQ ID NO: 51030 - DNA, 738 bp, Artificial Sequence
  derived and/or modified sequence
atggacaagaatgagctggtgcagaaggccaagctggccgagcaggccgagagatatgatgacatggccgcctgcatgaagtctgtgacagagcagggcgctgagctgagcaatgaggagaggaacctgctgtctgtggcctacaagaatgtggtgggcgcccggcgcagctcctggagggtggtgagcagcattgagcagaagacagaaggagctgagaagaagcagcagatggcccgggagtaccgggagaagattgaaacagagctgcgggacatctgcaatgatgtgctgagcctgctggagaagttcctgatccccaatgccagccaggccgagagcaaggtgttctacctgaagatgaagggggactactaccgctacctggccgaggtggccgctggagatgacaagaagggcatcgtggaccagagccagcaggcctaccaggaggcctttgagatcagcaagaaggagatgcagcccacccaccccatccggctgggcctggccctgaacttctctgtgttctactatgagatcctgaacagccctgagaaggcctgcagcctggccaagacagcctttgatgaggccatcgccgagctggacaccctgtctgaggagagctacaaggacagcaccctcatcatgcagctgctgcgggacaacctgaccctgtggaccagtgacacccagggagatgaagctgaggccggggagggcggggagaactag

SEQ ID NO: 51031 - DNA, 507 bp, Artificial Sequence
  derived and/or modified sequence
atggcccgggagtaccgggagaagattgaaacagagctgcgggacatctgcaatgatgtgctgagcctgctggagaagttcctgatccccaatgccagccaggccgagagcaaggtgttctacctgaagatgaagggggactactaccgctacctggccgaggtggccgctggagatgacaagaagggcatcgtggaccagagccagcaggcctaccaggaggcctttgagatcagcaagaaggagatgcagcccacccaccccatccggctgggcctggccctgaacttcagcgtcttctactatgagatcctgaacagccctgagaaggcctgcagcctggccaagacagcctttgatgaggccatcgccgagctggacaccctgtctgaggagagctacaaggacagcaccctcatcatgcagctgctgcgggacaacctgaccctgtggaccagtgacacccagggagatgaggccgaggccggggagggcggagaaaattag

SEQ ID NO: 51032 - DNA, 297 bp, Artificial Sequence
  derived and/or modified sequence
atggacaagaatgagctggtgcagaaggccaagctggccgagcaggccgagagatatgatgacatggccgcctgcatgaagtctgtgacagagcagggcgctgagctgagcaatgaggagaggaacctgctgtctgtggcctacaagaatgtggtgggcgcccggcgcagctcctggagggtggtgagcagcattgagcagaagacagaaggagctgagaagaagcagcagatggcccgggagtaccgggagaagattgaaacagagctgcgggacatctgcaatgatgtgctgtag

SEQ ID NO: 51033 - DNA, 279 bp, Artificial Sequence
  derived and/or modified sequence
atggacaagaatgagctggtgcagaaggccaagctggccgagcaggccgagagatatgatgacatggccgcctgcatgaagtctgtgacagagcagggcgctgagctgagcaatgaggagaggaacctgctgtctgtggcctacaagaatgtggtgggcgcccggcgcagctcctggagggtggtgagcagcattgagcagaagacagaaggagctgagaagaagcagcagatggcccgggagtaccgggagaagattgaaacagagctgcgggactag

SEQ ID NO: 51034 - DNA, 378 bp, Artificial Sequence
  derived and/or modified sequence
atgaagggggactactaccgctacctggccgaggtggccgctggagatgacaagaagggcatcgtggaccagagccagcaggcctaccaggaggcctttgagatcagcaagaaggagatgcagcccacccaccccatccggctgggcctggccctgaacttctctgtgttctactatgagatcctgaacagccctgagaaggcctgcagcctggccaagacagcctttgatgaggccatcgccgagctggacaccctgtctgaggagagctacaaggacagcaccctcatcatgcagctgctgcgggacaacctgaccctgtggaccagtgacacccagggagatgaagctgaggccggggagggcggggagaactag

SEQ ID NO: 51035 - DNA, 414 bp, Artificial Sequence
  derived and/or modified sequence
atggacaagaatgagctggtgcagaaggccaagctggccgagcaggccgagagatatgatgacatggccgcctgcatgaagtctgtgacagagcagggcgctgagctgagcaatgaggagaggaacctgctgtctgtggcctacaagaatgtggtgggcgcccggcgcagctcctggagggtggtgagcagcattgagcagaagacagaaggagctgagaagaagcagcagatggcccgggagtaccgggagaagattgaaacagagctgcgggacatctgcaatgatgtgctgagcctgctggagaagttcctgatccccaatgccagccaggccgagagcaaggtgttctacctgaagatgaagggggactactaccgctacctggccgaggtggccgctggagatgactag

SEQ ID NO: 51036 - DNA, 741 bp, Artificial Sequence
  derived and/or modified sequence
atggacaagaatgagctggtgcagaaggccaagctggccgagcaggccgagagatatgatgacatggccgcctgcatgaagtctgtgacagagcagggcgctgagctgagcaatgaggagaggaacctgctgtctgtggcctacaagaatgtggtgggcgcccggcgcagctcctggagggtggtgagcagcattgagcagaagacagaaggagctgagaagaagcagcagatggcccgggagtaccgggagaagattgaaacagagctgcgggacatctgcaatgatgtgctgagcctgctggagaagttcctgatccccaatgccagccaggccgagagcaaggtgttctacctgaagatgaagggggactactaccgctacctggccgaggtggccgctggagatgacaagaaggtgcgcttcggcgtgtcctacccaggcatcgtggaccagagccagcaggcctaccaggaggcctttgagatcagcaagaaggagatgcagcccacccaccccatccggctgggcctggccctgaacttctctgtgttctactatgagatcctgaacagccctgagaaggcctgcagcctggccaagacagcctttgatgaggccatcgccgagctggacaccctgtctgaggagagctacaaggacagcaccctcatcatgcagctgctgcgggacaacctgaccctgtggaccagtgacacccagggagatgaagctgagtag

SEQ ID NO: 51037 - DNA, 513 bp, Artificial Sequence
  derived and/or modified sequence
atgagccagccctgcaggaagctgtggaggcacaactatgagaccagcagctgcatcgagttcctgaagagcctgctggagaagttcctgatccccaatgccagccaggccgagagcaaggtgttctacctgaagatgaagggggactactaccgctacctggccgaggtggccgctggagatgacaagaagggcatcgtggaccagagccagcaggcctaccaggaggcctttgagatcagcaagaaggagatgcagcccacccaccccatccggctgggcctggccctgaacttcagcgtcttctactatgagatcctgaacagccctgagaaggcctgcagcctggccaagacagcctttgatgaggccatcgccgagctggacaccctgtctgaggagagctacaaggacagcaccctcatcatgcagctgctgcgggacaacctgaccctgtggaccagtgacacccagggagatgaggccgaggccggggagggcggagaaaattag

SEQ ID NO: 51038 - DNA, 228 bp, Artificial Sequence
  derived and/or modified sequence
atggacaagaatgagctggtgcagaaggccaagctggccgagcaggccgagagatatgatgacatggccgcctgcatgaagtctgtgacagagcagggcgctgagctgagcaatgaggagaggaacctgctgtctgtggcctacaagaatgtggtgggcgcccggcgcagctcctggagggtggtgagcagcattgagcagaagacagaaggagctgagaagaagtag

SEQ ID NO: 51039 - DNA, 393 bp, Artificial Sequence
  derived and/or modified sequence
gtcttctacctgaagatgaagggggactactaccgctacctggccgaggtggccgctggagatgacaagaagggcatcgtggaccagagccagcaggcctaccaggaggcctttgagatcagcaagaaggagatgcagcccacccaccccatccggctgggcctggccctgaacttcagcgtcttctactatgagatcctgaacagccctgagaaggcctgcagcctggccaagacagcctttgatgaggccatcgccgagctggacaccctgtctgaggagagctacaaggacagcaccctcatcatgcagctgctgcgggacaacctgaccctgtggaccagtgacacccagggagatgaggccgaggccggggagggcggagaaaattag

SEQ ID NO: 51040 - DNA, 159 bp, Artificial Sequence
  derived and/or modified sequence
atggacaagaatgagctggtgcagaaggccaagctggccgagcaggccgagagatatgatgacatggccgcctgcatgaagtctgtgacagagcagggcgctgagctgagcaatgaggagaggaacctgctgtctgtggcctacaagaatgtggtgtag

SEQ ID NO: 51041 - DNA, 738 bp, Artificial Sequence
  derived and/or modified sequence
atggacaagaacgagctggtgcagaaggccaagctggccgagcaggcggaacgctacgacgacatggcagcctgcatgaaaagcgtgaccgaacagggtgcagaactgtccaatgaggaaagaaaccttctgtctgttgcctacaaaaacgtggtgggggcaagaagatctagttggcgagttgtgtcatcaatcgagcagaaaaccgagggcgctgagaaaaagcagcagatggccagggagtatagagagaagatcgagaccgaactacgggacatatgcaatgatgtgctgtctctgctggagaaattcctgattccgaatgcctctcaagccgaatccaaagtcttctaccttaagatgaagggagattattatcgctaccttgccgaagtggccgccggcgacgacaagaaggggatcgtggatcagagtcagcaagcctaccaggaagccttcgaaatcagtaaaaaggagatgcagccaacacaccctatacggttgggtctagccctgaacttcagtgtgttttactatgagatcctcaactccccggagaaagcttgtagtcttgccaagaccgcgtttgacgaagcgattgcggagctggatactctgtctgaagagagctataaagactccactttaattatgcagctgctccgcgataacctgacgctttggacttcggatacccagggggatgaagctgaggctggagaaggtggcgaaaactag

SEQ ID NO: 51042 - DNA, 507 bp, Artificial Sequence
  derived and/or modified sequence
atggcccgggagtaccgggagaagatcgagaccgagctgcgggacatctgtaacgatgtgttaagtcttctcgagaagttccttattcctaacgcctcacaggcagagagtaaagtcttttatctgaaaatgaaaggcgattattaccggtacttggctgaggtggctgccggcgacgacaaaaagggtattgtggaccagagtcaacaggcttatcaggaagcatttgagatcagcaagaaggaaatgcagcctactcacccgatcaggttaggcttggccctcaacttctcagtcttctactacgaaatcctcaactcccccgaaaaagcatgctcactcgcgaaaaccgctttcgatgaggccattgctgaactggataccttgtcggaggaaagctacaaagattctacactgattatgcaactcctccgcgataacctaaccctttggacctctgatacccagggcgacgaagccgaggccggtgagggaggcgagaattag

SEQ ID NO: 51043 - DNA, 738 bp, Artificial Sequence
  derived and/or modified sequence
atggacaagaacgagctggtgcagaaggccaagctggccgagcaggccgaaagatatgatgacatggctgcctgcatgaaatcagtcactgagcagggagcagagctgagtaacgaggaacgaaacctgctgtccgtggcctacaagaacgtggttggcgctcgtagatcttcctggcgtgtagtgtcatctattgaacagaaaactgagggcgctgagaaaaaacagcagatggctagggagtaccgagagaagatcgagacggaactccgggacatctgtaatgacgtgctcagcttgcttgagaagttcctgatcccgaacgcaagccaggccgaatccaaggtgttttacttaaaaatgaaaggagattattatcggtacctggcagaggtggcagctggagacgacaagaagggaattgtggaccagtctcagcaggcctatcaagaagcctttgagatatcaaagaaggagatgcagccaacccacccaatcaggctcggccttgcactgaatttcagcgtcttctactacgagatcttaaacagtccggaaaaagcctgctctctagcgaagaccgcctttgatgaggcaatcgcggaacttgataccctttctgaggagtcatacaaggacagcactttgataatgcaattactgcgagacaatctcactctgtggacctctgatacacaaggagatgaagccgaagcgggagaaggcggagagaattag

SEQ ID NO: 51044 - DNA, 738 bp, Artificial Sequence
  derived and/or modified sequence
atggacaagaacgagctggtgcagaaggccaagctggccgagcaggccgagcgctatgatgatatggcggcatgtatgaagagtgtgacggagcagggtgcagagttgtccaatgaagaacggaacctactgtcagtggcctataaaaacgtcgtgggcgcacggagatcttcctggcgcgtggtttccagcatcgaacaaaaaactgaaggggccgagaagaagcagcagatggctcgagagtaccgcgagaaaatcgagactgagttgcgggatatatgcaacgatgtattgtctcttcttgagaagtttctcattcccaatgcatcacaagccgaatctaaggtgttctaccttaagatgaagggagactattaccgctaccttgctgaagtcgctgccggagatgacaaaaaagggatcgtggatcagtcccagcaagcatatcaagaggccttcgaaatcagtaagaaagaaatgcagccaactcacccgattcggctaggactcgcgctgaatttctccgtcttctattacgagattttgaactctcccgaaaaggcttgcagcttggcaaagactgcttttgatgaagccatcgcagagctggacacactctctgaagagagctacaaggattctaccctgatcatgcagttgctgagagacaatcttacactgtggacatctgacactcagggcgacgaagcagaggcgggcgagggtggtgaaaattag

SEQ ID NO: 51045 - DNA, 738 bp, Artificial Sequence
  derived and/or modified sequence
atggacaagaacgagctggtgcagaaggccaagctggccgagcaggccgaacgatatgatgacatggcggcctgcatgaagtcagtgaccgaacagggggccgagttgtcgaacgaggaacggaacttgctatcagtggcctacaagaacgtggtcggggcgaggcgatctagctggcgggtggtgtctagcatagaacagaaaacagagggtgccgaaaaaaagcagcagatggcccgcgagtaccgcgagaagatcgagacagagctacgcgacatctgcaacgacgtactttctcttctcgaaaaattcttaatccccaacgcctcacaggcagaatctaaagtcttttatttgaagatgaagggcgactactataggtacctggcggaggtagccgccggtgatgacaaaaaaggcatagtggaccagtctcagcaggcctaccaagaggctttcgagatctctaagaaggagatgcagcctacccacccaattaggctcggtttggccctgaacttctctgtgttctactatgagatcctgaattcacccgaaaaagcttgcagccttgcaaagaccgctttcgacgaggccattgccgaactggatactctgtccgaggagagctataaggactcaacgttgataatgcagttgctgcgggataacttgacactttggacttcggacacccagggggatgaggcagaagcaggcgaaggaggagagaattag

SEQ ID NO: 51046 - DNA, 738 bp, Artificial Sequence
  derived and/or modified sequence
atggacaagaacgagctggtgcagaaggccaagctggccgagcaggccgaaagatacgacgacatggccgcttgcatgaaatctgtgaccgaacaaggagcagagctgagcaatgaagaaagaaacctgctgtccgtcgcatacaagaacgtagtgggggctaggcgatcatcctggcgggtggtttcatcaattgaacagaagaccgagggcgcagagaagaagcagcagatggcccgcgagtatcgagaaaagatagaaactgaactccgggatatctgtaatgatgtgctttctctcctcgagaaatttctcataccgaatgcctcacaggcagaatctaaagtgttttatctcaaaatgaaaggcgattactaccgctaccttgcagaggtagctgctggcgatgacaaaaaaggtatcgtcgaccagagtcaacaagcctaccaagaggcattcgagatttcaaagaaagagatgcaaccgactcacccaatcaggctgggcctggccctgaatttctccgttttttattacgagatcttgaactcccccgaaaaagcatgcagtctagccaagaccgctttcgacgaggctatcgccgaactagacaccttgagcgaggagtcttataaggatagcaccctaatcatgcagctgctgcgggacaatttaactctctggaccagcgatacacaaggggatgaagccgaggcgggagagggcggggaaaactag

SEQ ID NO: 51047 - DNA, 738 bp, Artificial Sequence
  derived and/or modified sequence
atggacaagaacgagctggtgcagaaggccaagctggccgagcaggccgagaggtatgacgacatggccgcctgcatgaagagcgtgacagagcagggggctgagttgtcaaatgaagaacggaatcttctgtccgtagcttataaaaacgtagtgggcgcgcgccgctcaagttggcgagtcgtgagttccatcgagcagaagactgagggtgcagagaaaaagcagcaaatggctcgcgagtatcgtgagaagatcgaaacagaattacgtgatatttgcaacgacgtgttatcactgctggagaagttcctcatccctaacgcaagtcaggctgagagtaaagtgttttatctgaaaatgaagggggactattatcgctaccttgcagaggtggccgcaggcgatgataaaaaagggattgtggaccagtcccagcaagcctaccaggaagccttcgaaatttcgaagaaagagatgcaacctacccaccccatcagactgggcttggctctgaacttttcagtcttttattacgagatcctgaatagccctgaaaaggcctgtagcttagcaaaaaccgcgtttgacgaggcaattgccgagcttgatacactatccgaggaatcttacaaggatagtacgttgatcatgcagctccttagagacaacctcactctctggacatcagacacacagggcgacgaagcggaggccggggaaggcggagagaattag

SEQ ID NO: 51048 - DNA, 297 bp, Artificial Sequence
  derived and/or modified sequence
atggacaagaacgagctggtgcagaaggccaagctggccgagcaggctgaacgatacgacgacatggccgcttgtatgaaatctgtgaccgagcagggcgccgagctgtccaacgaggaaaggaatctacttagcgttgcatacaagaacgtcgtaggcgccagaaggtcttcttggcgagtggtgtctagtattgagcagaagaccgagggggcagaaaagaaacaacagatggccagggaatatagggaaaaaatcgagactgaactgagagatatctgtaatgatgtattgtag

SEQ ID NO: 51049 - DNA, 738 bp, Artificial Sequence
  derived and/or modified sequence
atggacaagaacgagctggtgcagaaggccaagctggccgagcaggctgaaagatacgacgacatggccgcatgcatgaagagtgtgaccgagcagggggccgagttgagtaatgaagaacgcaatcttcttagcgtggcctacaaaaacgttgtgggggccagacgttccagctggcgggtggtgagctcaattgaacagaaaaccgaaggggccgagaaaaagcagcagatggcgagagagtatagagagaaaatcgaaactgaactcagggatatctgtaatgacgtgctttcactcttggagaagtttttaatccctaacgcatcacaagctgagtcaaaagtcttctacctaaagatgaaaggcgactactaccggtacttggccgaggtggccgccggagacgacaagaagggcatcgtcgaccagtctcagcaagcttatcaggaagctttcgagatatccaagaaagaaatgcagcctacacaccctatcaggctggggctcgctctgaactttagtgtattctactatgaaatactaaacagccccgaaaaagcctgcagcctggcaaagacagccttcgacgaggccattgctgaactggatacgttatcagaagaaagttacaaagactccacactcataatgcagctcctgcgcgacaacctgacactgtggacctctgatacccagggagatgaagcggaggccggagaaggaggcgaaaactag

SEQ ID NO: 51050 - DNA, 279 bp, Artificial Sequence
  derived and/or modified sequence
atggacaagaacgagctggtgcagaaggccaagctggccgagcaggctgagaggtacgacgacatggccgcttgcatgaagtctgtcaccgaacaaggtgccgaactctcaaatgaagaacggaaccttttaagcgtggcctacaaaaatgtcgtgggtgcccgccggtcttcctggcgggtagtgtcaagtatagagcagaaaacagaaggcgctgagaagaagcaacaaatggctcgtgaatatcgggagaagattgagactgagcttcgagactag

SEQ ID NO: 51051 - DNA, 738 bp, Artificial Sequence
  derived and/or modified sequence
atggacaagaacgagctggtgcagaaggccaagctggccgagcaggcggagcgctacgatgatatggcagcatgcatgaagagcgtcacggagcagggagccgagctatcaaacgaggagaggaatttactgtcagttgcatacaagaatgtggtaggcgcccgacgttcatcatggagagttgtatcgagcatcgaacagaagaccgaaggcgcagagaaaaaacagcagatggcacgggagtatagggagaagatcgaaaccgagctgagggacatatgcaacgatgtgctgtctctgctggagaaatttcttatcccaaacgccagccaggcagagtcgaaagtcttctacctcaagatgaagggagactactatagatatctcgccgaagtcgccgctggagatgataagaagggcattgtagaccagagccaacaggcctatcaggaggcttttgagatctccaagaaagagatgcaaccaactcaccccataagacttggtcttgccctgaatttcagcgtgttctactacgagatcctgaactcccccgagaaggcctgctcactggccaagacggccttcgacgaggctatcgcagaacttgataccctttctgaggagtcctacaaggactccacactgattatgcaattgctgcgagacaatctcaccctgtggactagtgatactcagggggacgaggcagaggctggggagggaggagaaaactag

SEQ ID NO: 51052 - DNA, 507 bp, Artificial Sequence
  derived and/or modified sequence
atggcccgggagtaccgggagaagatcgagaccgagctgcgggacatttgtaacgacgtgttgtcccttttggaaaaattcctcattccaaatgcctctcaggctgaaagtaaagtgttttaccttaaaatgaagggtgactactatagatacctggcagaggttgccgcgggggatgataagaaagggattgttgatcagtcacagcaagcgtatcaggaggcttttgagatttccaagaaagagatgcaacctacacatcccatccggttgggacttgcgcttaactttagcgtattttactatgagatcctgaattccccggaaaaggcctgttctctcgccaagacagcttttgacgaggctatcgcggagctggataccctgtcagaggaatcctacaaagatagcacgctgataatgcaactcctaagggacaacttgactctgtggacatccgacacacagggggatgaggctgaagctggtgaaggcggcgaaaactag

SEQ ID NO: 51053 - DNA, 378 bp, Artificial Sequence
  derived and/or modified sequence
atgaagggcgactactaccggtacctggccgaggtggccgccggcgacgataaaaagggaattgtcgatcagagtcagcaagcgtaccaggaagcatttgaaatcagtaagaaagagatgcaacctacgcacccaataaggctgggcctggccctgaatttttcagtgttttactacgagatcttgaactcccctgagaaagcttgcagcttagccaaaaccgcctttgacgaagctattgcggagctggatacgttatccgaggaatcctacaaagactccacattaatcatgcagctcttgcgcgacaacttgaccctgtggacaagcgacacacagggggatgaagccgaggcaggcgaagggggggagaattag

SEQ ID NO: 51054 - DNA, 414 bp, Artificial Sequence
  derived and/or modified sequence
atggacaagaacgagctggtgcagaaggccaagctggccgagcaggcggaaagatacgatgatatggcagcttgtatgaagtccgtgaccgagcagggcgctgagctaagcaatgaggaaagaaatctactatcagtagcctacaaaaacgtcgttggcgcccgacgcagttcttggcgcgtggttagcagcatcgaacagaaaacagagggtgctgaaaaaaagcagcagatggccagagagtatagagagaagatcgaaaccgaactaagagatatctgtaatgatgtgttgagtcttctggagaagtttttgattcctaatgccagccaggcagagtcaaaagtattttacctgaagatgaagggtgattattacaggtatcttgccgaggtggccgcaggggatgactag

SEQ ID NO: 51055 - DNA, 741 bp, Artificial Sequence
  derived and/or modified sequence
atggacaagaacgagctggtgcagaaggccaagctggccgagcaggcagagcgctacgacgatatggccgcctgcatgaaatccgtgaccgagcagggcgctgaattaagcaacgaggaacgcaacctactgtccgtggcctacaagaatgtagtgggtgcccgcaggtcctcctggagagtagtgagctcaatcgaacaaaagacagaaggtgccgagaagaaacagcaaatggctcgggagtatagggagaagatcgaaacagagctgagagatatatgtaatgacgtactttcactgctcgagaagttccttattccaaacgcatcgcaagccgagagcaaggtcttttacctgaagatgaaaggtgattattaccgctacctggcagaagtcgccgccggagacgacaaaaaagtaagatttggcgtgtcctatcctggaattgtcgatcaatcacagcaggcttatcaggaggcatttgagatctcaaagaaagagatgcagcctacacaccccattagactgggactggccttaaacttttctgtgttttattacgagatcctgaattcccctgaaaaggcatgcagcctggctaagacagcctttgatgaggctattgccgagctcgatactttgagtgaggagtcctataaggactccactttgatcatgcagctcctgagagacaacctgactctttggacatcagacacccagggtgacgaagcggaatag

SEQ ID NO: 51056 - DNA, 513 bp, Artificial Sequence
  derived and/or modified sequence
atgagccagccctgccggaagctgtggcggcacaactacgagacctcaagctgcattgaattcttaaagagcctgctcgagaaatttctcatccccaatgccagtcaggctgaaagtaaagttttttatcttaagatgaaaggagactactatcgatacctggccgaagtcgccgccggtgacgataaaaaaggaatagtagatcagtcacagcaggcataccaggaggcattcgagatctccaagaaagaaatgcagcctacgcaccctattagactcggactggccttgaattttagtgttttttattacgagatacttaatagtccagaaaaagcatgcagcctggccaagaccgccttcgacgaagccatcgccgaactcgatacccttagtgaggagtcgtacaaggattcaaccctgattatgcagctgctgagagataacctgactctatggacctccgatacgcagggcgacgaagcagaggcgggtgagggaggagaaaactag

SEQ ID NO: 51057 - DNA, 378 bp, Artificial Sequence
  derived and/or modified sequence
atgaagggcgactactaccggtacctggccgaggtggccgccggcgacgacaagaaaggtatcgtcgaccagtcacagcaggcttatcaagaggccttcgagatttccaaaaaagaaatgcaacccactcacccaatcagactggggctggccctgaactttagcgttttctattatgaaatcctgaattcccccgaaaaggcttgctcattagcaaaaaccgctttcgacgaggcgattgctgagctggacactctcagcgaggaatcatataaagattctactttgataatgcagctgctcagggacaatttgactttgtggacttctgatacccagggagatgaagccgaagcgggtgagggaggtgagaactag

SEQ ID NO: 51058 - DNA, 228 bp, Artificial Sequence
  derived and/or modified sequence
atggacaagaacgagctggtgcagaaggccaagctggccgagcaggccgagaggtatgatgacatggccgcgtgtatgaagagcgtaaccgagcagggagcagagctgtccaacgaagaacgcaacctattaagcgtggcctacaaaaacgtggtcggggcaaggcgctccagttggagagtcgtgagttcgattgagcagaaaactgaaggggcagagaagaaatag

SEQ ID NO: 51059 - DNA, 393 bp, Artificial Sequence
  derived and/or modified sequence
gtgttctacctgaagatgaagggcgactactaccggtacctggccgaggtagccgctggagacgataaaaagggaattgtggatcagtcccagcaggcatatcaggaggcctttgagatcagtaagaaggagatgcagcccacccaccccatcagactgggcctcgcgctgaatttcagtgtgttctattacgaaattctgaacagccctgagaaagcgtgcagcttggctaagaccgctttcgatgaggctatagccgagttagacacgctctcagaggaatcttacaaggactccacactgattatgcagcttctgcgcgataacttgactttatggacatctgacactcagggagacgaagctgaagctggcgagggcggcgaaaactag

SEQ ID NO: 51060 - DNA, 159 bp, Artificial Sequence
  derived and/or modified sequence
atggacaagaacgagctggtgcagaaggccaagctggccgagcaggcagagcgttacgatgatatggctgcctgcatgaagtcagtgaccgaacagggggcagagctcagtaacgaagagagaaacctgctgtcggttgcctacaagaatgtcgtatag

SEQ ID NO: 51061 - DNA, 738 bp, Artificial Sequence
  derived and/or modified sequence
atggataagaacgagctggttcagaaggccaagttggctgagcaggcagagcgctacgacgatatggcagcctgcatgaaatctgtgaccgagcagggcgctgaactgtcaaacgaggaacggaatctcctctccgtcgcctacaaaaatgtggtgggtgcacgacgatccagctggagagtggttagttcgatcgagcagaaaaccgagggggcagagaagaagcagcaaatggctcgggaatatcgtgaaaaaatagaaacagagctaagagatatttgcaacgatgtcttgagtctgctggagaaatttttgatccccaacgccagccaagcagaatctaaagttttctatttgaagatgaagggcgactactataggtatctagcagaagttgcggcaggcgacgacaaaaagggcattgtggaccagtcacagcaggcttaccaagaagcattcgaaatcagcaagaaggaaatgcagcctactcatccaatccggctcggcctggctctaaacttttccgtgttttattacgagattctgaacagcccagaaaaagcctgttctctggcaaagaccgcgttcgatgaggccatagcagaactagacacccttagtgaagagagttataaggattctacacttataatgcagctgcttagagacaatctgaccctgtggacctcagatacccagggagatgaagctgaggccggagaagggggagaaaattag

SEQ ID NO: 51062 - DNA, 507 bp, Artificial Sequence
  derived and/or modified sequence
atggcacgcgaataccgagaaaagatcgagacagagctgagagatatctgtaacgatgttctgagcctgcttgaaaagttcctgattccaaatgccagtcaagctgaatctaaagtcttttacctgaaaatgaaaggagactattatagatacctagcagaggtggctgcaggcgacgataagaaaggtattgtggaccagagtcagcaagcttatcaggaagccttcgagatctcaaaaaaggaaatgcagcccactcaccccattcgactgggattggccttgaatttctctgtgttttattatgagatactgaatagccctgaaaaggcctgttcccttgctaaaactgccttcgatgaagctatcgcagagctggatactctatccgaggaaagctataaagacagcacattaatcatgcaactattgcgagacaatctcaccctgtggaccagcgacacacagggcgacgaggcggaagctggggagggtggtgaaaactag

SEQ ID NO: 51063 - DNA, 738 bp, Artificial Sequence
  derived and/or modified sequence
atggataagaacgaactcgttcagaaggcaaagttggctgagcaggccgagagatatgatgacatggcagcttgcatgaagagtgtgacagaacagggggcagagctgagcaatgaggaaaggaatctgctgagtgtcgcctacaagaacgtggtgggggcacggaggtcctcttggagggtggtgtctagcatcgagcagaagaccgagggagcagaaaagaaacagcaaatggctagggagtatcgcgagaagatagaaacagaacttagagacatctgtaatgatgtgctgagcttacttgagaagtttctgattccaaacgcctcacaagctgagtctaaggtcttctatttgaaaatgaagggtgattactatcggtatttggcagaggtcgcagcaggcgacgacaaaaaggggatcgtggatcaaagccaacaagcataccaagaagcgttcgagatttctaagaaggaaatgcagccgacgcaccctataaggctagggctggccctgaacttttcagttttttactacgagattctgaactcccccgagaaggcttgttccctagctaaaacagcttttgatgaagctattgctgaactcgatacattgagcgaggagtcgtacaaggactctactttaattatgcagcttcttagagacaatctcaccctctggacaagcgatacgcagggagacgaagccgaggctggggagggtggtgagaattag

SEQ ID NO: 51064 - DNA, 738 bp, Artificial Sequence
  derived and/or modified sequence
atggataagaatgaactcgtgcagaaagcgaagcttgcggagcaggctgaaagatatgatgatatggccgcttgcatgaaatcagtgacggagcagggtgccgagctgagtaatgaagaaagaaacctgctgtcggtggcctataagaatgtggtgggcgcaagacgctcatcatggcgagtcgtgagcagcatcgaacagaaaacagagggcgcagagaagaaacagcagatggccagagaatacagggaaaagatcgaaacagagctcagagacatatgcaacgatgtgctcagcctcctcgagaagtttctcatacccaatgcttcacaggcagagagtaaggtgttctatcttaaaatgaaaggagattattaccgatacctggcagaggtagccgcaggcgacgataagaagggtatcgtagaccaaagccagcaggcgtatcaggaagcttttgagatatctaaaaaagagatgcagcccacacacccaatcaggctggggcttgctctgaacttcagcgtgttttattacgagatccttaacagcccagagaaagcctgctctctggctaagactgcatttgacgaagccatcgccgagctggacacactctcggaagagtcttataaggactctaccctgatcatgcagctgcttagggacaaccttactttgtggacatctgatacacagggagacgaggccgaggcgggtgagggcggtgagaattag

SEQ ID NO: 51065 - DNA, 738 bp, Artificial Sequence
  derived and/or modified sequence
atggacaagaatgagttagtgcaaaaggctaagctggccgagcaggctgagcgctatgatgatatggccgcttgcatgaaatcggtgacagaacagggcgctgagctcagcaacgaagagcgaaatctcctgtccgtagcttacaagaacgttgttggcgcacggcgatctagttggcgcgtagtgtcctcaatcgagcagaagacagagggcgcagagaaaaagcagcagatggcacgtgagtatagggagaaaatcgaaacagagctgagggacatatgcaatgacgtgctctcgttgctagagaaattccttatacccaatgcctctcaagcagagtccaaggttttttatctcaagatgaaaggagactactaccgttacctagccgaggtggcggcaggagatgacaagaaaggaattgtggaccagagtcaacaggcgtaccaggaagcatttgagattagcaagaaagaaatgcagccaactcatcccatccgtctgggtcttgccctgaattttagcgtgttttattacgagattctgaactctcccgagaaggcctgttccctcgccaaaaccgcctttgacgaggcgatagctgaactggataccctgtcagaggaaagctacaaggactccacgctgattatgcagctgctgcgtgacaacctgacattgtggacatcagatacccagggtgacgaagctgaggctggagaaggcggtgagaactag

SEQ ID NO: 51066 - DNA, 738 bp, Artificial Sequence
  derived and/or modified sequence
atggacaaaaacgaactggtgcagaaggccaagctggcggaacaggctgagaggtacgacgatatggccgcttgtatgaagagtgtaaccgagcagggggctgagctgagcaacgaggagagaaacttactgagcgtcgcctacaagaatgtcgtgggcgctcgtcgcagcagttggcgggtggtgtcctccattgaacagaagactgagggggcagaaaagaagcaacagatggccagggagtacagagagaaaatcgaaacagaattgcgggatatctgcaatgacgtgctctctcttctggagaagttcttaattcctaacgcttcccaggccgagtctaaggtattttaccttaaaatgaaaggtgactactatcgctacctggctgaagtggcagctggagatgataagaagggaatagtcgatcagtctcagcaggcctatcaggaggcctttgaaatcagcaagaaagagatgcagcccactcaccccatccggctggggctggcacttaacttctccgtgttttattacgaaattctgaactctcctgagaaagcttgctcactcgcaaaaacagcattcgatgaggcgatagctgaactggatacgctctccgaggaatcatataaggattccacacttataatgcagttgttgagagacaacctcacattatggacctccgatacccagggggatgaggcggaagccggagagggtggagagaactag

SEQ ID NO: 51067 - DNA, 738 bp, Artificial Sequence
  derived and/or modified sequence
atggacaagaatgaactggtgcagaaggcaaaacttgccgagcaagcagagcgctacgatgacatggcagcctgcatgaagagcgtgaccgagcagggagccgagctcagcaatgaggaaaggaacctgctctctgttgcttacaaaaatgtggttggggctcgacggtcctcttggcgcgtggtctccagcatagaacagaagacagagggggcagaaaagaaacagcagatggcccgagagtaccgcgagaagatcgagacagagcttagagacatttgtaatgacgtcctttccctactggaaaagttcctgattcccaatgcctcccaagccgagagcaaagtgttctacctcaagatgaaaggggactattatagatatttggccgaggtggccgctggcgatgataaaaagggaattgtggaccagtctcaacaggcctaccaggaggccttcgaaatatcgaaaaaagaaatgcagcctacacatccaattagactgggactagccctgaacttttccgtcttctactacgaaatcctgaatagtcccgagaaggcatgttccctcgccaaaaccgctttcgacgaggcaatcgctgagctcgatactctcagcgaagaaagctataaggatagtacactgataatgcaacttctgagagataacctcaccttatggacatccgatactcaaggcgatgaagccgaagctggcgaaggtggagagaactag

SEQ ID NO: 51068 - DNA, 297 bp, Artificial Sequence
  derived and/or modified sequence
atggacaagaatgagctggtccagaaggctaagctcgcggagcaggcagagcggtacgatgatatggccgcatgcatgaagagtgtaaccgagcagggcgcagagctgtccaacgaagaacgaaatctgcttagcgtcgcttacaagaacgtggtcggggctcgcaggtcctcctggcgggtggtctcctcaatcgagcagaaaacagagggagccgaaaagaaacagcagatggccagggagtatcgtgagaagatcgagacagagttacgcgacatttgcaacgatgtgctatag

SEQ ID NO: 51069 - DNA, 738 bp, Artificial Sequence
  derived and/or modified sequence
atggacaaaaatgagctcgtgcaaaaagcaaaacttgccgagcaagctgagcggtatgacgatatggccgcttgtatgaagtccgtcactgagcaaggggcagaactctctaatgaagaacggaacttgctttctgtcgcgtataaaaacgtcgtcggcgctcgccgttccagctggagggtggtgtcaagtatcgagcaaaagacagaaggtgcagagaaaaagcagcagatggccagggaatatagagagaagattgagaccgagctacgggatatttgcaatgacgtgctgtctctcctggagaaattcctgattcccaacgcgagtcaggcagagtcaaaagtgttttacttgaagatgaaaggcgattattaccgctatctcgcagaggtggcggctggggacgacaagaagggaattgtggaccaatctcagcaggcgtatcaagaagctttcgaaatctcaaagaaggagatgcagcccacccatcccataaggttgggcctggctttgaacttctccgtattctactacgagatactaaactcaccggaaaaggcttgctcactggcaaagactgcgtttgacgaagctattgctgagctcgacaccttaagcgaagagtcctataaggactctacccttatcatgcagcttctccgcgataatctgacgctgtggaccagcgacacccaaggcgacgaggcagaagccggtgagggaggcgagaattag

SEQ ID NO: 51070 - DNA, 279 bp, Artificial Sequence
  derived and/or modified sequence
atggacaaaaacgagttggtgcaaaaggcgaagctggcagagcaggcggaacggtatgacgacatggctgcctgtatgaagtccgtgacagagcaaggtgcagagttgagtaatgaagaacgaaatttgttaagcgtggcttacaaaaatgtggtcggcgctcgtcgtagttcctggcgggtggtcagtagcattgagcaaaaaacagaaggagcagaaaagaagcagcagatggctcgggagtatagagaaaaaatagagacggagctacgggactag

SEQ ID NO: 51071 - DNA, 738 bp, Artificial Sequence
  derived and/or modified sequence
atggacaagaatgagctagtgcaaaaggccaaactagccgagcaggccgaaagatatgacgatatggccgcatgtatgaaaagtgtaacagagcagggtgccgaactctcaaatgaagaacgcaatctgctcagtgtcgcttacaagaacgtcgttggggcacgcaggagtagctggagagttgtctcttccatcgagcagaagaccgagggagccgagaagaaacagcagatggccagggagtacagagagaaaattgaaacagagctgcgtgacatctgtaacgatgtcctctccttattggagaaattcctgatcccaaacgccagtcaggccgaatcaaaggttttctacctgaagatgaaaggcgactattacaggtatctagctgaggtggccgcaggggacgataaaaaggggatagtggaccagtctcagcaggcataccaggaggcttttgagatctctaagaaggaaatgcagcccacgcatccaatccgacttgggctggccctgaatttcagtgtgttttactatgagatcctgaactcacctgagaaggcctgtagtctggcaaagaccgccttcgatgaagctatcgctgaactggacacactgagcgaggagtcttacaaagatagcacgttgatcatgcagctccttagagataatctcactttgtggacttctgatacacagggcgacgaggccgaggcaggggagggtggcgagaattag

SEQ ID NO: 51072 - DNA, 507 bp, Artificial Sequence
  derived and/or modified sequence
atggcaagggaatatcgcgaaaaaattgagaccgagctgagggacatttgtaacgacgttctgtctctgctggaaaagttcttgatccctaatgcaagccaggccgaaagcaaagtgttttatctgaagatgaagggcgactattaccgatatctggcagaggtggcagcaggagacgataaaaaaggcattgtggatcagagtcagcaagcctaccaggaagcatttgaaatctctaaaaaagagatgcaaccaactcaccccatccggttaggtttggccctgaacttctcggttttctactacgaaattctgaatagcccagagaaggcttgctccctcgccaaaaccgcatttgatgaagccatcgctgagcttgacacgctgagcgaagagagctacaaagatagtactctgattatgcagttacttcgcgacaatctgacactgtggacatcagatactcagggagacgaagccgaggcaggcgagggaggcgagaactag

SEQ ID NO: 51073 - DNA, 378 bp, Artificial Sequence
  derived and/or modified sequence
atgaagggcgattactatcgctaccttgcagaagtcgctgctggagatgacaagaagggtattgtggaccagtctcagcaggcctaccaggaagcgtttgaaatttctaagaaggaaatgcaacctactcatcctataaggcttggactggcattgaatttttcggtcttctactacgaaatcctcaactccccagagaaggcatgcagcctagccaagaccgctttcgacgaggccatcgctgagctagacacgctgtctgaggaaagctacaaggactccactctcatcatgcaactgctgagggacaaccttaccctatggacatccgacacacagggcgacgaggcggaggctggagagggcggagaaaattag

SEQ ID NO: 51074 - DNA, 414 bp, Artificial Sequence
  derived and/or modified sequence
atggacaagaatgagctggttcagaaagccaaattggctgaacaggccgaacgatacgatgatatggccgcatgcatgaaatccgttacagaacaaggtgcagagctcagcaatgaagagaggaatctgctgagcgttgcatataagaatgtggtgggagcccgacgcagttcatggcgcgtcgtcagcagtatcgaacagaagactgagggagcagagaaaaagcagcagatggcccgagaatatagagagaaaatcgagactgaacttcgcgatatttgcaatgacgtactgtctctcttggagaagtttcttatccccaacgcctcccaagccgagtcaaaggtattctacctgaaaatgaagggagactactaccgctatttggccgaggtcgccgcaggggatgactag

SEQ ID NO: 51075 - DNA, 741 bp, Artificial Sequence
  derived and/or modified sequence
atggacaaaaatgaactggtgcagaaggccaaacttgccgagcaagccgagcgttatgacgacatggcagcgtgcatgaagtctgtgaccgaacaaggagccgaactctcgaacgaggaacgcaatttactctcagtcgcgtataaaaacgtagtgggggcaaggagaagcagttggagagtggtgtccagtattgaacagaaaaccgaaggggctgaaaaaaaacaacagatggcccgagaatatagagagaaaatcgagaccgaactgagggacatttgcaacgacgtcctcagccttttagaaaaattccttattcctaacgcctcccaggctgagtccaaggtgttctacctgaagatgaaaggcgactactatcgctatctggcagaagttgccgcaggagatgacaagaaggtgcggtttggcgtatcctatcctgggatcgtggatcagagccagcaggcctaccaggaggcatttgaaatcagcaagaaagaaatgcagcctacgcatcccatccggctgggcctggctctgaatttcagcgttttctattacgagatccttaactcccccgaaaaagcttgttcattagcaaagacagccttcgacgaggccatcgcggaactggacacactttcggaagaatcatacaaagacagcacgctgataatgcagcttttgagagacaacctcacgctttggacatcagatacacagggcgatgaggccgagtag

SEQ ID NO: 51076 - DNA, 513 bp, Artificial Sequence
  derived and/or modified sequence
atgtctcaaccctgcagaaagttatggcgacacaattacgagacatcctcatgcatcgagtttttgaagagcctcttagagaagttcctcatccccaatgcgagtcaagctgaatctaaggtattctatttgaaaatgaaaggagattactacaggtacctggcagaggtagccgcaggagatgacaagaagggcattgttgatcagtctcagcaggcgtatcaggaggctttcgagataagcaaaaaagagatgcagccgactcacccaatcagactggggcttgcgctaaacttctccgtcttttattacgagatattgaatagtcctgaaaaagcttgctccctggcaaaaactgcttttgacgaagctattgcggaactggacacacttagcgaagaatcgtataaggactctactctcattatgcagttgctgagggataacctgacgctttggaccagcgacactcaaggggacgaggctgaagctggcgagggaggcgaaaactag

SEQ ID NO: 51077 - DNA, 378 bp, Artificial Sequence
  derived and/or modified sequence
atgaagggagattactatcgctatttggcggaagtggcagccggtgatgataaaaaagggatcgtagaccagagtcaacaggcttatcaggaagctttcgagatctccaaaaaagaaatgcagcctacacatcctatccggcttggccttgcccttaatttctctgttttttactacgaaattttgaactccccagagaaggcctgctctttggcgaaaaccgcctttgatgaagcgatagcagagctggacacgctgagcgaggagagctataaagatagcactctcatcatgcaactgctccgagataacctgaccctgtggacctccgacacccagggtgatgaggcggaggccggtgaaggtggagaaaactag

SEQ ID NO: 51078 - DNA, 228 bp, Artificial Sequence
  derived and/or modified sequence
atggataaaaacgaactcgtccaaaaagcaaaattggccgaacaggcggagcggtatgatgatatggctgcttgcatgaaaagtgtcacagaacagggagcagagttgtcaaacgaagagagaaatctgcttagcgtcgcatataagaacgttgtgggagccaggaggtcctcctggagagttgtctcatctattgagcagaagaccgaaggtgctgaaaaaaagtag

SEQ ID NO: 51079 - DNA, 393 bp, Artificial Sequence
  derived and/or modified sequence
gtattctacttgaaaatgaaaggcgactattatagatacctggcagaagtggctgccggagacgataaaaaagggattgtcgatcaaagccagcaagcctaccaggaagcttttgagatttctaagaaggagatgcaaccaacacaccccatcagattgggattggcactgaatttctcggtcttttactacgaaattctcaatagccctgagaaagcgtgttcgctggcaaagactgcattcgatgaggccatcgcagagctcgatacgctgtccgaagagtcttacaaagacagcactctgataatgcaattgcttagagacaacctgacgctttggacttcagatacacagggcgacgaagccgaggcgggtgaggggggagaaaattag

SEQ ID NO: 51080 - DNA, 159 bp, Artificial Sequence
  derived and/or modified sequence
atggataagaatgaattggtccagaaggccaaactggccgaacaggcagaaagatacgacgacatggctgcttgcatgaagagcgtcaccgaacagggtgctgaactgtccaatgaggagagaaaccttctgtcagttgcttacaagaacgtcgtgtag

SEQ ID NO: 51081 - DNA, 2829 bp, Artificial Sequence
  derived and/or modified sequence
gcccactcccaccgccagctggaaccctggggactacgacgtccctcaaaccttgcttctaggagataaaaagaacatccagtcatggataaaaatgagctggttcagaaggccaaactggccgagcaggctgagcgatatgatgacatggcagcctgcatgaagtctgtaactgagcaaggagctgaattatccaatgaggagaggaatcttctctcagttgcttataaaaatgttgtaggagcccgtaggtcatcttggagggtcgtctcaagtattgaacaaaagacggaaggtgctgagaaaaaacagcagatggctcgagaatacagagagaaaattgagacggagctaagagatatctgcaatgatgtactgtctcttttggaaaagttcttgatccccaatgcttcacaagcagagagcaaagtcttctatttgaaaatgaaaggagattactaccgttacttggctgaggttgccgctggtgatgacaagaaagggattgtcgatcagtcacaacaagcataccaagaagcttttgaaatcagcaaaaaggaaatgcaaccaacacatcctatcagactgggtctggcccttaacttctctgtgttctattatgagattctgaactccccagagaaagcctgctctcttgcaaagacagcttttgatgaagccattgctgaacttgatacattaagtgaagagtcatacaaagacagcacgctaataatgcaattactgagagacaacttgacattgtggacatcggatacccaaggagacgaagctgaagcaggagaaggaggggaaaattaaccggccttccaacttttgtctgcctcattctaaaatttacacagtagaccatttgtcatccatgctgtcccacaaatagttttttgtttacgatttatgacaggtttatgttacttctatttgaatttctatatttcccatgtggtttttatgtttaatattaggggagtagagccagttaacatttagggagttatctgttttcatcttgaggtggccaatatggggatgtggaatttttatacaagttataagtgtttggcatagtacttttggtacattgtggcttcaaaagggccagtgtaaaactgcttccatgtctaagcaaagaaaactgcctacatactggtttgtcctggcggggaataaaagggatcattggttccagtcacaggtgtagtaattgtgggtactttaaggtttggagcacttacaaggctgtggtagaatcataccccatggataccacatattaaaccatgtatatctgtggaatactcaatgtgtacacctttgactacagctgcagaagtgttcctttagacaaagttgtgacccattttactctggataagggcagaaacggttcacattccattatttgtaaagttacctgctgttagctttcattatttttgctacactcattttatttgtatttaaatgttttaggcaacctaagaacaaatgtaaaagtaaagatgcaggaaaaatgaattgcttggtattcattacttcatgtatatcaagcacagcagtaaaacaaaaacccatgtatttaacttttttttaggatttttgcttttgtgatttttttttttttgatacttgcctaacatgcatgtgctgtaaaaatagttaacagggaaataacttgagatgatggctagctttgtttaatgtcttatgaaattttcatgaacaatccaagcataattgttaagaacacgtgtattaaattcatgtaagtggaataaaagttttatgaatggacttttcaactactttctctacagcttttcatgtaaattagtcttggttctgaaacttctctaaaggaaattgtacattttttgaaatttattccttattccctcttggcagctaatgggctcttaccaagtttaaacacaaaatttatcataacaaaaatactactaatataactactgtttccatgtcccatgatcccctctcttcctccccaccctgaaaaaaatgagttcctattttttctgggagagggggggattgattagaaaaaaatgtagtgtgttccatttaaaattttggcatatggcattttctaacttaggaagccacaatgttcttggcccatcatgacattgggtagcattaactgtaagttttgtgcttccaaatcactttttggtttttaagaatttcttgatactcttatagcctgccttcaattttgatcctttattctttctatttgtcaggtgcacaagattaccttcctgttttagccttctgtcttgtcaccaaccattcttacttggtggccatgtacttggaaaaaggccgcatgatctttctggctccactcagtgtctaaggcaccctgcttcctttgcttgcatcccacagactatttccctcatcctatttactgcagcaaatctctccttagttgatgagactgtgtttatctccctttaaaaccctacctatcctgaatggtctgtcattgtctgcctttaaaatccttcctctttcttcctcctctattctctaaataatgatggggctaagttatacccaaagctcactttacaaaatatttcctcagtactttgcagaaaacaccaaacaaaaatgccattttaaaaaaggtgtattttttcttttagaatgtaagctcctcaagagcagggacaatgttttctgtatgttctattgtgcctagtacactgtaaatgctcaataaatattgatgatgggaggcagtgagtcttgatgataagggtgagaaactgaaatccc

SEQ ID NO: 51082 - DNA, 812 bp, Artificial Sequence
  derived and/or modified sequence
cccctcgcgcagtcaccgagcgcagatcccgcgctctcgattggaacgcctccccatcactcagccacactcaggggctggacgcctcactcccgtttccgagccataaaaggtctaggaccgcttcccccgagccagcaggagcccgtaggtcatcttggagggtcgtctcaagtattgaacaaaagacggaaggtgctgagaaaaaacagcagatggctcgagaatacagagagaaaattgagacggagctaagagatatctgcaatgatgtactgtctcttttggaaaagttcttgatccccaatgcttcacaagcagagagcaaagtcttctatttgaaaatgaaaggagattactaccgttacttggctgaggttgccgctggtgatgacaagaaagggattgtcgatcagtcacaacaagcataccaagaagcttttgaaatcagcaaaaaggaaatgcaaccaacacatcctatcagactgggtctggcccttaacttctctgtgttctattatgagattctgaactccccagagaaagcctgctctcttgcaaagacagcttttgatgaagccattgctgaacttgatacattaagtgaagagtcatacaaagacagcacgctaataatgcaattactgagagacaacttgacattgtggacatcggatacccaaggagacgaagctgaagcaggagaaggaggggaaaattaaccggccttccaacttttgtctgcctcattctaaaatttacacagtagaccatttgtcatccatgctgtcccacaaatagttttttgttta

SEQ ID NO: 51083 - DNA, 964 bp, Artificial Sequence
  derived and/or modified sequence
atgacaaaggaggagagtcggggacttgagccgtggctccgacttgggcggagcctggaggggggtggttgcgatacgcggaccggagaatttgcactttaaagtccgggtctgcccgttttcgtttcacagtaaccgacgtctcaagtcagaacatccagtcatggataaaaatgagctggttcagaaggccaaactggccgagcaggctgagcgatatgatgacatggcagcctgcatgaagtctgtaactgagcaaggagctgaattatccaatgaggagaggaatcttctctcagttgcttataaaaatgttgtaggagcccgtaggtcatcttggagggtcgtctcaagtattgaacaaaagacggaaggtgctgagaaaaaacagcagatggctcgagaatacagagagaaaattgagacggagctaagagatatctgcaatgatgtactgtctcttttggaaaagttcttgatccccaatgcttcacaagcagagagcaaagtcttctatttgaaaatgaaaggagattactaccgttacttggctgaggttgccgctggtgatgacaagaaagggattgtcgatcagtcacaacaagcataccaagaagcttttgaaatcagcaaaaaggaaatgcaaccaacacatcctatcagactgggtctggcccttaacttctctgtgttctattatgagattctgaactccccagagaaagcctgctctcttgcaaagacagcttttgatgaagccattgctgaacttgatacattaagtgaagagtcatacaaagacagcacgctaataatgcaattactgagagacaacttgacattgtggacatcggatacccaaggagacgaagctgaagcaggagaaggaggggaaaattaaccggccttccaacttttgtctgcctcattctaaaatttacacagtagaccatttgtcatccat

SEQ ID NO: 51084 - DNA, 994 bp, Artificial Sequence
  derived and/or modified sequence
gcatggccggggcgccgccggccgcgatccatccccacccttgtctctgcgggcttccaccccctccctcgccgcccttctcgcttccgcccgagataatgactcggcggcggcggcggcgggcatcgcagtggcgcagaacatccagtcatggataaaaatgagctggttcagaaggccaaactggccgagcaggctgagcgatatgatgacatggcagcctgcatgaagtctgtaactgagcaaggagctgaattatccaatgaggagaggaatcttctctcagttgcttataaaaatgttgtaggagcccgtaggtcatcttggagggtcgtctcaagtattgaacaaaagacggaaggtgctgagaaaaaacagcagatggctcgagaatacagagagaaaattgagacggagctaagagatatctgcaatgatgtactgtctcttttggaaaagttcttgatccccaatgcttcacaagcagagagcaaagtcttctatttgaaaatgaaaggagattactaccgttacttggctgaggttgccgctggtgatgacaagaaagggattgtcgatcagtcacaacaagcataccaagaagcttttgaaatcagcaaaaaggaaatgcaaccaacacatcctatcagactgggtctggcccttaacttctctgtgttctattatgagattctgaactccccagagaaagcctgctctcttgcaaagacagcttttgatgaagccattgctgaacttgatacattaagtgaagagtcatacaaagacagcacgctaataatgcaattactgagagacaacttgacattgtggacatcggatacccaaggagacgaagctgaagcaggagaaggaggggaaaattaaccggccttccaacttttgtctgcctcattctaaaatttacacagtagaccatttgtcatccatgctgtcccacaaatagttttttgtttacgatttatgacaggtt

SEQ ID NO: 51085 - DNA, 2974 bp, Artificial Sequence
  derived and/or modified sequence
ccgccccctcccctctccctcggccgccccctcctttccctccccctcgcgcagcctccgcgctgggcgctgcggcggcgggacccggccctcccccaccccgggaggcggtggcgcggcggggaggggccgggggcctcggggacccaagcgcgagggaaaggcctggccgagagcgggccggagcccaggcctggcgcggcggcgcccgccagaacatccagtcatggataaaaatgagctggttcagaaggccaaactggccgagcaggctgagcgatatgatgacatggcagcctgcatgaagtctgtaactgagcaaggagctgaattatccaatgaggagaggaatcttctctcagttgcttataaaaatgttgtaggagcccgtaggtcatcttggagggtcgtctcaagtattgaacaaaagacggaaggtgctgagaaaaaacagcagatggctcgagaatacagagagaaaattgagacggagctaagagatatctgcaatgatgtactgtctcttttggaaaagttcttgatccccaatgcttcacaagcagagagcaaagtcttctatttgaaaatgaaaggagattactaccgttacttggctgaggttgccgctggtgatgacaagaaagggattgtcgatcagtcacaacaagcataccaagaagcttttgaaatcagcaaaaaggaaatgcaaccaacacatcctatcagactgggtctggcccttaacttctctgtgttctattatgagattctgaactccccagagaaagcctgctctcttgcaaagacagcttttgatgaagccattgctgaacttgatacattaagtgaagagtcatacaaagacagcacgctaataatgcaattactgagagacaacttgacattgtggacatcggatacccaaggagacgaagctgaagcaggagaaggaggggaaaattaaccggccttccaacttttgtctgcctcattctaaaatttacacagtagaccatttgtcatccatgctgtcccacaaatagttttttgtttacgatttatgacaggtttatgttacttctatttgaatttctatatttcccatgtggtttttatgtttaatattaggggagtagagccagttaacatttagggagttatctgttttcatcttgaggtggccaatatggggatgtggaatttttatacaagttataagtgtttggcatagtacttttggtacattgtggcttcaaaagggccagtgtaaaactgcttccatgtctaagcaaagaaaactgcctacatactggtttgtcctggcggggaataaaagggatcattggttccagtcacaggtgtagtaattgtgggtactttaaggtttggagcacttacaaggctgtggtagaatcataccccatggataccacatattaaaccatgtatatctgtggaatactcaatgtgtacacctttgactacagctgcagaagtgttcctttagacaaagttgtgacccattttactctggataagggcagaaacggttcacattccattatttgtaaagttacctgctgttagctttcattatttttgctacactcattttatttgtatttaaatgttttaggcaacctaagaacaaatgtaaaagtaaagatgcaggaaaaatgaattgcttggtattcattacttcatgtatatcaagcacagcagtaaaacaaaaacccatgtatttaacttttttttaggatttttgcttttgtgatttttttttttttgatacttgcctaacatgcatgtgctgtaaaaatagttaacagggaaataacttgagatgatggctagctttgtttaatgtcttatgaaattttcatgaacaatccaagcataattgttaagaacacgtgtattaaattcatgtaagtggaataaaagttttatgaatggacttttcaactactttctctacagcttttcatgtaaattagtcttggttctgaaacttctctaaaggaaattgtacattttttgaaatttattccttattccctcttggcagctaatgggctcttaccaagtttaaacacaaaatttatcataacaaaaatactactaatataactactgtttccatgtcccatgatcccctctcttcctccccaccctgaaaaaaatgagttcctattttttctgggagagggggggattgattagaaaaaaatgtagtgtgttccatttaaaattttggcatatggcattttctaacttaggaagccacaatgttcttggcccatcatgacattgggtagcattaactgtaagttttgtgcttccaaatcactttttggtttttaagaatttcttgatactcttatagcctgccttcaattttgatcctttattctttctatttgtcaggtgcacaagattaccttcctgttttagccttctgtcttgtcaccaaccattcttacttggtggccatgtacttggaaaaaggccgcatgatctttctggctccactcagtgtctaaggcaccctgcttcctttgcttgcatcccacagactatttccctcatcctatttactgcagcaaatctctccttagttgatgagactgtgtttatctccctttaaaaccctacctatcctgaatggtctgtcattgtctgcctttaaaatccttcctctttcttcctcctctattctctaaataatgatggggctaagttatacccaaagctcactttacaaaatatttcctcagtactttgcagaaaacaccaaacaaaaatgccattttaaaaaaggtgtattttttcttttagaatgtaagctcctcaagagcagggacaatgttttctgtatgttctattgtgcctagtacactgtaaatgctcaataaatattgatgatgggaggcagtgagtcttgatgataagggtgagaaactgaaatcccaaa

SEQ ID NO: 51086 - DNA, 3197 bp, Artificial Sequence
  derived and/or modified sequence
cgcagtcaccgagcgcagatcccgcgctctcgattggaacgcctccccatcactcagccacactcaggggctggacgcctcactcccgtttccgagccataaaaggtctaggaccgcttcccccgagccagcagcgtttgacgtcatcgtgcgtgtggtgcccctgctgccggggctggtgattggaggaaaccccgtgtctgcggagcggctgtagcctgtgagcagcgagatccagggacagagtctcagcctcgccgctgctgccgccgccgccgcccagagactgctgagcccgtccgtccgccgccaccacccactccggacacagaacatccagtcatggataaaaatgagctggttcagaaggccaaactggccgagcaggctgagcgatatgatgacatggcagcctgcatgaagtctgtaactgagcaaggagctgaattatccaatgaggagaggaatcttctctcagttgcttataaaaatgttgtaggagcccgtaggtcatcttggagggtcgtctcaagtattgaacaaaagacggaaggtgctgagaaaaaacagcagatggctcgagaatacagagagaaaattgagacggagctaagagatatctgcaatgatgtactgtctcttttggaaaagttcttgatccccaatgcttcacaagcagagagcaaagtcttctatttgaaaatgaaaggagattactaccgttacttggctgaggttgccgctggtgatgacaagaaagggattgtcgatcagtcacaacaagcataccaagaagcttttgaaatcagcaaaaaggaaatgcaaccaacacatcctatcagactgggtctggcccttaacttctctgtgttctattatgagattctgaactccccagagaaagcctgctctcttgcaaagacagcttttgatgaagccattgctgaacttgatacattaagtgaagagtcatacaaagacagcacgctaataatgcaattactgagagacaacttgacattgtggacatcggatacccaaggagacgaagctgaagcaggagaaggaggggaaaattaaccggccttccaacttttgtctgcctcattctaaaatttacacagtagaccatttgtcatccatgctgtcccacaaatagttttttgtttacgatttatgacaggtttatgttacttctatttgaatttctatatttcccatgtggtttttatgtttaatattaggggagtagagccagttaacatttagggagttatctgttttcatcttgaggtggccaatatggggatgtggaatttttatacaagttataagtgtttggcatagtacttttggtacattgtggcttcaaaagggccagtgtaaaactgcttccatgtctaagcaaagaaaactgcctacatactggtttgtcctggcggggaataaaagggatcattggttccagtcacaggtgtagtaattgtgggtactttaaggtttggagcacttacaaggctgtggtagaatcataccccatggataccacatattaaaccatgtatatctgtggaatactcaatgtgtacacctttgactacagctgcagaagtgttcctttagacaaagttgtgacccattttactctggataagggcagaaacggttcacattccattatttgtaaagttacctgctgttagctttcattatttttgctacactcattttatttgtatttaaatgttttaggcaacctaagaacaaatgtaaaagtaaagatgcaggaaaaatgaattgcttggtattcattacttcatgtatatcaagcacagcagtaaaacaaaaacccatgtatttaacttttttttaggatttttgcttttgtgatttttttttttttgatacttgcctaacatgcatgtgctgtaaaaatagttaacagggaaataacttgagatgatggctagctttgtttaatgtcttatgaaattttcatgaacaatccaagcataattgttaagaacacgtgtattaaattcatgtaagtggaataaaagttttatgaatggacttttcaactactttctctacagcttttcatgtaaattagtcttggttctgaaacttctctaaaggaaattgtacattttttgaaatttattccttattccctcttggcagctaatgggctcttaccaagtttaaacacaaaatttatcataacaaaaatactactaatataactactgtttccatgtcccatgatcccctctcttcctccccaccctgaaaaaaatgagttcctattttttctgggagagggggggattgattagaaaaaaatgtagtgtgttccatttaaaattttggcatatggcattttctaacttaggaagccacaatgttcttggcccatcatgacattgggtagcattaactgtaagttttgtgcttccaaatcactttttggtttttaagaatttcttgatactcttatagcctgccttcaattttgatcctttattctttctatttgtcaggtgcacaagattaccttcctgttttagccttctgtcttgtcaccaaccattcttacttggtggccatgtacttggaaaaaggccgcatgatctttctggctccactcagtgtctaaggcaccctgcttcctttgcttgcatcccacagactatttccctcatcctatttactgcagcaaatctctccttagttgatgagactgtgtttatctccctttaaaaccctacctatcctgaatggtctgtcattgtctgcctttaaaatccttcctctttcttcctcctctattctctaaataatgatggggctaagttatacccaaagctcactttacaaaatatttcctcagtactttgcagaaaacaccaaacaaaaatgccattttaaaaaaggtgtattttttcttttagaatgtaagctcctcaagagcagggacaatgttttctgtatgttctattgtgcctagtacactgtaaatgctcaataaatattgatgatgggaggcagtgagtcttgatgataagggtgagaaactgaaatcccaaacactgttttgttgcttgttttattatgacctcagattaaattgggaaatattggcccttttgaataattgtcccaaatattacattcaaataaaagtgcaatggaga

SEQ ID NO: 51087 - DNA, 3064 bp, Artificial Sequence
  derived and/or modified sequence
gcagcgtttgacgtcatcgtgcgtgtggtgcccctgctgccggggctggtgattggaggaaaccccgtgtctgcggagcggctgtagcctgtgagcagcgagatccagggacagagtctcagcctcgccgctgctgccgccgccgccgcccagagactgctgagcccgtccgtccgccgccaccacccactccggacacagaacatccagtcatggataaaaatgagctggttcagaaggccaaactggccgagcaggctgagcgatatgatgacatggcagcctgcatgaagtctgtaactgagcaaggagctgaattatccaatgaggagaggaatcttctctcagttgcttataaaaatgttgtaggagcccgtaggtcatcttggagggtcgtctcaagtattgaacaaaagacggaaggtgctgagaaaaaacagcagatggctcgagaatacagagagaaaattgagacggagctaagagatatctgcaatgatgtactgtctcttttggaaaagttcttgatccccaatgcttcacaagcagagagcaaagtcttctatttgaaaatgaaaggagattactaccgttacttggctgaggttgccgctggtgatgacaagaaagggattgtcgatcagtcacaacaagcataccaagaagcttttgaaatcagcaaaaaggaaatgcaaccaacacatcctatcagactgggtctggcccttaacttctctgtgttctattatgagattctgaactccccagagaaagcctgctctcttgcaaagacagcttttgatgaagccattgctgaacttgatacattaagtgaagagtcatacaaagacagcacgctaataatgcaattactgagagacaacttgacattgtggacatcggatacccaaggagacgaagctgaagcaggagaaggaggggaaaattaaccggccttccaacttttgtctgcctcattctaaaatttacacagtagaccatttgtcatccatgctgtcccacaaatagttttttgtttacgatttatgacaggtttatgttacttctatttgaatttctatatttcccatgtggtttttatgtttaatattaggggagtagagccagttaacatttagggagttatctgttttcatcttgaggtggccaatatggggatgtggaatttttatacaagttataagtgtttggcatagtacttttggtacattgtggcttcaaaagggccagtgtaaaactgcttccatgtctaagcaaagaaaactgcctacatactggtttgtcctggcggggaataaaagggatcattggttccagtcacaggtgtagtaattgtgggtactttaaggtttggagcacttacaaggctgtggtagaatcataccccatggataccacatattaaaccatgtatatctgtggaatactcaatgtgtacacctttgactacagctgcagaagtgttcctttagacaaagttgtgacccattttactctggataagggcagaaacggttcacattccattatttgtaaagttacctgctgttagctttcattatttttgctacactcattttatttgtatttaaatgttttaggcaacctaagaacaaatgtaaaagtaaagatgcaggaaaaatgaattgcttggtattcattacttcatgtatatcaagcacagcagtaaaacaaaaacccatgtatttaacttttttttaggatttttgcttttgtgatttttttttttttgatacttgcctaacatgcatgtgctgtaaaaatagttaacagggaaataacttgagatgatggctagctttgtttaatgtcttatgaaattttcatgaacaatccaagcataattgttaagaacacgtgtattaaattcatgtaagtggaataaaagttttatgaatggacttttcaactactttctctacagcttttcatgtaaattagtcttggttctgaaacttctctaaaggaaattgtacattttttgaaatttattccttattccctcttggcagctaatgggctcttaccaagtttaaacacaaaatttatcataacaaaaatactactaatataactactgtttccatgtcccatgatcccctctcttcctccccaccctgaaaaaaatgagttcctattttttctgggagagggggggattgattagaaaaaaatgtagtgtgttccatttaaaattttggcatatggcattttctaacttaggaagccacaatgttcttggcccatcatgacattgggtagcattaactgtaagttttgtgcttccaaatcactttttggtttttaagaatttcttgatactcttatagcctgccttcaattttgatcctttattctttctatttgtcaggtgcacaagattaccttcctgttttagccttctgtcttgtcaccaaccattcttacttggtggccatgtacttggaaaaaggccgcatgatctttctggctccactcagtgtctaaggcaccctgcttcctttgcttgcatcccacagactatttccctcatcctatttactgcagcaaatctctccttagttgatgagactgtgtttatctccctttaaaaccctacctatcctgaatggtctgtcattgtctgcctttaaaatccttcctctttcttcctcctctattctctaaataatgatggggctaagttatacccaaagctcactttacaaaatatttcctcagtactttgcagaaaacaccaaacaaaaatgccattttaaaaaaggtgtattttttcttttagaatgtaagctcctcaagagcagggacaatgttttctgtatgttctattgtgcctagtacactgtaaatgctcaataaatattgatgatgggaggcagtgagtcttgatgataagggtgagaaactgaaatcccaaacactgttttgttgcttgttttattatgacctcagattaaattgggaaatattggcccttttgaataattgtcccaaatattacattcaaataaaagtgcaatgg

SEQ ID NO: 51088 - DNA, 996 bp, Artificial Sequence
  derived and/or modified sequence
agttactaccgcgaagcacggagggtggggcgggccgggcctcggggaggggtggggggatgtgaaaggtcccggatgttgctgaacgggagccccttccagagggagtgactggggcaagcgcagacgggctgagcgaaagctaaggtgggggtagggagagaacgccttcccgccggctgagaggaagagtgggccggcagaggctgcaggggagagggagagagagggcgttggggacccaaagggaaggcgaggagtgggggatttgcgttggggaggaaaaggaaaaaagcagcctcctgccctaggtgcactcgggacaagcgtagaggagctggaagccgagcggggtgggaggagtggcggctgcgggcgaggacgcgcgcgcctccgctcgccctccagcgcgggcgggcaggacgagcgccggggagcggcggttacgcggggccccgatcgctgtgggcaccaatcaacggttgccatagcagcgtttgacgtcatcgtgcgtgtggtgcccctgctgccggggctggtgattggaggaaaccccgtgtctgcggagcggctgtagcctgtgagcagcgagatccagggacagagtctcagcctcgccgctgctgccgccgccgccgcccagagactgctgagcccgtccgtccgccgccaccacccactccggacacagaacatccagtcatggataaaaatgagctggttcagaaggccaaactggccgagcaggctgagcgatatgatgacatggcagcctgcatgaagtctgtaactgagcaaggagctgaattatccaatgaggagaggaatcttctctcagttgcttataaaaatgttgtaggagcccgtaggtcatcttggagggtcgtctcaagtattgaacaaaagacggaaggtgctgagaaaaaacagcagatggctcgagaatacagagagaaaattgagacggagctaagagatatctgcaatgatgtactg

SEQ ID NO: 51089 - DNA, 891 bp, Artificial Sequence
  derived and/or modified sequence
gagcgggccggagcccaggcctggcgcggcggcgcccgccaggtagaccggggcgaggctgcgcgccggcgggaggggagtccactgcgggaacatccagtcatggataaaaatgagctggttcagaaggccaaactggccgagcaggctgagcgatatgatgacatggcagcctgcatgaagtctgtaactgagcaaggagctgaattatccaatgaggagaggaatcttctctcagttgcttataaaaatgttgtaggagcccgtaggtcatcttggagggtcgtctcaagtattgaacaaaagacggaaggtgctgagaaaaaacagcagatggctcgagaatacagagagaaaattgagacggagctaagagatatctgcaatgatgtactgtctcttttggaaaagttcttgatccccaatgcttcacaagcagagagcaaagtcttctatttgaaaatgaaaggagattactaccgttacttggctgaggttgccgctggtgatgacaagaaagggattgtcgatcagtcacaacaagcataccaagaagcttttgaaatcagcaaaaaggaaatgcaaccaacacatcctatcagactgggtctggcccttaacttctctgtgttctattatgagattctgaactccccagagaaagcctgctctcttgcaaagacagcttttgatgaagccattgctgaacttgatacattaagtgaagagtcatacaaagacagcacgctaataatgcaattactgagagacaacttgacattgtggacatcggatacccaaggagacgaagctgaagcaggagaaggaggggaaaattaaccggccttccaacttttgtctgcctcattctaaaatttacacagtagacca

SEQ ID NO: 51090 - DNA, 701 bp, Artificial Sequence
  derived and/or modified sequence
aaaaggtctaggaccgcttcccccgagccagcaggtgcactcgggacaagcgtagaggagctggaagccgagcggggtgggaggagtggcggctgcgggcgaggacgcgcgcgcctccgctcgccctccagcgcgggcgggcaggacgagcgccggggagcggcggttacgcggggccccgatcgctgtgggcaccaatcaacggttgccatagcagcgtttgacgtcatcgtgcgtgtggtgcccctgctgccggggctggtgattggaggaaaccccgtgtctgcggagcggctgtagcctgtgagcagcgagatccagggacagagtctcagcctcgccgctgctgccgccgccgccgcccagagactgctgagcccgtccgtccgccgccaccacccactccggacacagaacatccagtcatggataaaaatgagctggttcagaaggccaaactggccgagcaggctgagcgatatgatgacatggcagcctgcatgaagtctgtaactgagcaaggagctgaattatccaatgaggagaggaatcttctctcagttgcttataaaaatgttgtaggagcccgtaggtcatcttggagggtcgtctcaagtattgaacaaaagacggaaggtgctgagaaaaaacagcagatggctcgagaatacagagagaaaattgagacggagctaagagat

SEQ ID NO: 51091 - DNA, 3007 bp, Artificial Sequence
  derived and/or modified sequence
tgtcccctcgcgcagtcaccgagcgcagatcccgcgctctcgattggaacgcctccccatcactcagccacactcaggggctggacgcctcactcccgtttccgagccataaaaggtctaggaccgcttcccccgagccagcagaacatccagtcatggataaaaatgagctggttcagaaggccaaactggccgagcaggctgagcgatatgatgacatggcagcctgcatgaagtctgtaactgagcaaggagctgaattatccaatgaggagaggaatcttctctcagttgcttataaaaatgttgtaggagcccgtaggtcatcttggagggtcgtctcaagtattgaacaaaagacggaaggtgctgagaaaaaacagcagatggctcgagaatacagagagaaaattgagacggagctaagagatatctgcaatgatgtactgtctcttttggaaaagttcttgatccccaatgcttcacaagcagagagcaaagtcttctatttgaaaatgaaaggagattactaccgttacttggctgaggttgccgctggtgatgacaagaaagggattgtcgatcagtcacaacaagcataccaagaagcttttgaaatcagcaaaaaggaaatgcaaccaacacatcctatcagactgggtctggcccttaacttctctgtgttctattatgagattctgaactccccagagaaagcctgctctcttgcaaagacagcttttgatgaagccattgctgaacttgatacattaagtgaagagtcatacaaagacagcacgctaataatgcaattactgagagacaacttgacattgtggacatcggatacccaaggagacgaagctgaagcaggagaaggaggggaaaattaaccggccttccaacttttgtctgcctcattctaaaatttacacagtagaccatttgtcatccatgctgtcccacaaatagttttttgtttacgatttatgacaggtttatgttacttctatttgaatttctatatttcccatgtggtttttatgtttaatattaggggagtagagccagttaacatttagggagttatctgttttcatcttgaggtggccaatatggggatgtggaatttttatacaagttataagtgtttggcatagtacttttggtacattgtggcttcaaaagggccagtgtaaaactgcttccatgtctaagcaaagaaaactgcctacatactggtttgtcctggcggggaataaaagggatcattggttccagtcacaggtgtagtaattgtgggtactttaaggtttggagcacttacaaggctgtggtagaatcataccccatggataccacatattaaaccatgtatatctgtggaatactcaatgtgtacacctttgactacagctgcagaagtgttcctttagacaaagttgtgacccattttactctggataagggcagaaacggttcacattccattatttgtaaagttacctgctgttagctttcattatttttgctacactcattttatttgtatttaaatgttttaggcaacctaagaacaaatgtaaaagtaaagatgcaggaaaaatgaattgcttggtattcattacttcatgtatatcaagcacagcagtaaaacaaaaacccatgtatttaacttttttttaggatttttgcttttgtgatttttttttttttgatacttgcctaacatgcatgtgctgtaaaaatagttaacagggaaataacttgagatgatggctagctttgtttaatgtcttatgaaattttcatgaacaatccaagcataattgttaagaacacgtgtattaaattcatgtaagtggaataaaagttttatgaatggacttttcaactactttctctacagcttttcatgtaaattagtcttggttctgaaacttctctaaaggaaattgtacattttttgaaatttattccttattccctcttggcagctaatgggctcttaccaagtttaaacacaaaatttatcataacaaaaatactactaatataactactgtttccatgtcccatgatcccctctcttcctccccaccctgaaaaaaatgagttcctattttttctgggagagggggggattgattagaaaaaaatgtagtgtgttccatttaaaattttggcatatggcattttctaacttaggaagccacaatgttcttggcccatcatgacattgggtagcattaactgtaagttttgtgcttccaaatcactttttggtttttaagaatttcttgatactcttatagcctgccttcaattttgatcctttattctttctatttgtcaggtgcacaagattaccttcctgttttagccttctgtcttgtcaccaaccattcttacttggtggccatgtacttggaaaaaggccgcatgatctttctggctccactcagtgtctaaggcaccctgcttcctttgcttgcatcccacagactatttccctcatcctatttactgcagcaaatctctccttagttgatgagactgtgtttatctccctttaaaaccctacctatcctgaatggtctgtcattgtctgcctttaaaatccttcctctttcttcctcctctattctctaaataatgatggggctaagttatacccaaagctcactttacaaaatatttcctcagtactttgcagaaaacaccaaacaaaaatgccattttaaaaaaggtgtattttttcttttagaatgtaagctcctcaagagcagggacaatgttttctgtatgttctattgtgcctagtacactgtaaatgctcaataaatattgatgatgggaggcagtgagtcttgatgataagggtgagaaactgaaatcccaaacactgttttgttgcttgttttattatgacctcagattaaattgggaaatattggcccttttgaataattgtcccaaatattacattcaaataaaagtgcaatgg

SEQ ID NO: 51092 - DNA, 1012 bp, Artificial Sequence
  derived and/or modified sequence
agagtctcagcctcgccgctgctgccgccgccgccgcccagagactgctgagcccgtccgtccgccgccaccacccactccggacacagaacatccagtcatggataaaaatgagctgaattatccaatgaggagaggaatcttctctcagttgcttataaaaatgttgtaggagcccgtaggtcatcttggagggtcgtctcaagtattgaacaaaagacggaaggtgctgagaaaaaacagcagatggctcgagaatacagagagaaaattgagacggagctaagagatatctgcaatgatgtactgtctcttttggaaaagttcttgatccccaatgcttcacaagcagagagcaaagtcttctatttgaaaatgaaaggagattactaccgttacttggctgaggttgccgctggtgatgacaagaaagggattgtcgatcagtcacaacaagcataccaagaagcttttgaaatcagcaaaaaggaaatgcaaccaacacatcctatcagactgggtctggcccttaacttctctgtgttctattatgagattctgaactccccagagaaagcctgctctcttgcaaagacagcttttgatgaagccattgctgaacttgatacattaagtgaagagtcatacaaagacagcacgctaataatgcaattactgagagacaacttgacattgtggacatcggatacccaaggagacgaagctgaagcaggagaaggaggggaaaattaaccggccttccaacttttgtctgcctcattctaaaatttacacagtagaccatttgtcatccatgctgtcccacaaatagttttttgtttacgatttatgacaggtttatgttacttctatttgaatttctatatttcccatgtggtttttatgtttaatattaggggagtagagccagttaacatttagggagttatctgttttcatcttgaggtggccaatatggggatgtggaatttttatacaagttataagtgtt

SEQ ID NO: 51093 - DNA, 1399 bp, Artificial Sequence
  derived and/or modified sequence
acagagtctcagcctcgccgctgctgccgccgccgccgcccagagactgctgagcccgtccgtccgccgccaccacccactccggacacagtctcttttggaaaagttcttgatccccaatgcttcacaagcagagagcaaagtcttctatttgaaaatgaaaggagattactaccgttacttggctgaggttgccgctggtgatgacaagaaagggattgtcgatcagtcacaacaagcataccaagaagcttttgaaatcagcaaaaaggaaatgcaaccaacacatcctatcagactgggtctggcccttaacttctctgtgttctattatgagattctgaactccccagagaaagcctgctctcttgcaaagacagcttttgatgaagccattgctgaacttgatacattaagtgaagagtcatacaaagacagcacgctaataatgcaattactgagagacaacttgacattgtggacatcggatacccaaggagacgaagctgaagcaggagaaggaggggaaaattaaccggccttccaacttttgtctgcctcattctaaaatttacacagtagaccatttgtcatccatgctgtcccacaaatagttttttgtttacgatttatgacaggtttatgttacttctatttgaatttctatatttcccatgtggtttttatgtttaatattaggggagtagagccagttaacatttagggagttatctgttttcatcttgaggtggccaatatggggatgtggaatttttatacaagttataagtgtttggcatagtacttttggtacattgtggcttcaaaagggccagtgtaaaactgcttccatgtctaagcaaagaaaactgcctacatactggtttgtcctggcggggaataaaagggatcattggttccagtcacaggtgtagtaattgtgggtactttaaggtttggagcacttacaaggctgtggtagaatcataccccatggataccacatattaaaccatgtatatctgtggaatactcaatgtgtacacctttgactacagctgcagaagtgttcctttagacaaagttgtgacccattttactctggataagggcagaaacggttcacattccattatttgtaaagttacctgctgttagctttcattatttttgctacactcattttatttgtatttaaatgttttaggcaacctaagaacaaatgtaaaagtaaagatgcaggaaaaatgaattgcttggtattcattacttcatgtatatcaagcacagcagtaaaacaaaaacccatgtatttaacttttttttaggatttttgcttttgtgatttttttttttttgatacttgcctaacatgcatgtgctgtaaaaatagttaaca

SEQ ID NO: 51094 - DNA, 511 bp, Artificial Sequence
  derived and/or modified sequence
agcccgcagtcggctcccgtgcttgatggactagaactggagggtccctgcgctcggtttggggacgcatatcctgctttgggggcggaacatccagtcatggataaaaatgagctggttcagaaggccaaactggccgagcaggctgagcgatatgatgacatggcagcctgcatgaagtctgtaactgagcaaggagctgaattatccaatgaggagaggaatcttctctcagttgcttataaaaatgttgtaggagcccgtaggtcatcttggagggtcgtctcaagtattgaacaaaagacggaaggtgctgagaaaaaacagcagatggctcgagaatacagagagaaaattgagacggagctaagagatatctgcaatgatgtactgtctcttttggaaaagttcttgatccccaatgcttcacaagcagagagcaaagtcttctatttgaaaatgaaaggagattactaccgttacttggctgaggttgccgctggtgatgaca

SEQ ID NO: 51095 - DNA, 750 bp, Artificial Sequence
  derived and/or modified sequence
aacatccagtcatggataaaaatgagctggttcagaaggccaaactggccgagcaggctgagcgatatgatgacatggcagcctgcatgaagtctgtaactgagcaaggagctgaattatccaatgaggagaggaatcttctctcagttgcttataaaaatgttgtaggagcccgtaggtcatcttggagggtcgtctcaagtattgaacaaaagacggaaggtgctgagaaaaaacagcagatggctcgagaatacagagagaaaattgagacggagctaagagatatctgcaatgatgtactgtctcttttggaaaagttcttgatccccaatgcttcacaagcagagagcaaagtcttctatttgaaaatgaaaggagattactaccgttacttggctgaggttgccgctggtgatgacaagaaagtacgttttggtgtgtcttatccagggattgtcgatcagtcacaacaagcataccaagaagcttttgaaatcagcaaaaaggaaatgcaaccaacacatcctatcagactgggtctggcccttaacttctctgtgttctattatgagattctgaactccccagagaaagcctgctctcttgcaaagacagcttttgatgaagccattgctgaacttgatacattaagtgaagagtcatacaaagacagcacgctaataatgcaattactgagagacaacttgacattgtggacatcggatacccaaggagacgaagctgaag

SEQ ID NO: 51096 - DNA, 1394 bp, Artificial Sequence
  derived and/or modified sequence
gctataatgttaatgtaatgagtcaaccatgcagaaaactctggcgtcacaactatgaaacctcttcctgcattgaattcttgaagtctcttttggaaaagttcttgatccccaatgcttcacaagcagagagcaaagtcttctatttgaaaatgaaaggagattactaccgttacttggctgaggttgccgctggtgatgacaagaaagggattgtcgatcagtcacaacaagcataccaagaagcttttgaaatcagcaaaaaggaaatgcaaccaacacatcctatcagactgggtctggcccttaacttctctgtgttctattatgagattctgaactccccagagaaagcctgctctcttgcaaagacagcttttgatgaagccattgctgaacttgatacattaagtgaagagtcatacaaagacagcacgctaataatgcaattactgagagacaacttgacattgtggacatcggatacccaaggagacgaagctgaagcaggagaaggaggggaaaattaaccggccttccaacttttgtctgcctcattctaaaatttacacagtagaccatttgtcatccatgctgtcccacaaatagttttttgtttacgatttatgacaggtttatgttacttctatttgaatttctatatttcccatgtggtttttatgtttaatattaggggagtagagccagttaacatttagggagttatctgttttcatcttgaggtggccaatatggggatgtggaatttttatacaagttataagtgtttggcatagtacttttggtacattgtggcttcaaaagggccagtgtaaaactgcttccatgtctaagcaaagaaaactgcctacatactggtttgtcctggcggggaataaaagggatcattggttccagtcacaggtgtagtaattgtgggtactttaaggtttggagcacttacaaggctgtggtagaatcataccccatggataccacatattaaaccatgtatatctgtggaatactcaatgtgtacacctttgactacagctgcagaagtgttcctttagacaaagttgtgacccattttactctggataagggcagaaacggttcacattccattatttgtaaagttacctgctgttagctttcattatttttgctacactcattttatttgtatttaaatgttttaggcaacctaagaacaaatgtaaaagtaaagatgcaggaaaaatgaattgcttggtattcattacttcatgtatatcaagcacagcagtaaaacaaaaacccatgtatttaacttttttttaggatttttgcttttgtgatttttttttttttgatacttgcctaacatgcatgtgctgtaaaaatagttaaca

SEQ ID NO: 51097 - DNA, 875 bp, Artificial Sequence
  derived and/or modified sequence
tcagcctcccgagtagctgggattacagtcgtgtgccaccacatccaatttttttttttttcccagtagagacggggtgtcacccaggctggtaatctttattttaaattgtacttgctcctaagaatttaggtgttaagagcatagcatgtagaaggaaaaaataaagctgctgtaacctcatcctgccttcttggagatgagaatctgagacccaggaagatttcagagttttgtcaaggtgacagagtttgaatttaggcatctcttttggaaaagttcttgatccccaatgcttcacaagcagagagcaaagtcttctatttgaaaatgaaaggagattactaccgttacttggctgaggttgccgctggtgatgacaagaaagggattgtcgatcagtcacaacaagcataccaagaagcttttgaaatcagcaaaaaggaaatgcaaccaacacatcctatcagactgggtctggcccttaacttctctgtgttctattatgagattctgaactccccagagaaagcctgctctcttgcaaagacagcttttgatgaagccattgctgaacttgatacattaagtgaagagtcatacaaagacagcacgctaataatgcaattactgagagacaacttgacattgtggacatcggatacccaaggagacgaagctgaagcaggagaaggaggggaaaattaaccggccttccaacttttgtctgcctcattctaaaatttacacagtagaccatttgtcatccatgctgtcccacaaatagttttttgtttacgatttatgacaggtttatgttacttctatttgaatttctatatttcccatgtggtttttatgtttaatattagggg

SEQ ID NO: 51098 - DNA, 567 bp, Artificial Sequence
  derived and/or modified sequence
gcacggagggtggggcgggccgggcctcggggaggggtggggggatgtgaaaggtcccggatgttgctgaacgggagccccttccagagggagtgactggggcaagcgcagacgggctgagcgaaagctaagcgtttgacgtcatcgtgcgtgtggtgcccctgctgccggggctggtgattggaggaaaccccgtgtctgcggagcggctgtagcctgtgagcagcgagatccagggacagagtctcagcctcgccgctgctgccgccgccgccgcccagagactgctgagcccgtccgtccgccgccaccacccactccggacacagaacatccagtcatggataaaaatgagctggttcagaaggccaaactggccgagcaggctgagcgatatgatgacatggcagcctgcatgaagtctgtaactgagcaaggagctgaattatccaatgaggagaggaatcttctctcagttgcttataaaaatgttgtaggagcccgtaggtcatcttggagggtcgtctcaagtattgaacaaaagacggaaggtgctgagaaaaaaca

SEQ ID NO: 51099 - DNA, 664 bp, Artificial Sequence
  derived and/or modified sequence
gtcttctatttgaaaatgaaaggagattactaccgttacttggctgaggttgccgctggtgatgacaagaaagggattgtcgatcagtcacaacaagcataccaagaagcttttgaaatcagcaaaaaggaaatgcaaccaacacatcctatcagactgggtctggcccttaacttctctgtgttctattatgagattctgaactccccagagaaagcctgctctcttgcaaagacagcttttgatgaagccattgctgaacttgatacattaagtgaagagtcatacaaagacagcacgctaataatgcaattactgagagacaacttgacattgtggacatcggatacccaaggagacgaagctgaagcaggagaaggaggggaaaattaaccggccttccaacttttgtctgcctcattctaaaatttacacagtagaccatttgtcatccatgctgtcccacaaatagttttttgtttacgatttatgacaggtgcacaagattaccttcctgttttagccttctgtcttgtcaccaaccattcttacttggtggccatgtacttggaaaaaggccgcatgatctttctggctccactcagtgtctaaggcaccctgcttcctttgcttgcatcccacagactatttccctcatcctatt

SEQ ID NO: 51100 - DNA, 626 bp, Artificial Sequence
  derived and/or modified sequence
ggtcccggatgttgctgaacgggagccccttccagagggagtgactggggcaagcgcagacgggctgagcgaaagctaaggtgcactcgggacaagcgtagaggagctggaagccgagcggggtgggaggagtggcggctgcgggcgaggacgcgcgcgcctccgctcgccctccagcgcgggcgggcaggacgagcgccggggagcggcggttacgcggggccccgatcgctgtgggcaccaatcaacggttgccatagcagcgtttgacgtcatcgtgcgtgtggtgcccctgctgccggggctggtgattggaggaaaccccgtgtctgcggagcggctgtagcctgtgagcagcgagatccagggacagagtctcagcctcgccgctgctgccgccgccgccgcccagagactgctgagcccgtccgtccgccgccaccacccactccggacacagaacatccagtcatggataaaaatgagctggttcagaaggccaaactggccgagcaggctgagcgatatgatgacatggcagcctgcatgaagtctgtaactgagcaaggagctgaattatccaatgaggagaggaatcttctctcagttgcttataaaaatgttgt

SEQ ID NO: 51101 - protein, 840 aa, Artificial Sequence
  derived and/or modified sequence
MACRWSTKESPRWRSALLLLFLAGVYACGETPEQIRAPSGIITSPGWPSEYPAKINCSWFIRANPGEIITISFQDFDIQGSRRCNLDWLTIETYKNIESYRACGSTIPPPYISSQDHIWIRFHSDDNISRKGFRLAYFSGKSEEPNCACDQFRCGNGKCIPEAWKCNNMDECGDSSDEEICAKEANPPTAAAFQPCAYNQFQCLSRFTKVYTCLPESLKCDGNIDCLDLGDEIDCDVPTCGQWLKYFYGTFNSPNYPDFYPPGSNCTWLIDTGDHRKVILRFTDFKLDGTGYGDYVKIYDGLEENPHKLLRVLTAFDSHAPLTVVSSSGQIRVHFCADKVNAARGFNATYQVDGFCLPWEIPCGGNWGCYTEQQRCDGYWHCPNGRDETNCTMCQKEEFPCSRNGVCYPRSDRCNYQNHCPNGSDEKNCFFCQPGNFHCKNNRCVFESWVCDSQDDCGDGSDEENCPVIVPTRVITAAVIGSLICGLLLVIALGCTCKLYSLRMFERRSFETQLSRVEAELLRREAPPSYGQLIAQGLIPPVEDFPVCSPNQASVLENLRLAVRSQLGFTSVRLPMAGRSSNIWNRIFNFARSRHSGSLALVSADGDEVVPSQSTSREPERNHTHRSLFSVESDDTDTENERRDMAGASGGVAAPLPQKVPPTTAVEATVGACASSSTQSTRGGHADNGRDVTSVEPPSVSPARHQLTSALSRMTQGLRWVRFTLGRSSSLSQNQSPLRQLDNGVSGREDDDDVEMLIPISDGSSDFDVNDCSRPLLDLASDQGQGLRQPYNATNPGVRPSNRDGPCERCGIVHTAQIPDTCLEVTLKNETSDDEALLLC

SEQ ID NO: 51102 - DNA, 2523 bp, Artificial Sequence
  derived and/or modified sequence
atggcctgcagatggagcaccaaggagagccccagatggagaagcgccctgctgctgctgttcctggccggcgtgtacgcctgcggcgagacccccgagcagatcagagcccccagcggcatcatcaccagccccggctggcccagcgagtaccccgccaagatcaactgcagctggttcatcagagccaaccccggcgagatcatcaccatcagcttccaggacttcgacatccagggcagcagaagatgcaacctggactggctgaccatcgagacctacaagaacatcgagagctacagagcctgcggcagcaccatcccccccccctacatcagcagccaggaccacatctggatcagattccacagcgacgacaacatcagcagaaagggcttcagactggcctacttcagcggcaagagcgaggagcccaactgcgcctgcgaccagttcagatgcggcaacggcaagtgcatccccgaggcctggaagtgcaacaacatggacgagtgcggcgacagcagcgacgaggagatctgcgccaaggaggccaacccccccaccgccgccgccttccagccctgcgcctacaaccagttccagtgcctgagcagattcaccaaggtgtacacctgcctgcccgagagcctgaagtgcgacggcaacatcgactgcctggacctgggcgacgagatcgactgcgacgtgcccacctgcggccagtggctgaagtacttctacggcaccttcaacagccccaactaccccgacttctacccccccggcagcaactgcacctggctgatcgacaccggcgaccacagaaaggtgatcctgagattcaccgacttcaagctggacggcaccggctacggcgactacgtgaagatctacgacggcctggaggagaacccccacaagctgctgagagtgctgaccgccttcgacagccacgcccccctgaccgtggtgagcagcagcggccagatcagagtgcacttctgcgccgacaaggtgaacgccgccagaggcttcaacgccacctaccaggtggacggcttctgcctgccctgggagatcccctgcggcggcaactggggctgctacaccgagcagcagagatgcgacggctactggcactgccccaacggcagagacgagaccaactgcaccatgtgccagaaggaggagttcccctgcagcagaaacggcgtgtgctaccccagaagcgacagatgcaactaccagaaccactgccccaacggcagcgacgagaagaactgcttcttctgccagcccggcaacttccactgcaagaacaacagatgcgtgttcgagagctgggtgtgcgacagccaggacgactgcggcgacggcagcgacgaggagaactgccccgtgatcgtgcccaccagagtgatcaccgccgccgtgatcggcagcctgatctgcggcctgctgctggtgatcgccctgggctgcacctgcaagctgtacagcctgagaatgttcgagagaagaagcttcgagacccagctgagcagagtggaggccgagctgctgagaagagaggccccccccagctacggccagctgatcgcccagggcctgatcccccccgtggaggacttccccgtgtgcagccccaaccaggccagcgtgctggagaacctgagactggccgtgagaagccagctgggcttcaccagcgtgagactgcccatggccggcagaagcagcaacatctggaacagaatcttcaacttcgccagaagcagacacagcggcagcctggccctggtgagcgccgacggcgacgaggtggtgcccagccagagcaccagcagagagcccgagagaaaccacacccacagaagcctgttcagcgtggagagcgacgacaccgacaccgagaacgagagaagagacatggccggcgccagcggcggcgtggccgcccccctgccccagaaggtgccccccaccaccgccgtggaggccaccgtgggcgcctgcgccagcagcagcacccagagcaccagaggcggccacgccgacaacggcagagacgtgaccagcgtggagccccccagcgtgagccccgccagacaccagctgaccagcgccctgagcagaatgacccagggcctgagatgggtgagattcaccctgggcagaagcagcagcctgagccagaaccagagccccctgagacagctggacaacggcgtgagcggcagagaggacgacgacgacgtggagatgctgatccccatcagcgacggcagcagcgacttcgacgtgaacgactgcagcagacccctgctggacctggccagcgaccagggccagggcctgagacagccctacaacgccaccaaccccggcgtgagacccagcaacagagacggcccctgcgagagatgcggcatcgtgcacaccgcccagatccccgacacctgcctggaggtgaccctgaagaacgagaccagcgacgacgaggccctgctgctgtgctag

SEQ ID NO: 51103 - DNA, 2523 bp, Artificial Sequence
  derived and/or modified sequence
atggcctgccgctggagtaccaaggagtcaccacggtggcggtcagcccttctgctgctttttctggccggcgtgtacgcgtgtggggagacacctgagcagatcagggcccccagcggcatcattacctcccctggatggccaagcgaatatccagcaaagattaactgctcatggttcattagggcgaatccgggagaaattattaccatctcattccaagacttcgatatccaagggtccaggcgatgcaatctggactggcttactatagagacttataaaaacattgaatcgtaccgcgcctgtggctcaactattccccctccctatatatccagtcaggaccacatatggatcaggttccattccgacgacaatatttctagaaaaggcttccggcttgcttattttagcggaaaaagcgaagagccaaactgcgcgtgcgaccagtttcgatgcggcaatgggaagtgtatcccggaggcttggaaatgtaataatatggatgaatgtggggacagcagcgacgaagagatatgtgccaaggaggccaacccacccactgcggccgcttttcaaccttgcgcttataatcagtttcaatgtctttcaagatttacaaaggtgtacacatgcttgccagaaagtctgaagtgtgacggcaatatcgattgcctggatttgggcgatgagattgactgtgacgtgcctacctgcggacagtggcttaaatatttttacggcacctttaacagcccgaactatcctgatttttaccctcctggctctaattgtacatggctaatcgacaccggggaccatcggaaagtgatactccgcttcaccgatttcaagctggatggcaccggttatggagattatgttaagatatacgatggtttggaagaaaatccacacaagctgctccgcgtcctgactgcatttgactcgcacgcccccctcacagtggtatctagttcagggcagatcagagttcatttttgtgccgacaaagtaaatgccgcacgaggcttcaatgctacgtaccaggttgacggcttctgcctgccgtgggaaattccctgtggaggtaattgggggtgctacacagagcagcagagatgtgatggctattggcattgtccgaacggacgagatgaaacaaactgtaccatgtgtcagaaggaagaatttccctgtagccgcaacggcgtctgttaccctagatccgaccgatgtaattatcaaaaccactgtccaaacggttctgacgaaaagaattgcttcttctgccagcccggcaacttccactgcaagaacaacaggtgcgtttttgagtcgtgggtatgcgattctcaggacgattgtggagatggctctgatgaggaaaactgtcctgtgatcgttcccaccagggtgattactgccgccgtaattggcagcctcatctgtgggctgcttctggtgatcgcactgggctgcacctgcaaattgtactccctaagaatgttcgagcgacgcagctttgagacgcaattgtcccgagtggaggccgaattgctgagacgcgaagctcctcccagctatgggcagctgatcgcgcagggactgattccacctgtggaggatttcccggtctgctctcctaaccaggcaagcgtcctggaaaacctccgccttgccgtcagatctcaactggggttcacttctgttcggctaccaatggctggtaggagttccaacatctggaacaggatatttaactttgccaggtctcgtcattctggctcactggctctggttagcgcagatggcgatgaagtcgtcccttcacagtctacatctagagagccagagcgcaaccacacccacagatcattgttttcagtcgaatccgacgacacagacacagaaaacgagcgtcgcgatatggctggcgcttccgggggagtcgccgcgcccttgccccagaaagtgccgcctactaccgccgttgaagccaccgtgggagcatgtgcatcctccagcacacaaagcacgaggggggggcatgcagacaacggtagggacgtgactagtgtggagccgccttccgtgtcccctgcacggcaccaattgaccagcgccctttccagaatgacgcagggtctgaggtgggtccggtttaccctcggacgttcatccagcctcagccagaatcagtctcctctgaggcagctcgacaatggggtgtcaggaagagaggatgatgacgatgtggaaatgctcattccaatcagcgacggcagttccgacttcgacgtgaatgattgctcaaggccactgctggatctcgctagcgaccaggggcagggtctgagacagccctataatgcaaccaatccaggggttcgaccaagcaatagagacggaccctgtgagcgctgtggcatcgtccatacagcacagattcctgatacctgtttggaggtgacactgaagaatgaaaccagtgacgatgaggctctgctgttgtgttag

SEQ ID NO: 51104 - DNA, 4092 bp, Artificial Sequence
  derived and/or modified sequence
agagcgcagggagcagccggtggctcggcggcggcggcggcggcggcggcggcgtcggcgtcgtctacctccagcttctcctccctcctcctccgtctcctcctctctctctccatctgctgtggttatggcctgtcgctggagcacaaaagagtctccgcggtggaggtctgcgttgctcttgcttttcctcgctggggtgtacgcttgtggagagactccagagcaaatacgagcaccaagtggcataatcacaagcccaggctggccttctgaatatcctgcaaaaatcaactgtagctggttcataagggcaaacccaggcgaaatcattactataagttttcaggattttgatattcaaggatccagaaggtgcaatttggactggttgacaatagaaacatacaagaatattgaaagttacagagcttgtggttccacaattccacctccgtatatctcttcacaagaccacatctggattaggtttcattcggatgacaacatctctagaaagggtttcagactggcatatttttcagggaaatctgaggaaccaaattgtgcttgtgatcagtttcgttgtggtaatggaaagtgtataccagaagcctggaaatgtaataacatggatgaatgtggagatagttccgatgaagagatctgtgccaaagaagcaaatcctccaactgctgctgcttttcaaccctgtgcttacaaccagttccagtgtttatcccgttttaccaaagtttacacttgcctccccgaatctttaaaatgtgatgggaacattgactgccttgacctaggagatgagatagactgtgatgtgccaacatgtgggcaatggctaaaatatttttatggtacttttaattctcccaattatccagacttttatcctcctggaagcaattgcacctggttaatagacactggtgatcaccgtaaagtcattttacgcttcactgactttaaacttgatggtactggttatggtgattatgtcaaaatatatgatggattagaggagaatccacacaagcttttgcgtgtgttgacagcttttgattctcatgcacctcttacagttgtttcttcttctggacagataagggtacatttttgtgctgataaagtgaatgctgcaaggggatttaatgctacttaccaagtagatgggttctgtttgccatgggaaataccctgtggaggtaactgggggtgttatactgagcagcagcgttgtgatgggtattggcattgcccaaatggaagggatgaaaccaattgtaccatgtgccagaaggaagaatttccatgttcccgaaatggtgtctgttatcctcgttctgatcgctgcaactaccagaatcattgcccaaatggctcagatgaaaaaaactgctttttttgccaaccaggaaatttccattgtaaaaacaatcgttgtgtgtttgaaagttgggtgtgtgattctcaagatgactgtggtgatggcagcgatgaagaaaattgcccagtaatcgtgcctacaagagtcatcactgctgccgtcatagggagcctcatctgtggcctgttactcgtcatagcattgggatgtacttgtaagctttattctctgagaatgtttgaaagaagatcatttgaaacacagttgtcaagagtggaagcagaattgttaagaagagaagctcctccctcgtatggacaattgattgctcagggtttaattccaccagttgaagattttcctgtttgttcacctaatcaggcttctgttttggaaaatctgaggctagcggtacgatctcagcttggatttacttcagtcaggcttcctatggcaggcagatcaagcaacatttggaaccgtatttttaattttgcaagatcacgtcattctgggtcattggctttggtctcagcagatggagatgaggttgtccctagtcagagtaccagtagagaacctgagagaaatcatactcacagaagtttgttttccgtggagtctgatgatacagacacagaaaatgagagaagagatatggcaggagcatctggtggggttgcagctcctttgcctcaaaaagtccctcccacaacggcagtagaagcgacagtaggagcatgtgcaagttcctcaactcagagtacccgaggtggtcatgcagataatggaagggatgtgacaagtgtggaacccccaagtgtgagtccagcacgtcaccagcttacaagtgcactcagtcgtatgactcaggggctacgctgggtacgttttacattaggacgatcaagttccctaagtcagaaccagagtcctttgagacaacttgataatggggtaagtggaagagaagatgatgatgatgttgaaatgctaattccaatttctgatggatcttcagactttgatgtgaatgactgctccagacctcttcttgatcttgcctcagatcaaggacaagggcttagacaaccatataatgcaacaaatcctggagtaaggccaagtaatcgagatggcccctgtgagcgctgtggtattgtccacactgcccagataccagacacttgcttagaagtaacactgaaaaacgaaacgagtgatgatgaggctttgttactttgttaggtacgaatcacataagggagattgtatacaagttggagcaatatccatttattattttgtaactttacagttaaactagttttagtttaaaaagaaaaaatgcagggtgatttcttattattatatgttagcctgcatggttaaattcgacaacttgtaactctatgaacttagagtttactattttagcagctaaaaatgcatcacatattcatattgttcaataatgtcctttcatttgtttctgattgttttcatcctgatactgtagttcactgtagaaatgtggctgctgaaactcatttgattgtcatttttatctatcctatgttaaatggtttgtttttacaaaataataccttattttaattgaaacgtttatgcttttgccaacacatcttgtaacttaatatactagatgttaaggttgttaatgtacaaaaaaaaaacccttatactcacctgcgttttcatttgtttgacatttgtctattattggatttcattatcatatgaacttgtcagtgggaaacaaactgtctaaaaatttttctcttacgtttaacatacaatcatgtgaaatttaggcagagttcgataaattactggcaaaaacaaaactcttttataaagattttctaatgttgactttaatactctaacatggtacaaaccaaatggtaaaatcccaagtcatttcttttttcatctctatttagcaacagaattaagtggatgaagatattctactatgcattaaatcttgaactttataaaacatgtacaaaaattgtacaagataagttccacctggtaatgtctttccctaatacagggttgcgcttgcattggaccctagggatttgcactaaaattatatcaaggtctcagatgagcttagtgcacaagcactatcactttaaatactattatttgctaccacagcaactatatatttccatagcttttggctgggggcgggggacatttttattacaacttgaaattgctttgctggtttcatatttatttgttgtatttaaaaaatacattgttgtaagagtgattttttcaatatattttattcctgggggggatcatgctacactctcaaaagaaaattaagaaatcattcagatcatcccccctttttaagtagtgtgaattgcaaaacccaacatattttttttactgtcagttgcggtttatttattctttaactgtctgttttagtagtttaatgattatgaaaaatgtatctgtgtgtgatttgctatttattaaattttaagtactttgctgaatgtcattttaaagcatgtttgaagtcttgtgtatttgtctgtgttaatgctgtcaggaggaactgactaagatgttttaatatgtatcaaaaattaaaatgattttttttattgccttgaggtactttttaaatcaaa

SEQ ID NO: 51105 - DNA, 2523 bp, Artificial Sequence
  derived and/or modified sequence
atggcctgccgctggagcaccaaggagagcccccgctggaggtctgccctgctgctgctcttcctggccggcgtgtatgcctgtggggagaccccagagcagatccgggcccccagcggcatcatcaccagccctggctggcccagcgagtacccagccaagatcaactgctcctggttcatccgggccaaccctggagagatcatcaccatctccttccaggactttgacatccagggcagccgccgctgcaacctggactggctgaccatcgagacctacaagaacatcgagagctaccgggcctgtggcagcaccatccccccaccctacatcagcagccaggaccacatctggatccgcttccacagtgatgacaacatcagcaggaagggcttccggctggcctacttcagcggcaagtctgaggagcccaactgtgcctgtgaccagttccgctgtggaaatggcaagtgcatccctgaggcctggaagtgcaacaacatggatgaatgtggggacagcagtgatgaggagatctgtgccaaggaggccaaccccccaacagctgctgccttccagccctgtgcctacaaccagttccagtgcctgagccgcttcaccaaggtgtacacctgcctgcctgagagcctgaagtgtgatggcaacatcgactgcctggacctgggagatgaaattgactgtgatgtgcccacctgtggccagtggctgaagtacttctacggcaccttcaacagccccaactacccagacttctacccacctggcagcaactgcacctggctgattgacaccggggaccacaggaaggtgatcctgcgcttcacagacttcaagctggatggcaccggctacggggactatgtgaagatctatgatggcctggaggagaacccccacaagctgctgcgggtgctgacagcctttgacagccacgcccccctgactgtggtgagcagcagcggccagatccgggtgcacttctgtgccgacaaggtgaatgctgcccggggcttcaatgccacctaccaggtggatggcttctgcctgccctgggagatcccctgtggcggcaactggggctgctacacagagcagcagagatgtgatggctactggcactgccccaacggcagagatgagaccaactgcaccatgtgccagaaggaggagttcccctgcagcagaaatggagtgtgctaccccaggagtgaccgctgcaactaccagaaccactgccccaacggcagtgatgagaagaactgcttcttctgccagcccggcaacttccactgcaagaacaacagatgtgtgtttgagagctgggtgtgtgacagccaggatgactgtggagatggcagtgatgaggagaactgccctgtgattgtgcccaccagggtcatcacagctgctgtgattggcagcctcatctgtggcctgctgctggtgattgccctgggctgcacctgcaagctgtacagcctgaggatgtttgaaagaagaagctttgagacccagctgagccgggtggaggccgagctgctgcggcgggaggcccctccttcctatggccagctgattgcccagggcctcatcccccctgtggaggacttccctgtgtgcagccccaaccaggcctctgtgctggagaacctgcggctggccgtgcgcagccagctgggcttcacctctgtgcggctgcccatggccggccgcagcagcaacatctggaaccgcatcttcaactttgcccggagccgccacagcggcagcctggccctggtgtctgcagatggagatgaggtggtgcccagccagagcaccagccgggagcctgagaggaaccacacccacaggagcctcttctctgtggagagtgatgacacagacacagaaaatgaaagaagagacatggccggggccagcggaggagtggccgcccccctgccccagaaggtgccccccaccacagctgtggaggccaccgtgggcgcctgtgccagcagcagcacccagagcacccggggcggccacgccgacaatggaagagatgtgacctctgtggagcccccatctgtgtccccagcccggcaccagctgaccagcgccctgagcaggatgacccagggcctgcgctgggtgcgcttcaccctgggccgcagcagcagcctgagccagaaccagagccccctgcggcagctggacaatggagtgtctggaagagaagatgatgatgatgtggagatgctgatccccatcagtgatggcagcagtgactttgatgtgaatgactgcagccggcccctgctggacctggccagtgaccagggccagggcctgcggcagccctacaatgccaccaaccctggggtgcggcccagcaacagagatggcccctgtgagcgctgtggcatcgtgcacacagcccagatcccagacacctgcctggaggtgaccctgaagaatgagaccagtgatgatgaggccctgctgctgtgctag

SEQ ID NO: 51106 - DNA, 2523 bp, Artificial Sequence
  derived and/or modified sequence
atggcctgccggtggagcaccaaggagagcccccggtggcggagcgcgctcctactgctgtttctggcaggcgtttatgcctgtggcgaaactccggagcagatccgggcgcctagcgggattataacatcccctggctggcccagtgaataccctgcgaaaattaattgttcatggttcatccgcgccaacccaggcgagattattactatctcttttcaagatttcgatattcagggatcacgcaggtgcaacctggactggctaactattgagacctacaaaaatattgagtcctaccgcgcctgcggaagtactattccgccaccttacattagcagccaggatcatatctggatccgcttccatagtgacgataacatctcccggaaaggatttcgtctggcttatttctccgggaaatccgaggaacctaattgtgcatgcgaccagttccgttgtggtaacgggaagtgcatcccagaggcttggaagtgtaacaacatggacgaatgcggcgactcttcagacgaggagatctgcgccaaagaggcaaatccacctacggccgccgcattccagccttgtgcttataatcagttccagtgtctgtcacggttcactaaagtatacacatgtcttccggaaagcctgaaatgtgatggcaacattgactgcctagatctcggagacgaaattgattgtgacgtgcccacatgtggacagtggctaaaatacttttacgggactttcaatagtcctaactatcccgacttttacccgcccgggtcaaattgtacatggctgatcgatacaggagatcaccgcaaggtgattttaagatttaccgacttcaaactggacggcacaggatacggagattatgtcaagatctatgatgggcttgaagaaaaccctcacaaattgctcagagtgctgacagctttcgacagtcatgctccccttaccgtggttagcagctctgggcagattagagtacacttttgtgctgataaggtgaacgcagcaaggggattcaatgctacgtaccaagtcgatggattttgcctcccctgggagataccatgtggaggaaactggggttgttatacagaacagcagcgctgcgatggatattggcactgccctaacggacgagacgagacaaactgcaccatgtgccaaaaggaggaattcccttgcagtcgtaatggtgtttgctacccgaggagcgacaggtgtaactatcagaatcactgtcctaacgggagtgacgaaaaaaactgttttttctgccaacccgggaactttcactgcaagaataatcgctgcgtgtttgaaagttgggtgtgcgactctcaagacgactgtggggacggttccgatgaggaaaactgtcccgtgattgtccccactcgcgtgattactgccgcagtaattgggagtctgatctgcggcctgctgttggtgatagccctcggctgcacatgtaagctgtactctctgagaatgtttgagcggcgcagttttgagacccagctgagccgggtcgaagccgagctgctccgaagggaggccccaccctcttacggtcagttgatcgcccagggcctgataccccccgttgaggattttcctgtctgcagtccaaatcaggcatctgtgctggaaaacctgcgcctggccgtgcgctcacagttaggatttacctccgttagactgcctatggcaggcagatcaagcaacatctggaataggatcttcaatttcgctcggtcccgacatagtggcagcctggctctggtctcagccgatggcgacgaggtagtgcccagtcaatctacctcaagagagccagaacgaaatcacacacacaggtccctcttctcagttgaatccgatgataccgacactgagaatgaacggcgcgatatggcaggggccagtggcggcgttgccgctcctctgccacagaaggttcccccaacaaccgcagttgaggccacagtgggggcttgcgcctcctcttctacacagagtaccagaggaggtcacgccgataatgggcgggatgtgacaagcgtggagccaccctccgtgagcccggcccgccatcagctgacaagtgcactaagcagaatgacccaggggctgcgttgggtgcgctttaccttagggagatcgagcagcctgtcacagaatcagagccctctgcggcagttagacaacggcgttagtgggcgtgaagacgacgatgacgtggagatgctcatccccatttcagatggctccagcgatttcgacgtgaacgattgttcacggcccctgcttgacctcgccagtgatcaggggcaggggctgagacagccctacaacgccaccaatcctggcgtaagaccttctaatcgcgatggtccatgcgagcgatgtgggatagtacacactgcacaaatccccgacacctgtcttgaggtgacattaaagaacgagacttcagacgatgaagcccttctgctgtgttag

SEQ ID NO: 51107 - DNA, 2523 bp, Artificial Sequence
  derived and/or modified sequence
atggcctgccgctggagtactaaggaaagccctagatggcgcagcgccttgttgctcttgttcctggccggagtgtatgcgtgtggtgagactccagagcagataagagctccctcaggcatcatcacaagccctggttggccgtcagaatatccagctaagattaactgtagttggttcatccgcgcaaatccaggtgagataattaccattagctttcaggactttgatattcaggggtcacgacgctgtaacttggattggctgacaatagagacttacaaaaacatcgagtcatatagagcatgtgggtccacaatccccccaccctacataagcagccaggaccacatatggatccggtttcattccgatgacaatatatcacggaagggctttaggttagcctacttttccggcaagtctgaagaacctaattgcgcctgcgaccagttcaggtgcggcaacggcaaatgcatccctgaagcctggaagtgtaataacatggacgagtgtggcgattcaagcgatgaggaaatttgcgctaaggaagcaaatcccccaactgcagctgcctttcagccttgtgcatataaccagttccaatgtctatcaaggttcaccaaagtatatacatgcttacccgagagcctcaagtgcgacggaaatattgattgtttggacctgggtgatgagatagactgcgatgttcctacctgtggacagtggctgaaatatttttatggaacgttcaacagtcctaactacccagatttttatcctcccggttcaaactgcacctggcttattgataccggcgatcaccggaaggttattctgcggtttacagatttcaagctggacggcaccggttatggcgattacgtgaaaatctacgatgggctggaggaaaacccccacaagctcctgcgggtccttacggccttcgatagtcatgcacccctgacagtggttagcagcagcggccagatccgggtgcacttttgtgctgacaaagttaacgccgcacggggatttaatgctacttaccaagtggatggcttctgcttaccatgggaaatcccatgcggcggtaattgggggtgctatactgagcaacagcggtgcgacggatactggcactgtcccaacggcagggacgaaaccaactgtacaatgtgtcaaaaggaggaattcccctgtagtcgaaatggcgtatgttacccccgatctgataggtgcaactaccagaatcactgtccaaacgggtcagatgaaaaaaattgcttcttctgtcagcccggtaactttcattgcaaaaataacaggtgcgtgttcgagagttgggtatgcgattcccaggatgattgtggagacggatctgatgaggaaaactgccccgttatagtacctactcgcgtgattaccgccgcagttatcgggtctctgatttgcggcctgctgcttgttatagccctcggatgcacctgcaagctgtattctcttaggatgtttgagaggcgcagcttcgagactcaactctcacgtgttgaggctgagcttctacgtagggaagccccaccaagttatgggcagttgattgcccagggattaattccgccagttgaggattttcctgtatgttccccaaatcaggcctcagtgctcgagaacctgcgcctggctgtgcggagtcagctcggatttacgtctgtgagattgcctatggccggaagatcctcaaacatctggaacaggatttttaactttgcacgaagccgacattctggctccctggcccttgtctccgctgatggggacgaggtcgtcccctcccagagcacttctcgagagcccgagagaaatcatactcatagaagcttattctccgtcgaaagtgatgatacggacaccgagaacgagagacgggacatggccggagccagtggcggagttgccgcacctctaccccaaaaagtgcctccaaccacagccgtcgaggccactgtcggtgcttgcgctagctcctctacgcagagcacacggggaggacacgccgacaacggacgtgatgttacctcagtggagcctccatccgtctcccctgcaaggcatcagctgactagcgcactgagccgcatgactcagggcctgcggtgggtgcgcttcactctgggccgttctagcagcctctctcaaaaccagtctcctctcaggcagctcgacaacggcgtatcaggcagagaggacgacgacgacgtggaaatgctgattcccattagtgacggctcatccgatttcgacgtgaatgattgcagtcgtccgctgttagacctcgcaagtgatcaaggccagggacttcggcagccatataatgccaccaaccctggcgttcggccttctaacagagatggaccctgcgaacgctgcggtattgtccatacggctcagatcccagacacctgcctggaagtcacactgaagaacgagacgtctgacgacgaggctctgctgctttgctag

SEQ ID NO: 51108 - protein, 341 aa, Artificial Sequence
  derived and/or modified sequence
MGTEKESPEPDCQKQFQAAVSVIQNLPKNGSYRPSYEEMLRFYSYYKQATMGPCLVPRPGFWDPIGRYKWDAWNSLGKMSREEAMSAYITEMKLVAQKVIDTVPLGEVAEDMFGYFEPLYQVIPDMPRPPETFLRRVTGWKEQVVNGDVGAVSEPPCLPKEPAPPSPASLWAVTLPTPPQSPIHPGTWTPRFSVIPWSSWSLSWFGQSSGQHLEESVIPGTAPCPPQRKRGCGAARRGPRSWTCGCWGQFEHYRRACRRCRRGCRAWRACPGPLSRGRSPGPVLGHGPLGSRGPRCSSSSCGPSSSSGSSECFGPKRGDCQWRGLCSQLRLSCCALSLPRV

SEQ ID NO: 51109 - DNA, 1026 bp, Artificial Sequence
  derived and/or modified sequence
atgggcaccgagaaggagagccccgagcccgactgccagaagcagttccaggccgccgtgagcgtgatccagaacctgcccaagaacggcagctacagacccagctacgaggagatgctgagattctacagctactacaagcaggccaccatgggcccctgcctggtgcccagacccggcttctgggaccccatcggcagatacaagtgggacgcctggaacagcctgggcaagatgagcagagaggaggccatgagcgcctacatcaccgagatgaagctggtggcccagaaggtgatcgacaccgtgcccctgggcgaggtggccgaggacatgttcggctacttcgagcccctgtaccaggtgatccccgacatgcccagaccccccgagaccttcctgagaagagtgaccggctggaaggagcaggtggtgaacggcgacgtgggcgccgtgagcgagcccccctgcctgcccaaggagcccgccccccccagccccgccagcctgtgggccgtgaccctgcccacccccccccagagccccatccaccccggcacctggacccccagattcagcgtgatcccctggagcagctggagcctgagctggttcggccagagcagcggccagcacctggaggagagcgtgatccccggcaccgccccctgccccccccagagaaagagaggctgcggcgccgccagaagaggccccagaagctggacctgcggctgctggggccagttcgagcactacagaagagcctgcagaagatgcagaagaggctgcagagcctggagagcctgccccggccccctgagcagaggcagaagccccggccccgtgctgggccacggccccctgggcagcagaggccccagatgcagcagcagcagctgcggccccagcagcagcagcggcagcagcgagtgcttcggccccaagagaggcgactgccagtggagaggcctgtgcagccagctgagactgagctgctgcgccctgagcctgcccagagtgtag

SEQ ID NO: 51110 - DNA, 1901 bp, Artificial Sequence
  derived and/or modified sequence
gatctgcgtcgccatcccggccctgctggaccccggggtcagtaggaagccgcggggtggtggcgagagaggacccaggtgtcctggcagtgggcgccgcggggcacacgctgggccaaggtgcaggcggccagggtgggagactgttcgccccgccctgagtactcctatcttgtttctccacctgttcgggagttggagatgtgcacctaaaggaggcgcatctggggacggacacatctggcactgaggccctcgccacctgcctcgccacctggcgaccctgaccccaccacactgccttgagagtcgctcaaaagtagggccccagggctcgcagcagcatgggcaccgagaaagaaagcccagagcccgactgccagaaacagttccaggctgcagtgagcgtcatccagaacctgcccaagaacggttcttaccgcccctcctatgaagagatgctgcgattctacagttactacaagcaggccaccatggggccctgcctggtcccccggcccgggttctgggaccccattggacgatataagtgggacgcctggaacagtctgggcaagatgagcagggaggaggccatgtctgcctacatcactgaaatgaaactggtggcacagaaggtgatcgacacagtgcccctgggtgaggtggcagaggacatgtttggttacttcgagcccctgtaccaggtgatccctgacatgccgaggcccccagagaccttcctgagaagggtcacaggttggaaagagcaggttgtgaatggagatgttggggctgtttcagagcctccctgcctccccaaggaaccggcacccccaagcccagcttccctctgggcagtaactctaccaacccctccacagagtcccattcacccagggacctggactccgaggttttctgtgattccctggagcagctggagcctgagctggtttggacagagcagcgggcagcatctggaggaaagcgtgatcccaggaacagccccgtgccccccacaaagaaagaggggttgcggggcagcccgccggggccccaggagttggacgtgtggctgctggggacagttcgagcactacaggagagcatgcaggaggtgcaggcgagggtgcagagcctggagagcatgccccggccccctgagcagaggccgcagcccaggcccagtgctcggccatggccccttgggctcccggggcccgcgctgctcttcttcctcctgtggcccttcgtcgtccagtggctcttccgaatgtttcggacccaaaagaggtgactgtcagtggaggggtctctgcagccaactgagactatcttgctgtgccctgagccttcctagggtttagaagaacagcattcaaaattccccgtcctgtcagtgtttgccttcgcacctcctcccctaaagcagcgcggggggcaaataagaccccacccctccctgcagcttcacagggacgcttccttccctccccgcaaccaccccaggctcccctgggaggctgcagttgtggtacacgtccccggtgctgggttggccgtgactcgggggcggggcgatcgggtctcagcccctgccttccccagtctctgggtcacccgaattttcccacccctgcttctccccgaggaggttgagctcttgagcaagttgggacttgggccggggcctggaagaatgattggctgggaggccgcgggagggaggccaggaggcccggaccagttgggaggagtgagcaggccccgggggagggggatgagcgcagtttgctcgctttcctcccctgccggccccctccgcccccacacacactcgggacgtcttcattgaagattcacttacaaaggaatgtttcactaaataaaagaaaacc

SEQ ID NO: 51111 - DNA, 2026 bp, Artificial Sequence
  derived and/or modified sequence
gcggtgcgagggcggggccaggcggtggcctggaagcccggagcctcagcgctcgcccctgctctgcctaagtgtctagagagctgagtgggttgcctcggatcggccaggcctggatatcagcgaacagatgcggatttccaccagggggcgctaggacgccacgacctttcactatgtgcaccagggggcgctgccgcccgccttggccatcccgggctgggaagtccgacccttcgattaagccccgcctgattgggaaaggctctgagaaactatttgcatgatcttgaaagagctgtgctgaatggttgaggtagttggagatgtgcacctaaaggaggcgcatctggggacggacacatctggcactgaggccctcgccacctgcctcgccacctggcgaccctgaccccaccacactgccttgagagtcgctcaaaagtagggccccagggctcgcagcagcatgggcaccgagaaagaaagcccagagcccgactgccagaaacagttccaggctgcagtgagcgtcatccagaacctgcccaagaacggttcttaccgcccctcctatgaagagatgctgcgattctacagttactacaagcaggccaccatggggccctgcctggtcccccggcccgggttctgggaccccattggacgatataagtgggacgcctggaacagtctgggcaagatgagcagggaggaggccatgtctgcctacatcactgaaatgaaactggtggcacagaaggtgatcgacacagtgcccctgggtgaggtggcagaggacatgtttggttacttcgagcccctgtaccaggtgatccctgacatgccgaggcccccagagaccttcctgagaagggtcacaggttggaaagagcaggttgtgaatggagatgttggggctgtttcagagcctccctgcctccccaaggaaccggcacccccaagcccagcttccctctgggcagtaactctaccaacccctccacagagtcccattcacccagggacctggactccgaggttttctgtgattccctggagcagctggagcctgagctggtttggacagagcagcgggcagcatctggaggaaagcgtgatcccaggaacagccccgtgccccccacaaagaaagaggggttgcggggcagcccgccggggccccaggagttggacgtgtggctgctggggacagttcgagcactacaggagagcatgcaggaggtgcaggcgagggtgcagagcctggagagcatgccccggccccctgagcagaggccgcagcccaggcccagtgctcggccatggccccttgggctcccggggcccgcgctgctcttcttcctcctgtggcccttcgtcgtccagtggctcttccgaatgtttcggacccaaaagaggtgactgtcagtggaggggtctctgcagccaactgagactatcttgctgtgccctgagccttcctagggtttagaagaacagcattcaaaattccccgtcctgtcagtgtttgccttcgcacctcctcccctaaagcagcgcggggggcaaataagaccccacccctccctgcagcttcacagggacgcttccttccctccccgcaaccaccccaggctcccctgggaggctgcagttgtggtacacgtccccggtgctgggttggccgtgactcgggggcggggcgatcgggtctcagcccctgccttccccagtctctgggtcacccgaattttcccacccctgcttctccccgaggaggttgagctcttgagcaagttgggacttgggccggggcctggaagaatgattggctgggaggccgcgggagggaggccaggaggcccggaccagttgggaggagtgagcaggccccgggggagggggatgagcgcagtttgctcgctttcctcccctgccggccccctccgcccccacacacactcgggacgtcttcattgaagattcacttacaaaggaatgtttcactaaataaaagaaaacc

SEQ ID NO: 51112 - DNA, 1026 bp, Artificial Sequence
  derived and/or modified sequence
atgggaactgagaaggaaagtcccgaacctgactgtcagaagcagtttcaggccgctgtgtccgtgatacagaatctgcccaaaaacggatcctatcgcccgtcttacgaggagatgctgcggttctacagctattataaacaagccaccatgggtccatgcctcgtgccgagacccggtttctgggatcccatcgggagatataaatgggatgcctggaactccttggggaagatgtcgagagaggaggctatgtctgcttatatcaccgagatgaagctcgttgcgcaaaaggtgatcgacacagttccccttggagaagtggctgaagacatgttcggatatttcgagcctctgtaccaagttataccggatatgcctcggcctccggaaactttcctccgccgtgtgacaggatggaaggagcaagtggtgaatggcgatgtgggtgctgtgagcgaacccccctgtcttcccaaggaacctgcacccccttcccctgcttctctgtgggcagtgaccctgcccacacccccgcagagccctattcatcctggcacctggacacctcgttttagtgtaatcccatggagctcttggagtctgagttggtttggccagagctctggacagcacctggaagagtcagtcattcctggcactgcaccatgcccgcctcagcggaagcgcggctgtggcgccgccaggagaggtccgagaagctggacgtgtggttgctggggtcaatttgagcactatagacgagcctgtaggcgctgccgtcgcggttgtcgcgcatggcgggcctgtcccggcccactgagtcgaggcagatcccctggccctgtgcttgggcacggacccttaggcagccgcggaccaagatgttcttcctcttcctgcggaccttcatcttcatctgggtcctccgagtgtttcggtcctaagagaggggattgtcagtggagggggctctgctcacaattgagattatcttgttgtgcgttgtctcttccgcgggtttag

SEQ ID NO: 51113 - DNA, 1026 bp, Artificial Sequence
  derived and/or modified sequence
atgggcacagaaaaagagagccccgagccagactgccagaaacagttccaagctgcagtgtctgtgatacaaaaccttcccaagaacggctcttacagaccctcgtacgaagagatgctgcgcttttatagctactataagcaagctactatgggcccctgtctcgtgccccggcccggtttctgggatcctatcggacgttataaatgggacgcctggaactctcttgggaagatgtcccgcgaagaggcaatgtctgcttacataactgaaatgaagcttgtggcccagaaggtcatagatacggtgccactgggggaggttgcagaagatatgtttggctacttcgagccactgtaccaagtgatccctgacatgcctcgcccaccagaaacgtttctcagaagagtgaccgggtggaaagaacaggtcgtgaatggagacgtcggggccgtcagtgaacctccctgtctcccaaaagagcccgctccaccgagccccgcatccctgtgggccgtcaccctgccaacccccccccagtccccaattcatcccggaacatggacgccccggtttagtgttattccctggagctcctggtcactgtcctggttcggccagtcgagcgggcagcacctcgaggagtctgtcatcccgggaacggcgccttgtccacctcaacgcaaacggggttgtggagccgcaaggcgggggcccagatcctggacttgtggatgctggggccaatttgagcattaccgtcgggcttgtagacggtgtcgcagagggtgccgtgcttggcgcgcttgtcctggccctttgtccagaggtaggagcccagggcccgtcctgggacacggtcccctgggatccaggggtcctaggtgcagcagtagcagctgtgggccgtcctcatcttctgggagctcagaatgttttgggccaaagcgcggcgactgccagtggcgcggcctgtgctcacagctaagactgtcttgctgcgccctgtccctccctcgtgtctag

SEQ ID NO: 51114 - DNA, 1026 bp, Artificial Sequence
  derived and/or modified sequence
atgggcacagagaaggagagccctgagccagactgccagaagcagttccaggccgctgtgtctgtcatccagaacctgcccaagaatggcagctaccggcccagctatgaggagatgctgcgcttctacagctactacaagcaggccaccatgggcccctgcctggtgcccaggcctggcttctgggaccccatcggccgctacaagtgggatgcctggaacagcctgggcaagatgagccgggaggaggccatgtctgcctacatcacagagatgaagctggtggcccagaaggtgattgacacagtgcccctgggggaggtggccgaggacatgtttggctactttgagcccctgtaccaggtgatcccagacatgcccaggcctcctgagaccttcctgcggcgggtgacaggctggaaggagcaggtggtgaatggagatgtgggcgctgtgtctgagcccccctgcctgcccaaggagcccgccccacccagccctgccagcctgtgggccgtgaccctgcccaccccaccccagagccccatccaccctggcacctggaccccccgcttcagcgtcatcccctggagctcctggagcctgtcctggtttggccagagcagcggccagcacctggaggagagcgtcatccctggaacagccccctgccccccccagaggaagaggggctgtggggccgcccggcggggccccaggtcctggacctgtggctgctggggccagtttgagcactaccgccgggcctgccgccgctgcagaagaggctgccgggcctggagggcctgccccggccccctgagccggggccgcagccctggccctgtgctgggccacggccccctgggcagccggggcccccgctgcagcagcagcagctgtggccccagcagcagcagcggcagcagtgaatgttttggccccaagagaggagactgccagtggaggggcctgtgcagccagctgcggctgagctgctgtgccctgagcctgccccgggtgtag

SEQ ID NO: 51115 - DNA, 1026 bp, Artificial Sequence
  derived and/or modified sequence
atgggcaccgagaaggagagccccgagcccgactgccagaagcagttccaggccgctgtttctgtgatccagaatctcccgaagaatgggtcctatcgccctagctacgaggagatgcttcgcttctacagctactacaaacaggcaacaatgggaccatgcctcgttccgaggcctggtttctgggatccaatcgggaggtacaagtgggacgcatggaatagcctcggtaagatgtcccgagaagaggctatgagcgcgtatatcaccgagatgaagttggttgcacagaaagtgattgacaccgtacctctcggagaagtggccgaggatatgttcgggtatttcgagccactgtaccaggtaatacctgatatgcccaggcctccggagacgttcctgaggcgcgtgactggttggaaagagcaggtcgttaacggcgacgtgggagctgtctctgaaccaccttgcctgccgaaggagcctgctcccccaagtccggcgagtctctgggctgttacgctaccaaccccaccacagtcgcctatacaccctggaacctggaccccccgtttttcggtaatcccatggtctagctggtctctaagctggtttggccagtccagcggccagcatctcgaagaatcagttattcccggaacagccccatgccctccacagaggaagcgggggtgcggagctgcgcgtcgagggccccggtcttggacctgtgggtgctggggccagtttgagcactaccggagagcctgccgtcgatgtaggagggggtgccgggcttggcgggcgtgtcctggacctctgtctcgcggccgatcaccaggccccgttctaggacatggtcctctggggagtaggggcccccggtgtagttcttctagttgtgggcccagctcatcctctggtagcagtgagtgttttggcccaaaaagaggtgattgccaatggcgcggtctatgcagccagctcagactatcatgttgtgccttaagtcttcctcgtgtctag

SEQ ID NO: 51116 - DNA, 1026 bp, Artificial Sequence
  derived and/or modified sequence
atgggcaccgagaaggagagccccgagcccgactgccagaagcagttccaggctgctgtcagcgtgatacaaaacctgcccaaaaatggctcatataggccttcctatgaagaaatgttgcgattttattcttattacaagcaagctacaatgggaccttgccttgtcccccggcccgggttctgggaccctataggccgctataaatgggatgcctggaatagccttggaaagatgtcacgagaagaggccatgtccgcctacattacggaaatgaagctcgtggcccagaaagtgattgacaccgttcctctcggagaggtggctgaggacatgtttggttactttgagcctttatatcaggttatccccgatatgccgaggcctcctgagacattcttgagaagggtaacaggttggaaagagcaggtggtaaacggggatgtaggcgccgtatccgaaccgccctgtctgccaaaagaacctgcaccccctagcccggccagcctgtgggcagtgaccttacctactccaccacagagccccatccaccccggaacttggacgcccaggttttcagttataccttggtcctcgtggtcactgagttggttcgggcaaagctctggacagcacctggaagagtcggttatccctgggactgcgccttgtccacctcagaggaagcgcggctgcggggcggctcgaagaggacccaggtcatggacctgcggctgctggggtcagttcgaacactatagaagggcgtgtaggagatgtaggcggggatgccgagcctggcgagcctgccccggtcccctcagtcgaggtaggagccctggtccagtgctgggccacggacccctgggctcaagaggtcctcgttgcagctcaagttcctgcggaccctcttcctcaagcgggtcgagcgagtgttttggccccaagagaggggattgccagtggcggggcctatgctcccagctgcggttgtcctgctgtgccctttcactgccgagagtgtag

SEQ ID NO: 51117 - DNA, 1026 bp, Artificial Sequence
  derived and/or modified sequence
atgggaacagaaaaggagtcccccgagccggattgtcagaaacagttccaggccgctgtgagtgtaattcagaatctgccaaaaaacgggtcctatcgccctagttatgaggagatgctgcgcttttacagttactacaaacaagccaccatgggcccatgtctggtgccaaggcccggattttgggatccaattggacggtacaagtgggatgcttggaattcgctcgggaagatgtcccgcgaggaggccatgagtgcatacattactgaaatgaaactggtggcccagaaggttatcgatacggttcctctgggcgaagtggcagaggatatgtttgggtacttcgaacccttatatcaggtaatacctgatatgcctcgtcctcctgagacatttctgcggagggtaaccggctggaaggagcaggtggtgaatggtgatgtcggagccgtaagcgaacctccttgcctgcctaaggagcctgcacccccaagtccagcgtctctgtgggcagtcaccctgcccactccgccacagtcccccatccaccccggtacctggacccccaggttttcagtaatcccttggtcaagttggtctctgagttggtttggacagtcttcaggtcagcatctcgaggaatcagtgattcctggtacagctccctgccctcctcagagaaaaagggggtgtggcgcagcgaggcgaggacccagaagttggacatgtgggtgttggggacaattcgagcattaccgaagggcttgtagacgttgccgaaggggctgtagggcctggcgcgcatgcccgggacccctgtcgcgaggtcgctcacccggtcccgtacttgggcatggccctctgggcagtcggggtcctcgctgttcttcgagttcttgcgggcctagttcatcttccgggtcatccgagtgcttcggccctaagcggggagactgtcaatggcggggtctgtgtagccagctcagactaagctgctgtgcactgtctctgcctcgggtgtag

SEQ ID NO: 51118 - DNA, 1026 bp, Artificial Sequence
  derived and/or modified sequence
atgggtaccgagaaggaatcacccgagcctgactgtcaaaaacagttccaagccgctgtttccgtgattcaaaatcttcctaagaacggctcctatcgacctagttacgaggaaatgttgcggttctatagttactacaagcaagccacaatgggtccctgcctggtgccaagacccggtttttgggatcctattggcaggtacaaatgggacgcttggaattccctggggaaaatgagcagagaggaggccatgtccgcttacatcaccgagatgaaattggtggcgcagaaggttattgacacagtgcccctgggcgaggttgctgaagacatgttcggatacttcgagccgctgtaccaagtgattcctgatatgccccgaccacctgaaaccttcctgaggcgggtcactggctggaaagaacaagtggtgaatggcgacgtgggcgcagtctcagaacccccatgtctgcctaaggaacctgctccgcctagccctgcatcattatgggcggtaacactccccactcctcctcaatcccccattcatcctggaacatggaccccacgattcagtgttattccttggtcgagttggagcctgagctggttcgggcagagcagcggccaacacctggaggagtctgttatccccggtaccgcaccatgtccccctcagaggaagcgcggatgcggtgccgctagacgtggtcccaggagttggacatgcggctgctggggacagttcgagcattacagacgcgcttgccggaggtgtcgtagaggatgtcgagcctggagagcttgccccggacctctgtccaggggtcgcagccctggtccagtgctgggccacggccctctaggatccagagggccacgctgctcatcttctagctgcgggcctagctccagctccggctcatctgaatgtttcggcccaaaaaggggcgattgtcaatggaggggcctttgttcacaactccgcttgagctgctgcgccctcagtctgccgcgtgtgtag

SEQ ID NO: 51119 - protein, 268 aa, Artificial Sequence
  derived and/or modified sequence
MGTEKESPEPDCQKQFQAAVSVIQNLPKNGSYRPSYEEMLRFYSYYKQATMGPCLVPRPGFWDPIGRYKWDAWNSLGKMSREEAMSAYITEMKLVAQKVIDTVPLGEVAEDMFGYFEPLYQVIPDMPRPPETFLRRVTGWKEQVVNGDVGAVSEPPCLPKEPAPPSPESHSPRDLDSEVFCDSLEQLEPELSSGQHLEESVIPGTAPCPPQRKRGCGAARRGPRSWTCGCWGQFEHYRRACRRCRRGCRAWRACPGPLSSLTLSVRLE

SEQ ID NO: 51120 - DNA, 807 bp, Artificial Sequence
  derived and/or modified sequence
atgggcaccgagaaggagagccccgagcccgactgccagaagcagttccaggccgccgtgagcgtgatccagaacctgcccaagaacggcagctacagacccagctacgaggagatgctgagattctacagctactacaagcaggccaccatgggcccctgcctggtgcccagacccggcttctgggaccccatcggcagatacaagtgggacgcctggaacagcctgggcaagatgagcagagaggaggccatgagcgcctacatcaccgagatgaagctggtggcccagaaggtgatcgacaccgtgcccctgggcgaggtggccgaggacatgttcggctacttcgagcccctgtaccaggtgatccccgacatgcccagaccccccgagaccttcctgagaagagtgaccggctggaaggagcaggtggtgaacggcgacgtgggcgccgtgagcgagcccccctgcctgcccaaggagcccgccccccccagccccgagagccacagccccagagacctggacagcgaggtgttctgcgacagcctggagcagctggagcccgagctgagcagcggccagcacctggaggagagcgtgatccccggcaccgccccctgccccccccagagaaagagaggctgcggcgccgccagaagaggccccagaagctggacctgcggctgctggggccagttcgagcactacagaagagcctgcagaagatgcagaagaggctgcagagcctggagagcctgccccggccccctgagcagcctgaccctgagcgtgagactggagtag

SEQ ID NO: 51121 - DNA, 1500 bp, Artificial Sequence
  derived and/or modified sequence
gatctgcgtcgccatcccggccctgctggaccccggggtcagtaggaagccgcggggtggtggcgagagaggacccaggtgtcctggcagtgggcgccgcggggcacacgctgggccaaggtgcaggcggccagggtgggagactgttcgccccgccctgagtactcctatcttgtttctccacctgttcgggagttggagatgtgcacctaaaggaggcgcatctggggacggacacatctggcactgaggccctcgccacctgcctcgccacctggcgaccctgaccccaccacactgccttgagagtcgctcaaaagtagggccccagggctcgcagcagcatgggcaccgagaaagaaagcccagagcccgactgccagaaacagttccaggctgcagtgagcgtcatccagaacctgcccaagaacggttcttaccgcccctcctatgaagagatgctgcgattctacagttactacaagcaggccaccatggggccctgcctggtcccccggcccgggttctgggaccccattggacgatataagtgggacgcctggaacagtctgggcaagatgagcagggaggaggccatgtctgcctacatcactgaaatgaaactggtggcacagaaggtgatcgacacagtgcccctgggtgaggtggcagaggacatgtttggttacttcgagcccctgtaccaggtgatccctgacatgccgaggcccccagagaccttcctgagaagggtcacaggttggaaagagcaggttgtgaatggagatgttggggctgtttcagagcctccctgcctccccaaggaaccggcacccccaagcccagagtcccattcacccagggacctggactccgaggttttctgtgattccctggagcagctggagcctgagctgagcagcgggcagcatctggaggaaagcgtgatcccaggaacagccccgtgccccccacaaagaaagaggggttgcggggcagcccgccggggccccaggagttggacgtgtggctgctggggacagttcgagcactacaggagagcatgcaggaggtgcaggcgagggtgcagagcctggagagcatgccccggccccctgagcagtctcactctgtcggtcagactggagtgaagtggcgtgaactcagctcactgcaacctccgcctccccgggttcaagcaattctctgcctcagcctcccgagtagctgggattacaggcgcccaccaccatgcccggctaattttttttgtatttttagtagagacggggtttcaccatcttggccacgctggtcttgaactcctgacctcgtgaccacctgcctcggcctcccaaagtgctgggatgacaggcgtgagccatcccacccggtctgccacagtcattcttttttatgctcagacagtcacaactttggccattcaagaccctttcataccggatcttatgttcttataacacgacctgatgaatcttt

SEQ ID NO: 51122 - DNA, 807 bp, Artificial Sequence
  derived and/or modified sequence
atgggcaccgagaaggagtctcccgagcccgactgtcagaaacagttccaggctgccgtgtcagtgatccagaatctcccaaagaacggctcgtatcgtccaagctacgaggagatgctaagattctactcatactacaagcaggcaacaatgggaccatgcttagtgcctaggccggggttctgggaccctatcggacggtacaaatgggacgcctggaattcccttggcaaaatgtctagagaagaggccatgagtgcttatatcacagagatgaaactggtcgcacaaaaggtgatcgatacagtacccctcggggaagtggctgaggatatgtttggatatttcgagcctctataccaggtaatccctgacatgcccaggcctccggaaacgtttcttcggcgcgtcaccggttggaaggagcaggttgtcaatggcgatgtgggagccgtatctgagcctccttgcctgccgaaggagcccgccccacctagccccgaaagccactctcctagggacctggatagcgaagtattctgcgatagccttgaacagttggagcctgagctgagctccggccaacatctggaagagtcagtgatcccaggtaccgcgccttgccccccacaacggaaacggggctgtggggccgcaagacggggcccaagaagttggacatgtgggtgctggggtcaattcgagcactatcgacgcgcttgccgtagatgcagacgcggatgtagagcatggagggcgtgcccaggaccactgagctctctcacccttagtgtgcggctcgagtag

SEQ ID NO: 51123 - DNA, 807 bp, Artificial Sequence
  derived and/or modified sequence
atgggcacagagaaggagagccctgagccagactgccagaagcagttccaggccgctgtgtctgtcatccagaacctgcccaagaatggcagctaccggcccagctatgaggagatgctgcgcttctacagctactacaagcaggccaccatgggcccctgcctggtgcccaggcctggcttctgggaccccatcggccgctacaagtgggatgcctggaacagcctgggcaagatgagccgggaggaggccatgtctgcctacatcacagagatgaagctggtggcccagaaggtgattgacacagtgcccctgggggaggtggccgaggacatgtttggctactttgagcccctgtaccaggtgatcccagacatgcccaggcctcctgagaccttcctgcggcgggtgacaggctggaaggagcaggtggtgaatggagatgtgggcgctgtgtctgagcccccctgcctgcccaaggagcccgccccacccagccctgagagccacagcccccgggacctggacagcgaggtgttctgtgacagcctggagcagctggagcctgagctgagcagcggccagcacctggaggagagcgtcatccctggaacagccccctgccccccccagaggaagaggggctgtggggccgcccggcggggccccaggtcctggacctgtggctgctggggccagtttgagcactaccgccgggcctgccgccgctgcagaagaggctgccgggcctggagggcctgccccggccccctgagcagcctgaccctgtctgtgcggctggagtag

SEQ ID NO: 51124 - DNA, 423 bp, Artificial Sequence
  derived and/or modified sequence
atgaggcgctgcctgcgggtgaagacccggcggggccagctgggcctggccagcagctgctttgagcagcacagctgcttcagcccccgggtgaaccgcatcctgtctgctgtgcagaacaccctgtgcaccggccccagcagccaggccccaccccagcccccccaggccagccccccagctgctgctgaccacagcaggacccccagcctgctggccagcagccacagcgccagcggcggggagagcctcttccagctgtacatcgccagcctggcctggccccagaactgctgcgtgctggagagctgccgccgcatccccctgggcggcctgagctccatggagaacagaagacccctgctgaggaagggccgcctgctgcggggccagatccaccacagccagaccaatgagctgtag

SEQ ID NO: 51125 - DNA, 807 bp, Artificial Sequence
  derived and/or modified sequence
atgggcaccgagaaggagagccccgagcccgactgccagaagcagtttcaggctgccgtatctgtgatacaaaatctccccaaaaacggcagttatagaccgtcgtacgaggaaatgctacgcttctattcttactacaaacaggctaccatgggcccttgcctggtcccccgcccaggattttgggatcctatcggtcgatacaagtgggacgcttggaactctttagggaaaatgagcagggaagaggcaatgagtgcttatatcaccgaaatgaagctagtggcccagaaagtgatagacacagtccccctcggagaagtggccgaagatatgtttggatacttcgagccactgtatcaggtgataccagatatgccacgccccccggaaacttttttgagacgggtgaccggctggaaggagcaggtggtgaatggagacgtcggagctgtcagcgagcccccgtgtctgccaaaagagccagcccctccttcgccagagagccactcccccagggacctggatagcgaagttttctgcgactccctggaacagctcgagcctgagctgagctctggccaacacctggaggaatccgtgataccaggcacagcaccgtgtcccccccagcggaagcgcggctgtggagctgccaggagagggcctcgaagttggacttgcggctgttggggccagttcgaacactaccggagagcctgccgccgttgccggcgggggtgcagagcttggcgcgcctgccccggtcccctcagttcgttgacattatctgtgaggctggaatag

SEQ ID NO: 51126 - DNA, 807 bp, Artificial Sequence
  derived and/or modified sequence
atgggaacggagaaagaatctccagaacctgactgccagaaacaattccaagccgctgtttctgtgattcagaacctgcctaagaatggttcttacagaccttcctacgaggaaatgcttcgattttatagctactataagcaggccacgatggggccatgtttagtaccgagacccggattttgggaccccatcgggagatacaaatgggatgcttggaatagcctgggcaagatgtccagagaggaagctatgtcagcctatattacagaaatgaagctggtggctcagaaagtaattgacaccgttcccctgggcgaggttgctgaagatatgtttggatatttcgaaccgctataccaagtcattcccgacatgccccgtccgcctgaaactttcctacgcagggtgacgggctggaaagagcaggtggtaaacggggacgtgggtgcagtcagcgagccaccatgtctgcccaaggaaccagcaccgccatcccccgagtcacactctcctagggacctcgatagcgaggtgttctgtgacagccttgagcagttggagcctgaactttcatccgggcaacacctcgaggaatctgtcatccctggtaccgcgccttgcccaccacagaggaagaggggatgcggtgccgctaggagaggcccaagaagctggacatgcgggtgctggggccagttcgagcactataggcgcgcttgtaggagatgtcgcagaggctgtagggcttggagggcttgtcccggacctctgtcaagcctgaccctgtctgtccgcctagaatag

SEQ ID NO: 51127 - protein, 973 aa, Artificial Sequence
  derived and/or modified sequence
MDPFRPSFRGQSPIHPSQCQAVRMPGCWPQASKPLDPALGRGAPAGRGHVFGKPEEPSTQRGPAQRESVGLVSMFRGLGIETVSKTPLKREMLPSGRGILGRGLSANLVRKDREELSPTFWDPKVLAAGDSKMAETSVGWSRTLGRGSSDASLLPLGRAAGGISREVDKPPCTFSTPSRGPPQLSSPPALPQSPLHSPDRPLVLTVEHKEKELIVKQGSKGTPQSLGLNLVKIQCHNEAVYQYHVTFSPNVECKSMRFGMLKDHQAVTGNVTAFDGSILYLPVKLQQVLELKSQRKTDSAEISIKIQMTKILEPCSDLCIPFYNVVFRRVMKLLDMKLVGRNFYDPTSAMVLQQHRLQIWPGYAASIRRTDGGLFLLADVSHKVIRNDCVLDVMHAIYQQNKEHFQDECTKLLVGNIVITRYNNRTYRIDDVDWNKTPKDSFTMSDGKEITFLEYYSKNYGITVKEEDQPLLIHRPSERQDNHGMLLKGEILLLPELSFMTGIPEKMKKDFRAMKDLAQQINLSPKQHHSALECLLQRIAKNEAATNELMRWGLRLQKDVHKIEGRVLPMERINLKNTSFITSQELNWVKEVTRDPSILTIPMHFWALFYPKRAMDQARELVNMLEKIAGPIGMRMSPPAWVELKDDRIETYVRTIQSTLGAEGKIQMVVCIIMGPRDDLYGAIKKLCCVQSPVPSQVVNVRTIGQPTRLRSVAQKILLQINCKLGGELWGVDIPLKQLMVIGMDVYHDPSRGMRSVVGFVASINLTLTKWYSRVVFQMPHQEIVDSLKLCLVGSLKKFYEVNHCLPEKIVVYRDGVSDGQLKTVANYEIPQLQKCFEAFENYQPKMVVFVVQKKISTNLYLAAPQNFVTPTPGTVVDHTITSCEWVDFYLLAHHVRQGCGIPTHYVCVLNTANLSPDHMQRLTFKLCHMYWNWPGTIRVPAPCKYAHKLAFLSGHILHHEPAIQLCENLFFL

SEQ ID NO: 51128 - DNA, 2922 bp, Artificial Sequence
  derived and/or modified sequence
atggacccattccgacctagttttcgaggccagtctcccatccacccgagccaatgtcaggctgtgaggatgccagggtgctggccgcaggccagcaagccactggatcctgcgctggggcgcggcgcccccgctggccgcgggcatgtcttcgggaaaccagaagaaccaagtacccagcggggtccagcacaaagagaatccgtcggattggtgtccatgttcaggggattagggatcgagactgtgtccaaaacccctttaaaaagagaaatgcttccaagtgggagaggtatactgggccgcgggctaagcgccaatctcgtgagaaaagatagggaagagctcagcccaactttctgggaccctaaagttttagcagcaggtgactctaaaatggccgaaacttccgtggggtggtcgaggactctgggtaggggaagctctgatgcatctttgctgcctctgggccgggcggccggaggaatttcccgcgaggtcgacaagcctccatgcaccttttctaccccctctcgtggcccacctcaactaagctcaccacctgcgttgccacagtcaccactgcatagcccagaccgccccctcgtccttacggtggagcacaaggaaaaagaattaattgtgaagcaggggagcaagggaaccccccagagcctgggcttgaacttagtcaagatacagtgccacaatgaagcggtctaccagtatcacgtcaccttttctccgaacgttgaatgcaagagtatgcggtttgggatgttgaaagatcatcaggccgtaacaggtaacgtgactgctttcgatggctctatcctgtacctgccggttaaactacagcaggtcctggaactaaagtcccagcgaaagacagactccgctgaaatctccatcaaaattcaaatgacgaaaatcctggaaccctgcagcgacctctgcataccattctacaatgtggtgtttagaagagtgatgaagctcctcgatatgaaactggtgggacgcaacttctatgatccgactagtgccatggtgcttcagcagcacagacttcagatctggccaggttacgcggcctcgatccgcagaactgatggaggtctgttcctgctggcagatgtcagtcacaaggtgattcgcaatgactgtgtactggatgtgatgcatgccatctaccagcaaaataaggagcattttcaggatgagtgtactaaactcctcgtcggaaacatcgtgattaccagatacaataaccgaacctataggattgatgatgtggattggaacaaaacccccaaagactcttttacaatgtccgacgggaaagaaatcacattcctggaatactactcaaaaaattacggaatcaccgttaaggaagaggaccagccgctgttgatacatagaccctccgagcgacaagacaaccacggcatgctgctgaaaggggagattcttttgctgccggagctctcattcatgaccggcatcccagaaaaaatgaagaaggattttagagcaatgaaagacctcgcacaacagataaacctgtccccaaagcagcatcatagcgcccttgagtgcctcctgcaaaggatagcgaagaacgaagctgccacaaacgagctgatgcggtggggtctcagactgcagaaggatgttcataagatcgagggacgtgttctgcccatggagcggattaacctaaagaatacctctttcattacgagccaagaacttaattgggtgaaggaggtgacacgcgacccatctatactgactattccgatgcatttttgggctctgttctaccctaagagagctatggatcaggctcgcgagctggtgaacatgctggaaaagatagctggaccgatcggtatgcggatgtctccacctgcatgggttgaattaaaggacgaccggatcgagacatacgtccgcacgattcaatcaactcttggcgcagagggcaaaattcagatggtagtctgcatcataatgggccctagagatgatctgtacggagccatcaaaaaactgtgttgtgtacagagccctgtgccaagccaggttgtgaatgttcggacaatagggcagccaaccagactccggtctgtcgcccagaagatactcctccagatcaattgcaaactgggtggcgaactctggggggttgacattcctctgaaacaactgatggttattggaatggacgtgtaccatgacccttctagaggtatgcgctcagtcgtggggttcgtggcttctataaatttaacactaacgaagtggtattctagagtcgtctttcagatgccacatcaggagattgtggatagtctgaagctttgcctcgtggggagtctgaagaagttctacgaggtgaatcactgtctcccggagaaaattgtggtgtatagggacggcgtgagcgacgggcaactgaagacagtggccaattacgagattccacagctgcagaaatgtttcgaggccttcgagaactatcagccaaagatggtggtgttcgttgtgcagaagaagatatcaaccaatctgtacttagccgctccccagaactttgtcaccccgaccccagggaccgtggtggaccacaccatcacctcttgtgaatgggtggatttttacctcctggcccaccatgtgaggcagggatgtgggatccctacacactatgtgtgcgttctgaacacagccaatctgtcccccgatcatatgcagcgcctgacgtttaagctgtgtcatatgtattggaactggcccgggacaattcgcgtgccggccccatgtaaatacgctcacaagttagcctttctgagcggccacattttgcaccacgaacccgccattcaactgtgcgaaaacctgttctttttatag

SEQ ID NO: 51129 - DNA, 2922 bp, Artificial Sequence
  derived and/or modified sequence
atggatccttttcggccatcctttagggggcagagccctattcaccccagccagtgtcaggccgtgcgaatgcccggctgctggccccaggcttcaaagcccttagacccagcacttggcagaggagctccagccggcaggggccatgtctttgggaagcctgaggaacctagcacacagcggggcccagctcagcgggaatctgtgggcctcgtgagcatgttcagaggccttggcattgaaacagtgtccaagacccctttgaaaagagagatgctcccatccggtagaggcattctagggcgaggcttaagtgcgaatctggtgcggaaggacagagaggagctttcaccaactttttgggatcctaaagtgctagcggcgggcgatagcaagatggccgagacgagtgttggttggagccgcacactcggtagaggaagctctgacgcaagcctcctccccctgggtcgggccgctgggggcatcagtcgtgaggtcgataaacccccctgcactttttctaccccgtctcggggccctccgcagctctcctcccccccagctctgccccagtctcctcttcactctcctgatcgtccactggtgctgaccgtggaacacaaggaaaaggagctgattgttaaacaaggctccaaagggacccctcagagtctcgggcttaacctcgtgaaaattcaatgtcataatgaggcggtctatcagtaccacgtcacattctctcctaacgtggagtgcaagtcgatgaggtttggcatgttgaaagaccaccaagcagtgacaggcaatgtcactgcttttgacggctccatcctgtatctgcctgtcaaacttcagcaggttctggagcttaagtctcaacgcaaaaccgatagcgctgagatcagtataaaaattcagatgacaaaaattttagagccatgcagtgacctgtgcatcccattttacaacgtggtgtttagaagagtgatgaaacttcttgacatgaagctggtggggcgtaacttttatgatcctacgagtgcaatggtattacaacaacataggctgcagatttggcctggctacgctgcaagtatcaggcggacagacggggggctctttctgcttgccgatgtgtcccataaggtgatcaggaacgattgtgtgctggatgtcatgcacgccatttatcaacagaataaagaacacttccaggacgaatgcaccaagctgctagtgggaaatatagtgataacccgatacaacaatcggacctatcgtatcgacgacgttgactggaataaaacgcctaaggatagctttaccatgtcagacgggaaagaaataaccttcctggaatattattcaaagaactacgggattactgtgaaagaggaagatcaaccactattgatccaccgcccctccgagagacaggacaatcacggcatgctcctaaagggagagatcttattgctccctgagctgtccttcatgaccggaatcccagagaaaatgaagaaagactttagagccatgaaagacctggcacagcaaatcaacttgtctcccaaacagcaccacagcgccctcgagtgcctgctgcagcggattgcaaaaaatgaggccgcgaccaatgagttaatgcgctggggcctgcgcttgcagaaggacgttcataaaattgagggaagagttctccccatggaaaggataaatctgaaaaataccagctttattacatctcaggagctaaactgggtcaaagaggtcacccgggacccgagcatcctcaccattccaatgcacttttgggcactgttttacccaaagagagctatggaccaggctagagagctcgttaacatgctagagaaaatcgcgggccctatcggcatgcggatgagtccccctgcctgggtggagttaaaggatgatagaatcgagacttatgtacggacaatccagtctaccctgggagccgaaggcaaaattcagatggtggtttgtattataatgggcccccgagatgatctatacggcgccataaagaagctttgttgtgtccagtcaccagtcccctctcaggtggttaacgtgcggactataggccagccaacacgacttagaagtgttgcacaaaaaatcttgctccagatcaattgcaagctagggggggagctgtggggagtagatatccccctgaaacagctgatggtgattggcatggatgtgtatcatgatccctccagaggaatgagaagtgtggtgggctttgtcgcctcaatcaatctgaccctgacaaagtggtactcaagagtggtgttccaaatgccacaccaggaaatagtggactcccttaagctgtgcctcgtggggtctttgaagaaattctatgaagtaaaccactgcttgcctgaaaaaatcgttgtttatagggatggggtgagcgatgggcagcttaagactgttgccaattatgaaattcctcaactccagaaatgctttgaggcattcgagaactaccagccaaaaatggtggtgtttgtggttcaaaaaaagatctcaacaaacctgtatttggcagccccgcaaaacttcgtgacccctacccccggaaccgtggttgatcacaccatcacctcttgcgaatgggtggacttctacctgttagctcaccatgtgagacagggatgcgggatcccgacgcactatgtctgtgttttgaatacagctaaccttagtccagaccatatgcaaagactcacatttaaattgtgtcatatgtactggaactggccgggcacaatcagagtgcctgccccctgcaagtatgcacataaactggccttcctgtctgggcatattctgcatcacgaaccagccatccagttgtgtgaaaacctattcttcctctag

SEQ ID NO: 51130 - DNA, 2922 bp, Artificial Sequence
  derived and/or modified sequence
atggaccccttccggcccagcttccggggccagagccccatccaccccagccagtgccaggccgtgaggatgcctggctgctggccccaggccagcaagcccctggaccctgccctgggccgcggggccccagctggccggggccacgtgtttgggaagccagaggagcccagcacccagaggggccctgcccagcgggagagcgtgggcctggtgtccatgttccggggcctgggcatcgagaccgtgtccaagacccccctgaagcgggagatgctgcccagcggccggggcatcctgggccggggcctgagcgccaacctggtgaggaaggaccgggaggagctgagccccaccttctgggaccccaaggtgctggccgccggggacagcaagatggccgagacctctgtgggctggagcaggaccctgggccggggcagcagtgatgccagcctgctgcccctgggccgggccgccggcggcatcagccgggaggtggacaagccaccctgcaccttcagcacccccagccggggccccccccagctgagcagccccccagccctgccccagagccccctgcacagcccagaccggcccctggtgctgactgtggagcacaaggagaaggagctgattgtgaagcagggcagcaagggcaccccccagagcctgggcctgaacctggtgaagatccagtgccacaatgaagctgtgtaccagtaccacgtgaccttcagccccaacgtggagtgcaagtccatgagatttggcatgctgaaggaccaccaggccgtgactggaaatgtgacagcctttgatggcagcatcctgtacctgcctgtgaagctgcagcaggtgctggagctgaagagccagaggaagacagattctgctgagatcagcatcaagatccagatgaccaagatcctggagccctgcagcgacctgtgcatccccttctacaacgtggtgttccggcgggtgatgaagctgctggacatgaagctggtgggcaggaacttctatgaccccaccagcgccatggtgctgcagcagcaccggctgcagatctggccaggctacgccgccagcatccggaggacagatggcggcctcttcctgctggctgatgtgagccacaaggtgatcagaaatgactgtgtgctggatgtgatgcacgccatctaccagcagaacaaggagcacttccaggatgagtgcaccaagctgctggtgggcaacatcgtcatcacccgctacaacaacagaacctacagaattgatgatgtggactggaacaagacccccaaggacagcttcaccatgtctgatggcaaggagatcaccttcctggagtactacagcaagaactacggcatcaccgtgaaggaggaggaccagcccctgctgatccaccggcccagcgagcggcaggacaaccacggcatgctgctgaagggggagatcctgctgctgcctgagctgtccttcatgacaggcatccctgagaagatgaagaaggacttccgggccatgaaggacctggcccagcagatcaacctgagccccaagcagcaccacagcgccctggagtgcctgctgcagagaattgccaagaatgaggccgccaccaatgagctgatgcgctggggcctgcggctgcagaaggatgtgcacaagattgagggccgggtgctgcccatggagcgcatcaacctgaagaacaccagcttcatcaccagccaggagctgaactgggtgaaggaggtgacccgggaccccagcatcctgaccatccccatgcacttctgggccctcttctaccccaagagggccatggaccaggcccgggagctggtgaacatgctggagaagattgctggccccatcggcatgaggatgagccccccagcctgggtggagctgaaggatgacagaattgagacctacgtgaggaccatccagagcaccctgggcgctgagggcaagatccagatggtggtgtgcatcatcatgggccccagagatgacctgtatggagccatcaagaagctgtgctgcgtgcagagccctgtgcccagccaggtggtgaatgtgaggaccatcggccagcccacccggctgcggtctgtggcccagaagatcctgctgcagatcaactgcaagctgggcggggagctgtggggcgtggacatccccctgaagcagctgatggtgattggcatggatgtgtaccatgaccccagccggggcatgaggtctgtggtgggctttgtggccagcatcaacctgaccctgaccaagtggtacagccgggtggtgttccagatgccccaccaggagatcgtggacagcctgaagctgtgcctggtgggcagcctgaagaagttctatgaggtgaaccactgcctgcctgagaagatcgtggtgtacagagatggagtgtctgatggccagctgaagacagtggccaactatgagatcccccagctgcagaagtgctttgaggcctttgagaactaccagcccaagatggtggtgtttgtggtgcagaagaagatcagcaccaacctgtacctggccgccccccagaactttgtgacccccaccccaggcaccgtggtggaccacaccatcaccagctgtgagtgggtggacttctacctgctggcccaccacgtgcggcagggctgcggcatccccacccactacgtgtgtgtgctgaacacagccaacctgagcccagaccacatgcagaggctgaccttcaagctgtgccacatgtactggaactggccaggcaccatccgggtgcctgccccctgcaagtatgcccacaagctggccttcctgagcggccacatcctgcaccacgagcccgccatccagctgtgtgagaacctcttcttcctgtag

SEQ ID NO: 51131 - DNA, 2922 bp, Artificial Sequence
  derived and/or modified sequence
atggaccccttccggcccagcttccggggccagagccccatccacccctcccagtgtcaagcggtccggatgccaggctgctggccgcaggcctccaagcctttagaccccgccctcggtcgaggagcaccggctggcaggggacacgtgttcggcaaaccagaggaaccatcgacccagcggggcccagcgcagagggagtctgtgggactggtgagcatgttccgagggttgggcattgaaaccgtgtccaagactcccctcaaaagggagatgttgccgagcgggcgcggtattttaggcagaggtttgagcgctaacctcgtgagaaaagatcgagaagagcttagtcctactttctgggatcccaaagtcctggccgcaggcgacagcaaaatggctgagacaagcgtgggttggtcccgtacgctagggagaggatcttcagacgcatcgctactaccactaggacgtgcagcggggggcatttcaagagaagtggacaaacccccctgcacatttagtaccccatcccgaggacctcctcagctgtctagtccaccggctttgcctcagtcacctctccactctcccgaccggccccttgtcctgacggtggagcataaagagaaggaactgatcgtcaaacagggtagcaaggggactccccagagtctcggattaaatctcgtcaagatccagtgtcacaatgaagctgtgtatcaataccatgttaccttctctcctaacgtggagtgcaagtccatgcgtttcggtatgctgaaggatcaccaggccgtgaccggaaacgtgactgcctttgatggatcgatcctctatttacctgtgaagctccaacaagttttagagctgaaatcccagcgtaagaccgatagcgctgaaattagcatcaaaatccaaatgacaaaaatcctggaaccctgtagcgatctgtgtatccccttctataacgtagtattccggagggtaatgaagctgctcgatatgaaattggttggacgaaacttctacgatcctacatcagccatggtcctccagcagcatcgattgcagatctggccagggtatgctgctagcatcagaagaactgacggaggattgttcctcttggcagatgtgtcgcacaaggtgattaggaacgactgtgtcctggacgtcatgcatgcaatctatcaacaaaataaggagcacttccaggatgagtgtaccaagctgctagttggcaatatcgtgatcactcggtataataatcgaacttataggatcgatgacgtggattggaataaaacccctaaggacagttttaccatgtctgacgggaaggagattaccttcttggagtattatagcaaaaactatggcattacggtcaaggaggaggaccaaccattgctgatccatcgtccaagcgagcgtcaggacaaccacggaatgctgctgaagggagaaatcctgcttctccccgaactgtcattcatgaccggcattccggagaagatgaagaaggacttcagagcaatgaaggacctagcccaacagattaatctttcacctaagcaacaccatagcgccctcgaatgccttctccagcgcatcgcaaagaacgaggccgcaaccaatgaacttatgaggtggggactcagattgcagaaggatgttcacaaaattgagggaagggttcttcccatggagagaataaatctgaaaaacacctcttttattacctctcaagagctaaactgggtgaaggaagttacgagagacccatccattctgacaatcccgatgcacttctgggccctgttttatccaaaacgggcaatggaccaggcccgggaactggtcaacatgcttgagaaaattgcagggcccatcggcatgaggatgagcccccccgcttgggttgaattaaaagacgacagaatcgagacctatgttcgtaccattcagtccaccctgggagcagagggaaagattcagatggtcgtctgtattataatggggcctagggacgacctctatggagccatcaagaagctctgttgcgttcaatctcctgtgccatcccaggtcgtgaatgttcggactatcggacagcccacccgcctcagatcagtggctcaaaagatactactgcagatcaattgcaagttagggggagaattgtggggtgtggatatccccttgaaacaactcatggtaattggaatggacgtgtatcacgaccccagtagagggatgcgatctgtggtggggttcgtcgcatccataaatctgactcttactaagtggtatagccgggtggtttttcaaatgccacatcaggagattgtggattcattgaagttgtgtcttgtgggctcactgaagaaattctatgaggtcaatcactgcttacccgagaagattgtagtttacagagatggcgtaagcgatggtcagttaaaaaccgtggccaattatgagatcccgcagctccagaaatgctttgaagcttttgagaactatcaacccaaaatggtggttttcgtcgtgcagaaaaaaattagcaccaatctctatctcgctgcgccgcaaaatttcgttactccaaccccaggcacggtcgttgaccacacaatcaccagttgcgagtgggtggacttttatctgcttgcccaccatgttcgccagggctgtgggattccaacacattacgtgtgtgtgttgaacacagctaacttgtcccctgatcatatgcagcgcctcacgttcaagctgtgtcatatgtattggaactggcccggcactattcgcgtaccagccccttgtaagtacgcgcataagttagcctttctttccgggcacatcttgcatcatgaacccgcgatccagctgtgtgagaatctgttcttcctctag

SEQ ID NO: 51132 - DNA, 2922 bp, Artificial Sequence
  derived and/or modified sequence
atggaccccttccggcccagcttccggggccagagccccatccacccgtctcagtgtcaggccgtcagaatgccagggtgttggccccaggccagcaaacctctggatcccgccctcggacggggagcacccgcgggcaggggtcacgtcttcggcaaacccgaggaacctagtactcagaggggacctgcccagcgcgagtctgtgggtctggtgtcaatgtttcgaggcctgggcatcgagaccgtgagcaagacgcctctcaaaagggagatgctgccctccggcaggggaatcctggggcgtggccttagcgccaacctagtgcggaaagaccgggaggagctgtctcctaccttctgggaccctaaggttctcgccgccggcgacagcaagatggctgagacatcggtgggctggagtaggactcttggcaggggttcctcagacgccagtcttctccccctgggtagggcagctggcggcatcagccgagaggtcgataagcctccgtgtaccttttccactcccagtcgaggaccccctcaactttcaagcccacccgcgttgcctcagtcccccctccacagccccgaccgtccactcgtgctgaccgtcgagcacaaagagaaagagctgatcgtcaagcagggatctaaggggaccccacagtccctagggctgaatctggttaagatacagtgccacaacgaagcggtttaccagtatcatgtgacgttctctccgaatgtagaatgcaagagcatgcgtttcggaatgctgaaggatcaccaggccgtgactgggaatgtaacagcattcgatgggagtatcttgtatctacctgtgaaactgcagcaggtgcttgagttgaagtctcagcgtaaaaccgactccgctgaaatctcgatcaagatccagatgacgaagatcctggagccttgttctgatttatgtatccctttttacaatgttgtgttccgacgagttatgaaactcctggatatgaagctggtgggacgaaacttctatgatcctacatccgcaatggtgctacagcagcaccgactccagatttggccgggctacgctgcgtccatccgacgcaccgacggcgggctgtttctgctggctgacgtgagccataaagtcattagaaacgattgcgtattggacgtcatgcatgctatttaccagcaaaataaggagcacttccaggacgaatgcacgaagctgctggtgggcaatatcgttatcacaagatacaataatcgcacttataggatcgatgatgtcgattggaacaagactcctaaggatagctttactatgagtgacgggaaggagatcactttcttagagtactacagcaagaactacggtatcaccgttaaagaggaagatcagccgctgttaatacataggcccagcgagcgccaggataaccatggaatgctgcttaaaggcgaaatcctgcttttgcctgagctttcattcatgacaggaatacctgaaaagatgaaaaaggacttccgcgcgatgaaagacttggctcaacagattaacctatctccaaaacagcaccattcagctctggaatgtctcttacagagaattgccaaaaacgaggccgctactaatgaattgatgcggtgggggcttagactccagaaagatgtgcacaaaattgagggccgagtgctgccgatggagagaattaatttgaagaatactagtttcattacctctcaggagcttaactgggtgaaggaggtgacccgggacccttcgatcctgaccattcccatgcatttctgggcgttattttatccaaagagggccatggatcaggcccgggaactcgtgaatatgctggaaaagatcgccgggcctataggcatgagaatgagcccccctgcatgggtggagctgaaggatgatcgtattgagacgtatgtccgaacaattcaatctaccctgggcgccgaggggaagattcaaatggtggtttgtatcattatgggccccagggatgacctttacggggccatcaagaaactctgctgtgtgcaatcccccgtgccgagccaggtcgtcaatgtccgtaccattggtcagccaacacggctaaggtccgtcgcacagaaaattctgctgcagattaactgcaaactggggggtgagctttggggggtcgatatacccctgaaacagctcatggtgatcgggatggatgtataccacgacccttctagaggtatgcgcagtgtggtcggcttcgtagcttcaattaacttgaccttaacaaaatggtacagcagggtcgttttccaaatgccccatcaggaaattgttgattccctgaagctgtgtctggtcggctccttgaaaaaattttacgaagtcaatcactgcctgcccgaaaagattgtggtttatcgtgacggggtgtctgacggacaactgaagaccgtagcaaactatgaaattccccagctgcagaagtgcttcgaagcctttgagaattaccagccaaagatggttgtgttcgtggtacagaaaaaaatttctactaacttgtacctggcggcaccacagaacttcgtgactcctactcctgggactgtggtggaccacaccattacaagctgcgagtgggtagatttctatcttctcgcacatcacgtaaggcagggatgcgggatacccacacactacgtctgtgtgctcaatactgcgaacctgtcacctgaccatatgcagagactgacctttaaattgtgccacatgtactggaactggccaggaaccattcgggttccggcgccctgtaaatacgcacacaagctggcttttctgagcggacacatcctgcatcatgagcctgccatacagctgtgtgagaatctgtttttcctgtag

SEQ ID NO: 51133 - DNA, 5128 bp, Artificial Sequence
  derived and/or modified sequence
gaaattggccctggagcatgtgggccccggggcgtgggttgagctcggtcttcccctgaggccgcgcggagctgggcgactggggcgaggactcgcgcacaggtaattaaccagaacaggatcgacacgtgttctctacagcccgtccatggatcctttccgaccatcgttcaggggccagtctcctatccacccatcccagtgccaggctgtacggatgccaggctgttggccacaagcttctaaacctttggacccagctctgggcaggggagcacctgcaggcagaggccatgtatttggaaagccagaggaaccaagcacacagagggggccagcacaaagggagtctgtgggtttggtctccatgttccgaggcctgggcattgaaacagtttctaagacccctctgaaacgggaaatgcttccatcaggtagaggcattttaggtcgaggcttgtctgctaatctggtacgcaaggacagggaggaactctctcccactttttgggatccaaaagtgttggcggctggggacagcaagatggcagagacctccgttggttggagtaggacgcttggaagagggagttcagatgcgtctttattaccactgggaagagcagcaggtggtatcagcagagaagtggacaagcctccctgtaccttcagcacaccgtcccggggtcccccgcagctgtcatcaccaccagctctgccccagtctcccctgcactctccagatcgccctctggtcctgactgtggaacacaaggaaaaagagcttattgtgaagcaaggatcaaaaggaacacctcagtctttgggactgaacctcgtcaaaatacagtgtcataatgaagcagtttatcaatatcatgtgactttcagccccaatgtggagtgcaaaagcatgaggttcggcatgttgaaggaccatcaagctgtcaccggcaacgtcactgcgtttgatggatctattctctatctgcctgttaagcttcaacaagttcttgagttaaaaagtcaaaggaaaacagacagtgctgaaatcagcattaagattcagatgacaaagatcctggagccctgctctgacctgtgcattcccttctacaatgttgttttccgtcgggtaatgaaacttttagatatgaagcttgtggggagaaacttttatgaccctacaagtgctatggtactacagcaacacagattgcagatctggccaggctatgcagctagcatccgaaggacagatggagggctcttcctgctagctgatgtctcccataaggtcattcggaatgactgtgtgctggatgtcatgcatgccatttatcagcagaataaagaacacttccaggatgagtgtactaagcttctggttggcaatattgttatcacccgatataacaatcgtacctatcgtattgatgatgtggattggaataagactccaaaggatagcttcacgatgtctgatgggaaagagatcacattcttggaatactacagcaaaaattatgggatcacagttaaggaagaggaccagccattgctgattcacaggcccagtgagagacaggataatcatgggatgctgctaaaaggggaaatcctgctgctgcctgagctttcttttatgaccggaatcccagagaagatgaagaaggacttcagagccatgaaggatttggctcagcaaatcaatctgagccccaagcaacaccatagtgctttggaatgcttgctgcaaagaattgcaaagaacgaggcagccaccaatgaactgatgcgttgggggctccgtctgcaaaaggatgtacataagattgaaggacgtgttctgccaatggaaagaattaacttaaaaaatacttcgtttatcacatctcaggaactaaactgggttaaggaagtaaccagagacccttccatcttgactatccccatgcatttctgggcacttttttacccaaagagagcaatggaccaggctcgagaactggtcaacatgttggagaagatagccggccccattggcatgcgtatgagcccaccggcctgggttgaactaaaggatgaccgaatagagacttatgtcagaaccattcaatccacgttaggagctgaggggaagatacagatggttgtttgcatcatcatgggcccacgtgatgatctctatggggccatcaagaagctgtgctgtgtgcagtccccagtgccctcccaggttgtcaatgttcgaaccattggtcagcccaccaggcttcggagtgtggcccagaagattttacttcagattaactgtaaattgggtggtgagctctggggagtggatattcctctgaaacagttaatggtgatcgggatggatgtttaccatgaccccagtagaggcatgcgctccgtggttggcttcgtggcaagcatcaatctcaccctcacaaaatggtattcccgggtggtgttccagatgccgcatcaggagattgtggacagcctgaagctatgcctcgtgggctccttaaaaaagttttatgaggtgaaccactgtctaccagagaagattgtggtgtaccgtgatggagtgtctgatggccaactgaagacagttgccaactatgagattcctcaactacagaagtgttttgaagcttttgagaattatcagcccaagatggtggtgtttgtagttcagaagaaaatcagtactaatctatatctggctgctcctcagaactttgtaactcccactcctggaactgtggtagatcatacaataacaagctgtgagtgggtggatttctatcttcttgcccatcatgtacggcagggctgtggcattcctacgcattatgtctgtgttctcaacaccgcaaacctgagccctgatcatatgcagaggctgactttcaaactgtgccacatgtactggaattggcctggcaccatcagagttccagctccttgcaagtatgcccacaagctagctttcctgtcaggacacatcttgcatcatgaaccagccatccagctgtgcgagaacctgttcttcctgtgactgcacagcttggagatgggctggtgagaagaaaggcggcctcagaactcagctgtgactcttgcagaatcaacagagactgaagtgggcttttgtgttataattttccctttctccaaccctgtagaataagatttctttcttgtcttttaaacctaatatcaccaagaagcaagtttctgagtaacagctgaaaatggccttgttgcctgtgtagagcaagttacggtggtactgccactctgcaggtggagcgggtgactctgggggaccattaagacctccagaccgggtgcggtggttcacacctgtaatccaagcactttgggaggccgaggcgggtggatcatgaggtcaggagatcaagaccatcctggccaacatggtgaaaccccgtctctactaaaatacaaaaaaattagccgggtgtggcggtgcacgcctgtagtcccagctactcaggaggctaaggcaggagaatcgcttgaacccgggaggtggaggttgcagtgagccgagatcacgccactgcactccagcctgttgacaaagcaagactctgtctcaaaaaaaaaaaaaaaaagccaacatgagctgcagaaaccagcagaagcagccattatacttctaagctgtgccaactaagtggttcccatttctggagccagagatgataattaagtcattgcaagttgcctgaagagaattactcaggcaactgggaaaggcagtggaaggtctgtgaagcaaagttttcaagtagatattgctattactggcaggtgtgcaaggcgtgtagtaaaatcagtttgtggcataggtcggcccttgctgactaaatcctctctggggattgaattgatgacgactgtgacttgagttggattcgaaaatggcttcccttggcctcttgaaagagtgcagatgaagccttttccgtggatttcagtaactttccagcataccatgacgatttcttccccaaatatacacatgctcttttgctctttgtgcctgatcttcagtaatttttagttttttaacaggcagaaaaaatctagcagctaggaaagttcaagttggggtgggagtttttagtgaacttttctcccaggtgtgtggcctttatttctatttatatatgtttgtaaatggaattaccccctttctcttgcaaaataaccgcttcctggctgttggctcactttgctggaatttttctgaatccaggttaagatttccagaagtcagctttggaaaacgtgacactcctaccaaagtccagatggttagaaagttatcacataccatgggtttcagtgtttttggaaacccgtttttttctggttttttttcccccctctccattttagaatcttctcccagtcccttcgggcctagttctgtctcatcttgctttattgggttttaaaaaccggtcttatttaagcttttctaatttgtatttatgtacttatttattttttggtatgatggcagggaggggacaaagcagaaataccccttttatatgacaatgtgtgagaaaagaaactttagcttaaaactccgtaaaatgtgctcacttcagcagcacatatactaaaattaaaatgatatagagaagattagcatatagaaaaaaagaaaaaagatttccttaaaacaagaaaaccaagaatgtttttggtttgttgcggtgcccagccgaggttgaggagggatgggtattgttggtgcactgctggtttcatttggagtgtgggacattagggtgagacaaggacctggaatttaaaaaccacagaatcaaacactgtgaaccactggtctctggctaagcagatcagttttctgattttccttggaagcgttttgaatttttctgttgaagttggatttcctaatactttttttctcttagataatcagaacaaatggttgaatacattataatacaaaaatttcttcactttttattcttggttttcttgcctcgtttttcggttttaatgccaaatgattgggtcatggggtgggaaataaaaacaactttgt

SEQ ID NO: 51134 - DNA, 3442 bp, Artificial Sequence
  derived and/or modified sequence
attcgaggcccggcgccgcggccccaagaaggtgtccaggttggggcggcaggggaggccctccggaggcccaagtggacgtcttatttggcctgagagaggagatagaacccctggcagggctgtggctttggggaaaggtgcttttctcggggtggaaaggggatgggactcgccttcgggggccttgcttctggttaggcccgagtcgcgaggcctcagcgcggagcacgcacccagggatgcgagggaggcaggcccagcccgtcctgggttcgctccccattgaacctttcggacagccaagtatctgctacctgatcccagggggaaacccacactgggagagggccctctgggggagctacctgaatctatagaagtggtgctggaggttgagggaagcgtggacaaagaggaagattccagatgtcccttaagggaggccgtccagcgcttctgagtaattaaccagaacaggatcgacacgtgttctctacagcccgtccatggatcctttccgaccatcgttcaggggccagtctcctatccacccatcccagtgccaggctgtacggatgccaggctgttggccacaagcttctaaacctttggacccagctctgggcaggggagcacctgcaggcagaggccatgtatttggaaagccagaggaaccaagcacacagagggggccagcacaaagggagtctgtgggtttggtctccatgttccgaggcctgggcattgaaacagtttctaagacccctctgaaacgggaaatgcttccatcaggtagaggcattttaggtcgaggcttgtctgctaatctggtacgcaaggacagggaggaactctctcccactttttgggatccaaaagtgttggcggctggggacagcaagatggcagagacctccgttggttggagtaggacgcttggaagagggagttcagatgcgtctttattaccactgggaagagcagcaggtggtatcagcagagaagtggacaagcctccctgtaccttcagcacaccgtcccggggtcccccgcagctgtcatcaccaccagctctgccccagtctcccctgcactctccagatcgccctctggtcctgactgtggaacacaaggaaaaagagcttattgtgaagcaaggatcaaaaggaacacctcagtctttgggactgaacctcgtcaaaatacagtgtcataatgaagcagtttatcaatatcatgtgactttcagccccaatgtggagtgcaaaagcatgaggttcggcatgttgaaggaccatcaagctgtcaccggcaacgtcactgcgtttgatggatctattctctatctgcctgttaagcttcaacaagttcttgagttaaaaagtcaaaggaaaacagacagtgctgaaatcagcattaagattcagatgacaaagatcctggagccctgctctgacctgtgcattcccttctacaatgttgttttccgtcgggtaatgaaacttttagatatgaagcttgtggggagaaacttttatgaccctacaagtgctatggtactacagcaacacagattgcagatctggccaggctatgcagctagcatccgaaggacagatggagggctcttcctgctagctgatgtctcccataaggtcattcggaatgactgtgtgctggatgtcatgcatgccatttatcagcagaataaagaacacttccaggatgagtgtactaagcttctggttggcaatattgttatcacccgatataacaatcgtacctatcgtattgatgatgtggattggaataagactccaaaggatagcttcacgatgtctgatgggaaagagatcacattcttggaatactacagcaaaaattatgggatcacagttaaggaagaggaccagccattgctgattcacaggcccagtgagagacaggataatcatgggatgctgctaaaaggggaaatcctgctgctgcctgagctttcttttatgaccggaatcccagagaagatgaagaaggacttcagagccatgaaggatttggctcagcaaatcaatctgagccccaagcaacaccatagtgctttggaatgcttgctgcaaagaattgcaaagaacgaggcagccaccaatgaactgatgcgttgggggctccgtctgcaaaaggatgtacataagattgaaggacgtgttctgccaatggaaagaattaacttaaaaaatacttcgtttatcacatctcaggaactaaactgggttaaggaagtaaccagagacccttccatcttgactatccccatgcatttctgggcacttttttacccaaagagagcaatggaccaggctcgagaactggtcaacatgttggagaagatagccggccccattggcatgcgtatgagcccaccggcctgggttgaactaaaggatgaccgaatagagacttatgtcagaaccattcaatccacgttaggagctgaggggaagatacagatggttgtttgcatcatcatgggcccacgtgatgatctctatggggccatcaagaagctgtgctgtgtgcagtccccagtgccctcccaggttgtcaatgttcgaaccattggtcagcccaccaggcttcggagtgtggcccagaagattttacttcagattaactgtaaattgggtggtgagctctggggagtggatattcctctgaaacagttaatggtgatcgggatggatgtttaccatgaccccagtagaggcatgcgctccgtggttggcttcgtggcaagcatcaatctcaccctcacaaaatggtattcccgggtggtgttccagatgccgcatcaggagattgtggacagcctgaagctatgcctcgtgggctccttaaaaaagttttatgaggtgaaccactgtctaccagagaagattgtggtgtaccgtgatggagtgtctgatggccaactgaagacagttgccaactatgagattcctcaactacagaagtgttttgaagcttttgagaattatcagcccaagatggtggtgtttgtagttcagaagaaaatcagtactaatctatatctggctgctcctcagaactttgtaactcccactcctggaactgtggtagatcatacaataacaagctgtgagtgggtggatttctatcttcttgcccatcatgtacggcagggctgtggcattcctacgcattatgtctgtgttctcaacaccgcaaacctgagccctgatcatatgcagaggctgactttcaaactgtgccacatgtactggaattggcctggcaccatcagagttccagctccttgcaagtatgcccacaagctagctttcctgtcaggacacatcttgcatcatgaaccagccatccagctgtgcgagaacctgttcttcctgtgactgcacagctt

SEQ ID NO: 51135 - DNA, 2922 bp, Artificial Sequence
  derived and/or modified sequence
atggacccctttagaccatcctttcgaggtcagagtcctatacatccttcgcaatgtcaggctgtccggatgccaggctgttggccacaggctagcaaacctctggaccctgcattgggcaggggggcacctgctggaaggggccatgtctttggcaaacccgaggagccttctacccagcgcggtccagcacagagagaatccgttgggctcgtctctatgtttcggggtttgggaatagagactgtgtctaaaacacccctgaaaagggagatgctccccagcgggcgtggaatccttggaaggggcctctccgctaacctggtccgcaaggatagggaagaactctcccctacattctgggaccctaaagttcttgccgcaggcgacagtaaaatggctgagacaagcgtgggatggtccagaacactgggcagggggagctcggatgccagtctgcttccccttgggagagcggctgggggtatctctcgcgaagtagataagcctccttgcacattttcaacgccgtctcgcggaccgcctcagctttcttcaccacccgctctgcctcagtctccactccatagccccgaccgaccactggtcctaacggtggaacataaggaaaaggaactgattgtcaaacagggctctaaggggacccctcagtccctcggcctaaaccttgtgaagattcagtgtcataatgaggccgtgtatcaataccacgtgacgttttccccaaacgtggagtgcaagagcatgcgtttcgggatgctgaaagatcatcaagccgtgacaggcaacgtaaccgcctttgacgggtccatactctacctacccgtgaagctccagcaggtgctcgaactgaagagccagcggaagacagattcggccgaaattagtattaagatccagatgactaaaatcttagagccttgcagcgacctgtgtatcccattctataacgtggtcttcagacgcgtgatgaagctgctggacatgaagctcgtcggccgtaatttctacgatccaacatccgccatggtcctgcaacagcatcggttgcagatttggcctggatacgctgcgtctatacgaaggacagacggagggctgttcctgttggctgacgtgtcacataaggtgatcaggaatgattgtgttctcgatgtgatgcatgcaatataccagcagaataaagagcactttcaggacgagtgcactaaactgttagtgggaaacatagtcatcaccaggtataacaaccggacttatcgtattgacgatgtggattggaacaagaccccaaaggactcttttacaatgtcggatggcaaagaaatcacctttctggaatactattcgaagaattatggaatcaccgttaaggaggaagaccagcctcttttgattcaccgcccaagcgagaggcaagataaccatgggatgcttctgaagggagaaatccttctactgccagagttgtccttcatgactggcatcccagaaaagatgaaaaaggatttccgagcaatgaaggatctggcacagcaaatcaatctgagccccaagcaacaccattccgccttagaatgtcttctgcagagaatcgctaaaaatgaagccgcaactaatgagctgatgaggtggggcctcaggctgcagaaagacgtacataagatcgagggcagagtgttgcctatggagagaataaacctcaaaaacaccagcttcataacgtcacaggagttaaactgggtgaaggaggtgactcgggaccctagcatcctgactatccctatgcatttttgggcgctgttttaccctaaaagggccatggaccaggcaagggagctcgtgaacatgctggagaaaatcgctggacccataggcatgcgaatgagtccccctgcttgggttgagctcaaagacgatcggattgagacctacgtacgcaccatccaatccacactgggtgcggagggaaaaatccagatggtggtctgtattataatgggaccacgcgatgacctttacggcgcaattaaaaaactctgctgtgttcagtcgcccgtgccttcgcaagtggtcaatgtgagaactattgggcaacccactcgcctcagatccgtggcacagaagattctgctccagattaattgcaagctcggcggtgaactgtggggcgttgatatccctctaaagcagctgatggtcatcggcatggatgtctaccacgacccatctagaggtatgaggtccgttgtaggatttgtggctagtattaacctcactcttacaaagtggtatagccgggttgtgttccagatgccacaccaagagatagttgactctttaaagctctgtcttgtggggagcctaaagaaattctacgaggtgaatcactgcctcccggaaaagatagtagtgtatcgggatggcgtatctgatggccagctaaagactgtggccaattacgagattccccaattgcaaaaatgttttgaagcattcgaaaactatcagcccaagatggtggttttcgtggtgcagaagaaaatcagtacgaacttatatctcgctgctccacagaatttcgtcactccaaccccaggcaccgtcgttgaccatactattacctcatgtgagtgggtggatttctacttactggcacatcacgtgagacaaggatgcggcattcctacacactatgtgtgtgtgctcaatacagccaacctttcccctgaccatatgcagagactcacattcaagctctgccacatgtactggaattggcccggaaccattcgagtacccgctccctgcaaatatgcacataagctggccttcctaagtgggcacattctgcaccacgaaccggcaatccagctttgtgaaaatctcttctttctgtag

SEQ ID NO: 51136 - DNA, 2922 bp, Artificial Sequence
  derived and/or modified sequence
atggatccgttccgcccttcctttcgcggtcagtctcccattcacccgagccagtgtcaggctgtgagaatgccagggtgctggccccaggctagcaagcccctggaccccgcactgggcaggggagcacctgctggtaggggacacgtttttggtaagcccgaggagccgtcaacccaacggggacccgctcagagagagagtgtcggtcttgtttcaatgtttaggggactgggaatcgagacagtctctaaaactcccctaaaaagagagatgttgccaagcggaagaggaatcctaggccgtggcttgagcgctaacttagtgagaaaagaccgtgaagagctcagccctacgttttgggatccaaaagtgctggctgcaggagacagcaaaatggctgagactagcgtgggttggtcgcgaacactgggccgaggcagcagcgacgcatcactcctgccattgggcagagcagccggtgggatcagccgcgaagtcgataagcctccatgtacattttccacaccctccagagggcctcctcagctctcgtctccccctgccctgccccagtctcccttgcactcaccagacagacccttggtcctcacagtggagcacaaagagaaggagctaatagtgaagcagggctctaaagggactccccagagtctcggcctgaatttggtcaaaattcagtgccataatgaagccgtttaccaatatcacgtaacattttcacctaacgttgagtgcaaaagcatgcggtttgggatgctcaaggaccaccaagctgtgaccggcaatgtgactgccttcgatggatccatcctgtacttgccagtgaaactccagcaggtcctggagttgaaaagccagcgaaaaaccgactccgccgaaatctctattaagattcagatgactaaaatacttgagccttgtagcgatctgtgtatccctttctataacgtggtattccgtcgcgtcatgaagctgttagacatgaaactagtgggcagaaacttctacgatccaacatctgccatggtcctgcagcaacatcgattacagatatggccgggatacgcagcctcaattcggagaactgacggcggactgtttctcttagcggatgtatctcacaaagtcatacggaatgactgtgtgctagacgtgatgcacgccatttaccagcaaaacaaagagcactttcaggacgaatgtaccaaactgttagtgggaaatattgtgattacacggtataataacagaacgtacagaatcgatgacgttgactggaacaaaacacccaaagattcctttacgatgtctgacggtaaggaaatcacgtttctcgaatattactctaagaattatggtatcacagtgaaagaggaagatcagcctctcttgatccatcgtccctctgagcgccaggacaatcacgggatgctgctaaagggcgagatcttgctcctccctgagctatcatttatgacgggaattccggaaaaaatgaaaaaagatttcagggctatgaaggatctggcccagcagatcaacctctcacccaagcagcatcactccgccctggagtgccttctacagaggatcgccaagaacgaggcagctactaacgagctgatgcgctggggcttgaggctgcaaaaagacgtgcataagatagaagggcgagtgctgccaatggagcggattaacctgaaaaacaccagtttcataacaagtcaagagcttaactgggtgaaagaggtcacaagagatccaagcatcctcactattccaatgcatttttgggccttgttttaccccaagcgcgcaatggatcaagcgagagaactcgtgaatatgttggaaaaaattgccggtcccataggcatgcgcatgtcccctcctgcctgggttgagttaaaagacgaccgaattgaaacatatgtgcgtaccatccagtccactctgggggctgagggcaaaatacagatggttgtttgtattattatgggtccccgtgacgatctgtacggcgcaatcaaaaaactgtgctgcgtgcagtcccccgtgccctcacaggttgtcaatgtgcggaccattggacagcccacccgccttcggtcagtggcacaaaaaatcctcttgcagatcaattgtaagttggggggagaactttggggtgttgacatcccattgaaacagctgatggtcataggcatggacgtgtatcacgacccgtctagaggcatgagatctgtagtggggtttgtagcgtccattaacctcactcttacaaaatggtactcgcgagtggtgtttcagatgccacaccaggaaattgtggatagccttaagctgtgcttagtagggtccttaaagaagttctatgaggtgaaccactgccttccagagaagatcgtggtctatcgcgacggtgtgagtgatggtcagttaaaaactgtggccaactacgagatcccacagctgcagaagtgtttcgaagcttttgaaaactatcagccaaagatggtggtgttcgtagtacagaaaaaaattagcacaaatctgtacctagcagcgccacagaatttcgtaacaccaacaccaggaacagtcgtcgaccacactatcacaagctgcgagtgggtggatttctatctcctggcacaccacgttcggcagggttgtggtataccaactcactatgtctgcgtgttaaataccgccaatcttagtcctgaccatatgcaacgcctcacctttaaactgtgtcacatgtattggaactggcctggcacaatccgagtccctgcaccatgcaagtacgctcataaactggcgtttctcagcggacacattctccaccacgagcctgcaatccaattgtgcgagaatctattcttcctctag

SEQ ID NO: 51137 - DNA, 2922 bp, Artificial Sequence
  derived and/or modified sequence
atggaccccttcagacccagcttcagaggccagagccccatccaccccagccagtgccaggccgtgagaatgcccggctgctggccccaggccagcaagcccctggaccccgccctgggcagaggcgcccccgccggcagaggccacgtgttcggcaagcccgaggagcccagcacccagagaggccccgcccagagagagagcgtgggcctggtgagcatgttcagaggcctgggcatcgagaccgtgagcaagacccccctgaagagagagatgctgcccagcggcagaggcatcctgggcagaggcctgagcgccaacctggtgagaaaggacagagaggagctgagccccaccttctgggaccccaaggtgctggccgccggcgacagcaagatggccgagaccagcgtgggctggagcagaaccctgggcagaggcagcagcgacgccagcctgctgcccctgggcagagccgccggcggcatcagcagagaggtggacaagcccccctgcaccttcagcacccccagcagaggccccccccagctgagcagcccccccgccctgccccagagccccctgcacagccccgacagacccctggtgctgaccgtggagcacaaggagaaggagctgatcgtgaagcagggcagcaagggcaccccccagagcctgggcctgaacctggtgaagatccagtgccacaacgaggccgtgtaccagtaccacgtgaccttcagccccaacgtggagtgcaagagcatgagattcggcatgctgaaggaccaccaggccgtgaccggcaacgtgaccgccttcgacggcagcatcctgtacctgcccgtgaagctgcagcaggtgctggagctgaagagccagagaaagaccgacagcgccgagatcagcatcaagatccagatgaccaagatcctggagccctgcagcgacctgtgcatccccttctacaacgtggtgttcagaagagtgatgaagctgctggacatgaagctggtgggcagaaacttctacgaccccaccagcgccatggtgctgcagcagcacagactgcagatctggcccggctacgccgccagcatcagaagaaccgacggcggcctgttcctgctggccgacgtgagccacaaggtgatcagaaacgactgcgtgctggacgtgatgcacgccatctaccagcagaacaaggagcacttccaggacgagtgcaccaagctgctggtgggcaacatcgtgatcaccagatacaacaacagaacctacagaatcgacgacgtggactggaacaagacccccaaggacagcttcaccatgagcgacggcaaggagatcaccttcctggagtactacagcaagaactacggcatcaccgtgaaggaggaggaccagcccctgctgatccacagacccagcgagagacaggacaaccacggcatgctgctgaagggcgagatcctgctgctgcccgagctgagcttcatgaccggcatccccgagaagatgaagaaggacttcagagccatgaaggacctggcccagcagatcaacctgagccccaagcagcaccacagcgccctggagtgcctgctgcagagaatcgccaagaacgaggccgccaccaacgagctgatgagatggggcctgagactgcagaaggacgtgcacaagatcgagggcagagtgctgcccatggagagaatcaacctgaagaacaccagcttcatcaccagccaggagctgaactgggtgaaggaggtgaccagagaccccagcatcctgaccatccccatgcacttctgggccctgttctaccccaagagagccatggaccaggccagagagctggtgaacatgctggagaagatcgccggccccatcggcatgagaatgagcccccccgcctgggtggagctgaaggacgacagaatcgagacctacgtgagaaccatccagagcaccctgggcgccgagggcaagatccagatggtggtgtgcatcatcatgggccccagagacgacctgtacggcgccatcaagaagctgtgctgcgtgcagagccccgtgcccagccaggtggtgaacgtgagaaccatcggccagcccaccagactgagaagcgtggcccagaagatcctgctgcagatcaactgcaagctgggcggcgagctgtggggcgtggacatccccctgaagcagctgatggtgatcggcatggacgtgtaccacgaccccagcagaggcatgagaagcgtggtgggcttcgtggccagcatcaacctgaccctgaccaagtggtacagcagagtggtgttccagatgccccaccaggagatcgtggacagcctgaagctgtgcctggtgggcagcctgaagaagttctacgaggtgaaccactgcctgcccgagaagatcgtggtgtacagagacggcgtgagcgacggccagctgaagaccgtggccaactacgagatcccccagctgcagaagtgcttcgaggccttcgagaactaccagcccaagatggtggtgttcgtggtgcagaagaagatcagcaccaacctgtacctggccgccccccagaacttcgtgacccccacccccggcaccgtggtggaccacaccatcaccagctgcgagtgggtggacttctacctgctggcccaccacgtgagacagggctgcggcatccccacccactacgtgtgcgtgctgaacaccgccaacctgagccccgaccacatgcagagactgaccttcaagctgtgccacatgtactggaactggcccggcaccatcagagtgcccgccccctgcaagtacgcccacaagctggccttcctgagcggccacatcctgcaccacgagcccgccatccagctgtgcgagaacctgttcttcctgtag

SEQ ID NO: 51138 - protein, 420 aa, Artificial Sequence
  derived and/or modified sequence
MLSSFPVVLLETMSHYTDEPRFTIEQIDLLQRLRRTGMTKHEILHALETLDRLDQEHSDKFGRRSSYGGSSYGNSTNNVPASSSTATASTQTQHSGMSPSPSNSYDTSPQPCTTNQNGRENNERLSTSNGKMSPTRYHANSMGQRSYSFEASEEDLDVDDKVEELMRRDSSVIKEEIKAFLANRRISQAVVAQVTGISQSRISHWLLQQGSDLSEQKKRAFYRWYQLEKTNPGATLSMRPAPIPIEDPEWRQTPPPVSATSGTFRLRRGSRFTWRKECLAVMESYFNENQYPDEAKREEIANACNAVIQKPGKKLSDLERVTSLKVYNWFANRRKEIKRRANIEAAILESHGIDVQSPGGHSNSDDVDGNDYSEQDDSTSHSDHQDPISLAVEMAAVNHTILALARQGANEIKTEALDDD

SEQ ID NO: 51139 - DNA, 1263 bp, Artificial Sequence
  derived and/or modified sequence
atgctgagcagcttccccgtggtgctgctggagaccatgagccactacaccgacgagcccagattcaccatcgagcagatcgacctgctgcagagactgagaagaaccggcatgaccaagcacgagatcctgcacgccctggagaccctggacagactggaccaggagcacagcgacaagttcggcagaagaagcagctacggcggcagcagctacggcaacagcaccaacaacgtgcccgccagcagcagcaccgccaccgccagcacccagacccagcacagcggcatgagccccagccccagcaacagctacgacaccagcccccagccctgcaccaccaaccagaacggcagagagaacaacgagagactgagcaccagcaacggcaagatgagccccaccagataccacgccaacagcatgggccagagaagctacagcttcgaggccagcgaggaggacctggacgtggacgacaaggtggaggagctgatgagaagagacagcagcgtgatcaaggaggagatcaaggccttcctggccaacagaagaatcagccaggccgtggtggcccaggtgaccggcatcagccagagcagaatcagccactggctgctgcagcagggcagcgacctgagcgagcagaagaagagagccttctacagatggtaccagctggagaagaccaaccccggcgccaccctgagcatgagacccgcccccatccccatcgaggaccccgagtggagacagacccccccccccgtgagcgccaccagcggcaccttcagactgagaagaggcagcagattcacctggagaaaggagtgcctggccgtgatggagagctacttcaacgagaaccagtaccccgacgaggccaagagagaggagatcgccaacgcctgcaacgccgtgatccagaagcccggcaagaagctgagcgacctggagagagtgaccagcctgaaggtgtacaactggttcgccaacagaagaaaggagatcaagagaagagccaacatcgaggccgccatcctggagagccacggcatcgacgtgcagagccccggcggccacagcaacagcgacgacgtggacggcaacgactacagcgagcaggacgacagcaccagccacagcgaccaccaggaccccatcagcctggccgtggagatggccgccgtgaaccacaccatcctggccctggccagacagggcgccaacgagatcaagaccgaggccctggacgacgactag

SEQ ID NO: 51140 - DNA, 1263 bp, Artificial Sequence
  derived and/or modified sequence
atgctgagcagcttcccggtggttttactggaaactatgtctcactataccgatgaaccccggtttaccatcgaacagatcgatcttcttcaacgccttagacgcaccggaatgaccaaacacgaaattctccacgcgctggaaacactggacaggcttgatcaagaacactctgataagtttggccggagaagttcgtacggaggcagcagctatgggaactctacaaacaacgtcccagcctctagcagcaccgccaccgccagcacgcagacccagcactctggcatgtccccatcgccgtcaaacagttatgatacatctcctcaaccatgcacaacaaatcaaaatggtagggagaacaacgagcggctatctacatctaacggtaaaatgagcccaacgcgctaccacgccaactccatggggcaacgctcttactccttcgaagcctctgaggaagacctggatgtggacgacaaggttgaagagctgatgaggcgagattcgagcgtcattaaagaggagatcaaagcttttctggcaaaccgccggatatcccaagccgtggtagcccaggttacaggaattagccaatcccggatttcccactggttgctacagcagggctctgacctatctgagcagaaaaagcgtgctttttatagatggtaccaactggagaagaccaacccgggcgctacactgtccatgcgcccagcgccgattccgatagaagaccccgagtggagacagaccccaccccctgtgagcgcaacctctggcacctttcgattaagacgcggaagcaggttcacctggcggaaagaatgcctcgccgtgatggagtcatactttaatgaaaaccagtaccccgacgaagccaagagagaagagattgccaacgcttgcaatgcagtgatccagaagcctggcaaaaaactatccgacttggaaagggtgacatcactgaaggtgtataattggtttgctaataggcggaaggagatcaaacgccgcgcaaacatagaagcagccatcctcgagtcacatggaattgatgtgcaatcccctggcggacactccaattccgatgacgtcgatggaaacgactactccgagcaggatgacagcacttcacattctgaccatcaggaccccatcagccttgccgtagagatggcggccgtcaatcatactatcttggcacttgctagacaaggggccaatgaaattaagaccgaggccctcgatgatgattag

SEQ ID NO: 51141 - DNA, 1263 bp, Artificial Sequence
  derived and/or modified sequence
atgctgtcatctttcccagtcgttttgctggaaacgatgtcgcattacacagacgagcctaggtttaccatcgaacagatcgatctcctgcagcggctcagaaggacaggcatgactaagcacgagatccttcacgcactagaaactctggatagactggatcaggagcattctgacaagttcgggcgacgctcttcctatgggggctcaagctacggcaactcaaccaacaatgtgcctgcgtctagttcaaccgcaaccgccagcactcagacgcagcattcgggtatgtctccctcaccatccaactcttatgatactagtccacaaccttgcactaccaatcagaatgggcgtgagaacaacgaaagactctctacctctaacggcaaaatgagccctactcggtaccatgcaaactcgatgggccagaggtcttattctttcgaagcatctgaggaagacctggatgtggatgataaggtggaagagctgatgcgccgggacagtagcgtgatcaaggaggaaatcaaagcctttctcgccaaccgaagaattagtcaggccgtggtggctcaggtgactggcatcagccagtccagaattagccactggctccttcaacagggcagcgatctatcggagcagaagaagcgagcgttctacaggtggtaccaactggagaaaacaaaccccggtgcgactctgtctatgcggccggctccaataccgatcgaggaccccgagtggcgtcagactccacctccagtgagcgccacaagcggaacatttagactccggcgcgggtcgaggtttacttggcggaaagagtgcctggcagtgatggagagctattttaatgagaaccaatacccagacgaggctaagcgagaggaaattgctaacgcctgcaatgccgttatccagaagcccggcaagaagttgtcagatcttgagcgtgtaacctctttgaaggtgtacaactggttcgcaaacaggagaaaggaaattaaaagaagggccaacatcgaagctgccatactggaatcacatgggatcgatgtgcagtccccagggggccactctaatagcgatgatgtcgacggcaatgactacagcgaacaggacgattcaacatcccattccgatcatcaggacccaataagtctggccgttgaaatggcagctgtgaaccacacaatcctcgccctggcgcgccaaggcgccaatgaaatcaaaacggaggcgctcgacgatgactag

SEQ ID NO: 51142 - DNA, 1263 bp, Artificial Sequence
  derived and/or modified sequence
atgctgagcagcttccctgtggtgctgctggagaccatgagccactacacagatgagccccgcttcaccatcgagcagattgacctgctgcagaggctgcggaggacaggcatgaccaagcatgagatcctgcacgccctggagaccctggaccggctggaccaggagcacagcgacaagtttggaagaagaagcagctatggaggcagcagctatggcaacagcaccaacaacgtgcctgccagcagcagcacagccacagccagcacccagacccagcacagcggcatgagccccagccccagcaacagctatgacaccagcccccagccctgcaccaccaaccagaatggccgggagaacaatgaaaggctgagcaccagcaatggcaagatgagccccacccgctaccacgccaacagcatgggccagaggagctacagctttgaggccagcgaggaggacctggatgtggatgacaaggtggaggagctgatgagaagagacagcagcgtcatcaaggaggagatcaaggccttcctggccaacagacgcatcagccaggccgtggtggcccaggtgacaggcatcagccagagccgcatcagccactggctgctgcagcagggcagtgacctgtctgagcagaagaagagggccttctaccgctggtaccagctggagaagaccaaccctggggccaccctgtccatgaggcctgcccccatccccatcgaggaccctgagtggaggcagaccccacctcctgtgtctgccaccagcggcaccttccggctgcggcggggcagccgcttcacctggaggaaagaatgtctggccgtgatggagagctacttcaatgaaaaccagtacccagatgaggccaagcgggaggagatcgccaatgcctgcaatgctgtgatccagaagccaggcaagaagctgagtgacctggagcgggtgaccagcctgaaggtgtacaactggtttgccaacagaaggaaggagatcaagagaagagccaacattgaagctgccatcctggagagccatggaattgatgtgcagagccctgggggccacagcaacagtgatgatgtggatggaaatgactacagcgagcaggatgacagcaccagccacagcgaccaccaggaccccatcagcctggccgtggagatggctgctgtgaaccacaccatcctggccctggcccggcagggcgccaatgagatcaagacagaggccctggatgatgactag

SEQ ID NO: 51143 - DNA, 1263 bp, Artificial Sequence
  derived and/or modified sequence
atgctgagcagcttccccgtggtgctgctggagaccatgagccactacacggatgaaccccgattcaccatagagcagattgatctgctgcagcgactgagaagaactggtatgaccaagcatgaaatcctgcacgcgctggaaacactggaccggctggaccaggaacattctgataagtttggtcggcgcagctcttacgggggctccagttacgggaactccactaataatgttcccgcttccagcagcaccgcaacagcatctacgcaaacacaacattctggcatgagtccaagcccttccaactcatacgatactagcccacagccatgcactactaaccaaaatggtagggaaaataacgagcgtttatctacctcgaacggcaagatgtcacccacgcggtatcacgccaactctatgggtcagagaagttactcatttgaagcaagtgaggaggatcttgatgtagatgacaaagttgaggagctgatgagacgagactcgtcagttatcaaggaagaaatcaaagcattcttggctaatcgccgtatttcgcaggcagtggtcgctcaagtcacagggatcagtcagtcgaggatatcccactggctcctgcagcaggggagtgacctgagcgaacaaaaaaaacgtgcattctatcggtggtaccaactggagaagactaatccgggtgccacattatccatgcgccctgctcccattcccatagaggatccagaatggcggcagactcccccacctgtgagtgcaacctctgggactttcaggcttcggagaggtagtagatttacatggcggaaggaatgcttggcggtgatggaatcatatttcaacgagaatcagtaccctgacgaggcaaagcgcgaggagattgccaacgcatgtaatgctgtgattcagaagccgggtaaaaaactgagcgacctggagagggtcaccagtctaaaggtatataactggttcgccaacaggaggaaagagattaagaggagggccaatattgaagccgccatccttgagagccatggtatcgacgttcagagcccaggaggccactccaactccgacgatgtcgatggaaacgactattctgaacaggatgattctacatctcactccgaccaccaggaccctattagcctggccgtggaaatggctgccgtgaaccacaccatacttgccctcgcccggcagggcgctaacgagataaagacagaagctttggacgatgactag

SEQ ID NO: 51144 - DNA, 1263 bp, Artificial Sequence
  derived and/or modified sequence
atgctgagcagcttccccgtggtgctgctggagaccatgagccactacaccgatgaaccccggtttactatcgagcagattgacctgctccagcgactgcggagaacgggcatgacaaagcacgagatcctgcacgcgcttgagacactggaccgtcttgatcaggaacactctgataaattcggtcgacggtcatcttatggaggaagttcatacggcaacagcacaaataatgtgcccgccagcagttctactgctacagcatctacccagacccagcatagcggcatgagcccaagtccttccaactcctacgacacctcacctcagccttgtacgacaaatcagaatggcagagagaacaatgagaggttgagtaccagtaatggcaagatgagtccaacaagataccacgccaactcaatggggcagcgctcctacagctttgaggcctcagaagaggacctggacgttgacgacaaggtggaggagctcatgcggcgcgattcttccgtgataaaagaggaaattaaagcttttctggcaaacagacgtatttcacaggcagtggtggcccaagtgacagggatctctcagtctagaatctcacattggctactccagcagggcagtgacctgtctgaacaaaaaaagcgggcattctacaggtggtaccaactggagaagacaaatccaggagcaactcttagcatgagaccagctcccattcccatagaggaccccgaatggcgccagactccaccccccgttagcgcaacctccggcaccttccgcctgagacgaggctcaagatttacctggcgcaaggaatgtcttgctgtcatggaatcctatttcaatgagaatcagtaccccgacgaagccaagagagaggagatagcgaatgcttgtaacgcagtcatccagaaaccagggaagaagctgagcgatcttgagagggtaacatctttaaaggtttataattggtttgcaaatcggaggaaagagatcaagcgccgcgcaaacatcgaggccgcgatcttggaatctcatggtatcgacgtccagagcccagggggacatagcaatagtgacgacgtcgatggaaacgattactctgagcaggatgattccacttcgcatagtgatcaccaggacccaatttcccttgcagtggagatggcagccgtcaatcacacgatcctggcgctggctcggcagggcgcgaacgagatcaaaacagaggctttagacgatgactag

SEQ ID NO: 51145 - DNA, 1263 bp, Artificial Sequence
  derived and/or modified sequence
atgctcagttcatttccagtggtcctcttggagactatgagccactacaccgatgagcctcggtttactatcgagcagatcgacctcttacaacgtctacgtcgtactggcatgacgaaacacgaaatcttgcacgctctcgagacacttgacaggctcgaccaggagcactctgacaagttcggacgcaggtcgagctatgggggttcctcatacggtaatagcacgaataacgtccccgcatcaagttcaactgcgaccgcaagcacccagacccagcacagcgggatgagcccgtcccctagtaattcttacgatacttcccctcagccttgtactacaaaccagaatggtagagagaacaatgaacgcttatccacgagcaacggtaaaatgtctcccactagataccatgccaatagtatgggacagaggtcctattcgtttgaggccagcgaagaggatctggatgtggatgacaaggtggaggaactgatgcgccgagacagtagcgtgattaaagaagagattaaagccttcctagcaaataggcggatctctcaggccgtggttgcacaagttaccgggatttctcaatcacggatatcacactggcttctacagcagggatctgatctctctgaacaaaaaaagagagcattttatagatggtaccagctcgaaaagaccaaccccggagccactctctccatgagacccgcacctattcccatcgaggaccctgagtggaggcaaacaccccctcccgtcagcgcgacgtccgggacattcagattacgcagagggagccgttttacttggcgcaaagagtgtctggcagtgatggagtcctactttaatgagaaccaatacccagatgaggctaagcgggaggagattgccaatgcctgcaacgccgtgatacagaagcccggaaaaaagctgtccgacttagagagggtcacatcccttaaggtttataattggttcgccaaccgcaggaaagaaatcaagagaagagcaaacatcgaagctgccatcctcgagtcccatggaattgatgtccagagccccggaggccattcaaatagtgacgacgtcgacggaaatgactactctgaacaggatgactctacaagccactctgatcaccaggatccgatcagccttgcggtggagatggccgctgtaaatcacaccatcctggccctcgctcgccagggtgccaacgagatcaaaacagaagcattggatgacgactag

SEQ ID NO: 51146 - DNA, 1263 bp, Artificial Sequence
  derived and/or modified sequence
atgctctcaagtttccctgttgtgctcctcgaaacaatgagtcactacacagatgagccacgctttaccattgagcagattgacttgcttcagcgcctgaggcgcaccggtatgactaagcacgagatactgcacgctctcgagacgctggatcggcttgatcaggagcacagcgacaaattcggcagacgctctagttacggaggcagctcttacggtaattctactaacaatgtgcccgcatctagttcgacagctactgcatccacccagactcaacacagcggcatgagtcctagtccctcaaattcatacgatactagccctcagccttgcactacaaatcagaatggcagggaaaataacgaaaggctgtcgacaagtaatggcaagatgtctcccacccggtatcatgctaactctatgggtcagcgtagttacagtttcgaggcgagtgaagaagatttagacgtggacgataaagtcgaggagctgatgcgccgtgactccagcgttattaaagaggaaatcaaagcctttcttgccaatagacgcattagccaagccgttgtggcccaggtgaccgggatatcacagagccgcatttcacactggctgttacagcagggttccgatctgagcgaacagaagaagagagccttttaccgctggtatcagctagagaaaactaatccaggcgcaacattatctatgaggcctgcccctatccccatagaggacccggagtggcgccagaccccaccccctgtgagcgcgaccagcggcacttttcgattgaggcggggttctcgcttcacatggcgtaaagagtgcctggccgttatggaaagctattttaatgagaaccagtacccagatgaggctaagagagaggagatcgcaaatgcgtgtaacgcagttatacaaaagccaggcaaaaagctaagcgatctggaacgcgtcacttccctgaaagtctacaactggtttgcgaaccggaggaaagagattaaaaggcgcgcaaatatcgaggcagccatcctagagtctcacggcattgacgttcagtcacctggtggacacagtaatagcgatgatgttgatggaaacgactacagtgagcaggacgatagtacatcccactccgatcatcaggaccccatctccctcgcagtggaaatggcagccgtcaatcacaccattcttgccctcgcgaggcagggcgctaacgagatcaagaccgaagcgttggatgatgactag

SEQ ID NO: 51147 - DNA, 3184 bp, Artificial Sequence
  derived and/or modified sequence
tgttgatatcaatatggcggttgtcagccagacaaagacagtcagtctgatgtgattgagacaagggaggtttttcagggggagactgggagataggggcctcccctcccccttctcctcttcctgcgccggcctcaacccctccccagtcccctcccgacgggcgccccacgcggaagacacccctccccctcccgccttccctcctccctatctcagcccttcgtactgggacgttggggagggggctgtgccgggcggagagaactcagcgaggattctgagaatggtagataacgcagatcatctctggaaaggatattgatccgcctcatgtaaagtatgcttagttcctttccagtggttttgctggaaaccatgtctcattatacagatgaacccagatttaccatagagcagatagatctgcttcagcgacttcggcgtactggaatgactaaacatgaaattctccatgccttggaaactttggaccgtcttgatcaagagcatagtgacaagtttggaagaaggtccagctatggaggaagttcatatgggaatagtactaacaatgtcccagcatcttcctctacagctacagcttccacacagacgcagcattcgggaatgtccccgtcacctagcaacagttatgatacttccccacagccttgcactaccaatcaaaatgggagggagaataatgagcgattatctacatccaatggaaagatgtcaccaactcgctaccatgcaaacagcatgggtcagaggtcatacagttttgaagcctcagaagaggacctagatgtagatgataaagtggaagaattaatgaggagggacagcagtgtgataaaagaggaaatcaaagcctttcttgccaatcggaggatttcccaagcagttgttgcacaggtaacaggtatcagtcagagccggatctctcattggctgttgcagcagggatcagacctgagtgaacagaagaaaagagcattttaccgatggtatcaacttgagaagacaaaccctggcgctacactaagtatgagaccagcccccattccaatagaggaccctgaatggagacaaacgcctcccccagtctctgccacatctggtactttccgactgcgacgagggagtcgatttacctggagaaaggagtgcctggctgttatggaaagttacttcaatgagaatcaatacccagatgaagcaaagagggaagaaattgcaaacgcttgcaatgcagttatacagaagccaggcaaaaagctgtcagatctggaaagagttacctccctgaaagtatataattggtttgctaacagaaggaaggagatcaagaggagagccaatattgaagcagcaatcctggagagtcatgggatagatgtgcagagtccaggaggccactcaaacagtgatgatgtcgacgggaatgactactctgagcaggatgacagtacgagccatagtgaccaccaagaccccatctcattagctgtggaaatggcagcagtcaaccacactatcttggcattggcccgacaaggagccaacgaaatcaagacagaggccctggatgatgactgatcagggaggttaaacatgacaagttaacttagtttagacgtagcaccttagcagactttcctcggtccttaacatgtgttcttacagtataacttgcagtttcttgtatgtcaggtagctgttagggtcttgttctgtgaagatggcatggtgccctcagcctttgcatatactctctcagtattaactcccagtaaataataaccaaccaaccaaccaaacttccctctcccagcccccgaggctagaaaatcttgctgctccgtcttagcattccaagaaagtgcttccaggtatttagatagccctcagttctcaaatattagactacgtgtaaaatcttgggtacctttagattcttgtaacactagtctgtactcccttttccttccccaagactgataggatgcaagctgaggtcgtggcacaggaatgacagacaccatttggggagtatccacagagtcaaaggaacactagaatccccacctcagcgtgaggataattgatttccagctgcaataagccgtgcctcattatagccacactgtggctagattatacttctttgggtgctgtgctaagaatgtcaatggaaaaagccgatctcagattttgtttgaagttaacatgcctgacacagacatcctttcctctcacaagctgtgtgacttagtagataaaatactgccttctgcctttgggaccatgattaaaaacaaagacaaaaaccaaaagtcattaaaaaaaaaaaaaaaaaaaacccagcttgagagcattggaaaaaaaaaatatgagctgaatgtctaatggatgctaagtccagttttcagaaccactgtacattccacggcacagttagcagtgcctgcctggaaaagttttggaggtcatcgtggaagttgctttgcctcctgtcagtgtcccctttccctgctaccaaaaaagtctttcaaggatggagctaaggtcaaaaatgagtgaaaaaacttgcagtgtttgtatccattaaacggaagccccctcactctgagaggtcactagaggacttcatagtggggttgtgctgcttatcacagatgcagacacttgcccagataggagcagagaaaagcaggggacgtttcctactcacattgtggctgtatgagaacacgatgggactgctttgctgttctctttactctgtccttggagaggtgtgaaaagctgtattgctacaggcaatttatttaataattggaagccatattgataatggatgtggtaatatttgtaaagtttaatctactttaagcggcagtaactaatggaatttttttccttgatcacatatgtagcacttttgttactttttaaagatatttatatttgataaatctttttttcattttgagaactcaaaataccaaacagtgaacttgcattctaaagtcaccctgtgatcaccttgtcatctagtagcaaaatgatgaactattcatgcatcaaagaaaattacatctgctggccttgtatgaaaatgatctcttggcatcccgattaaatgacacactgtcactgtgggtaagaggaaaga

SEQ ID NO: 51148 - DNA, 4082 bp, Artificial Sequence
  derived and/or modified sequence
aatatggcggttgtcagccagacaaagacagtcagtctgatgtgattgagacaagggaggtttttcagggggagactgggagataggggcctcccctcccccttctcctcttcctgcgccggcctcaacccctccccagtcccctcccgacgggcgccccacgcggaagacacccctccccctcccgccttccctcctccctatctcagcccttcgtactgggacgttggggagggggctgtgccgggcggagagaactcagcgaggattctgaggtgagtcgagcggttttgaagccggactacctcaagtctctttcctcacttctttctcttcacttaaaacaatttttttggaggggttttggggaggaagtgagcggacgctggggatgggtctcgtaagcggccggattgagaggagggaggaagcagggggcttccgagtgggtgacccagacgcgggctgtggggtggggcagttcgtggggtccggtcctggaaaggcgtcgactgccccccaactcttctggtttcctctacgatgagcggaaggtttgaatcctggaggtggggtctccggtgtggagttctggaaactgtgaggtgatttgcagctggtggaatggaacagtgaagaagcattggaatggtagataacgcagatcatctctggaaaggatattgatccgcctcatgtaaagtatgcttagttcctttccagtggttttgctggaaaccatgtctcattatacagatgaacccagatttaccatagagcagatagatctgcttcagcgacttcggcgtactggaatgactaaacatgaaattctccatgccttggaaactttggaccgtcttgatcaagagcatagtgacaagtttggaagaaggtccagctatggaggaagttcatatgggaatagtactaacaatgtcccagcatcttcctctacagctacagcttccacacagacgcagcattcgggaatgtccccgtcacctagcaacagttatgatacttccccacagccttgcactaccaatcaaaatgggagggagaataatgagcgattatctacatccaatggaaagatgtcaccaactcgctaccatgcaaacagcatgggtcagaggtcatacagttttgaagcctcagaagaggacctagatgtagatgataaagtggaagaattaatgaggagggacagcagtgtgataaaagaggaaatcaaagcctttcttgccaatcggaggatttcccaagcagttgttgcacaggtaacaggtatcagtcagagccggatctctcattggctgttgcagcagggatcagacctgagtgaacagaagaaaagagcattttaccgatggtatcaacttgagaagacaaaccctggcgctacactaagtatgagaccagcccccattccaatagaggaccctgaatggagacaaacgcctcccccagtctctgccacatctggtactttccgactgcgacgagggagtcgatttacctggagaaaggagtgcctggctgttatggaaagttacttcaatgagaatcaatacccagatgaagcaaagagggaagaaattgcaaacgcttgcaatgcagttatacagaagccaggcaaaaagctgtcagatctggaaagagttacctccctgaaagtatataattggtttgctaacagaaggaaggagatcaagaggagagccaatattgaagcagcaatcctggagagtcatgggatagatgtgcagagtccaggaggccactcaaacagtgatgatgtcgacgggaatgactactctgagcaggatgacagtacgagccatagtgaccaccaagaccccatctcattagctgtggaaatggcagcagtcaaccacactatcttggcattggcccgacaaggagccaacgaaatcaagacagaggccctggatgatgactgatcagggaggttaaacatgacaagttaacttagtttagacgtagcaccttagcagactttcctcggtccttaacatgtgttcttacagtataacttgcagtttcttgtatgtcaggtagctgttagggtcttgttctgtgaagatggcatggtgccctcagcctttgcatatactctctcagtattaactcccagtaaataataaccaaccaaccaaccaaacttccctctcccagcccccgaggctagaaaatcttgctgctccgtcttagcattccaagaaagtgcttccaggtatttagatagccctcagttctcaaatattagactacgtgtaaaatcttgggtacctttagattcttgtaacactagtctgtactcccttttccttccccaagactgataggatgcaagctgaggtcgtggcacaggaatgacagacaccatttggggagtatccacagagtcaaaggaacactagaatccccacctcagcgtgaggataattgatttccagctgcaataagccgtgcctcattatagccacactgtggctagattatacttctttgggtgctgtgctaagaatgtcaatggaaaaagccgatctcagattttgtttgaagttaacatgcctgacacagacatcctttcctctcacaagctgtgtgacttagtagataaaatactgccttctgcctttgggaccatgattaaaaacaaagacaaaaaccaaaagtcattaaaaaaaaaaaaaaaaaaaacccagcttgagagcattggaaaaaaaaaatatgagctgaatgtctaatggatgctaagtccagttttcagaaccactgtacattccacggcacagttagcagtgcctgcctggaaaagttttggaggtcatcgtggaagttgctttgcctcctgtcagtgtcccctttccctgctaccaaaaaagtctttcaaggatggagctaaggtcaaaaatgagtgaaaaaacttgcagtgtttgtatccattaaacggaagccccctcactctgagaggtcactagaggacttcatagtggggttgtgctgcttatcacagatgcagacacttgcccagataggagcagagaaaagcaggggacgtttcctactcacattgtggctgtatgagaacacgatgggactgctttgctgttctctttactctgtccttggagaggtgtgaaaagctgtattgctacaggcaatttatttaataattggaagccatattgataatggatgtggtaatatttgtaaagtttaatctactttaagcggcagtaactaatggaatttttttccttgatcacatatgtagcacttttgttactttttaaagatatttatatttgataaatctttttttcattttgagaactcaaaataccaaacagtgaacttgcattctaaagtcaccctgtgatcaccttgtcatctagtagcaaaatgatgaactattcatgcatcaaagaaaattacatctgctggccttgtatgaaaatgatctcttggcatcccgattaaatgacacactgtcactgtgggtaagaggaaagagccttcaatgtagcagcacagggtgcgcctgaaagaggcacaactgctgtggattttctgcctcgctccatctctcctatgtataatgaagccttgtttaaaggggcatgtggggctggatgttaagcacggcttctttttgtccgttacctgaaaacaatttctaagataaaaggaaggtgccatttccttacctcttcacccatcctcctccaccaaatgtattcaacttaaaactgtgagagagagagactgaatgaccttcctcagttttccctttctcattcaggagatactgaatatccgccagtttgtagttggtttccttccacttaaggcacacgctgactgcatcatttccttatctgttaatcctgcttatgtgagtgtgaggaaagtctttgagagggcatgaaagtgccaccttatatatgtctgtgactttaaagagctatatgcagggcctggtcccacttttgtccatggatttcagggggaaaaaatatatgtacttttttcagcttccaagcattgaa

SEQ ID NO: 51149 - protein, 460 aa, Artificial Sequence
  derived and/or modified sequence
MEICDIINETEEGPKDALRAVKKRIVGNKNFHEVMLALTVLETCVKNCGHRFHVLVASQDFVESVLVRTILPKNNPPTIVHDKVLNLIQSWADAFRSSPDLTGVVTIYEDLRRKGLEFPMTDLDMLSPIHTPQRTVFNSETQSGQDSVGTDSSQQEDSGQHAAPLPAPPILSGDTPIAPTPEQIGKLRSELEMVSGNVRVMSEMLTELVPTQAEPADLELLQELNRTCRAMQQRVLELIPQIANEQLTEELLIVNDNLNNVFLRHERFERFRTGQTTKAPSEAEPAADLIDMGPDPAATGNLSSQLAGMNLGSSSVRAGLQSLEASGRLEDEFDMFALTRGSSLADQRKEVKYEAPQATDGLAGALDARQQSTGAIPVTQACLMEDIEQWLSTDVGNDAEEPKGVTSEGKFDKFLEERAKAADRLPNLSSPSAEGPPGPPSGPAPRKKTQEKDDDMLFAL

SEQ ID NO: 51150 - DNA, 1383 bp, Artificial Sequence
  derived and/or modified sequence
atggagatctgcgacatcatcaacgagaccgaggagggccccaaggacgccctgagagccgtgaagaagagaatcgtgggcaacaagaacttccacgaggtgatgctggccctgaccgtgctggagacctgcgtgaagaactgcggccacagattccacgtgctggtggccagccaggacttcgtggagagcgtgctggtgagaaccatcctgcccaagaacaacccccccaccatcgtgcacgacaaggtgctgaacctgatccagagctgggccgacgccttcagaagcagccccgacctgaccggcgtggtgaccatctacgaggacctgagaagaaagggcctggagttccccatgaccgacctggacatgctgagccccatccacaccccccagagaaccgtgttcaacagcgagacccagagcggccaggacagcgtgggcaccgacagcagccagcaggaggacagcggccagcacgccgcccccctgcccgccccccccatcctgagcggcgacacccccatcgcccccacccccgagcagatcggcaagctgagaagcgagctggagatggtgagcggcaacgtgagagtgatgagcgagatgctgaccgagctggtgcccacccaggccgagcccgccgacctggagctgctgcaggagctgaacagaacctgcagagccatgcagcagagagtgctggagctgatcccccagatcgccaacgagcagctgaccgaggagctgctgatcgtgaacgacaacctgaacaacgtgttcctgagacacgagagattcgagagattcagaaccggccagaccaccaaggcccccagcgaggccgagcccgccgccgacctgatcgacatgggccccgaccccgccgccaccggcaacctgagcagccagctggccggcatgaacctgggcagcagcagcgtgagagccggcctgcagagcctggaggccagcggcagactggaggacgagttcgacatgttcgccctgaccagaggcagcagcctggccgaccagagaaaggaggtgaagtacgaggccccccaggccaccgacggcctggccggcgccctggacgccagacagcagagcaccggcgccatccccgtgacccaggcctgcctgatggaggacatcgagcagtggctgagcaccgacgtgggcaacgacgccgaggagcccaagggcgtgaccagcgagggcaagttcgacaagttcctggaggagagagccaaggccgccgacagactgcccaacctgagcagccccagcgccgagggcccccccggcccccccagcggccccgcccccagaaagaagacccaggagaaggacgacgacatgctgttcgccctgtag

SEQ ID NO: 51151 - DNA, 1383 bp, Artificial Sequence
  derived and/or modified sequence
atggaaatatgtgacattattaacgaaaccgaggagggtccgaaagatgcccttagagccgtgaagaagcggattgtgggcaataaaaattttcatgaagttatgctagcactcacagttctggagacctgtgtgaaaaactgtggtcaccgcttccacgtgctagtcgcttcgcaggactttgttgagtccgtgctggtgcgaaccattctaccgaaaaacaacccacctacaatcgtgcatgacaaggtgctgaacctgatacagtcatgggcagacgccttcaggtccagccctgacctgaccggagtggtgactatctatgaggacctgaggcgaaaaggcctggagttcccgatgaccgaccttgacatgctgagccctatccatactccgcaaaggaccgtgtttaactctgagacacagtctgggcaggactcggtgggaactgattcctcccaacaggaagacagcggtcagcatgcggccccacttccagctccaccaatactgtccggagataccccaattgcgccaacgccagaacaaatcggtaaactccgctcagaattggaaatggtgagtggtaacgtgcgtgtgatgagtgagatgctcacggagcttgtgccgactcaagccgagcccgccgatctggagctcctgcaggagctgaatcggacttgccgagccatgcagcagcgcgtgctagaactgatcccccagatcgccaatgagcaactcacagaggagctgctgatcgtgaacgacaacctaaacaacgtgttcttgagacacgaacgcttcgagcgattccgcaccgggcagacaactaaggcgccgagcgaagccgaacccgccgcggacctgatcgacatgggacccgaccctgctgccaccgggaacctcagcagccagctcgcggggatgaatttgggcagctcaagtgtccgggccggactccagtctctcgaagcaagcggcaggcttgaagatgagttcgacatgttcgccttaacacgtgggtccagtctggccgaccaaaggaaggaggttaaatacgaagcccctcaggctactgatgggctggctggagctcttgacgcaagacagcaatcgacaggcgccatccccgttacgcaggcttgccttatggaggatattgagcaatggcttagtacagacgtgggcaatgatgctgaagagcctaaaggcgtaacaagtgaggggaagttcgacaaatttctggaagagcgtgctaaagcggccgatcgtctgcccaatttgtcttctccttcggctgaaggacccccaggaccaccctccggaccagccccgaggaagaagactcaagaaaaagacgacgatatgttgttcgcgctgtag

SEQ ID NO: 51152 - DNA, 1383 bp, Artificial Sequence
  derived and/or modified sequence
atggagatctgtgacatcatcaatgaaacagaggagggccccaaggatgccctgcgggctgtgaagaagagaattgtgggcaacaagaacttccacgaggtgatgctggccctgactgtgctggagacctgtgtgaagaactgtggccaccgcttccacgtgctggtggccagccaggactttgtggagagcgtgctggtgaggaccatcctgcccaagaacaacccccccaccatcgtgcatgacaaggtgctgaacctgatccagagctgggcagatgccttccgcagcagcccagacctgactggagtggtgaccatctatgaggacctgcggaggaagggcctggagttccccatgacagacctggacatgctgagccccatccacaccccccagaggacagtgttcaacagcgagacccagagcggccaggacagcgtgggcacagacagcagccagcaggaggacagcggccagcacgccgcccccctgcctgccccacccatcctgagcggggacacccccatcgcccccaccccagagcagatcggcaagctgcggtctgagctggagatggtgtctggaaatgtgcgggtgatgtctgagatgctgacagagctggtgcccacccaggccgagcctgctgacctggagctgctgcaggagctgaacagaacctgccgggccatgcagcagagggtgctggagctgatcccccagatcgccaatgagcagctgacagaggagctgctgattgtgaatgacaacctgaacaacgtgttcctgcggcatgaaagatttgagcgcttcagaacaggccagaccaccaaggcccccagcgaggccgagcctgctgctgacctgattgacatgggccctgaccctgctgccactggaaacctgagcagccagctggccggcatgaacctgggcagcagctctgtgcgggccggcctgcagagcctggaggccagcggccgcctggaggatgaatttgacatgtttgccctgacccggggcagcagcctggccgaccagaggaaggaggtgaagtatgaggccccccaggccacagatggcctggccggggccctggatgcccggcagcagagcactggagccatccctgtgacccaggcctgcctgatggaggacatcgagcagtggctgagcacagatgtgggcaatgatgctgaggagcccaagggcgtgaccagcgagggcaagtttgacaagttcctggaggagcgggccaaggctgctgaccggctgcccaacctgagcagccccagcgctgagggccccccaggccccccatctggccctgcccccaggaagaagacccaggagaaggatgatgacatgctgtttgccctgtag

SEQ ID NO: 51153 - DNA, 1383 bp, Artificial Sequence
  derived and/or modified sequence
atggagatctgcgacatcatcaacgagaccgaggagggccccaaggatgcactgcgggccgtcaagaaacgtattgttgggaacaaaaacttccacgaggtgatgctagccctcacagtgctggagacctgcgttaagaactgcgggcacaggttccatgtgcttgtggcatcccaagatttcgtggagtccgtgctggtcagaactatcttaccaaagaacaatccgccaacaatagtgcacgacaaggtcttgaacctgatccagagttgggcagacgccttcaggagcagtcctgacctcactggagtcgtgaccatttatgaggacctgaggagaaagggacttgagttccccatgacagacctggacatgttgtcacccatccacacacctcagcgcacagtgtttaattccgagacccagtcaggccaggactctgtcggtaccgactcttcacagcaggaagattctggccagcacgcagctccacttccagccccaccaatactgtcaggggataccccaatcgcgccaactccggaacagataggcaagctgagatctgaactcgaaatggtgtcaggaaacgtgagagtgatgagcgagatgttgaccgaactcgtaccaacccaggcagagcccgcagacctggagctcctgcaggaactgaaccgcacgtgccgcgcaatgcagcagcgtgtcctggagctgattccccagatcgctaatgaacaactgacagaggaattgctgatagtaaacgataacctgaacaacgtctttctgcggcacgaacgttttgaaagattcaggaccgggcagaccactaaggcaccctctgaggccgagccagctgctgacctgatagacatgggtcccgatcccgccgccacaggaaacctgagcagtcagctggctgggatgaatttgggctcgtcatcagttcgggctggcctgcaatcactcgaagccagtggccgccttgaggatgaattcgatatgtttgccttgacacgagggtcctccctggccgaccagaggaaagaagtcaagtacgaggccccacaggctactgacggcctcgcaggcgccctggatgccagacagcagtccactggggctatcccggttactcaggcctgcctgatggaagacatcgagcagtggctctcaacagatgtcgggaacgacgccgaggagcccaaaggggtgacatctgagggcaagttcgataagttcctcgaggagcgtgccaaggcagccgaccgcttgcccaatctgtcctccccctctgcagaagggccaccaggccctcccagtggccccgcgccgcggaagaagactcaggagaaagacgatgatatgctgttcgccctgtag

SEQ ID NO: 51154 - DNA, 1383 bp, Artificial Sequence
  derived and/or modified sequence
atggagatctgtgacattataaacgagaccgaagaagggccaaaagatgccctaagagccgtcaagaaacggattgtaggcaacaagaattttcatgaagtcatgctcgccttgacagttctcgaaacttgcgtgaaaaactgtggacacaggtttcatgttcttgtcgccagccaagattttgttgagagtgtgcttgttaggacgatacttccgaagaataatcctcccacgatcgtgcatgacaaggtgctcaatctgattcagtcttgggccgatgcctttcgaagctctccggacctgacgggcgtcgtgacaatctatgaggatctccgcaggaaaggccttgaatttcccatgacggatctggatatgctgtctcctattcacacacctcagcggaccgtgtttaactctgaaactcagagtggacaggactccgttggaacagattcctctcagcaagaggattccgggcagcacgctgccccactcccagcaccccctattctaagcggcgacacacccatcgcaccaacccccgagcagataggcaaactgcgatcagaactggagatggtgtctggcaatgtgagggtgatgtccgagatgttgacagaactggtgccaacccaggccgaacccgctgacctcgaactcctccaagaactcaataggacgtgtcgggctatgcaacaacgtgtactcgagttgattccccagatcgcgaacgaacagctgactgaggagctgcttatcgtgaacgacaatttaaacaacgtttttttaagacacgaacgtttcgagcggtttcggactggccagaccaccaaagccccttcagaagctgaaccagctgcagatttgatcgatatgggaccggatccagctgcaacaggaaatctcagctcccagcttgccggaatgaatctcggaagctccagtgtgagagccggattacagtccttggaggcctcaggacgactggaggacgaattcgatatgtttgctctgactaggggcagtagcctggcagaccagcgaaaagaagttaaatatgaggctccccaggccacggacgggctagccggagcactggatgcccgacagcagtcaaccggggctattccagtaacgcaggcctgtttaatggaggatatcgagcaatggctgtccactgacgttgggaacgatgccgaggagccaaagggtgtcacttctgaggggaaattcgacaagttcctggaggagcgggcaaaagccgctgaccgcttgcctaatctctcctccccctcggctgaaggccctccaggccctccaagcggcccagcccctcggaagaaaactcaggagaaggacgatgacatgctgttcgcactctag

SEQ ID NO: 51155 - protein, 229 aa, Artificial Sequence [sequence omitted]

SEQ ID NO: 51156 - protein, 447 aa, Artificial Sequence
  derived and/or modified sequence
MDFLLGNPFSSPVGQRIEKATDGSLQSEDWALNMEICDIINETEEGPKDALRAVKKRIVGNKNFHEVMLALTVLETCVKNCGHRFHVLVASQDFVESVLVRTILPKNNPPTIVHDKVLNLIQTVFNSETQSGQDSVGTDSSQQEDSGQHAAPLPAPPILSGDTPIAPTPEQIGKLRSELEMVSGNVRVMSEMLTELVPTQAEPADLELLQELNRTCRAMQQRVLELIPQIANEQLTEELLIVNDNLNNVFLRHERFERFRTGQTTKAPSEAEPAADLIDMGPDPAATGNLSSQLAGMNLGSSSVRAGLQSLEASGRLEDEFDMFALTRGSSLADQRKEVKYEAPQATDGLAGALDARQQSTGAIPVTQACLMEDIEQWLSTDVGNDAEEPKGVTSEEFDKFLEERAKAADRLPNLSSPSAEGPPGPPSGPAPRKKTQEKDDDMLFAL

SEQ ID NO: 51157 - DNA, 690 bp, Artificial Sequence
  derived and/or modified sequence
atgcagcagagagtgctggagctgatcccccagatcgccaacgagcagctgaccgaggagctgctgatcgtgaacgacaacctgaacaacgtgttcctgagacacgagagattcgagagattcagaaccggccagaccaccaaggcccccagcgaggccgagcccgccgccgacctgatcgacatgggccccgaccccgccgccaccggcaacctgagcagccagctggccggcatgaacctgggcagcagcagcgtgagagccggcctgcagagcctggaggccagcggcagactggaggacgagttcgacatgttcgccctgaccagaggcagcagcctggccgaccagagaaaggaggtgaagtacgaggccccccaggccaccgacggcctggccggcgccctggacgccagacagcagagcaccggcgccatccccgtgacccaggcctgcctgatggaggacatcgagcagtggctgagcaccgacgtgggcaacgacgccgaggagcccaagggcgtgaccagcgaggagttcgacaagttcctggaggagagagccaaggccgccgacagactgcccaacctgagcagccccagcgccgagggcccccccggcccccccagcggccccgcccccagaaagaagacccaggagaaggacgacgacatgctgttcgccctgtag

SEQ ID NO: 51158 - DNA, 1344 bp, Artificial Sequence
  derived and/or modified sequence
atggacttcctgctgggcaaccccttcagcagccccgtgggccagagaatcgagaaggccaccgacggcagcctgcagagcgaggactgggccctgaacatggagatctgcgacatcatcaacgagaccgaggagggccccaaggacgccctgagagccgtgaagaagagaatcgtgggcaacaagaacttccacgaggtgatgctggccctgaccgtgctggagacctgcgtgaagaactgcggccacagattccacgtgctggtggccagccaggacttcgtggagagcgtgctggtgagaaccatcctgcccaagaacaacccccccaccatcgtgcacgacaaggtgctgaacctgatccagaccgtgttcaacagcgagacccagagcggccaggacagcgtgggcaccgacagcagccagcaggaggacagcggccagcacgccgcccccctgcccgccccccccatcctgagcggcgacacccccatcgcccccacccccgagcagatcggcaagctgagaagcgagctggagatggtgagcggcaacgtgagagtgatgagcgagatgctgaccgagctggtgcccacccaggccgagcccgccgacctggagctgctgcaggagctgaacagaacctgcagagccatgcagcagagagtgctggagctgatcccccagatcgccaacgagcagctgaccgaggagctgctgatcgtgaacgacaacctgaacaacgtgttcctgagacacgagagattcgagagattcagaaccggccagaccaccaaggcccccagcgaggccgagcccgccgccgacctgatcgacatgggccccgaccccgccgccaccggcaacctgagcagccagctggccggcatgaacctgggcagcagcagcgtgagagccggcctgcagagcctggaggccagcggcagactggaggacgagttcgacatgttcgccctgaccagaggcagcagcctggccgaccagagaaaggaggtgaagtacgaggccccccaggccaccgacggcctggccggcgccctggacgccagacagcagagcaccggcgccatccccgtgacccaggcctgcctgatggaggacatcgagcagtggctgagcaccgacgtgggcaacgacgccgaggagcccaagggcgtgaccagcgaggagttcgacaagttcctggaggagagagccaaggccgccgacagactgcccaacctgagcagccccagcgccgagggcccccccggcccccccagcggccccgcccccagaaagaagacccaggagaaggacgacgacatgctgttcgccctgtag

SEQ ID NO: 51159 - DNA, 690 bp, Artificial Sequence
  derived and/or modified sequence
atgcagcagagggtcttagagctgatacctcagatagccaatgaacaactgaccgaagaattgctcatcgtcaacgacaaccttaataacgtctttcttagacacgagcggtttgagcgatttaggacgggccagactaccaaagcacccagcgaggccgaaccagccgctgacctcatcgatatgggaccagaccctgcggctactggcaacctttcttctcagcttgccggcatgaacttgggaagttcatccgttagggccggactccagagccttgaggcttcaggccggttagaggatgagtttgatatgtttgctctgaccagaggcagttcactggcggaccagcgcaaggaggttaagtatgaagcaccacaagccactgatgggctggccggggcattagatgctcgacagcaatcaacaggcgcaattcctgttacacaagcatgtctcatggaagacatagaacagtggctctccaccgacgtgggcaacgacgcagaggaacccaaaggtgtaacctccgaggagtttgacaaattcctcgaagaaagggcaaaggccgccgatcgcttgcccaatctctcttcgcctagcgccgagggccctccgggacccccttccgggcccgcgccacggaaaaagacccaggagaaagacgacgacatgctatttgccttgtag

SEQ ID NO: 51160 - DNA, 1344 bp, Artificial Sequence
  derived and/or modified sequence
atggattttttattagggaatcctttcagctcccctgtggggcaacggatagagaaagcaaccgacggcagtctacaaagtgaggattgggcgctgaatatggagatctgtgatatcatcaatgaaaccgaagagggaccgaaagatgcgttacgagccgtgaaaaaacgcatagttgggaacaagaactttcacgaggtgatgttggcgctcacagtactggaaacttgtgtaaagaattgtgggcacaggttccacgtgcttgtcgcttcccaggattttgtcgaatccgtcctggtgcgaactattctccccaagaataatcccccaacaatcgtacacgacaaagtcctgaatctgattcagacagtgtttaactcagagacccagagcggtcaagattctgtcggaacggactcgtcccagcaggaggactccgggcaacacgccgccccccttcctgcgcctcccatactgtccggagatacacccattgctccaactccggaacaaattgggaaattaaggagcgaactggaaatggtgtccggaaacgtccgggtgatgtccgagatgctgactgagcttgtgccaacccaggccgagcctgccgatctagaactcctgcaggaactgaatagaacctgccgtgcaatgcagcagcgcgtattggagctgattccacaaatcgctaacgagcaactgaccgaggaacttttgattgtgaatgacaatctcaacaatgtgttccttcggcatgaacgctttgagcggttcagaaccggacagaccacgaaagcgccatctgaagccgaacccgctgcggacctcatagacatggggcccgatccagcagctaccggtaacttatcttcccaattggccggcatgaatcttggctccagctcagttcgcgccggcctccaatcactggaagcttctgggcggctggaggacgagtttgacatgtttgcccttacaagaggctcctctctggcagaccaacggaaggaagttaagtacgaagctcctcaggccacagacggcctcgccggtgccctggacgccaggcagcagagtacgggggctattcctgtgacccaggcgtgtctcatggaagacatcgaacagtggttgtccactgacgttggaaacgatgctgaggaaccgaaaggggtgacaagcgaggaatttgacaagtttcttgaggagagagcaaaagccgccgaccgacttcccaacctgtccagtccttccgccgagggtcctccaggacccccttctggccctgcgcctagaaagaaaacccaggaaaaggacgatgacatgctgttcgctctctag

SEQ ID NO: 51161 - DNA, 690 bp, Artificial Sequence
  derived and/or modified sequence
atgcagcagagggtgctggagctgatcccccagatcgccaatgagcagctgacagaggagctgctgattgtgaatgacaacctgaacaacgtgttcctgcggcatgaaagatttgagcgcttcagaacaggccagaccaccaaggcccccagcgaggccgagcctgctgctgacctgattgacatgggccctgaccctgctgccactggaaacctgagcagccagctggccggcatgaacctgggcagcagctctgtgcgggccggcctgcagagcctggaggccagcggccgcctggaggatgaatttgacatgtttgccctgacccggggcagcagcctggccgaccagaggaaggaggtgaagtatgaggccccccaggccacagatggcctggccggggccctggatgcccggcagcagagcactggagccatccctgtgacccaggcctgcctgatggaggacatcgagcagtggctgagcacagatgtgggcaatgatgctgaggagcccaagggcgtgaccagcgaggagtttgacaagttcctggaggagcgggccaaggctgctgaccggctgcccaacctgagcagccccagcgctgagggccccccaggcccccccagcggccctgcccccaggaagaagacccaggagaaggatgatgacatgctgtttgccctgtag

SEQ ID NO: 51162 - DNA, 1344 bp, Artificial Sequence
  derived and/or modified sequence
atggacttcctgctgggcaaccccttcagcagccctgtgggccagagaattgagaaggccacagatggcagcctgcagagcgaggactgggccctgaacatggagatctgtgacatcatcaatgaaacagaggagggccccaaggatgccctgcgggctgtgaagaagagaattgtgggcaacaagaacttccacgaggtgatgctggccctgactgtgctggagacctgtgtgaagaactgtggccaccgcttccacgtgctggtggccagccaggactttgtggagagcgtgctggtgaggaccatcctgcccaagaacaacccccccaccatcgtgcatgacaaggtgctgaacctgatccagacagtgttcaacagcgagacccagagcggccaggacagcgtgggcacagacagcagccagcaggaggacagcggccagcacgccgcccccctgcctgccccacccatcctgagcggggacacccccatcgcccccaccccagagcagatcggcaagctgcggtctgagctggagatggtgtctggaaatgtgcgggtgatgtctgagatgctgacagagctggtgcccacccaggccgagcctgctgacctggagctgctgcaggagctgaacagaacctgccgggccatgcagcagagggtgctggagctgatcccccagatcgccaatgagcagctgacagaggagctgctgattgtgaatgacaacctgaacaacgtgttcctgcggcatgaaagatttgagcgcttcagaacaggccagaccaccaaggcccccagcgaggccgagcctgctgctgacctgattgacatgggccctgaccctgctgccactggaaacctgagcagccagctggccggcatgaacctgggcagcagctctgtgcgggccggcctgcagagcctggaggccagcggccgcctggaggatgaatttgacatgtttgccctgacccggggcagcagcctggccgaccagaggaaggaggtgaagtatgaggccccccaggccacagatggcctggccggggccctggatgcccggcagcagagcactggagccatccctgtgacccaggcctgcctgatggaggacatcgagcagtggctgagcacagatgtgggcaatgatgctgaggagcccaagggcgtgaccagcgaggagtttgacaagttcctggaggagcgggccaaggctgctgaccggctgcccaacctgagcagccccagcgctgagggccccccaggcccccccagcggccctgcccccaggaagaagacccaggagaaggatgatgacatgctgtttgccctgtag

SEQ ID NO: 51163 - DNA, 690 bp, Artificial Sequence
  derived and/or modified sequence
atgcagcagcgggtgctggagctgatcccccagatcgccaacgagcaactcactgaggagctcttgatcgtgaatgacaacttgaacaacgtgtttctgaggcatgagaggttcgagaggttcagaacaggacaaacgaccaaggcaccatctgaggccgagcccgctgctgatttgatcgatatgggcccggatcctgccgccaccggtaatttgagctctcagctggcggggatgaacctggggagctcctcagtgagagcgggccttcagtcccttgaagctagcggacgattggaggatgaatttgacatgtttgcattgacaagaggcagcagcctggccgaccaaaggaaagaggtcaaatatgaggcaccacaggctactgatggtctggcaggagccctggatgctcgccagcaatcaacaggtgccattcctgtaacccaagcctgtctgatggaggacatagaacagtggctttcgaccgacgtaggcaacgacgctgaagagcccaagggggtaacaagcgaggaattcgacaaattcctggaggagagggccaaggccgctgacaggctgcctaacctgtcaagcccaagcgcagagggaccgcctgggcccccttctggccctgccccaagaaaaaaaactcaggaaaaagacgatgacatgctgttcgctctgtag

SEQ ID NO: 51164 - DNA, 1344 bp, Artificial Sequence
  derived and/or modified sequence
atggacttcctgctgggcaaccccttcagcagccccgtgggccagcggatcgaaaaagccaccgacggctccttgcagtccgaggactgggcgttgaatatggaaatctgcgacatcatcaacgagacagaagagggccccaaagatgctctgcgagccgtgaaaaagaggattgtgggaaataaaaatttccatgaagtaatgcttgctctaacagtgctcgaaacttgtgtcaaaaactgtggacatcgcttccacgttctcgtggccagtcaggactttgtggagagtgtgctggtgaggaccattctgcctaagaacaaccccccaactattgtgcatgacaaggtgctgaatctgatccaaactgtgttcaattccgaaacccagtccggtcaggactcagttgggactgactcctctcagcaagaagactccgggcagcatgctgcccccctacctgccccacccattctgtctggcgatacacctattgcccctacacctgagcaaatcgggaaacttcgctccgagctcgagatggtctctgggaacgtgagggtgatgtccgagatgctcaccgagctggtgcccacccaggctgagccagccgacttggagctactgcaagagcttaatcggacgtgtcgcgccatgcagcagcgtgttcttgaactgattccacaaatagctaacgagcagttaaccgaagagctccttattgtgaatgataacttaaacaatgtatttctcaggcacgagcggttcgagaggtttcgcactggccagacgaccaaagcgcccagcgaagccgaacccgccgcagacctgattgatatgggccctgacccagccgctaccggcaatctgagctcccagctcgctggcatgaacttaggcagctccagcgtgcgagccggcctgcaatcgctcgaggcctcaggccgcctggaggacgaattcgatatgttcgcgctgacccgtggatcgtctttggccgatcagagaaaggaggtgaagtatgaggcccctcaggctacggacggcttggctggtgctctggacgccagacagcagtccaccggcgccattcccgtcactcaagcctgccttatggaggacatagagcagtggctgagtacagatgtgggcaatgatgccgaagagccaaagggcgttacgagcgaggaattcgacaagttcctggaggagagggcaaaggcagctgaccgattgccaaacctcagctctccatcagccgaagggccccccggacccccatcagggcctgcacccagaaaaaagacacaagagaaggacgacgatatgctctttgccttatag

SEQ ID NO: 51165 - DNA, 1893 bp, Artificial Sequence
  derived and/or modified sequence
agctgattcccggggttggtggcagcggcggtagcagcaatggactttctcctggggaacccgttcagctctccagtgggacagcgcatcgagaaagccacagatggctccctgcagagcgaggactgggccctcaacatggagatctgcgacatcatcaacgagacggaggaaggtcccaaagatgccctccgagcagtaaagaagagaatcgtggggaataagaacttccacgaggtgatgctggctctcacagtcttagaaacctgtgtcaagaactgcgggcaccgcttccacgtgctggtggccagccaggacttcgtggagagtgtgctggtgaggaccatgctgacggagctggtgcccacccaggccgagcccgcagacctggagctgctgcaggagctcaaccgcacgtgccgagccatgcagcagcgggtcctggagctcatccctcagatcgccaatgagcagctgacagaggagctgctcatcgtcaatgacaatctcaacaatgtgttcctgcgccatgaacggtttgaacggttccgaacaggccagaccaccaaggccccaagtgaggccgagccggcagctgacctgatcgacatgggccctgacccagcagccaccggcaacctctcatcccagctggcaggaatgaacctgggctccagcagtgtgagagctggcctgcagtctctggaggcctctggtcgactggaagatgagtttgacatgtttgcgctgacacggggcagctcactggctgaccaacggaaagaggtaaaatacgaagccccccaagcaacagacggcctggctggagccctggacgcccggcagcagagcactggcgcgatcccagtcacccaggcctgcctcatggaggacatcgagcagtggctgtccactgacgtgggtaatgatgcggaagagcctaagggggtcaccagcgaagaatttgacaaattcctggaagaacgggccaaagccgcggaccgattgcccaacctctccagcccctcagctgaggggcccccgggtcccccatctggcccagcgccccggaagaagacccaggagaaagatgatgacatgctgtttgccttatgagtgtggggtctggcaccctgcagcccaggtccccactgctctcacacccttaggctgggacctccctccctcctctggtgttaaggctgctttgggggtggcttgttacccccttttcctcctctttgaagacggagctgccccagctgtggctgggggtgtggaggcagtgggatgaactgggggacaggtctgcgctgcagtgggatctggctgctctgcctcctttcccaccccagctgaccatgagactttgctgagaagtggaggccccaggacaggctggctggctggctggctgcttgacccagtgtgactctccttcactgagtgataccctgctccgggcccatgccccaaggagcccttcagagcccacactgccagtcgaggcctggctggaggctggccacagtggaaattctgccgagcctcttgtcccttccctgctctgctgcatggggccccatggctttggctggccactgagggtagggtgtggaggtgtggaggccccctgaggagctgcggcggcccaggtacgaagctgcaactctgcgcgcagtgggcgagatctcatcagccccaggctgcaggtgaggcttcaggggatgctggggccccactgcccctccgctgccttgccctccatccttcctctgttccttctggccgggcaccacagcactggggctcacctcttggttgatcctcttgtactgggagaggtgccttttgtatccccaattaaaggtagaaaaccaccctgctagcagc

SEQ ID NO: 51166 - DNA, 690 bp, Artificial Sequence
  derived and/or modified sequence
atgcagcagcgcgtgctggagctgattccacaaatcgccaacgagcaactgacagaagaacttctgatcgtcaacgacaacctcaacaacgtgttcttgcggcacgaacgcttcgaaaggttccgcacaggacagaccaccaaagcgccatccgaggctgagccagccgcagatttaattgacatggggccagatccggctgccacaggcaacctgtcctcgcagctcgctggaatgaacctgggcagcagctcagtgcgcgctgggctgcagtccctggaagcttccggcaggctagaggacgagttcgatatgttcgcactgaccagggggtcgagcctcgcagatcagcgaaaggaagttaaatacgaggcacctcaggctacggatggactggctggagcccttgacgccaggcagcagtccactggcgcaatccccgtcacacaggcctgtctgatggaagacatcgaacagtggttatctactgatgtgggcaatgatgctgaagagcccaaaggggtgacttcagaggaattcgacaaattcttagaggaaagggcaaaagcagccgaccgtttacctaacttgtctagcccgtctgcagaaggcccaccaggtcccccatcaggacctgcacctcgcaagaaaacacaggaaaaggacgatgacatgctgtttgccctgtag

SEQ ID NO: 51167 - DNA, 2252 bp, Artificial Sequence
  derived and/or modified sequence
ttcgcggtgccaccgccccgcccacgcctcctcgccggcctccgagtgcgtcacgtgacgggtcggtggcgctggcggttgctgtcagctgattcccggggttggtggcagcggcggtagcagcaatggactttctcctggggaacccgttcagctctccagtgggacagcgcatcgagaaagccacagatggctccctgcagagcgaggactgggccctcaacatggagatctgcgacatcatcaacgagacggaggaaggtcccaaagatgccctccgagcagtaaagaagagaatcgtggggaataagaacttccacgaggtgatgctggctctcacagtcttagaaacctgtgtcaagaactgcgggcaccgcttccacgtgctggtggccagccaggacttcgtggagagtgtgctggtgaggaccatcctgcccaagaacaacccacccaccatcgtgcatgacaaagtgctcaacctcatccagaccgtgttcaactcagagacacaatcaggacaggattctgtgggcactgactccagccagcaagaggactctggccagcatgctgcccctctgcccgccccgcccatactctccggtgacacgcccatagcaccaaccccggaacagattgggaagctgcgcagtgagctggagatggtgagtgggaacgtgagggtgatgtcggagatgctgacggagctggtgcccacccaggccgagcccgcagacctggagctgctgcaggagctcaaccgcacgtgccgagccatgcagcagcgggtcctggagctcatccctcagatcgccaatgagcagctgacagaggagctgctcatcgtcaatgacaatctcaacaatgtgttcctgcgccatgaacggtttgaacggttccgaacaggccagaccaccaaggccccaagtgaggccgagccggcagctgacctgatcgacatgggccctgacccagcagccaccggcaacctctcatcccagctggcaggaatgaacctgggctccagcagtgtgagagctggcctgcagtctctggaggcctctggtcgactggaagatgagtttgacatgtttgcgctgacacggggcagctcactggctgaccaacggaaagaggtaaaatacgaagccccccaagcaacagacggcctggctggagccctggacgcccggcagcagagcactggcgcgatcccagtcacccaggcctgcctcatggaggacatcgagcagtggctgtccactgacgtgggtaatgatgcggaagagcctaagggggtcaccagcgaagaatttgacaaattcctggaagaacgggccaaagccgcggaccgattgcccaacctctccagcccctcagctgaggggcccccgggtcccccatctggcccagcgccccggaagaagacccaggagaaagatgatgacatgctgtttgccttatgagtgtggggtctggcaccctgcagcccaggtccccactgctctcacacccttaggctgggacctccctccctcctctggtgttaaggctgctttgggggtggcttgttacccccttttcctcctctttgaagacggagctgccccagctgtggctgggggtgtggaggcagtgggatgaactgggggacaggtctgcgctgcagtgggatctggctgctctgcctcctttcccaccccagctgaccatgagactttgctgagaagtggaggccccaggacaggctggctggctggctggctgcttgacccagtgtgactctccttcactgagtgataccctgctccgggcccatgccccaaggagcccttcagagcccacactgccagtcgaggcctggctggaggctggccacagtggaaattctgccgagcctcttgtcccttccctgctctgctgcatggggccccatggctttggctggccactgagggtagggtgtggaggtgtggaggccccctgaggagctgcggcggcccaggtacgaagctgcaactctgcgcgcagtgggcgagatctcatcagccccaggctgcaggtgaggcttcaggggatgctggggccccactgcccctccgctgccttgccctccatccttcctctgttccttctggccgggcaccacagcactggggctcacctcttggttgatcctcttgtactgggagaggtgccttttgtatccccaattaaaggtagaaaaccaccctgctagcagcattgtc

SEQ ID NO: 51168 - DNA, 1344 bp, Artificial Sequence
  derived and/or modified sequence
atggacttcctgctgggcaatccattttccagccctgtagggcagcgcattgagaaagccacagacggcagcctccaaagcgaagattgggcactcaacatggaaatctgcgacattatcaatgaaactgaggagggacccaaggatgccctccgcgctgttaaaaagcggatcgtaggtaacaaaaacttccacgaggtgatgctggccctcactgtgcttgagacatgcgtgaaaaattgcggccaccggttccatgtcctggtggcctcgcaggatttcgtcgaaagcgtactagtgaggacgatattgcccaagaataacccacctactattgtgcatgataaggtcttaaacttgatccagacagtgtttaacagcgaaacacaatctggacaggactccgtcgggactgactcaagccagcaggaagacagtggacagcatgcagcacctttgccggctccaccaatcctgtccggcgacacacctatcgctcccacaccagaacagatcgggaaactcagatcagaattagaaatggtctcgggcaacgtgagagtcatgtccgaaatgctgacagagctcgttcccactcaagctgagccagccgatctggaactgctccaggaactcaatagaacctgccgggcaatgcaacaaagagtcctcgagctgataccccaaattgccaatgaacaattaactgaagaactgctcattgtaaacgacaacttgaacaatgtcttcctccgccacgagaggtttgaaagatttaggaccgggcaaaccaccaaggctcctagcgaggccgagccagcagccgacctgatcgatatgggccctgacccggcagccaccggcaacctgagtagccagctggcaggcatgaatctcggctcttcgagtgtgcgggcagggctgcaatccctagaggcctctggtcggctggaggacgagtttgacatgtttgctctcacaaggggttcctcattggcagaccagagaaaagaggtcaagtatgaagctccacaggccactgacgggctcgctggagctttagatgcacggcagcagagcacaggtgccattcccgtcacacaggcttgcttgatggaggatattgaacagtggttatctacggatgtcggtaatgacgctgaggagccgaaaggcgtgaccagcgaggagttcgacaagttcctcgaggagagagccaaggctgccgatcgtctgccaaatctctcttctcccagcgctgaaggaccacccggaccaccctcaggtcctgccccacgcaagaagacgcaggagaaagacgacgacatgctgttcgcactgtag

SEQ ID NO: 51169 - DNA, 462 bp, Artificial Sequence
  derived and/or modified sequence
atgaagagcagcgacatcgaccaggacctgttcaccgacagctactgcaaggtgtgcagcgcccagctgatcagcgagagccagagagtggcccactacgagagcagaaagcacgccagcaaggtgagactgtactacatgctgcaccccagagacggcggctgccccgccaagagactgagaagcgagaacggcagcgacgccgacatggtggacaagaacaagtgctgcaccctgtgcaacatgagcttcaccagcgccgtggtggccgacagccactaccagggcaagatccacgccaagagactgaagctgctgctgggcgagaagacccccctgaagaccaccggcctgagaagaaactacagatgcaccatctgcagcgtgagcctgaacagcatcgagcagtaccacgcccacctgaagggcagcaagcaccagaccaacctgaagaacaagtag

SEQ ID NO: 51170 - DNA, 462 bp, Artificial Sequence
  derived and/or modified sequence
atgaagtcttctgacattgaccaggacttgttcaccgacagttattgcaaagtctgctcagctcagctgatatccgagagtcaaagggtggcccattacgagtcaaggaaacacgctagcaaggtccgactgtactacatgctgcacccacgcgacgggggatgcccggcaaagcgactgcggagtgaaaatggctcggacgccgatatggtggacaaaaacaagtgctgcacactgtgcaatatgagctttacctccgccgttgtggctgattctcactaccaaggcaaaatccacgcaaagaggctcaagcttctgcttggtgaaaaaacccccctcaagacaaccggcctgcgtcgcaattaccgatgcaccatctgctctgtttctctcaattcaattgagcaatatcacgcccatttaaaggggtctaagcatcagaccaatttaaaaaataagtag

SEQ ID NO: 51171 - DNA, 462 bp, Artificial Sequence
  derived and/or modified sequence
atgaagagcagtgacatcgaccaggacctcttcacagacagctactgcaaggtgtgcagcgcccagctgatcagcgagagccagagggtggcccactatgagagcaggaagcacgccagcaaggtgcggctgtactacatgctgcaccccagagatggcggctgcccagccaagaggctgcggagtgaaaatggaagtgatgctgacatggtggacaagaacaagtgctgcaccctgtgcaacatgtccttcaccagcgctgtggtggccgacagccactaccagggcaagatccacgccaagaggctgaagctgctgctgggggagaagacccccctgaagaccaccggcctgcggaggaactaccgctgcaccatctgcagcgtgtccctgaacagcattgagcagtaccacgcccacctgaagggcagcaagcaccagaccaacctgaagaacaagtag

SEQ ID NO: 51172 - DNA, 462 bp, Artificial Sequence
  derived and/or modified sequence
atgaagagcagcgacatcgaccaggacctgttcaccgacagctactgcaaagtttgcagcgcacagctcatctccgaatcacagagagtggcccattacgagagccgtaagcacgcaagcaaggtgcgcttgtactacatgttgcatcctagagacggcggatgccccgccaagaggctcaggagcgagaacggtagcgacgctgatatggtcgacaagaataagtgttgcactctgtgcaacatgtctttcacatcggctgtagtggccgactcccattaccagggcaagatacatgcaaaaaggctaaaattactgctgggcgagaaaacgccattgaagacaaccggactgagaagaaattacaggtgtacaatttgttctgtcagcctcaacagtatcgaacagtaccatgctcacctgaagggttccaaacaccaaacaaacctgaagaacaagtag

SEQ ID NO: 51173 - DNA, 462 bp, Artificial Sequence
  derived and/or modified sequence
atgaaatcctcagatatcgatcaggacctctttactgatagttactgtaaagtgtgtagtgcacagctaattagtgagtcccagagggtcgcgcactatgaatccagaaagcatgcttccaaggtaaggctgtattacatgctccaccccagggacggaggatgtccagctaagcgcctgcggtcagaaaacggctcagatgcagatatggtagataagaacaagtgctgtaccctctgcaatatgtctttcacgagcgccgtagtggccgattctcactaccaggggaaaattcatgctaagagattgaagttgttactcggcgaaaagacccccttgaaaaccactgggctgaggcggaactatcggtgcacaatttgcagtgtatctctcaactctatcgaacagtaccacgcccatttgaaaggatccaaacaccaaaccaacctgaaaaacaaatag

SEQ ID NO: 51174 - protein, 493 aa, Artificial Sequence
  derived and/or modified sequence
MDFLLGNPFSSPVGQRIEKATDGSLQSEDWALNMEICDIINETEEGPKDALRAVKKRIVGNKNFHEVMLALTVLETCVKNCGHRFHVLVASQDFVESVLVRTILPKNNPPTIVHDKVLNLIQSWADAFRSSPDLTGVVTIYEDLRRKGLEFPMTDLDMLSPIHTPQRTVFNSETQSGQDSVGTDSSQQEDSGQHAAPLPAPPILSGDTPIAPTPEQIGKLRSELEMVSGNVRVMSEMLTELVPTQAEPADLELLQELNRTCRAMQQRVLELIPQIANEQLTEELLIVNDNLNNVFLRHERFERFRTGQTTKAPSEAEPAADLIDMGPDPAATGNLSSQLAGMNLGSSSVRAGLQSLEASGRLEDEFDMFALTRGSSLADQRKEVKYEAPQATDGLAGALDARQQSTGAIPVTQACLMEDIEQWLSTDVGNDAEEPKGVTSEGKFDKFLEERAKAADRLPNLSSPSAEGPPGPPSGPAPRKKTQEKDDDMLFAL

SEQ ID NO: 51175 - DNA, 1482 bp, Artificial Sequence
  derived and/or modified sequence
atggacttcctgctgggcaaccccttcagcagccccgtgggccagagaatcgagaaggccaccgacggcagcctgcagagcgaggactgggccctgaacatggagatctgcgacatcatcaacgagaccgaggagggccccaaggacgccctgagagccgtgaagaagagaatcgtgggcaacaagaacttccacgaggtgatgctggccctgaccgtgctggagacctgcgtgaagaactgcggccacagattccacgtgctggtggccagccaggacttcgtggagagcgtgctggtgagaaccatcctgcccaagaacaacccccccaccatcgtgcacgacaaggtgctgaacctgatccagagctgggccgacgccttcagaagcagccccgacctgaccggcgtggtgaccatctacgaggacctgagaagaaagggcctggagttccccatgaccgacctggacatgctgagccccatccacaccccccagagaaccgtgttcaacagcgagacccagagcggccaggacagcgtgggcaccgacagcagccagcaggaggacagcggccagcacgccgcccccctgcccgccccccccatcctgagcggcgacacccccatcgcccccacccccgagcagatcggcaagctgagaagcgagctggagatggtgagcggcaacgtgagagtgatgagcgagatgctgaccgagctggtgcccacccaggccgagcccgccgacctggagctgctgcaggagctgaacagaacctgcagagccatgcagcagagagtgctggagctgatcccccagatcgccaacgagcagctgaccgaggagctgctgatcgtgaacgacaacctgaacaacgtgttcctgagacacgagagattcgagagattcagaaccggccagaccaccaaggcccccagcgaggccgagcccgccgccgacctgatcgacatgggccccgaccccgccgccaccggcaacctgagcagccagctggccggcatgaacctgggcagcagcagcgtgagagccggcctgcagagcctggaggccagcggcagactggaggacgagttcgacatgttcgccctgaccagaggcagcagcctggccgaccagagaaaggaggtgaagtacgaggccccccaggccaccgacggcctggccggcgccctggacgccagacagcagagcaccggcgccatccccgtgacccaggcctgcctgatggaggacatcgagcagtggctgagcaccgacgtgggcaacgacgccgaggagcccaagggcgtgaccagcgagggcaagttcgacaagttcctggaggagagagccaaggccgccgacagactgcccaacctgagcagccccagcgccgagggcccccccggcccccccagcggccccgcccccagaaagaagacccaggagaaggacgacgacatgctgttcgccctgtag

SEQ ID NO: 51176 - DNA, 1482 bp, Artificial Sequence
  derived and/or modified sequence
atggacttcctgctagggaaccccttttcttcccctgtcgggcagaggatcgagaaggccactgacgggtccctgcaatctgaggactgggccttgaatatggagatctgcgatattatcaacgagactgaagagggtccaaaggacgcattaagagccgtgaaaaagcggatagtgggcaataagaacttccatgaagttatgcttgctcttacagtcttagaaacctgcgtaaagaattgtggacaccgctttcacgtgctggtagcatcacaggatttcgtggagagtgtgctagttcgaacgattctccctaaaaacaatccacccacaatcgtccacgataaggtgttgaatctgatccaatcctgggccgacgcgttccgatccagtcccgacctaacaggcgttgttactatctacgaggatctgcgacgcaagggactggagtttccaatgacagacctcgatatgctgtccccgattcatacccctcagcgaaccgtattcaattcagagacgcagagcggacaggattcagtgggaactgatagtagccaacaggaagatagtggtcagcacgcggcccctttaccagccccgccaatcttgagcggagatactccaatagctccaaccccagaacagattggaaaactgaggagtgagcttgaaatggtgagcgggaatgtgagggttatgtccgaaatgctcacggaacttgtccctactcaagcagagcctgctgacctggagcttctgcaggaactgaaccggacttgccgcgctatgcagcagcgcgtgctcgaactgattccccagatcgcaaacgagcagctcactgaggaactgctcatcgttaatgacaacctgaacaacgtttttctgcggcatgagaggtttgaaaggttccgtaccggacagacaaccaaagcccccagcgaggcagaacccgctgccgacctgatcgatatgggtccggaccccgccgctaccgggaacctgtcctcccagctcgctggcatgaacctgggttcctcctctgtccgcgctggacttcagagcttggaggcctctgggagattggaagacgaattcgatatgttcgctctgaccagaggttcctctctggccgatcaaaggaaggaggtgaaatacgaagcaccccaagccactgacgggctggcaggcgccctcgatgctcgccagcagagcaccggagctatccccgtcacgcaggcgtgtcttatggaggacattgaacagtggctgtccacggatgtaggaaatgacgccgaggagcccaaaggcgtaacgagcgaaggaaagtttgacaagttcctggaggaacgcgcaaaggcagccgacaggctgcctaatttgtcctcaccctccgccgagggtccaccagggcccccctctggacccgctcctcgcaagaagactcaggaaaaggacgacgacatgctgtttgctctctag

SEQ ID NO: 51177 - DNA, 1482 bp, Artificial Sequence
  derived and/or modified sequence
atggacttcctgctgggcaaccccttcagcagccctgtgggccagagaattgagaaggccacagatggcagcctgcagagcgaggactgggccctgaacatggagatctgtgacatcatcaatgaaacagaggagggccccaaggatgccctgcgggctgtgaagaagagaattgtgggcaacaagaacttccacgaggtgatgctggccctgactgtgctggagacctgtgtgaagaactgtggccaccgcttccacgtgctggtggccagccaggactttgtggagagcgtgctggtgaggaccatcctgcccaagaacaacccccccaccatcgtgcatgacaaggtgctgaacctgatccagagctgggcagatgccttccgcagcagcccagacctgactggagtggtgaccatctatgaggacctgcggaggaagggcctggagttccccatgacagacctggacatgctgagccccatccacaccccccagaggacagtgttcaacagcgagacccagagcggccaggacagcgtgggcacagacagcagccagcaggaggacagcggccagcacgccgcccccctgcctgccccacccatcctgagcggggacacccccatcgcccccaccccagagcagatcggcaagctgcggtctgagctggagatggtgtctggaaatgtgcgggtgatgtctgagatgctgacagagctggtgcccacccaggccgagcctgctgacctggagctgctgcaggagctgaacagaacctgccgggccatgcagcagagggtgctggagctgatcccccagatcgccaatgagcagctgacagaggagctgctgattgtgaatgacaacctgaacaacgtgttcctgcggcatgaaagatttgagcgcttcagaacaggccagaccaccaaggcccccagcgaggccgagcctgctgctgacctgattgacatgggccctgaccctgctgccaccggcaacctgagcagccagctggccggcatgaacctgggcagcagctctgtgcgggccggcctgcagagcctggaggccagcggccgcctggaggatgaatttgacatgtttgccctgacccggggcagcagcctggccgaccagaggaaggaggtgaagtatgaggccccccaggccacagatggcctggccggggccctggatgcccggcagcagagcactggagccatccctgtgacccaggcctgcctgatggaggacatcgagcagtggctgagcacagatgtgggcaatgatgctgaggagcccaagggcgtgaccagcgagggcaagtttgacaagttcctggaggagcgggccaaggctgctgaccggctgcccaacctgagcagccccagcgctgagggccccccaggcccccccagcggccctgcccccaggaagaagacccaggagaaggatgatgacatgctgtttgccctgtag

SEQ ID NO: 51178 - DNA, 1482 bp, Artificial Sequence
  derived and/or modified sequence
atggacttcctgctgggcaaccccttcagcagccccgtgggccagaggattgaaaaggcgaccgatggatcattacagtctgaggactgggccctcaacatggagatttgtgatatcatcaacgagaccgaggagggccctaaggacgcgctgagggcagtgaagaagagaatcgtgggtaataagaacttccacgaggtgatgttagccctcacagtcctggagacttgtgtaaagaattgtggacacagattccacgtgttagttgcatcacaagactttgtggagtccgtgctcgttcggacaattctgccgaagaataatcctcctaccatagtccacgacaaggttctaaatctaatacagtcctgggcggatgcatttcgttcaagccccgatctgacaggagtcgtgaccatttacgaagacctccgcaggaagggcctggagtttccaatgaccgatctcgatatgctgagccctatccacaccccccagcggacggttttcaactccgaaactcagtcaggtcaggactctgtgggaaccgactcttcgcagcaggaggactccggacaacacgcagcaccactccctgccccacctatactgtctggagatactccgatcgctcccacccctgaacagattgggaagcttcgctcagaactggagatggtcagtggcaatgtgagggtgatgtccgagatgctgacggagctagttcccactcaggctgagcctgcagacctagaattactccaggaattgaacagaacctgtcgagctatgcagcaaagagtcttagagctgatacctcagatagcaaatgaacaactgactgaagagctgttgatagtgaacgataatctgaataacgtattcttgagacatgagcggtttgaaaggtttagaacaggacagacaactaaagctccatccgaggcagaaccagctgcagacctcatcgacatgggacccgatccggcagccactggaaatctctccagtcagctggcgggaatgaacctcggctcgagctccgtgcgggccggcctgcagtctctcgaggcgagcggaagactggaggacgagtttgacatgttcgcgcttacccgcggctcatccctcgcggaccagcgcaaggaagtcaagtacgaagcccctcaggccacagatggccttgcgggggccctagacgcccgccaacaatcaactggcgcaatcccagttacccaggcttgccttatggaagatatcgagcagtggctgtctaccgacgtagggaacgacgccgaagagcctaaaggggtgaccagtgaggggaaattcgataagttcctcgaggagcgggcaaaggccgcagataggctccccaacctatccagcccctctgccgagggtcctcctggaccacccagcggccctgcccctcggaagaagacacaggagaaagatgatgacatgcttttcgccctgtag

SEQ ID NO: 51179 - DNA, 2390 bp, Artificial Sequence
  derived and/or modified sequence
ttcgcggtgccaccgccccgcccacgcctcctcgccggcctccgagtgcgtcacgtgacgggtcggtggcgctggcggttgctgtcagctgattcccggggttggtggcagcggcggtagcagcaatggactttctcctggggaacccgttcagctctccagtgggacagcgcatcgagaaagccacagatggctccctgcagagcgaggactgggccctcaacatggagatctgcgacatcatcaacgagacggaggaaggtcccaaagatgccctccgagcagtaaagaagagaatcgtggggaataagaacttccacgaggtgatgctggctctcacagtcttagaaacctgtgtcaagaactgcgggcaccgcttccacgtgctggtggccagccaggacttcgtggagagtgtgctggtgaggaccatcctgcccaagaacaacccacccaccatcgtgcatgacaaagtgctcaacctcatccagtcctgggctgacgcgttccgcagctcgcccgatctgacaggtgtggtcaccatctatgaggacctgcggaggaaaggcctggagttccccatgactgacctggacatgctgtcacccatccacacaccccagaggaccgtgttcaactcagagacacaatcaggacaggattctgtgggcactgactccagccagcaagaggactctggccagcatgctgcccctctgcccgccccgcccatactctccggtgacacgcccatagcaccaaccccggaacagattgggaagctgcgcagtgagctggagatggtgagtgggaacgtgagggtgatgtcggagatgctgacggagctggtgcccacccaggccgagcccgcagacctggagctgctgcaggagctcaaccgcacgtgccgagccatgcagcagcgggtcctggagctcatccctcagatcgccaatgagcagctgacagaggagctgctcatcgtcaatgacaatctcaacaatgtgttcctgcgccatgaacggtttgaacggttccgaacaggccagaccaccaaggccccaagtgaggccgagccggcagctgacctgatcgacatgggccctgacccagcagccaccggcaacctctcatcccagctggcaggaatgaacctgggctccagcagtgtgagagctggcctgcagtctctggaggcctctggtcgactggaagatgagtttgacatgtttgcgctgacacggggcagctcactggctgaccaacggaaagaggtaaaatacgaagccccccaagcaacagacggcctggctggagccctggacgcccggcagcagagcactggcgcgatcccagtcacccaggcctgcctcatggaggacatcgagcagtggctgtccactgacgtgggtaatgatgcggaagagcctaagggggtcaccagcgaaggtaaatttgacaaattcctggaagaacgggccaaagccgcggaccgattgcccaacctctccagcccctcagctgaggggcccccgggtcccccatctggcccagcgccccggaagaagacccaggagaaagatgatgacatgctgtttgccttatgagtgtggggtctggcaccctgcagcccaggtccccactgctctcacacccttaggctgggacctccctccctcctctggtgttaaggctgctttgggggtggcttgttacccccttttcctcctctttgaagacggagctgccccagctgtggctgggggtgtggaggcagtgggatgaactgggggacaggtctgcgctgcagtgggatctggctgctctgcctcctttcccaccccagctgaccatgagactttgctgagaagtggaggccccaggacaggctggctggctggctggctgcttgacccagtgtgactctccttcactgagtgataccctgctccgggcccatgccccaaggagcccttcagagcccacactgccagtcgaggcctggctggaggctggccacagtggaaattctgccgagcctcttgtcccttccctgctctgctgcatggggccccatggctttggctggccactgagggtagggtgtggaggtgtggaggccccctgaggagctgcggcggcccaggtacgaagctgcaactctgcgcgcagtgggcgagatctcatcagccccaggctgcaggtgaggcttcaggggatgctggggccccactgcccctccgctgccttgccctccatccttcctctgttccttctggccgggcaccacagcactggggctcacctcttggttgatcctcttgtactgggagaggtgccttttgtatccccaattaaaggtagaaaaccaccctgctagcagcattgtc

SEQ ID NO: 51180 - DNA, 1482 bp, Artificial Sequence
  derived and/or modified sequence
atggattttctgcttggaaatcccttttcatcccctgtgggccagcgcattgaaaaggccactgacggatctctgcagagcgaagattgggccctcaatatggaaatatgcgatatcattaacgagacagaagagggccctaaggacgctctgcgggcagtgaaaaagcggatcgtgggcaataaaaactttcacgaggtgatgctggccttaaccgtgttggaaacgtgtgtgaagaactgcgggcaccgttttcacgtcttggtcgcctcccaggactttgttgagagtgtgctggtgcggacgatcctccccaaaaacaacccgccaaccatagtgcacgacaaagttctgaacctaatacagtcatgggccgacgcattcagatcctctccggacttaaccggcgtggtgacgatttatgaggatctgcgtagaaagggcctggagttcccaatgacagatctcgatatgcttagtccgattcacacgcctcaacgaactgtctttaacagtgaaacgcagtccggccaggattccgttggaaccgacagttcgcagcaggaggactcggggcagcacgctgctcccctaccagcccctcctattctgtcaggggacacaccgatcgcaccaacgccagagcaaataggcaaactgcgatctgagttagagatggtgagcggtaacgtccgggtcatgtcggaaatgctcaccgagcttgtgcctactcaagctgagccggcagatcttgagttactgcaggagttaaatagaacatgtcgggctatgcaacagagagtgctggagctgatcccccaaatagccaacgaacagctcacggaagagctgcttatcgttaacgacaatctgaataacgttttcctgcgccatgagaggtttgaacgattccggaccggacagacaaccaaggcaccatccgaggccgaacccgctgcggatctcattgatatgggaccagatcccgcagctacgggcaatctgtcctctcaactggcgggaatgaatctgggctcctcgtctgttcgagccggactccaaagcctcgaggcctcaggacgcttggaagacgagttcgatatgtttgcgttgacccgcggtagctcacttgccgaccaacgcaaggaggttaaatatgaagccccacaagccactgacggcctagccggtgccctggacgccaggcagcaatccactggggctatccccgttactcaagcctgcctgatggaagacatagagcagtggctgagtactgacgtcgggaacgacgcagaagagccaaaaggcgtcacatcagagggcaagtttgataagtttctggaagaacgggctaaggccgctgacaggttgccgaatctgtcctctccaagcgctgaaggtccaccgggacctccatcaggcccagcaccacgaaagaagactcaggaaaaagatgatgacatgttattcgcactatag

SEQ ID NO: 51181 - DNA, 2317 bp, Artificial Sequence
  derived and/or modified sequence
gctttttgccatcctgggcgctagagggaattgcgctgcaattcattaaattgcctctcagtctcaacagatgacaaaccccttgcccttgcctctgatttaagagaaagccacagatggctccctgcagagcgaggactgggccctcaacatggagatctgcgacatcatcaacgagacggaggaaggtcccaaagatgccctccgagcagtaaagaagagaatcgtggggaataagaacttccacgaggtgatgctggctctcacagtcttagaaacctgtgtcaagaactgcgggcaccgcttccacgtgctggtggccagccaggacttcgtggagagtgtgctggtgaggaccatcctgcccaagaacaacccacccaccatcgtgcatgacaaagtgctcaacctcatccagtcctgggctgacgcgttccgcagctcgcccgatctgacaggtgtggtcaccatctatgaggacctgcggaggaaaggcctggagttccccatgactgacctggacatgctgtcacccatccacacaccccagaggaccgtgttcaactcagagacacaatcaggacaggattctgtgggcactgactccagccagcaagaggactctggccagcatgctgcccctctgcccgccccgcccatactctccggtgacacgcccatagcaccaaccccggaacagattgggaagctgcgcagtgagctggagatggtgagtgggaacgtgagggtgatgtcggagatgctgacggagctggtgcccacccaggccgagcccgcagacctggagctgctgcaggagctcaaccgcacgtgccgagccatgcagcagcgggtcctggagctcatccctcagatcgccaatgagcagctgacagaggagctgctcatcgtcaatgacaatctcaacaatgtgttcctgcgccatgaacggtttgaacggttccgaacaggccagaccaccaaggccccaagtgaggccgagccggcagctgacctgatcgacatgggccctgacccagcagccaccggcaacctctcatcccagctggcaggaatgaacctgggctccagcagtgtgagagctggcctgcagtctctggaggcctctggtcgactggaagatgagtttgacatgtttgcgctgacacggggcagctcactggctgaccaacggaaagaggtaaaatacgaagccccccaagcaacagacggcctggctggagccctggacgcccggcagcagagcactggcgcgatcccagtcacccaggcctgcctcatggaggacatcgagcagtggctgtccactgacgtgggtaatgatgcggaagagcctaagggggtcaccagcgaaggtaaatttgacaaattcctggaagaacgggccaaagccgcggaccgattgcccaacctctccagcccctcagctgaggggcccccgggtcccccatctggcccagcgccccggaagaagacccaggagaaagatgatgacatgctgtttgccttatgagtgtggggtctggcaccctgcagcccaggtccccactgctctcacacccttaggctgggacctccctccctcctctggtgttaaggctgctttgggggtggcttgttacccccttttcctcctctttgaagacggagctgccccagctgtggctgggggtgtggaggcagtgggatgaactgggggacaggtctgcgctgcagtgggatctggctgctctgcctcctttcccaccccagctgaccatgagactttgctgagaagtggaggccccaggacaggctggctggctggctggctgcttgacccagtgtgactctccttcactgagtgataccctgctccgggcccatgccccaaggagcccttcagagcccacactgccagtcgaggcctggctggaggctggccacagtggaaattctgccgagcctcttgtcccttccctgctctgctgcatggggccccatggctttggctggccactgagggtagggtgtggaggtgtggaggccccctgaggagctgcggcggcccaggtacgaagctgcaactctgcgcgcagtgggcgagatctcatcagccccaggctgcaggtgaggcttcaggggatgctggggccccactgcccctccgctgccttgccctccatccttcctctgttccttctggccgggcaccacagcactggggctcacctcttggttgatcctcttgtactgggagaggtgccttttgtatccccaattaaaggtagaaaaccaccctgctagcagcattgtc

SEQ ID NO: 51182 - DNA, 1300 bp, Artificial Sequence
  derived and/or modified sequence
gtggcgctggcggttgctgtcagctgattcccggggttggtggcagcggcggtagcagcaatggactttctcctggggaacccgttcagctctccagtgggacagcgcatcgagaaagccacagatggctccctgcagagcgaggactgggccctcaacatggagatctgcgacatcatcaacgagacggaggaaggtcccaaagatgccctccgagcagtaaagaagagaatcgtggggaataagaacttccacgaggtgatgctggctctcacagtcttagaaacctgtgtcaagaactgcgggcaccgcttccacgtgctggtggccagccaggacttcgtggagagtgtgctggtgaggaccatcctgcccaagaacaacccacccaccatcgtgcatgacaaagtgctcaacctcatccagtcctgggctgacgcgttccgcagctcgcccgatctgacaggtgtggtcaccatctatgaggacctgcggaggaaaggcctggagttccccatgactgacctggacatgctgtcacccatccacacacccagaggaccgtgttcaactcagagacacaatcaggacaggattctgtgggcactgactccagccagcaagaggactctggccagcatgctgcccctctgcccgccccgcccatactctccggtgacacgcccatagcaccaaccccggaacagattgggaagctgcgcagtgagctggagatggtgagtgggaacgtgagggtgatgtcggagatgctgacggagctggtgcccacccaggccgagcccgcagacctggagctgctgcaggagctcaaccgcacgtgccgagccatgcagcagcgggtcctgagtgataccctgctccgggcccatgccccaaggagcccttcagagcccacactgccagtcgaggcctggctggaggctggccacagtggaaattctgccgagcctcttgtcccttccctgctctgctgcatggggccccatggctttggctggccactgagggtagggtgtggaggtgtggaggccccctgaggagctgcggcggcccaggtacgaagctgcaactctgcgcgcagtgggcgagatctcatcagccccaggctgcaggtgaggcttcaggggatgctggggccccactgcccctccgctgccttgccctccatccttcctctgttccttctggccgggcaccacagcactggggctcacctcttggttgatcctcttgtactgggagaggtgccttttgtatccccaattaaaggtagaaaacc

SEQ ID NO: 51183 - protein, 164 aa, Artificial Sequence
  derived and/or modified sequence
MFQRLNKMFVGEVSSSSNQEPEFNEKEDDEWILVDFIDTCTGFSAEEEEEEEDISEESPTEHPSVFSCLPASLECLADTSDSCFLQFESCPMEESWFITPPPCFTAGGLTTIKVETSPMENLLIEHPSMSVYAVHNSCPGLSEATRGTDELHSPSSPRARKSCL

SEQ ID NO: 51184 - DNA, 558 bp, Artificial Sequence
  derived and/or modified sequence
atgttccaacgtctgaacaagatgttcgtcggcgaggtgagcagctccagcaatcaagaacctgaattcaatgagaaggaggacgacgaatggattctggtggatttcatcgatacctgcaccggctttagcgccgaggaagaggaagaggaggaagacattagcgaggagtctcctaccgagcatcccagcgtgtttagttgtctccccgccagtttagagtgcctggccgatacatcagactcatgtttcctccagtttgagtcttgccccatggaggaatcctggtttataacaccgccaccatgcttcaccgcagggggcctgacaactatcaaagtcgaaacctcccccatggagaatctgcttattgagcaccccagcatgagtgtctacgccgtacacaacagctgccccggactgtctgaggcgactcggggaaccgatgagctccattcaccgtccagccccagatattcacaagactgtcaccctaggcaagtgaagcacaatgggtgggtcgttcaccagccctgccctcgccaatacaactactag

SEQ ID NO: 51185 - DNA, 495 bp, Artificial Sequence
  derived and/or modified sequence
atgttccagcgcctgaacaaaatgtttgtcggagaggtctcgagctcaagcaaccaagaacctgagtttaacgagaaagaagatgatgagtggattctggtcgactttatcgacacatgtactggattctccgccgaagaggaggaagaggaggaagatatctccgaggaatccccaacagagcacccttctgtgttctcttgcctgccagcatctctagagtgtcttgcagatacatccgatagctgtttccttcagttcgaatcctgcccaatggaggagtcttggttcatcacgccacctccttgtttcaccgcggggggattgactacaataaaggtcgagacctctcctatggaaaacctacttatagaacatcctagcatgtccgtctacgccgtgcataatagctgcccagggctctccgaggctactagagggaccgacgaactgcactcccccagctcaccaagagctcgcaaatcgtgcctttag

SEQ ID NO: 51186 - DNA, 558 bp, Artificial Sequence
  derived and/or modified sequence
atgttccagaggctgaacaagatgtttgtgggggaggtgagcagcagcagcaaccaggagcctgagttcaatgagaaggaggatgatgagtggatcctggtggacttcatcgacacctgcaccggcttctctgctgaggaggaggaggaggaggaggacatcagcgaggagagccccacagagcaccccagcgtcttcagctgcctgcctgccagcctggagtgcctggccgacaccagtgacagctgcttcctgcagtttgagagctgccccatggaggagagctggttcatcaccccaccaccctgcttcaccgctgggggcctgaccaccatcaaggtggagaccagccccatggagaacctgctgattgagcaccccagcatgtctgtgtatgctgtgcacaacagctgccccggcctgtctgaggccacccggggcacagatgagctgcacagccccagcagcccccgctacagccaggactgccacccccggcaggtgaagcacaacggctgggtggtgcaccagccctgcccccggcagtacaactactag

SEQ ID NO: 51187 - DNA, 495 bp, Artificial Sequence
  derived and/or modified sequence
atgttccagaggctgaacaagatgtttgtgggggaggtgagcagcagcagcaaccaggagcctgagttcaatgagaaggaggatgatgagtggatcctggtggacttcatcgacacctgcaccggcttctctgctgaggaggaggaggaggaggaggacatcagcgaggagagccccacagagcaccccagcgtcttcagctgcctgcctgccagcctggagtgcctggccgacaccagtgacagctgcttcctgcagtttgagagctgccccatggaggagagctggttcatcaccccaccaccctgcttcaccgctgggggcctgaccaccatcaaggtggagaccagccccatggagaacctgctgattgagcaccccagcatgtctgtgtatgctgtgcacaacagctgccccggcctgtctgaggccacccggggcacagatgagctgcacagccccagcagcccccgggccaggaagagctgcctgtag

SEQ ID NO: 51188 - DNA, 558 bp, Artificial Sequence
  derived and/or modified sequence
atgttccagcggctgaacaagatgttcgtgggcgaggtgagcagctcttcaaatcaggagcctgagttcaatgagaaagaagatgacgaatggattctggttgactttatcgacacatgtacagggttctccgccgaggaagaggaagaagaggaagatatctccgaggaaagtcctaccgaacacccatccgtcttttcttgcttgccggcaagtctggagtgtttggccgatacttctgattcatgctttctgcagttcgagtcttgtcctatggaggaaagctggtttatcaccccgcccccctgtttcacagcaggcggactgactactattaaggtcgaaacaagtcccatggagaatctcctcatcgagcaccctagcatgtccgtatacgccgtccacaattcttgccccggcttaagcgaagcaacccgcggcaccgatgagctacacagcccaagttccccccgatatagtcaagactgtcatcctagacaggtaaaacacaacggatgggtggtccaccagccttgccctcggcagtacaattactag

SEQ ID NO: 51189 - DNA, 495 bp, Artificial Sequence
  derived and/or modified sequence
atgttccagcggctgaacaagatgttcgtgggcgaggtgagcagctccagtaatcaggagccagagttcaacgagaaagaggacgatgaatggattctggtggatttcatcgacacctgcacgggtttctctgcagaggaagaggaggaggaggaagacattagtgaagagtcaccaaccgagcatccatccgttttctcttgcctccccgcctctctcgagtgcctggcagatacctcagacagttgctttctgcagttcgagtcgtgccccatggaggaatcttggttcatcaccccacccccatgcttcacggcaggcgggcttactactatcaaagtagaaaccagccccatggaaaatcttctcatcgagcatccttcaatgtccgtgtacgccgtacataactcatgccctggactatccgaagccacccgaggcaccgacgagctccatagcccttcctccccaagggctagaaagtcctgtttgtag

SEQ ID NO: 51190 - DNA, 558 bp, Artificial Sequence
  derived and/or modified sequence
atgttccagaggttaaataagatgttcgttggagaggtcagcagtagttccaatcaagagcccgagttcaacgagaaggaagacgacgagtggatcctagtggattttattgacacctgtactggcttctccgccgaggaggaggaggaagaagaggacatctctgaagagtcccccaccgagcatccaagtgtgttctcatgtctgcccgctagtctagaatgtttggctgatacatccgatagttgcttcctccagttcgagagttgtcccatggaggagtcctggttcattacccccccaccatgcttcaccgccggaggccttacaactatcaaagtcgaaacgtccccgatggaaaatttgcttattgagcacccttcaatgagcgtgtatgctgtgcataacagctgccctggtctgtcagaggctacaagggggaccgatgaattgcacagtccctcaagcccacgttatagccaggattgccacccaaggcaggtgaagcacaatgggtgggtagtccaccaaccatgtccacggcagtacaactattag

SEQ ID NO: 51191 - DNA, 495 bp, Artificial Sequence
  derived and/or modified sequence
atgttccaaagactcaacaagatgtttgttggggaggtgtccagctcttcaaaccaggagcccgagtttaacgagaaggaagacgacgagtggatcttagttgacttcatcgacacttgcacaggctttagcgccgaggaggaagaggaggaggaggacatctctgaggagagtcctaccgagcatcctagcgtcttcagctgcctcccagcatccctggagtgccttgccgatactagtgattcttgctttctccagtttgagagctgtcccatggaggagtcctggtttatcacgcctcccccatgctttactgctggtgggctgaccacaattaaagttgaaacttcaccaatggagaatctcctgatcgagcacccctcaatgtcagtgtatgcggtacataactcctgccccggactgagcgaagcgacacgtgggaccgacgagctgcactcaccaagttctccccgtgctcgcaagtcttgcctatag

SEQ ID NO: 51192 - DNA, 590 bp, Artificial Sequence
  derived and/or modified sequence
catccagccaaactctcagtcttgccttaacaatgttccagaggctgaataaaatgtttgtgggtgaagtcagttcttcctccaaccaagaaccagaattcaatgagaaagaagatgatgaatggattcttgttgacttcatagatacttgcactggtttctcagcagaagaagaagaagaagaggaggacatcagtgaagagtcacctactgagcacccttcagtcttttcctgtttaccggcatctcttgagtgcttggctgatacaagtgattcctgctttctccagtttgagtcatgtccaatggaggagagctggtttatcaccccacccccatgttttactgcaggtggattaaccactatcaaggtggaaacaagtcctatggaaaaccttctcattgaacatcccagcatgtctgtctatgctgtgcataactcctgccctggtctcagtgaggccacccgtgggactgatgaattacatagcccaagtagtcccaggtactcacaggattgccaccctcggcaagtcaagcacaatggctgggttgttcatcagccctgcccgcgtcagtacaattactaa

SEQ ID NO: 51193 - DNA, 558 bp, Artificial Sequence
  derived and/or modified sequence
atgttccagagactgaacaagatgttcgtgggcgaggtgagcagcagcagcaaccaggagcccgagttcaacgagaaggaggacgacgagtggatcctggtggacttcatcgacacctgcaccggcttcagcgccgaggaggaggaggaggaggaggacatcagcgaggagagccccaccgagcaccccagcgtgttcagctgcctgcccgccagcctggagtgcctggccgacaccagcgacagctgcttcctgcagttcgagagctgccccatggaggagagctggttcatcaccccccccccctgcttcaccgccggcggcctgaccaccatcaaggtggagaccagccccatggagaacctgctgatcgagcaccccagcatgagcgtgtacgccgtgcacaacagctgccccggcctgagcgaggccaccagaggcaccgacgagctgcacagccccagcagccccagatacagccaggactgccaccccagacaggtgaagcacaacggctgggtggtgcaccagccctgccccagacagtacaactactag

SEQ ID NO: 51194 - DNA, 495 bp, Artificial Sequence
  derived and/or modified sequence
atgttccagagactgaacaagatgttcgtgggcgaggtgagcagcagcagcaaccaggagcccgagttcaacgagaaggaggacgacgagtggatcctggtggacttcatcgacacctgcaccggcttcagcgccgaggaggaggaggaggaggaggacatcagcgaggagagccccaccgagcaccccagcgtgttcagctgcctgcccgccagcctggagtgcctggccgacaccagcgacagctgcttcctgcagttcgagagctgccccatggaggagagctggttcatcaccccccccccctgcttcaccgccggcggcctgaccaccatcaaggtggagaccagccccatggagaacctgctgatcgagcaccccagcatgagcgtgtacgccgtgcacaacagctgccccggcctgagcgaggccaccagaggcaccgacgagctgcacagccccagcagccccagagccagaaagagctgcctgtag

SEQ ID NO: 51195 - protein, 577 aa, Artificial Sequence
  derived and/or modified sequence
MEESHFNSNPYFWPSIPTVSGQIENTMFINKMKDQLLPEKGCGLAPPHYPTLLTVPASVSLPSGISMDTESKSDQLTPHSQASVTQNITVVPVPSTGLMTAGVSCSQRWRREGSQSRGPGLVITSPSGSLVTTASSAQTFPISAPMIVSALPPGSQALQVVPDLSKKVASTLTEEGGGGGGGGGSVAPKPPRGRKKKRMLESGLPEMNDPYVLSPEDDDDHQKDGKTYRCRMCSLTFYSKSEMQIHSKSHTETKPHKCPHCSKTFANSSYLAQHIRIHSGAKPYSCNFCEKSFRQLSHLQQHTRIHSKMHTETIKPHKCPHCSKTFANTSYLAQHLRIHSGAKPYNCSYCQKAFRQLSHLQQHTRIHTGDRPYKCAHPGCEKAFTQLSNLQSHRRQHNKDKPFKCHNCHRAYTDAASLEVHLSTHTVKHAKVYTCTICSRAYTSETYLMKHMRKHNPPDLQQQVQAAAAAAAVAQAQAQAQAQAQAQAQAQAQAQASQASQQQQQQQQQQQQQQQQPPPHFQSPGAAPQGGGGGDSNPNPPPQCSFDLTPYKTAEHHKDICLTVTTSTIQVEHLASS

SEQ ID NO: 51196 - protein, 277 aa, Artificial Sequence
  derived and/or modified sequence
MEESHFNSNPYFWPSIPTVSGQIENTMFINKMKDQLLPEKGCGLAPPHYPTLLTVPASVSLPSGISMDTESKSDQLTPHSQASVTQNITVVPVPSTGLMTAGPGLVITSPSGSLVTTASSAQTFPISAPMIVSALPPGSQALQVVPDLSKKVASTLTEEGGGGGGGGGSVAPKPPRGRKKKRMLESGLPEMNDPYVLSPEDDDDHQKDGKTYRCRMCSLTFYSKSEMQIHSKSHTETKPHKCPHCSKTFANSSYLAQHIRIHSGAKPYSCNFCEKSF

SEQ ID NO: 51197 - DNA, 1734 bp, Artificial Sequence
  derived and/or modified sequence
atggaggagagccacttcaacagcaacccctacttctggcccagcatccccaccgtgagcggccagatcgagaacaccatgttcatcaacaagatgaaggaccagctgctgcccgagaagggctgcggcctggcccccccccactaccccaccctgctgaccgtgcccgccagcgtgagcctgcccagcggcatcagcatggacaccgagagcaagagcgaccagctgaccccccacagccaggccagcgtgacccagaacatcaccgtggtgcccgtgcccagcaccggcctgatgaccgccggcgtgagctgcagccagagatggagaagagagggcagccagagcagaggccccggcctggtgatcaccagccccagcggcagcctggtgaccaccgccagcagcgcccagaccttccccatcagcgcccccatgatcgtgagcgccctgccccccggcagccaggccctgcaggtggtgcccgacctgagcaagaaggtggccagcaccctgaccgaggagggcggcggcggcggcggcggcggcggcagcgtggcccccaagccccccagaggcagaaagaagaagagaatgctggagagcggcctgcccgagatgaacgacccctacgtgctgagccccgaggacgacgacgaccaccagaaggacggcaagacctacagatgcagaatgtgcagcctgaccttctacagcaagagcgagatgcagatccacagcaagagccacaccgagaccaagccccacaagtgcccccactgcagcaagaccttcgccaacagcagctacctggcccagcacatcagaatccacagcggcgccaagccctacagctgcaacttctgcgagaagagcttcagacagctgagccacctgcagcagcacaccagaatccacagcaagatgcacaccgagaccatcaagccccacaagtgcccccactgcagcaagaccttcgccaacaccagctacctggcccagcacctgagaatccacagcggcgccaagccctacaactgcagctactgccagaaggccttcagacagctgagccacctgcagcagcacaccagaatccacaccggcgacagaccctacaagtgcgcccaccccggctgcgagaaggccttcacccagctgagcaacctgcagagccacagaagacagcacaacaaggacaagcccttcaagtgccacaactgccacagagcctacaccgacgccgccagcctggaggtgcacctgagcacccacaccgtgaagcacgccaaggtgtacacctgcaccatctgcagcagagcctacaccagcgagacctacctgatgaagcacatgagaaagcacaacccccccgacctgcagcagcaggtgcaggccgccgccgccgccgccgccgtggcccaggcccaggcccaggcccaggcccaggcccaggcccaggcccaggcccaggcccaggcccaggccagccaggccagccagcagcagcagcagcagcagcagcagcagcagcagcagcagcagcagccccccccccacttccagagccccggcgccgccccccagggcggcggcggcggcgacagcaaccccaacccccccccccagtgcagcttcgacctgaccccctacaagaccgccgagcaccacaaggacatctgcctgaccgtgaccaccagcaccatccaggtggagcacctggccagcagctag

SEQ ID NO: 51198 - DNA, 1734 bp, Artificial Sequence
  derived and/or modified sequence
atggaggagagccatttcaactccaacccttacttttggccttcgatccctaccgtttcgggtcaaattgagaatacaatgttcattaataagatgaaagaccagctcttgccagagaaggggtgcggtctggcaccgccccactatccaactctgttaacggtgccagcctccgtgtcacttccgtcaggaatttctatggacacagaatctaagtcggatcagcttaccccgcactcccaagccagtgtcacccagaatattacagtggtccctgtccctagcactggcctcatgacggccggggtgagctgctcgcagcgctggagaagggaggggtctcagagcagagggcccggcctggtcatcacctcaccctcgggctccctggtgacaaccgcatcgagtgctcagacctttcccattagcgcaccgatgatagtctctgccctgccccccggatcacaagccttacaagtggtccctgacctctcaaagaaagtggcctccacactaacggaggaaggtggaggcggtggtgggggcggaggttcagtcgctccaaagccaccaaggggcaggaaaaaaaagcggatgctcgaaagcggactccccgagatgaacgacccgtacgtgctgtcaccagaggatgatgatgatcaccagaaagatggcaaaacctaccgatgcaggatgtgtagcctgaccttttatagtaaaagtgaaatgcagatccacagtaagagccacactgagacgaagccgcacaagtgtccccattgttccaagacctttgcaaacagttcttacctggcccagcacatcaggatacactctggcgcgaagccatacagttgcaacttctgcgagaagtcgttccgacagctgagccacctgcaacaacacacaaggattcattccaaaatgcataccgagacaatcaaacctcacaagtgcccacattgcagcaagacctttgccaatacgtcatacctcgcacagcacttacggattcattccggggcaaaaccgtataattgttcttattgccagaaggccttccgccaattgagtcatctgcagcaacacacacgtatccacacaggggacagaccttacaagtgcgcgcaccccgggtgtgaaaaagctttcacacaactgtctaacctgcagagtcacagacggcagcacaataaggacaagccctttaagtgtcataactgccacagagcctacaccgacgctgccagtctcgaggtccatctcagcacccacaccgtcaaacatgccaaggtgtatacttgcactatctgttcacgggcatacaccagcgagacatatctcatgaaacacatgaggaagcacaacccgcccgaccttcaacaacaggtgcaggcagccgctgccgccgccgcagtcgcccaggcccaggcccaggcccaggcacaggcacaggctcaagcacaagcacaggcacaggcccaagcttcccaggcttcacagcagcagcaacagcagcagcaacagcagcagcagcaacagcagcaaccccccccgcacttccagtcgccaggtgctgccccccagggcggcgggggaggagattcgaatcctaaccccccaccacagtgttcctttgatctcaccccgtataagactgctgaacaccataaggacatctgccttaccgtgacgacctctacaattcaggtggaacatctcgcctcctcttag

SEQ ID NO: 51199 - DNA, 1734 bp, Artificial Sequence
  derived and/or modified sequence
atggaagagtcccacttcaactccaatccctacttctggccgtccatccctaccgtatccgggcagatcgagaacacgatgtttattaacaagatgaaggaccagctcctccccgagaagggttgtggattagctcctcctcactatccgaccctactgacagtgccagccagtgtgagcctgccgagcggtatctccatggatacagaatccaagagtgaccagctgactccccatagccaggcatcagtgactcaaaatattactgtcgtccctgtgccttctacaggcttgatgactgcaggagtaagctgctctcagcgatggagacgggagggctcccagtctcgcggcccaggcctggtaattacctctcctagtggaagcttagtaacaaccgcaagcagtgcacagacctttccaattagtgctcctatgatcgtctccgccctgcctcccgggagccaggcactgcaagttgtgccagacctttctaaaaaggtggcttccaccctcaccgaggagggcggtggaggtggcggggggggtgggtccgtggccccaaagcccccaaggggacgtaaaaagaaaaggatgttggaatccggccttccggagatgaacgacccttacgtgctttcccctgaggatgacgacgaccatcagaaggatggaaaaacctatcggtgtcgcatgtgttctctaaccttctacagcaagtccgagatgcagatccacagcaagtcacataccgaaacgaaaccccataaatgcccacattgcagtaagactttcgccaactcctcctatcttgcacaacatattcgaatccactctggcgcaaagccatactcttgcaatttttgcgaaaagagcttcagacagctgtcccatctccagcagcacactcgtattcactctaagatgcacaccgaaacaatcaaacctcataaatgtccccactgctctaaaacatttgcaaatactagctacctcgctcagcatctccgaatccactctggagccaagccgtataactgcagttattgtcagaaagcatttcgccaactgtcgcacctgcaacagcatacacggatccacacaggcgaccggccttacaaatgtgcccatcctggctgtgaaaaggcctttacccagctctcaaatctacagtctcataggagacagcataacaaagacaaaccctttaagtgccacaattgccaccgcgcttacactgacgcagcctcgctggaagtgcatctgagcactcacaccgttaaacacgcgaaggtgtacacttgtaccatctgctcacgcgcctacactagcgaaacctacctgatgaagcatatgagaaaacataaccctcccgatctgcagcagcaagtacaggccgctgccgcagccgccgccgtggcccaggcacaggcccaggcccaggcacaggcacaggcccaggcgcaagcccaggcccaagcacaggcgagtcaggcatcccagcagcaacagcagcagcagcagcaacagcagcagcagcagcagcaacctccacctcacttccagtccccaggtgctgcgcctcagggcggggggggcggggactccaatcctaacccccccccccaatgtagcttcgatctgaccccctacaaaaccgcggaacatcacaaagatatttgcctcaccgtgaccacctcaactattcaagtggaacacctagcatcatcatag

SEQ ID NO: 51200 - DNA, 1734 bp, Artificial Sequence
  derived and/or modified sequence
atggaggagagccacttcaacagcaacccctacttctggcccagcatccccaccgtgtctggccagatcgagaacaccatgttcatcaacaagatgaaggaccagctgctgcctgagaagggctgcggcctggccccaccccactaccccaccctgctgactgtgcctgcctctgtgtccctgcccagcggcatctccatggacacagagagcaagagtgaccagctgaccccccacagccaggcctctgtgacccagaacatcaccgtggtgcctgtgcccagcacaggcctgatgacagctggggtgtcctgcagccagcgctggaggcgggagggcagccagagccggggccctggcctggtgatcaccagccccagcggcagcctggtgaccacagccagcagcgcccagaccttccccatcagcgcccccatgattgtgtctgccctgcccccaggcagccaggccctgcaggtggtgcctgacctgagcaagaaggtggccagcaccctgacagaggagggcggcggcggcggcggcggcggcggctctgtggcccccaagccaccccggggcaggaagaagaagaggatgctggagagcggcctgcctgagatgaatgacccctacgtgctgagcccagaagatgatgatgaccaccagaaggatggcaagacctaccgctgcaggatgtgcagcctgaccttctacagcaagtctgagatgcagatccacagcaagagccacacagagaccaagccccacaagtgcccccactgcagcaagacctttgccaacagcagctacctggcccagcacatccgcatccacagcggggccaagccctacagctgcaacttctgtgagaagagcttccggcagctgagccacctgcagcagcacacccgcatccacagcaagatgcacacagagaccatcaagccccacaagtgcccccactgcagcaagacctttgccaacaccagctacctggcccagcacctgcgcatccacagcggggccaagccctacaactgcagctactgccagaaggccttccggcagctgagccacctgcagcagcacacccgcatccacactggagaccggccctacaagtgtgcccaccctggctgtgagaaggccttcacccagctgagcaacctgcagagccaccggcggcagcacaacaaggacaagcccttcaagtgccacaactgccaccgggcctacacagatgctgccagcctggaggtgcacctgagcacccacacagtgaagcacgccaaggtgtacacctgcaccatctgcagccgggcctacaccagcgagacctacctgatgaagcacatgaggaagcacaaccccccagacctgcagcagcaggtgcaggccgctgctgctgctgctgctgtggcccaggcccaggcccaggcccaggcccaggcccaggcccaggcccaggcccaggcccaggcccaggccagccaggccagccagcagcagcagcagcagcagcagcagcagcagcagcagcagcagcagcccccaccccacttccagagccctggggccgccccccagggcggcggcggcggggacagcaaccccaaccccccaccccagtgcagctttgacctgaccccctacaagacagctgagcaccacaaggacatctgcctgactgtgaccaccagcaccatccaggtggagcacctggccagcagctag

SEQ ID NO: 51201 - DNA, 1734 bp, Artificial Sequence
  derived and/or modified sequence
atggaggagagccacttcaacagcaacccctacttctggcccagcattccgaccgtatccggtcagattgaaaatacaatgtttataaacaagatgaaggaccaactgctccctgagaagggttgcgggctcgcccccccccattatccaactctgcttaccgttcccgctagcgtgtcactaccaagtggtatcagcatggatacagaatctaagtcagatcagctcacaccccacagccaggcttctgtgactcagaatatcactgtagtgcccgtgccctcaactggcctcatgacagccggggtcagctgctcccaaaggtggaggagagagggcagtcagtccagaggaccaggtttggtgattacctccccctccggttccttagtgacaaccgctagcagtgcccagactttccccatctcggctcctatgatcgtgagcgccctgccccctggctcacaggctctccaggtggtccccgatctgtccaaaaaagtcgccagcacccttacagaggaagggggggggggaggcggaggcgggggctcggtggcacccaaaccaccccgcggtcgcaagaaaaagaggatgctcgagtcaggccttcccgagatgaatgatccatatgttctgtccccagaggatgatgacgatcatcagaaagacgggaagacctaccgttgtcggatgtgcagcctcaccttctactctaagagcgagatgcagattcactctaagtcacacaccgaaaccaaaccacataaatgcccgcattgttcaaagacctttgctaacagctcctaccttgcccagcatatacggatccactcgggcgctaagccttactcttgtaatttttgcgaaaagagcttccggcagctgtcacacctccaacagcacacaaggatccactcaaaaatgcataccgagacaatcaagccccacaagtgcccacactgttcaaagacgttcgccaatacaagttatctggcccagcacctgaggattcactctggtgcgaagccatataattgttcctattgccaaaaagcctttcgtcaactttctcacttacaacagcacaccaggatccacaccggagaccgaccgtacaaatgcgcccaccctggttgtgagaaagccttcactcagctgagcaatcttcaatcccataggcgccagcataataaggacaagccctttaagtgtcacaactgtcacagggcatacactgatgctgcatcactggaggttcatctctctacacatactgttaagcacgcgaaggtttacacttgcaccatatgctcacgcgcatacacctccgaaacataccttatgaaacacatgcgtaaacataatccacctgatttacagcaacaagtccaggcagccgccgcggccgccgcagtggcccaggcgcaagcccaggcacaggctcaggctcaggcccaagctcaagcccaggcgcaggcccaggccagtcaagcgagccaacagcaacagcagcagcagcagcagcaacagcagcagcagcagcaacctccccctcacttccagagtcccggggccgcccctcaggggggggggggcggagactcaaaccctaacccccccccacagtgcagtttcgacctgactccgtacaagaccgccgagcatcataaggatatctgtcttactgtcacaacaagcacaatccaagtggagcacttggcatccagctag

SEQ ID NO: 51202 - DNA, 1734 bp, Artificial Sequence
  derived and/or modified sequence
atggaggagagccacttcaacagcaacccctacttctggcccagcatccctacagtgtccggacagatcgaaaacaccatgtttatcaataagatgaaagaccaactactgcccgaaaagggttgcggattggctccgccacattaccccactttactgaccgtccctgcgtcagtgtccttgccgagcggcattagtatggatacagagtctaagtccgatcagctgacacctcatagccaagcatccgtcactcagaatatcacagtagtaccagtcccatccaccggcctcatgacagcaggagtttcgtgctcccagagatggaggagggaagggtctcagtcacgcggcccaggcctagtaatcacgagcccaagcggttccctggtcactacagcctcatccgcccagacatttcctatcagcgcccccatgatcgtgtccgccttgccaccaggatcgcaggccttgcaggtggttccggatctgtccaaaaaagtggctagtaccctcacagaggaaggtggtggcggcgggggtggaggcggcagcgtggcccctaagccaccacgcgggcgcaaaaaaaagagaatgttagagtcaggcttacctgaaatgaacgacccttatgtcttgtcccccgaagatgacgatgaccaccagaaggatggtaagacataccgctgtagaatgtgtagtttaaccttttacagcaaatctgagatgcaaatccactccaagagtcacaccgagacaaaaccccacaaatgtccccactgctcgaagacgttcgccaatagttcatacctggcacagcatataagaatccattctggggccaagccatacagctgtaacttctgcgaaaagtcctttcggcagctgagccacctgcagcagcacacccgcatccatagcaagatgcacacggagacgatcaagccacacaaatgtccccattgcagtaagactttcgcaaacacctcttacctagcccagcacctacgcattcattcgggggccaagccctataattgttcttactgccagaaggcctttaggcagctcagtcatctgcagcagcataccagaatccacacaggagacaggccatacaaatgtgcccatcccggctgtgagaaagcctttacacagctgtcgaacctacagtctcaccgtcgccagcacaacaaggacaaacctttcaagtgtcacaactgccaccgagcttatacagatgctgcatccctggaggtgcacctttctacacacactgtgaagcatgccaaagtgtacacctgtactatttgctcccgcgcttatacctccgaaacctatctcatgaagcacatgcggaaacataatccaccagacttgcagcaacaggtgcaagccgccgccgccgctgccgcagttgcccaagcccaggcccaggctcaagcccaggctcaggctcaggcccaggcgcaggctcaggcccaggcatctcaggcatctcagcaacagcagcaacagcaacaacagcagcaacagcaacagcagcagcctcctcctcactttcagtcacctggcgccgccccgcagggcggaggaggaggggattccaaccctaatccacctcctcaatgttcttttgaccttacaccctacaaaaccgctgaacatcataaagacatctgcctcacagtgacgacctcaaccatccaagtggagcacctcgcctcatcctag

SEQ ID NO: 51203 - DNA, 1734 bp, Artificial Sequence
  derived and/or modified sequence
atggaagaaagtcacttcaactccaacccctacttctggccctccattcccaccgtgtcaggccaaatcgagaataccatgttcattaacaagatgaaagatcagctgttgccagaaaagggctgtggcttggcccctccccactaccccaccctcctgacggtgcctgccagcgtgagcttgccatctgggatcagcatggatacagagtcgaagtctgaccagctgactccacacagccaggcttccgtcacacagaatataactgtcgtacctgtgccctctactggactgatgaccgcaggcgtctcctgttcacagcgctggcgccgagaagggtcccagagcagaggcccaggcctggttattacaagcccgtccggctctctggttaccaccgcaagctcagctcaaactttcccgatctcggcaccaatgattgtcagcgcactcccacccggaagccaggctctgcaggtggtgcctgatctctccaaaaaggtggcctccacccttacagaagagggtggcggtggcggaggtggcggaggcagcgtcgcacccaaacccccacggggacgcaaaaaaaagagaatgctggagagcggcttgcccgagatgaatgacccgtacgtcctgtcaccagaagatgacgacgatcatcagaaggatggtaagacttacaggtgccgcatgtgttcccttacgttttactccaaatccgaaatgcagatccacagcaagtctcacaccgagaccaagccacacaagtgccctcactgtagtaagactttcgccaattccagctacctcgcccagcatattcgtatccacagtggagccaaaccatactcttgcaatttttgtgaaaagtccttccggcaattgtcacatctgcagcagcataccagaatacactctaagatgcacactgagactatcaagccccacaagtgccctcattgtagcaagaccttcgcaaataccagctacctcgcgcaacacctgcggatacacagcggggctaaaccctataactgttcttactgccagaaggcttttcgtcagttaagccacctgcagcagcacacacggatccacactggcgatcggccatataagtgtgcccatcctgggtgcgagaaggcgttcacacagttgtccaatctccaatcgcatagacgacagcacaataaagacaagccattcaagtgtcacaattgccacagggcttataccgatgcagccagcctggaggtccatctaagtacccatactgtgaagcatgccaaagtatatacctgcactatttgctccagagcctacaccagtgagacgtatctgatgaagcacatgagaaaacacaatccacccgacctgcaacagcaggtgcaggccgctgctgccgcagcagccgtggcgcaggcccaagcccaagcacaggcccaggcacaggcccaggctcaggcgcaggcacaggctcaggcatcacaggcttctcagcagcagcagcagcagcagcaacagcaacagcagcaacagcagcagccaccaccacacttccagtctcccggagctgctccacagggcggaggtgggggagattctaatccaaacccaccaccacaatgttcgtttgaccttaccccctacaagacagctgagcaccacaaggacatttgcttgactgttactaccagcacaattcaggttgaacacctcgcctcctcctag

SEQ ID NO: 51204 - DNA, 1734 bp, Artificial Sequence
  derived and/or modified sequence
atggaggagtcacacttcaacagtaatccatacttctggccgagcatccctaccgtgagcgggcagatcgagaacacaatgttcatcaataagatgaaggatcagcttttgccggaaaagggctgcggcttggcacctccccactaccccacactgctgacggtgcccgcttcagtatctctgccttcagggatctctatggatacagaatctaagagtgatcagctgacccctcatagccaggcctccgtcactcagaacataacagtagtgccagtgccttccacgggactgatgactgccggtgtctcttgcagccaacggtggagacgcgagggtagccagagccgcggacctgggctggtgataaccagcccttctgggtccttggtgactacggcgtcctccgcgcagactttcccaatcagcgccccaatgatcgtatccgccctgcctcccggttcccaggcattacaggtcgtgcccgatctgagcaagaaggtagcaagtaccctaaccgaagagggcggtggagggggaggagggggaggtagcgtggctcccaaaccacccaggggcaggaagaagaagaggatgctcgaatctggtcttcccgaaatgaatgacccctacgtgttgagtcccgaggatgatgacgaccatcaaaaagatggaaagacatatagatgtcgtatgtgctcgttgacattctactcaaagagcgagatgcaaattcattccaaaagtcacactgagactaaaccccataagtgtcctcattgtagtaaaacctttgctaattccagttacctcgcccaacacatacggattcactctggggctaagccctacagctgcaacttctgtgaaaagtcattcagacagctttcccatcttcagcagcatacaaggatccactctaaaatgcacacagagactatcaagccacataaatgccctcactgtagcaaaaccttcgccaatacaagttatttggctcaacaccttcgtattcattccggggcaaaaccttataattgttcttactgccagaaggcctttagacagctgagccacctgcagcagcacaccaggatccacaccggggatcgaccttacaaatgcgctcatcccggatgtgagaaagctttcacacagctatcaaatctacaatcacacagaagacagcacaataaagataagccttttaagtgtcacaattgccaccgtgcctacacagatgccgcatcactggaggtgcatctgtctacccacaccgtgaagcatgccaaagtctacacatgcacaatttgcagccgagcctacactagcgagacatacctaatgaaacacatgcggaagcataaccccccagatctccagcaacaggtgcaggcagctgcggctgcggctgccgtcgcccaagcccaggctcaggctcaggcacaagctcaggcccaagcgcaggcccaggcccaagctcaggccagccaggcctcccagcagcaacagcagcagcagcagcagcagcagcagcagcagcagcagcctcctcctcactttcagtcacccggagctgcgcctcagggcggaggcggaggagattccaatcccaacccgccaccacagtgctcctttgacttaaccccctacaaaaccgccgaacatcataaggatatctgcctgaccgtgacaacgagtaccattcaagttgaacacctcgcatcctcatag

SEQ ID NO: 51205 - DNA, 2978 bp, Artificial Sequence
  derived and/or modified sequence
cgcgttccgtgcgtgtgagtgtgtgggtctgtctcgctccagaagtgcgtgcccgcgcgctgcgccttgcgctttttcccctccctcgccccttcctggtcctcccaccctcctcggctccctcctttcccagcaaacgccgcccctcccgcgccctggctcaggctctggcgccgccgcagccgtcgccgcccgaaagttcaggagccctggaaaggagaaggaataagacggcaggaggaagagagagagagggtagaatggaagaatctcacttcaattctaacccgtacttctggccttctatccccacagtctcaggtcagatcgagaacacaatgttcatcaacaagatgaaggatcagctgttgccagagaagggctgtggtctggccccacctcactaccccaccttgctgacagtgcctgcctcagtgtccctgccctcaggcatcagtatggacacagagtccaagtcagaccagctgaccccacacagccaagcgtccgttacccagaatatcacggtggtccctgtgccgtctacaggactgatgactgctggagtctcctgttctcagaggtggagaagagaagggagtcaatcaaggggtccgggtttggtaatcacgtccccctcaggctctcttgtgaccacagcatcatcagctcagaccttccccatttcggctcccatgattgtctcagctcttccccctggctcacaagccctgcaggttgtccctgacctctccaagaaggtagcatcgaccctaaccgaggaaggaggcggaggtggtggtggaggtggcagtgtggctcctaagccaccccggggccggaagaagaagcggatgctggaatcagggctgcccgagatgaatgacccttatgtcctctcccctgaggatgatgatgaccatcagaaagacggcaagacctacaggtgccggatgtgctcactgacattctactccaagtcggagatgcagatccactccaagtcacacaccgagaccaagccccacaagtgcccacattgctccaagaccttcgccaacagctcctacctggcccagcacatccgtatacactcaggggctaagccctacagttgtaacttctgtgagaaatccttccgccagctctcccaccttcagcagcacacccggatccactccaagatgcacacggagaccatcaagccccacaagtgcccgcactgctccaagaccttcgccaacacctcctacctggcccagcacctccgtatccactcgggggccaagccctacaactgttcctactgccagaaggccttccgccagctctcccacctccagcagcacacacgaatccacactggtgatagaccatacaaatgtgcacacccaggctgtgagaaagccttcacacaactctccaatctgcagtcccacagacggcaacacaacaaagataaacccttcaagtgccacaactgtcatcgggcgtacacggatgcagcctcactagaggtgcacctgtctacgcacacagtgaagcatgccaaggtgtacacctgcactatctgcagtcgggcatacacatcagaaacataccttatgaaacatatgcgcaaacacaacccgcctgatcttcagcaacaggtgcaggcagcagcagcagcggcagcagtggcccaggcccaggctcaagctcaagcccaggctcaggctcaggctcaagcccaggcccaggcccaggcctcccaggcatcacagcagcagcagcagcagcagcagcagcagcagcagcagcagcaacagccaccaccacacttccagtctcctggggcagccccccagggtgggggtggtggggacagcaatcccaaccctccaccccagtgttcctttgacctgaccccgtataagacggcggagcatcataaggacatctgcctcactgtcaccaccagcaccatccaggtggagcacctggccagctcttagagatccgtgctgccacccactgggaagaggaagaagtagtcctggtgtcttctttctccaactcttggtgggaaaagtccttttcttccttgacaggccttggctccatctccttgggcctctgtcacggctttccttcacaggataccatcctttttctgaactcttcttcaaaaggaacatcagccctcctgattgcaaaggaatactgagctgatggtgtcatccagcagcctcccctcccaagcaaagcttctaaaactgggggtcggtgctcaagggaaggatttgctatgacctcatagaaccttgtccagtgtggccacttaccctatccttaccctccttatcctcaaagtttgggctgatgtaagactagaggctggccctcccagataacagagaaaagggagccccaaatgcaaccagcctcttgttctattcttgcctgcaaaagaacagaggtttctcaaatgcctcagtccctgagagccatttcttcccctacatcgtctcactttgcttcctattgactgctggtagaaggagatttggggtaggggctagacctccttttatttgaagggggcaagggctgagatgtggtccccaaggggccagaaattcccaagttggtcacaggtggcttagaagtgtgtgttatggttttacggatttccttgaagcctctctccttctctgcctacaaagaccctatactctcagtctccccaacccacccccaaggagctgtgggaggctttgtgttatctgtgaaactccaaaacaggggtgttgcggagaagggagagttcaaggcaaacgcaaggactggacttagctccctaggtgccacagtcagatgccggacacggatttatatataaatatatatatataaatatattatactcactcatcacggccatctttgttgtaaccatttctgtgtttataaatgcattatctctgagaattttcata

SEQ ID NO: 51206 - DNA, 3008 bp, Artificial Sequence
  derived and/or modified sequence
gctatttccctccctccccccttttcgtttccggcgctcccgccttctctccgcagagctcttctctgagcctgttggggggagggaggggggcgtggaggaactggggttcgcgggagcacgagctgcagcaccacttccggaaagttcaggagccctggaaaggagaaggaataagacggcaggaggaagagagagagagggtagaatggaagaatctcacttcaattctaacccgtacttctggccttctatccccacagtctcaggtcagatcgagaacacaatgttcatcaacaagatgaaggatcagctgttgccagagaagggctgtggtctggccccacctcactaccccaccttgctgacagtgcctgcctcagtgtccctgccctcaggcatcagtatggacacagagtccaagtcagaccagctgaccccacacagccaagcgtccgttacccagaatatcacggtggtccctgtgccgtctacaggactgatgactgctggagtctcctgttctcagaggtggagaagagaagggagtcaatcaaggggtccgggtttggtaatcacgtccccctcaggctctcttgtgaccacagcatcatcagctcagaccttccccatttcggctcccatgattgtctcagctcttccccctggctcacaagccctgcaggttgtccctgacctctccaagaaggtagcatcgaccctaaccgaggaaggaggcggaggtggtggtggaggtggcagtgtggctcctaagccaccccggggccggaagaagaagcggatgctggaatcagggctgcccgagatgaatgacccttatgtcctctcccctgaggatgatgatgaccatcagaaagacggcaagacctacaggtgccggatgtgctcactgacattctactccaagtcggagatgcagatccactccaagtcacacaccgagaccaagccccacaagtgcccacattgctccaagaccttcgccaacagctcctacctggcccagcacatccgtatacactcaggggctaagccctacagttgtaacttctgtgagaaatccttccgccagctctcccaccttcagcagcacacccggatccactccaagatgcacacggagaccatcaagccccacaagtgcccgcactgctccaagaccttcgccaacacctcctacctggcccagcacctccgtatccactcgggggccaagccctacaactgttcctactgccagaaggccttccgccagctctcccacctccagcagcacacacgaatccacactggtgatagaccatacaaatgtgcacacccaggctgtgagaaagccttcacacaactctccaatctgcagtcccacagacggcaacacaacaaagataaacccttcaagtgccacaactgtcatcgggcgtacacggatgcagcctcactagaggtgcacctgtctacgcacacagtgaagcatgccaaggtgtacacctgcactatctgcagtcgggcatacacatcagaaacataccttatgaaacatatgcgcaaacacaacccgcctgatcttcagcaacaggtgcaggcagcagcagcagcggcagcagtggcccaggcccaggctcaagctcaagcccaggctcaggctcaggctcaagcccaggcccaggcccaggcctcccaggcatcacagcagcagcagcagcagcagcagcagcagcagcagcagcagcaacagccaccaccacacttccagtctcctggggcagccccccagggtgggggtggtggggacagcaatcccaaccctccaccccagtgttcctttgacctgaccccgtataagacggcggagcatcataaggacatctgcctcactgtcaccaccagcaccatccaggtggagcacctggccagctcttagagatccgtgctgccacccactgggaagaggaagaagtagtcctggtgtcttctttctccaactcttggtgggaaaagtccttttcttccttgacaggccttggctccatctccttgggcctctgtcacggctttccttcacaggataccatcctttttctgaactcttcttcaaaaggaacatcagccctcctgattgcaaaggaatactgagctgatggtgtcatccagcagcctcccctcccaagcaaagcttctaaaactgggggtcggtgctcaagggaaggatttgctatgacctcatagaaccttgtccagtgtggccacttaccctatccttaccctccttatcctcaaagtttgggctgatgtaagactagaggctggccctcccagataacagagaaaagggagccccaaatgcaaccagcctcttgttctattcttgcctgcaaaagaacagaggtttctcaaatgcctcagtccctgagagccatttcttcccctacatcgtctcactttgcttcctattgactgctggtagaaggagatttggggtaggggctagacctccttttatttgaagggggcaagggctgagatgtggtccccaaggggccagaaattcccaagttggtcacaggtggcttagaagtgtgtgttatggttttacggatttccttgaagcctctctccttctctgcctacaaagaccctatactctcagtctccccaacccacccccaaggagctgtgggaggctttgtgttatctgtgaaactccaaaacaggggtgttgcggagaagggagagttcaaggcaaacgcaaggactggacttagctccctaggtgccacagtcagatgccggacacggatttatatataaatatatatatataaatatattatactcactcatcacggccatctttgttgtaaccatttctgtgtttataaatgcattatctctgagaattttcatatttgatgttttgtttatttttgtcctttttttccctctctccacccctgtcctctagccacagcatttttctttttgtcttt

SEQ ID NO: 51207 - protein, 360 aa, Artificial Sequence
  derived and/or modified sequence
MWRRVCGGLAGRRPSGDMLLLKKHTEDISSVYEIRERLGSGAFSEVVLAQERGSAHLVALKCIPKKALRGKEALVENEIAVLRRISHPNIVALEDVHESPSHLYLAMELVTGGELFDRIMERGSYTEKDASHLVGQVLGAVSYLHSLGIVHRDLKPENLLYATPFEDSKIMVSDFGLSKIQAGNMLGTACGTPGYVAPELLEQKPYGKAVDVWALGVISYILLCGYPPFYDESDPELFSQILRASYEFDSPFWDDISESAKDFIRHLLERDPQKRFTCQQALRHLWISGDTAFDRDILGSVSEQIRKNFARTHWKRAFNATSFLRHIRKLGQIPEGEGASEQGMARHSHSGLRAGQPPKW

SEQ ID NO: 51208 - DNA, 1083 bp, Artificial Sequence
  derived and/or modified sequence
atgtggaggagagtgtgtggcggattggccggccgacgcccttctggtgatatgctgctcctgaagaaacacacggaggatatatctagcgtttatgagatacgtgagcgattgggatctggtgctttctccgaggtggttttggcacaagaaaggggctctgctcacttagtggccttaaagtgtatccctaaaaaagccctcagaggcaaggaggcacttgtggagaacgagatagccgttcttagaagaatcagccatcccaatatcgtggctctggaagatgtgcacgaatctccaagccacctgtacctggctatggaactggtcaccggtggcgagctgtttgatcggataatggaaaggggcagctacactgagaaggatgcttcccatctcgtaggccaagtgctgggcgccgtcagctatttgcattccttgggcatcgttcatcgggatttgaagccggagaatttgctttacgctactccgtttgaggactccaaaatcatggtttccgattttgggctgagcaaaatccaggcaggcaacatgctcggcactgcctgcggcacgccggggtatgtggcaccagagctcctcgagcagaaaccttacggaaaagccgttgacgtatgggctctgggggtgataagctacatactattgtgcgggtatccaccattttatgatgaatccgatcccgagctcttctcccagatccttcgcgcttcatatgagtttgacagtccattttgggacgatatcagtgaatccgcaaaagactttatccgacacctgctggagagggatccccagaagcgcttcacttgccagcaggcactgcggcatctatggatcagcggtgacacagctttcgatcgggacatcctcggtagcgtgtccgaacagattaggaagaattttgcaaggacccactggaaacgagctttcaatgccacaagctttctccggcacattagaaaattgggccagattccagaaggggagggcgcttccgagcaaggcatggccagacatagccatagtggactgagggcagggcaaccccctaagtggtag

SEQ ID NO: 51209 - DNA, 1083 bp, Artificial Sequence
  derived and/or modified sequence
atgtggaggagagtgtgtggcggcctggccggccggcggcccagcggggacatgctgctgctgaagaagcacacagaggacatcagctctgtgtatgagatccgggagcggctgggcagcggggccttcagcgaggtggtgctggcccaggagcggggcagcgcccacctggtggccctgaagtgcatccccaagaaggccctgcggggcaaggaggccctggtggagaatgaaattgctgtgctgcggcgcatcagccaccccaacatcgtggccctggaggatgtgcatgagagccccagccacctgtacctggccatggagctggtgactggaggagagctgtttgaccgcatcatggagcggggcagctacacagagaaggatgccagccacctggtgggccaggtgctgggcgctgtgtcctacctgcacagcctgggcatcgtgcaccgggacctgaagccagagaacctgctgtatgccaccccatttgaggacagcaagatcatggtgtctgactttggcctgagcaagatccaggccggcaacatgctgggcacagcctgtggcaccccaggctacgtggcccctgagctgctggagcagaagccctacggcaaggctgtggatgtgtgggccctgggcgtcatctcctacatcctgctgtgtggctacccacccttctatgatgaaagtgaccctgagctgttcagccagatcctgcgggccagctatgaatttgacagccccttctgggatgacatcagcgagagcgccaaggacttcatccgccacctgctggagcgggacccccagaagcgcttcacctgccagcaggccctgcggcacctgtggatcagcggggacacagcctttgaccgggacatcctgggctctgtgtctgagcagatcaggaagaactttgcccggacccactggaagagggccttcaatgccaccagcttcctgcggcacatcaggaagctgggccagatccctgagggggagggcgccagcgagcagggcatggcccggcacagccacagcggcctgcgggccggccagccccccaagtggtag

SEQ ID NO: 51210 - DNA, 1083 bp, Artificial Sequence
  derived and/or modified sequence
atgtggcggcgggtgtgcggcggcctggccggccggcggcccagcggcgatatgctgctcctcaagaagcataccgaagatataagcagtgtgtacgaaatccgcgagaggctgggcagtggcgctttcagcgaggtggtgctggcacaggagcgtgggagcgctcatttagttgcactcaagtgcatccccaagaaagctctgcgcggcaaggaagcgctggtggagaacgagattgccgtacttcgccgcatttcccatcctaacatcgtcgctctagaggacgtgcacgagtcacctagtcatctttacttggctatggagctggttaccggtggagaacttttcgataggatcatggaacgcggctcttataccgaaaaggacgccagtcacctggtgggccaagtgttgggagccgtgtcctatctacattcacttggaattgtgcatcgcgacttaaagccagagaatcttttatacgccaccccttttgaagactccaaaataatggtgagtgatttcggactttctaaaatacaggcgggtaatatgctgggtaccgcgtgtggaactcccggctatgtcgcacccgaactactggaacagaagccatatgggaaggctgtggacgtttgggcactgggggtcatcagctacatcctgctctgtgggtatcccccattttatgacgaatcggacccagagcttttctcccaaattctccgcgcctcgtacgagtttgatagccctttctgggacgacatcagcgaatccgcgaaagactttattagacatcttctcgagcgagacccgcagaagcgatttacatgccaacaggcactgcgccatctgtggatctccggtgacacagcattcgatagggacatccttgggtcagtctctgagcagattcgtaagaactttgcccgtacccattggaagcgcgcatttaacgccacctccttcctaaggcatatcagaaaactgggccagattcctgagggggagggggcatccgaacagggcatggctagacacagtcattctggactgcgcgccggccagccaccaaagtggtag

SEQ ID NO: 51211 - DNA, 1455 bp, Artificial Sequence
  derived and/or modified sequence
agcagctgtaggcctgggatgtggaggcgtgtatgcggtggcctcgctgggaggcgtccgtctggggacatgctgctgctgaagaaacacacggaggacatcagcagcgtctacgagatccgcgagaggctcggctcgggtgccttctccgaggtggtgctggcccaggagcggggctccgcacacctcgtggccctcaagtgcatccccaagaaggccctccggggcaaggaggccctggtggagaacgagatcgcagtgctccgtaggatcagtcaccccaacatcgtcgctctggaggatgtccacgagagcccttcccacctctacctggccatggaactggtgacgggtggcgagctgtttgaccgcatcatggagcgcggctcctacacagagaaggatgccagccatctggtgggtcaggtccttggcgccgtctcctacctgcacagcctggggatcgtgcaccgggacctcaagcccgaaaacctcctgtatgccacgccctttgaggactcgaagatcatggtctctgactttggactctccaaaatccaggctgggaacatgctaggcaccgcctgtgggacccctggatatgtggccccagagctcttggagcagaaaccctacgggaaggccgtagatgtgtgggccctgggcgtcatctcctacatcctgctgtgtgggtacccccccttctacgacgagagcgaccctgagctcttcagccagatcctgagggccagctatgagtttgactctcctttctgggatgacatctcagaatcagccaaagacttcatccggcaccttctggagcgagacccccagaagaggttcacctgccaacaggccttgcggcacctttggatctctggggacacagccttcgacagggacatcttaggctctgtcagtgagcagatccggaagaactttgctcggacacactggaagcgagccttcaatgccacctcgttcctgcgccacatccggaagctggggcagatcccagagggcgagggggcctctgagcagggcatggcccgccacagccactcaggcctccgtgctggccagccccccaagtggtgatgcccaggcagatgccgaggccaagtggactgacccccagatttccttcccttggatgctttcggtcccctcccccaacccctccccctggggctggcctctgctggattttgagatttgagggtgtggcgcatggcgctggggttggaatggggcacccccaagtctgtccccaggctctgccctgcctgggggcagtggctcccctcccctgttgcctctcccgcccctgccccccccgccccgccaaaagccgagggggtgctggcaggcgggcctcaggggctgtctttcctgcacggctgttgtgtgcttcgctgagtgtgggtggtcctgcttgtgtcatggtcatgg

SEQ ID NO: 51212 - DNA, 1612 bp, Artificial Sequence
  derived and/or modified sequence
agcacacctgtcacgcctggcgcgccccctgcccgcacgcgctcggtccacgcagctcgggacgcgggcggcccaggctgccaggtccccctgctccgcggcgccgagggctgggctgcgtctgcggccgcgtgggtggccgcggtcttggcaggtggctgcgcgcgggggtcgcagacatgctgctgctgaagaaacacacggaggacatcagcagcgtctacgagatccgcgagaggctcggctcgggtgccttctccgaggtggtgctggcccaggagcggggctccgcacacctcgtggccctcaagtgcatccccaagaaggccctccggggcaaggaggccctggtggagaacgagatcgcagtgctccgtaggatcagtcaccccaacatcgtcgctctggaggatgtccacgagagcccttcccacctctacctggccatggaactggtgacgggtggcgagctgtttgaccgcatcatggagcgcggctcctacacagagaaggatgccagccatctggtgggtcaggtccttggcgccgtctcctacctgcacagcctggggatcgtgcaccgggacctcaagcccgaaaacctcctgtatgccacgccctttgaggactcgaagatcatggtctctgactttggactctccaaaatccaggctgggaacatgctaggcaccgcctgtgggacccctggatatgtggccccagagctcttggagcagaaaccctacgggaaggccgtagatgtgtgggccctgggcgtcatctcctacatcctgctgtgtgggtacccccccttctacgacgagagcgaccctgagctcttcagccagatcctgagggccagctatgagtttgactctcctttctgggatgacatctcagaatcagccaaagacttcatccggcaccttctggagcgagacccccagaagaggttcacctgccaacaggccttgcggcacctttggatctctggggacacagccttcgacagggacatcttaggctctgtcagtgagcagatccggaagaactttgctcggacacactggaagcgagccttcaatgccacctcgttcctgcgccacatccggaagctggggcagatcccagagggcgagggggcctctgagcagggcatggcccgccacagccactcaggcctccgtgctggccagccccccaagtggtgatgcccagatgccgaggccaagtggactgacccccagatttccttcccttggatgctttcggtcccctcccccaacccctccccctggggctggcctctgctggattttgagatttgagggtgtggcgcatggcgctggggttggaatggggcacccccaagtctgtccccaggctctgccctgcctgggggcagtggctcccctcccctgttgcctctcccgcccctgccccccccgccccgccaaaagccgagggggtgctggcaggcgggcctcaggggctgtctttcctgcacggctgttgtgtgcttcgctgagtgtgggtggtcctgcttgtgtcatggtcatggccttccagccccctccagttttccccaaaccaataaagaaagatacagcaa

SEQ ID NO: 51213 - DNA, 771 bp, Artificial Sequence
  derived and/or modified sequence
ggctgaggcctgcctggcagggggtggaggaggaagctgcccttgcccccggcggggcggggagagacccccatcacctctcccctgcccctgcagacatgctgctgctgaagaaacacacggaggacatcagcagcgtctacgagatccgcgagaggctcggctcgggtgccttctccgaggtggtgctggcccaggagcggggctccgcacacctcgtggccctcaagtgcatccccaagaaggccctccggggcaaggaggccctggtggagaacgagatcgcagtgctccgtaggatcagtcaccccaacatcgtcgctctggaggatgtccacgagagcccttcccacctctacctggccatggaactggtgacgggtggcgagctgtttgaccgcatcatggagcgcggctcctacacagagaaggatgccagccatctggtgggtcaggtccttggcgccgtctcctacctgcacagcctggggatcgtgcaccgggacctcaagcccgaaaacctcctgtatgccacgccctttgaggactcgaagatcatggtctctgactttggactctccaaaatccaggctgggaacatgctaggcaccgcctgtgggacccctggatatgtggccccagagctcttggagcagaaaccctacgggaaggccgtagatgtgtgggccctgggcgtcatctcctacatcctgctgtgtgggtacccccccttctacgacgagagcgaccctgagctcttcagccagatcc

SEQ ID NO: 51214 - DNA, 725 bp, Artificial Sequence
  derived and/or modified sequence
ccccgctcctggcaggctgcagccgtctcctcccggtgctccctccttccttgagctctctccaccgctgcccactgggggctacagcttcccggctaccctggaagctggaggccgggaccagctcttcaggtgacaggcctctgtgtctccacagtgggcagaggggagcctgcctggctgatgagcaagcctcgactttgtcatcaaggcagagaaggggcccgggtaaatgaccccggcggcccccacccctgcctggcgtgagagtgggtaggggcttcggacttgaggggactggagcgggaacaaggcaaggctgccccctgcctttgactgaagctggtctggagacaggggcattagagaagtgactcatagatggcctaaagaagcggggccactcaaggacccaggacagagggaagagggccaacccagctggaccacaggcaaaccccattgcctttgagagaaagaagaggacccggtgaaacatgctgctgctgaagaaacacacggaggacatcagcagcgtctacgagatccgcgagaggctcggctcgggtgccttctccgaggtggtgctggcccaggagcggggctccgcacacctcgtggccctcaagtgcatccccaagaaggccctccggggcaaggaggccctggtggagaacgagatcgcagtgctccgtaggatcagtcaccccaacatcgtcgctctg

SEQ ID NO: 51215 - DNA, 1083 bp, Artificial Sequence
  derived and/or modified sequence
atgtggcgccgagtgtgcggtgggctcgctgggagacggcctagcggcgacatgctgctcctgaaaaaacacacagaagatatttccagtgtgtatgagatccgagaacgattgggaagcggtgccttttcagaggttgtgctggctcaggagaggggctctgcccatttggtggcgctaaagtgtatccccaaaaaagctctacgaggaaaagaggcgctagtggaaaacgagatcgccgttctccgaaggatttcccaccccaatattgttgccctcgaggatgttcatgaatctccttcacatctgtacctagccatggaactagtaaccggcggagaactgtttgatcgtattatggagcggggtagctacacagagaaggatgcatcacacctcgttggtcaggtgctaggggctgtctcctatctccattcgctaggcattgtacaccgggaccttaaaccagagaatttgttatacgcaactccattcgaggacagtaaaatcatggtgagtgactttggcctctcaaagatacaggctgggaatatgctgggaaccgcttgtgggactcccggttacgtcgcgcctgagctgctggaacaaaaaccatatggaaaggcagttgacgtttgggcactcggggtgataagctatatactgctgtgcgggtacccgccattctacgatgaatctgaccctgagcttttcagccagatacttagagcgtcatacgagttcgacagcccattctgggatgatatatctgaatccgctaaagacttcatccggcaccttttagaacgagacccacagaagcgcttcacatgccaacaagcgctgcgtcatttgtggatctccggagacaccgcatttgacagagacattctgggctctgttagtgaacagattcgcaagaactttgccagaacgcattggaaacgggcatttaatgccacctcgtttctgaggcacatcagaaaactggggcagattccagaaggcgagggcgctagcgagcaagggatggccaggcattctcactctggcctgcgggctggccagccaccaaaatggtag

SEQ ID NO: 51216 - DNA, 1083 bp, Artificial Sequence
  derived and/or modified sequence
atgtggagaagagtgtgcggcggcctggccggcagaagacccagcggcgacatgctgctgctgaagaagcacaccgaggacatcagcagcgtgtacgagatcagagagagactgggcagcggcgccttcagcgaggtggtgctggcccaggagagaggcagcgcccacctggtggccctgaagtgcatccccaagaaggccctgagaggcaaggaggccctggtggagaacgagatcgccgtgctgagaagaatcagccaccccaacatcgtggccctggaggacgtgcacgagagccccagccacctgtacctggccatggagctggtgaccggcggcgagctgttcgacagaatcatggagagaggcagctacaccgagaaggacgccagccacctggtgggccaggtgctgggcgccgtgagctacctgcacagcctgggcatcgtgcacagagacctgaagcccgagaacctgctgtacgccacccccttcgaggacagcaagatcatggtgagcgacttcggcctgagcaagatccaggccggcaacatgctgggcaccgcctgcggcacccccggctacgtggcccccgagctgctggagcagaagccctacggcaaggccgtggacgtgtgggccctgggcgtgatcagctacatcctgctgtgcggctacccccccttctacgacgagagcgaccccgagctgttcagccagatcctgagagccagctacgagttcgacagccccttctgggacgacatcagcgagagcgccaaggacttcatcagacacctgctggagagagacccccagaagagattcacctgccagcaggccctgagacacctgtggatcagcggcgacaccgccttcgacagagacatcctgggcagcgtgagcgagcagatcagaaagaacttcgccagaacccactggaagagagccttcaacgccaccagcttcctgagacacatcagaaagctgggccagatccccgagggcgagggcgccagcgagcagggcatggccagacacagccacagcggcctgagagccggccagccccccaagtggtag

SEQ ID NO: 51217 - protein, 139 aa, Artificial Sequence
  derived and/or modified sequence
MDSKKRSSTEAEGSKERGLVHIWQAGSFPITPERLPGWGGKTVLQAALGVKHGVLLTEDGEVYSFGTLPWRSGPVEICPSSPILENALVGQYVITVATGSFHSGAVTDNGVAYMWGENSAGQCAVANQQYVPEPNPVSI

SEQ ID NO: 51218 - protein, 106 aa, Artificial Sequence
  derived and/or modified sequence
MDSKKRSSTEAEGSKERGLVHIWQAGSFPITPERLPGWGGKTVLQAALGVKHGVLLTEDGEVYSFGTLPWRSGPVEICPSSPILENALVGQYVITVATGSFHSGAV

SEQ ID NO: 51219 - protein, 396 aa, Artificial Sequence
  derived and/or modified sequence
MDSKKRSSTEAEGSKERGLVHIWQAGSFPITPERLPGWGGKTVLQAALGVKHGVLLTEDGEVYSFGTLPWRSGPVEICPSSPILENALVGQYVITVATGSFHSGAVTDNGVAYMWGENSAGQCAVANQQYVPEPNPVSIADSEASPLLAVRILQLACGEEHTLALSISREIWAWGTGCQLGLITTAFPVTKPQKVEHLAGRVVLQVACGAFHSLALVQCLPSQDLKPVPERCNQCSQLLITMTDKEDHVIISDSHCCPLGVTLTESQAENHASTALSPSTETLDRQEEVFENTLVANDQSVATELNAVSAQITSSDAMSSQQNVMGTTEISSARNIPSYPDTQAVNEYLRKLSDHSVREDSEHGEKPVPSQVPAQFYKIKVCLELNCMGFSLETLK

SEQ ID NO: 51220 - DNA, 420 bp, Artificial Sequence
  derived and/or modified sequence
atggacagcaagaagcggtcaagcacggaggcggaaggctcaaaggaacgaggactggtccatatctggcaagctggtagcttccccattacaccggagagactcccgggctgggggggtaaaacagtgctgcaggcagcacttggggttaaacatggtgtgctgctgactgaagacggtgaggtgtacagcttcggaacattgccctggcgcagtggccctgtggagatctgtccatcatcccctattctggaaaacgcgctggtgggacaatacgtaatcacagttgctaccggcagcttccactctggtgccgtaactgacaacggtgtggcttacatgtggggtgaaaatagcgctgggcaatgcgcagtggccaatcaacagtacgtgccagaacccaaccccgtgtctatctag

SEQ ID NO: 51221 - DNA, 321 bp, Artificial Sequence
  derived and/or modified sequence
atggacagcaagaagcgatcctcaaccgaggccgagggttcaaaggagagagggctggtgcacatctggcaggctggctcatttcccattactcccgaaaggctgcctgggtgggggggaaagactgttctccaggccgcattaggcgttaaacatggcgtgctcctgactgaagacggagaggtgtacagctttggaacactcccgtggaggtcaggtcctgtagagatctgcccctcaagcccaatcctcgaaaacgccctggtgggacagtatgtgatcactgtggcaacagggtcatttcatagcggcgccgtatag

SEQ ID NO: 51222 - DNA, 1191 bp, Artificial Sequence
  derived and/or modified sequence
atggactccaaaaagcggtcttccacagaagccgaaggatctaaggaacgtggactggtgcacatttggcaggccgggtcattccccatcactcctgagagactccccgggtggggaggaaagaccgtgctccaggccgctttaggtgtgaagcacggagttttgctgactgaagacggagaagtgtattcttttgggacactcccctggcggtccggtcccgtggagatttgccccagctctccgatcctggaaaatgcactggttggccagtatgtgattaccgtggctaccggctccttccactctggggcggtgacagacaatggcgtagcttacatgtggggcgaaaattccgcaggccagtgtgctgttgctaaccagcagtacgtcccagagcccaacccagtgtctatcgcggatagtgaggctagcccactgctggccgtgaggatccttcagctggcctgcggtgaagaacatactctggctctgtcaatcagtcgggaaatatgggcgtggggaaccgggtgtcagctgggccttatcactaccgccttccccgttactaagccgcagaaggtagaacacctggccggacgagtggtgctgcaggtggcttgtggggccttccatagtctcgcactcgtgcagtgcctcccatcccaggacctgaagcccgttcctgaacgctgcaaccagtgctcgcaactcctcatcacaatgaccgacaaagaagaccatgtgattatctctgattctcattgctgtcctctgggtgtgacgttaactgaaagccaggccgaaaatcacgcctctaccgccctgagtccttcgacggagactttggatcgacaggaggaggtattcgaaaataccctggtagccaacgatcagtccgtggcaaccgagcttaacgctgtgagcgcccagataacttcatccgatgcaatgtcaagtcagcagaatgtgatgggaaccaccgaaatatcttctgcccgtaatattcctagctatcccgatacacaagctgtcaatgaatatttaaggaagttaagcgaccactcggtgcgcgaagactccgaacacggtgaaaagcctgtcccttctcaagtaccagcacaattctataaaataaaggtgtgcctcgaactcaactgtatgggcttctccctggaaacacttaaatag

SEQ ID NO: 51223 - DNA, 420 bp, Artificial Sequence
  derived and/or modified sequence
atggacagcaagaagaggagcagcacagaagctgagggcagcaaggagcggggcctggtgcacatctggcaggccggcagcttccccatcaccccagagcggctgcccggctggggcggcaagacagtgctgcaggccgccctgggcgtgaagcacggcgtgctgctgacagaagatggagaggtgtacagctttggcaccctgccctggaggagcggccctgtggagatctgccccagcagccccatcctggagaatgccctggtgggccagtatgtgatcaccgtggccaccggcagcttccacagcggggctgtgacagacaatggagtggcctacatgtggggagaaaattctgctggccagtgtgctgtggccaaccagcagtatgtgcctgagcccaaccctgtgtccatctag

SEQ ID NO: 51224 - DNA, 321 bp, Artificial Sequence
  derived and/or modified sequence
atggacagcaagaagaggagcagcacagaagctgagggcagcaaggagcggggcctggtgcacatctggcaggccggcagcttccccatcaccccagagcggctgcccggctggggcggcaagacagtgctgcaggccgccctgggcgtgaagcacggcgtgctgctgacagaagatggagaggtgtacagctttggcaccctgccctggaggagcggccctgtggagatctgccccagcagccccatcctggagaatgccctggtgggccagtatgtgatcaccgtggccaccggcagcttccacagcggggctgtgtag

SEQ ID NO: 51225 - DNA, 1191 bp, Artificial Sequence
  derived and/or modified sequence
atggacagcaagaagaggagcagcacagaagctgagggcagcaaggagcggggcctggtgcacatctggcaggccggcagcttccccatcaccccagagcggctgcccggctggggcggcaagacagtgctgcaggccgccctgggcgtgaagcacggcgtgctgctgacagaagatggagaggtgtacagctttggcaccctgccctggaggagcggccctgtggagatctgccccagcagccccatcctggagaatgccctggtgggccagtatgtgatcaccgtggccaccggcagcttccacagcggggctgtgacagacaatggagtggcctacatgtggggagaaaattctgctggccagtgtgctgtggccaaccagcagtatgtgcctgagcccaaccctgtgtccattgctgacagcgaggccagccccctgctggccgtgcgcatcctgcagctggcctgtggggaggagcacaccctggccctgagcatcagccgggagatctgggcctggggcaccggctgccagctgggcctcatcaccacagccttccctgtgaccaagccccagaaggtggagcacctggccggccgggtggtgctgcaggtggcctgtggggccttccacagcctggccctggtgcagtgcctgcccagccaggacctgaagcctgtgcctgagcgctgcaaccagtgcagccagctgctgatcaccatgacagacaaggaggaccacgtgatcatcagtgacagccactgctgccccctgggcgtgaccctgacagagagccaggctgaaaatcatgccagcacagccctgagccccagcacagagaccctggaccggcaggaggaggtgtttgagaacaccctggtggccaatgaccagagcgtggccacagagctgaatgctgtgtctgcccagatcaccagcagtgatgccatgagcagccagcagaatgtgatgggcaccacagagatcagcagcgccaggaacatccccagctacccagacacccaggccgtgaatgagtacctgaggaagctgagtgaccacagcgtgagagaagattctgaacatggagagaagcctgtgcccagccaggtgcctgcccagttctacaagatcaaggtgtgcctggagctgaactgcatgggcttcagcctggagaccctgaagtag

SEQ ID NO: 51226 - DNA, 420 bp, Artificial Sequence
  derived and/or modified sequence
atggacagcaagaagcggagcagcaccgaggccgagggcagcaaggaacggggtctggtgcacatctggcaagccggctcctttcctatcacgcctgagagattaccgggctggggaggaaagacagtgctccaagccgctctgggcgtcaagcacggcgttcttctgactgaggatggcgaggtgtacagtttcgggaccctgccgtggagaagtggccccgtggaaatctgtcccagttcccccatcttggagaacgctctggtgggccagtatgtgatcactgtggcgacagggagctttcactctggcgctgttactgataacggagtggcttatatgtggggcgagaatagcgccggacagtgtgcagtggctaatcagcaatatgtccccgagccgaacccagttagcatctag

SEQ ID NO: 51227 - DNA, 321 bp, Artificial Sequence
  derived and/or modified sequence
atggacagcaagaagcggagcagcaccgaggccgagggcagcaaggagagaggcctggtgcatatatggcaagcaggttctttcccgattacgccagaacgcctacctggctggggcgggaaaactgtccttcaggctgcactgggagttaaacatggcgtgcttctcacagaagatggtgaggtatacagcttcggaaccctgccatggagaagcggaccggttgagatttgtccctcaagccccatattagagaacgcgctagttgggcagtacgtgatcactgtagctactggatcatttcacagcggcgccgtctag

SEQ ID NO: 51228 - DNA, 1191 bp, Artificial Sequence
  derived and/or modified sequence
atggacagcaagaagcggagcagcaccgaggccgagggcagcaaggagcgaggtttagtccacatctggcaggccggatcctttcccataacacctgaacggcttcccggatggggaggtaagacagtcctccaagctgcactcggtgtaaagcacggcgttctcctcactgaggatggcgaagtgtacagctttgggacattgccatggagaagtggccccgtggagatctgccccagctcaccaattctggaaaatgccctggtaggacagtacgttataacagtggctacagggtctttccactccggcgccgtgaccgacaatggtgtcgcctacatgtggggcgaaaactctgccgggcagtgcgcggtcgccaaccagcagtatgtccctgagcccaatcctgtgagcatcgcggacagtgaagcaagccccctcttggccgtcagaatattgcagttagcatgcggggaggaacacaccctggctctgtcaatttcccgagaaatctgggcctgggggactggctgccaattgggactcatcactaccgcctttccagtgaccaagcctcagaaggttgagcacctcgccgggcgtgttgtcctgcaggtagcctgtggtgcctttcattccctggccctggtgcaatgtctgccttctcaagacctgaagcccgtgccagagcgctgtaatcagtgttcccagctcctgatcaccatgaccgacaaggaagaccatgttatcatatcagactcccattgttgcccacttggcgtgacactaaccgaatcccaagcagaaaaccacgcctcaaccgccctgtctccttctaccgaaaccttggataggcaggaggaggtattcgaaaacactttggtggcaaacgatcagtcagttgcaacagaactgaatgctgtgtctgcccaaatcacatctagtgacgccatgagcagccagcagaacgtgatgggaacaaccgaaattagttctgcacggaatatcccatcataccccgacactcaggccgtgaatgaataccttagaaaacttagcgatcacagcgtgagagaggacagtgagcacggagaaaagcccgtaccatcccaggtgccagcccagttttacaagattaaagtttgcctcgagttgaactgcatgggattctccttagaaacactgaagtag

SEQ ID NO: 51229 - DNA, 571 bp, Artificial Sequence
  derived and/or modified sequence
aagctcgcgccggatgcggagcgcggtgctgccggtggagcttcagcttatgtcttgatgtttgcctgcatgtagctgaactgattgatccaggtcttgatagactttctgtaaagaaggaatgatttggtgatggagtgttcccactgaccgatggactcaaagaagagaagctcaacagaggcagaaggatccaaggaaagaggcctggtccatatctggcaggcaggatcctttcccataacaccagagagattgccaggctggggaggaaagactgttttgcaggcagccctcggagtgaaacatggagttcttctgactgaagatggtgaggtctacagctttgggactcttccctggagaagtggaccagtggagatttgtccaagtagccccattctagaaaatgccctggttgggcaatatgttattactgtggcaacaggaagcttccatagtggagcagtgacagacaatggtgtcgcgtacatgtggggagagaattctgctggccagtgtgcagtagccaaccagcagtatgtgccggaaccaaatcctgtcagcattg

SEQ ID NO: 51230 - DNA, 559 bp, Artificial Sequence
  derived and/or modified sequence
agctgatcccgcggacccactgggttgccaagctcgcgccggatgcggagcgcggtgctgccggtggagcttcaggatggagaaggaactgactgctgtacccaagtgaagatctttactcagttacccttatatttggctatatggaataaaattgtgtgatatgtttattctgagcaggtcttgatagactttctgtaaagaaggaatgatttggtgatggagtgttcccactgaccgatggactcaaagaagagaagctcaacagaggcagaaggatccaaggaaagaggcctggtccatatctggcaggcaggatcctttcccataacaccagagagattgccaggctggggaggaaagactgttttgcaggcagccctcggagtgaaacatggagttcttctgactgaagatggtgaggtctacagctttgggactcttccctggagaagtggaccagtggagatttgtccaagtagccccattctagaaaatgccctggttgggcaatatgttattactgtggcaacaggaagcttccatagtggagcagtga

SEQ ID NO: 51231 - DNA, 2674 bp, Artificial Sequence
  derived and/or modified sequence
gaatcagctgatcccgcggacccactgggttgccaagctcgcgccggatgcggagcgcggtgctgccggtggagcttcaggtcttgatagactttctgtaaagaaggaatgatttggtgatggagtgttcccactgaccgatggactcaaagaagagaagctcaacagaggcagaaggatccaaggaaagaggcctggtccatatctggcaggcaggatcctttcccataacaccagagagattgccaggctggggaggaaagactgttttgcaggcagccctcggagtgaaacatggagttcttctgactgaagatggtgaggtctacagctttgggactcttccctggagaagtggaccagtggagatttgtccaagtagccccattctagaaaatgccctggttgggcaatatgttattactgtggcaacaggaagcttccatagtggagcagtgacagacaatggtgtcgcgtacatgtggggagagaattctgctggccagtgtgcagtagccaaccagcagtatgtgccggaaccaaatcctgtcagcattgctgattctgaggccagccctttgttagcagtcaggattttacagttggcgtgtggcgaggagcacactctggcattgtcaataagcagagagatttgggcatggggtaccggttgtcagttgggtctcattaccactgccttcccagtgacaaagccgcaaaaggtagaacatcttgctgggcgagtggtgcttcaagttgcctgtggtgctttccacagcttagcccttgtacaatgcctcccttcccaggatctgaagccagtcccagaacgatgcaaccagtgcagccagctcttgattactatgactgacaaagaagaccatgtgattatatcagacagtcattgttgcccattaggtgtgacactgacagaatctcaggcagaaaaccatgccagcactgctctcagcccctccactgaaacccttgacaggcaggaagaagtatttgagaacactcttgtagcaaatgatcagtctgttgctactgaactgaatgcagtaagtgctcagatcacaagcagcgatgccatgtcctctcaacaaaatgtcatgggaacaactgaaatttcctctgccagaaacataccatcataccctgacacccaagcagtcaatgaatacctacggaaactgtcagatcattcagtaagagaggactcagagcatggtgaaaagccagtgccatctcaggtacctgctcaattttataaaataaaagtgtgtctagagttgaactgtatgggcttttctttagaaactttaaaatgagtaaggcttggtagcattttttattttttgagtttgattataattttgttttatcaggcaagcctagataaaggaaagaacctggattaattcaaaatcactctttatgtttgttctggccctttatgatattgaaaggtgtcatgttgggcttgttttataagtaggagcatttcatttttttttcttgctagtactttttttctatggctaaagtactgaattttggtgggccctgaatagtttaatataactagagattcacaaagattcttcttacttgtgtttgtaacactcttcagaattctgtagagaaaagtcttttccttctttaacagggaagattgttttgtggcagatccttcaattgtaggcagatttaaaacttacaggcaattacatgtttcagtttttttcaattatagctgtggtccttactgggcttaatttgaagaggtggctaatattttatctttttgtttgtttgtttttgagatggggtcttgctctgtcacccaggctggagtgcagtaatgcgattgtggctcactgcagcctcgatctcccaggttcaagcgatcctcccatttcagccttccaagtagctgggactatacacatgccaccacacctgctgattttatttttaagtagagtagagcctgttgcccaggctcatctcaaactcctgagctcaagcaatcctcccacctcagcctcccaaagtgttgagattacaggcatgagccatcatgcccagcctattttatatatcttattaaaactattttcattttgaagatttgtggtagaatgaacaaaagttgtttatcagtagcacatggtaaagtttgagttcccgcttaaactaaattgttttaaaaggattatttctgtgttttactcttagtgtggccttttgattttgctttaccaaaactgtaagaaaacaaaacaaaagatcatactcataaaagatctgtcctgcagtgtttctttttaggtttttgaaaccacatagcctcttgattctcaattcttattgtttactctgtcagaatgtgaacatgaaggtatttttagaaatagtctttatttcacaatctattcactgaaacttgtgggtatttgaatttttaaaaaaatcaaggataagctgtttggagaaaggtattataaagtctgaacaaagcaaaagtagtagtttaacaagaatgcatgtagaaaattcttagactgtacatgcttatcacattttacttactttgttaaacattggaagtttttgttacttatgctagtaacaatgtgtgtgtttctattgaattaaatttaatttattt

SEQ ID NO: 51232 - DNA, 420 bp, Artificial Sequence
  derived and/or modified sequence
atggacagtaagaagagaagttctaccgaggcagagggatctaaggaacgtggcctggtgcacatatggcaagcagggagcttcccaatcacccccgaacgtcttcctggatggggcggaaaaaccgttctgcaggccgcattaggtgtaaagcatggggtgctgctgaccgaagatggcgaggtatatagcttcggtaccctgccctggcgaagcggccctgttgagatttgccctagttcaccaatcctcgaaaacgctctggtgggccaatacgtaatcacagtggccacaggctcttttcactcaggcgctgtcaccgacaatggcgttgcctacatgtggggcgagaactcagctggccaatgcgctgtggcaaaccaacagtatgtgcctgaacccaatcccgttagcatctag

SEQ ID NO: 51233 - DNA, 321 bp, Artificial Sequence
  derived and/or modified sequence
atggacagcaaaaagcggtcctccactgaagcagaaggatccaaggagcgcggtctggtccacatctggcaggccggtagtttccccatcacacctgagaggctgcccggttggggagggaagaccgtcctgcaggctgctttaggagtgaagcatggggtccttctcactgaggacggcgaagtttacagcttcgggactttgccctggcggagcggccctgtagaaatatgcccgtcatcccctatcctggagaacgcactggttgggcaatacgtgattacggttgccacgggctctttccatagtggggctgtgtag

SEQ ID NO: 51234 - DNA, 1191 bp, Artificial Sequence
  derived and/or modified sequence
atggacagcaagaaaaggtcatccaccgaggccgaagggtcaaaagagcgtggccttgtgcatatttggcaagcgggaagctttcccatcacgccagagaggctgcctggatgggggggaaagaccgtgctgcaggctgccctgggtgtcaagcacggagtactgctgacagaggacggcgaggtgtattccttcggcacactcccttggagatcggggccagtagaaatatgcccatcttctcccattctggaaaatgctctcgtgggccagtacgtcattactgtcgctactggttctttccatagcggtgcagtaacagataacggagtggcctacatgtggggggagaatagcgccggacaatgcgctgtggccaaccagcagtacgtgcctgaacccaatcccgtaagtatcgccgattctgaggctagtcctcttcttgctgtgaggatcctccagctggcttgtggagaggaacataccctcgccctttccatatctagggagatctgggcttgggggacagggtgtcaactgggactgataaccactgctttcccagtcacaaagcctcaaaaggttgaacacctcgcgggacgtgttgtgctccaggtggcctgcggcgctttccactccttagcgctggtccagtgcctcccctcccaggatctgaaacctgtaccagagcgatgtaatcagtgctcacagctcctcataactatgactgacaaagaagatcacgtgatcatcagcgactcccactgctgtccactcggagtgacgcttaccgagagtcaagccgagaaccacgctagcaccgctctctctccatctacagagaccttggataggcaggaagaggttttcgagaatacactggtggccaacgaccaatctgtcgccaccgagctgaatgcagtgtcagcccagatcacatcctcggacgccatgtcatctcagcagaacgtgatgggaaccacagagatcagctctgctaggaatattccatcttaccctgatacccaggctgtgaacgaatatcttagaaagttgagtgatcactctgtgagggaggactcagaacacggcgagaagcccgtgcccagtcaggtgccagcgcagttctacaaaattaaggtgtgtctcgaactcaactgtatgggattcagcttagaaacacttaagtag

SEQ ID NO: 51235 - DNA, 420 bp, Artificial Sequence
  derived and/or modified sequence
atggacagcaagaagagaagcagcaccgaggccgagggcagcaaggagagaggcctggtgcacatctggcaggccggcagcttccccatcacccccgagagactgcccggctggggcggcaagaccgtgctgcaggccgccctgggcgtgaagcacggcgtgctgctgaccgaggacggcgaggtgtacagcttcggcaccctgccctggagaagcggccccgtggagatctgccccagcagccccatcctggagaacgccctggtgggccagtacgtgatcaccgtggccaccggcagcttccacagcggcgccgtgaccgacaacggcgtggcctacatgtggggcgagaacagcgccggccagtgcgccgtggccaaccagcagtacgtgcccgagcccaaccccgtgagcatctag

SEQ ID NO: 51236 - DNA, 321 bp, Artificial Sequence
  derived and/or modified sequence
atggacagcaagaagagaagcagcaccgaggccgagggcagcaaggagagaggcctggtgcacatctggcaggccggcagcttccccatcacccccgagagactgcccggctggggcggcaagaccgtgctgcaggccgccctgggcgtgaagcacggcgtgctgctgaccgaggacggcgaggtgtacagcttcggcaccctgccctggagaagcggccccgtggagatctgccccagcagccccatcctggagaacgccctggtgggccagtacgtgatcaccgtggccaccggcagcttccacagcggcgccgtgtag

SEQ ID NO: 51237 - DNA, 1191 bp, Artificial Sequence
  derived and/or modified sequence
atggacagcaagaagagaagcagcaccgaggccgagggcagcaaggagagaggcctggtgcacatctggcaggccggcagcttccccatcacccccgagagactgcccggctggggcggcaagaccgtgctgcaggccgccctgggcgtgaagcacggcgtgctgctgaccgaggacggcgaggtgtacagcttcggcaccctgccctggagaagcggccccgtggagatctgccccagcagccccatcctggagaacgccctggtgggccagtacgtgatcaccgtggccaccggcagcttccacagcggcgccgtgaccgacaacggcgtggcctacatgtggggcgagaacagcgccggccagtgcgccgtggccaaccagcagtacgtgcccgagcccaaccccgtgagcatcgccgacagcgaggccagccccctgctggccgtgagaatcctgcagctggcctgcggcgaggagcacaccctggccctgagcatcagcagagagatctgggcctggggcaccggctgccagctgggcctgatcaccaccgccttccccgtgaccaagccccagaaggtggagcacctggccggcagagtggtgctgcaggtggcctgcggcgccttccacagcctggccctggtgcagtgcctgcccagccaggacctgaagcccgtgcccgagagatgcaaccagtgcagccagctgctgatcaccatgaccgacaaggaggaccacgtgatcatcagcgacagccactgctgccccctgggcgtgaccctgaccgagagccaggccgagaaccacgccagcaccgccctgagccccagcaccgagaccctggacagacaggaggaggtgttcgagaacaccctggtggccaacgaccagagcgtggccaccgagctgaacgccgtgagcgcccagatcaccagcagcgacgccatgagcagccagcagaacgtgatgggcaccaccgagatcagcagcgccagaaacatccccagctaccccgacacccaggccgtgaacgagtacctgagaaagctgagcgaccacagcgtgagagaggacagcgagcacggcgagaagcccgtgcccagccaggtgcccgcccagttctacaagatcaaggtgtgcctggagctgaactgcatgggcttcagcctggagaccctgaagtag

SEQ ID NO: 51238 - DNA, 816 bp, Artificial Sequence
  derived and/or modified sequence
atgggcccccccggcagcagccccacccccgagcccccccagaaggaggtgcagaaggagggcgccgccgaccccaagcaggtgggcgagcccagcggccagaagaccctggacggcagcagcagaagcgccgagctggtgccccagggcgaggacgacagcgagtacctggagagagacgcccccgccggcgacgccggcagatggctgagagtgagcttcggcctgttcggcagcgtgtgggtgaacgacttcagcagagccaagaaggccaacaagagaggcgactggagagaccccagccccagactggtgctgcacttcggcggcggcggcttcctggccttctacaactgccagctgagctggagcagcagccccgtggtgacccccacctgcgacatcctgagcgagaagttccacagaggccaggccctggaggccctgggccaggcccagcccgtgtgctacaccctgctggaccagagatacttcagcggcctgggcaacatcatcaagaacgaggccctgtacagagccggcatccaccccctgagcctgggcagcgtgctgagcgccagcagaagagaggtgctggtggaccacgtggtggagttcagcaccgcctggctgcagggcaagttccagggcagaccccagcacacccaggtgtaccagaaggagcagtgccccgccggccaccaggtgatgaaggaggccttcggccccgaggacggcctgcagagactgacctggtggtgcccccagtgccagccccagctgagcgaggagcccgagcagtgccagttcagctag

SEQ ID NO: 51239 - DNA, 816 bp, Artificial Sequence
  derived and/or modified sequence
atgggaccacccggctcttcacctaccccagaacccccccagaaggaagtacaaaaggagggggcagctgacccaaaacaggtcggggaaccttcaggacagaagaccctggacgggtccagtcgtagcgccgaactggtcccccagggcgaagacgacagcgaatatctggagagagacgccccagcaggcgacgcaggcagatggctcagggtgagctttggattgtttgggagtgtgtgggttaatgatttcagcagggctaagaaggcaaataaaagaggagactggcgcgacccaagccccaggttggttctccattttggaggagggggatttcttgccttctataactgccagcttagctggtcttctagccctgtggtgacacctacctgcgacatactgtctgaaaagtttcacagagggcaagcgctggaggccttgggccaggcacagcctgtctgttatacgctattggatcagagatattttagcggactggggaacatcattaagaacgaggccttataccgggcgggaatacacccactttcacttgggtcggtgctttctgctagcagaagagaggtcctggttgaccatgtggtcgaattcagcacagcttggttacaggggaaattccagggccgcccacagcatacccaggtctatcagaaagaacaatgcccagctggacatcaggtcatgaaggaagccttcggcccggaagatggactccagcgtctgacctggtggtgtccccagtgccagccacaactgtctgaggagcccgagcaatgtcaattttcctag

SEQ ID NO: 51240 - DNA, 816 bp, Artificial Sequence
  derived and/or modified sequence
atgggccccccaggcagcagccccaccccagagcccccccagaaggaggtgcagaaggagggcgctgctgaccccaagcaggtgggggagcccagcggccagaagaccctggatggcagcagccgctctgctgagctggtgccccagggagaagatgacagcgagtacctggagagagatgccccagctggagatgctggccgctggctgcgggtgtcctttggcctgtttggatctgtgtgggtgaatgacttcagccgggccaagaaggccaacaagagaggagactggagggaccccagcccccggctggtgctgcactttggaggcggcggcttcctggccttctacaactgccagctgtcctggagcagcagccctgtggtgacccccacctgtgacatcctgtctgagaagttccaccggggccaggccctggaggccctgggccaggcccagcctgtgtgctacaccctgctggaccagcgctacttcagcggcctgggcaacatcatcaagaatgaggccctgtaccgggccggcatccaccccctgagcctgggctctgtgctgagcgccagcagaagagaggtgctggtggaccacgtggtggagttcagcacagcctggctgcagggcaagttccagggccggccccagcacacccaggtgtaccagaaggagcagtgcccagctggccaccaggtgatgaaggaggcctttggaccagaagatggcctgcagaggctgacctggtggtgcccccagtgccagccccagctgtctgaggagcctgagcagtgccagttctcctag

SEQ ID NO: 51241 - DNA, 816 bp, Artificial Sequence
  derived and/or modified sequence
atgggcccccccggcagcagccccacccccgagcccccccagaaggaagtgcagaaggaaggcgccgccgacccaaagcaggtcggcgaaccgtctggccagaaaacactggatggaagctcacgctccgcggagctggtccctcagggggaggatgatagcgagtacctcgaacgggacgcccccgccggagacgcaggtcgatggttacgcgttagtttcggactgtttggatcggtgtgggtcaatgatttctcgcgcgctaagaaggccaacaagagaggcgactggagagatccttccccacgcctcgtccttcactttggtggagggggctttctggccttttacaattgccagctctcttggtcgagttcgcctgtggtcacccctacttgtgacatcttatctgagaaatttcatagaggccaagcactggaggccctaggacaggctcaaccagtttgctataccctcctggaccagcgctatttttcaggactgggtaacattataaaaaatgaagctctgtaccgggccggcatccatcccctttccctagggagtgttctgtcagcctcccggagggaggtgctggtggaccacgtcgtggagttctccaccgcctggctccaaggaaagttccaaggaaggccacagcacacacaagtttatcagaaggagcagtgcccagcggggcaccaggtgatgaaagaagcctttgggccggaggacggccttcagagacttacgtggtggtgcccccaatgtcaaccccagctgagcgaagagccagagcagtgccaattttcctag

SEQ ID NO: 51242 - DNA, 816 bp, Artificial Sequence
  derived and/or modified sequence
atgggtcccccaggctcatcaccaaccccagagcctcctcagaaggaagtgcagaaggagggcgctgcagaccctaaacaggttggcgagccctctggacagaagaccctagatggtagttcacggagcgcagagctggttccccagggagaagacgattctgagtaccttgagcgggatgccccagcaggtgatgcagggagatggttgcgggtatcatttggcctgttcggatccgtctgggttaacgacttctcaagagccaagaaagcaaacaagagaggagattggcgcgaccctagtccaagactggtgctgcacttcggcggaggtggctttctggctttttacaattgccagctaagctggtcgagttccccagtggtaacccccacgtgtgatatattatccgaaaagttccaccgtgggcaggcattagaggccctgggccaggcacagcccgtgtgttacactctgctggatcagcggtacttttcaggcctaggtaacatcatcaagaacgaagccctgtacagagctgggattcatcctctaagtctcggctccgtacttagcgcgtcaaggcgagaggttcttgttgatcatgtcgttgagttcagtactgcctggctacagggcaagtttcaaggtcggcctcaacatacacaggtatatcaaaaagaacaatgcccagccggacatcaagtgatgaaggaggccttcggccctgaggatggcctgcagcggttaacatggtggtgcccccagtgtcaacctcagctcagcgaggaaccagagcaatgccagttttcctag

SEQ ID NO: 51243 - protein, 216 aa, Artificial Sequence
  derived and/or modified sequence
MPEGPLVRKFHHLVSPFVGQQVVKTGGSSKKLQPASLQSLWLQDTQVRLVLHFGGGGFLAFYNCQLSWSSSPVVTPTCDILSEKFHRGQALEALGQAQPVCYTLLDQRYFSGLGNIIKNEALYRAGIHPLSLGSVLSASRREVLVDHVVEFSTAWLQGKFQGRPQHTQVYQKEQCPAGHQVMKEAFGPEDGLQRLTWWCPQCQPQLSEEPEQCQFS

SEQ ID NO: 51244 - DNA, 651 bp, Artificial Sequence
  derived and/or modified sequence
atgcccgagggccccctggtgagaaagttccaccacctggtgagccccttcgtgggccagcaggtggtgaagaccggcggcagcagcaagaagctgcagcccgccagcctgcagagcctgtggctgcaggacacccaggtgagactggtgctgcacttcggcggcggcggcttcctggccttctacaactgccagctgagctggagcagcagccccgtggtgacccccacctgcgacatcctgagcgagaagttccacagaggccaggccctggaggccctgggccaggcccagcccgtgtgctacaccctgctggaccagagatacttcagcggcctgggcaacatcatcaagaacgaggccctgtacagagccggcatccaccccctgagcctgggcagcgtgctgagcgccagcagaagagaggtgctggtggaccacgtggtggagttcagcaccgcctggctgcagggcaagttccagggcagaccccagcacacccaggtgtaccagaaggagcagtgccccgccggccaccaggtgatgaaggaggccttcggccccgaggacggcctgcagagactgacctggtggtgcccccagtgccagccccagctgagcgaggagcccgagcagtgccagttcagctag

SEQ ID NO: 51245 - DNA, 651 bp, Artificial Sequence
  derived and/or modified sequence
atgccagagggcccccttgtccgaaagtttcaccatctggtatctcccttcgtggggcagcaggtagtgaaaaccggtggcagctccaagaagctgcagcccgcttcattgcagtccctttggcttcaggatacccaggtccgcttggtcctgcatttcggtgggggcggatttctcgccttctacaactgtcagctttcgtggagttcctcgccagtcgtcaccccaacttgtgatatcttgtcagagaagttccaccgaggccaggccctggaagcgctgggccaggcacagccagtctgttacactttactagatcagcggtactttagtggactcggcaatatcattaagaatgaggccctctatcgagctgggatccacccactgtccctgggatctgtactgagtgcatcaaggcgggaagtgctcgtcgaccacgtggtagaattttcaacggcatggctgcaaggaaagtttcaaggacggcctcaacatactcaagtatatcaaaaggagcagtgccccgctggtcaccaagtaatgaaagaagcatttggtccggaggatgggctgcagcgtctgacctggtggtgtccgcagtgccagcctcaactgtccgaggaaccagagcagtgtcagttctcctag

SEQ ID NO: 51246 - DNA, 651 bp, Artificial Sequence
  derived and/or modified sequence
atgcctgagggccccctggtgaggaagttccaccacctggtgagcccctttgtgggccagcaggtggtgaagacaggaggcagcagcaagaagctgcagcctgccagcctgcagagcctgtggctgcaggacacccaggtgcggctggtgctgcactttggaggcggcggcttcctggccttctacaactgccagctgtcctggagcagcagccctgtggtgacccccacctgtgacatcctgtctgagaagttccaccggggccaggccctggaggccctgggccaggcccagcctgtgtgctacaccctgctggaccagcgctacttcagcggcctgggcaacatcatcaagaatgaggccctgtacagagctggcatccaccccctgagcctgggctctgtgctgagcgccagccggcgggaggtgctggtggaccacgtggtggagttcagcacagcctggctgcagggcaagttccagggccggccccagcacacccaggtgtaccagaaggagcagtgcccagctggccaccaggtgatgaaggaggccttcggcccagaagatggcctgcagaggctgacctggtggtgcccccagtgccagccccagctgtctgaggagcctgagcagtgccagttctcctag

SEQ ID NO: 51247 - DNA, 651 bp, Artificial Sequence
  derived and/or modified sequence
atgcccgagggccccctggtgcggaagttccaccacctggtgagcccgttcgtgggccaacaggtggtgaagaccggaggtagtagtaaaaagcttcaaccggccagtcttcagtcattatggcttcaagacactcaagtaagactagtgctgcatttcggcggaggaggcttcctggcattctacaattgtcaactaagctggtcttcgtcaccagttgtgactcctacgtgcgacatcctgagcgagaagttccaccgtggacaggcactcgaggcgctcggtcaagcacagcctgtctgctacaccctgctggatcagagatatttctccgggttgggcaatattatcaagaacgaggcactgtaccgggcgggtattcacccgttaagtctagggagtgtgctgtccgcctcacggcgtgaagtgctagtggatcacgtggttgagttcagcacagcgtggctgcagggtaagttccaggggcgcccccagcacacacaggtctatcagaaggaacagtgtcctgctggccatcaagtaatgaaggaggcattcggccccgaggatggacttcagaggctgacctggtggtgtccgcagtgccagccacaattgtcggaagagccggagcaatgtcagttttcctag

SEQ ID NO: 51248 - DNA, 998 bp, Artificial Sequence
  derived and/or modified sequence
aaatctccgcccccagctggagcggctgtgcgggctgcgtagcggtgctgggtcgggccgacgtgccacccacccggagccggctgttgcagaggcggcttgcttcccacctgtccatctccataaaaatccctaaacgaaacatgcccacgtgtccggagattttcaggacttggtgcatttcagatgaaggcttttccagaagcttccccgtagaagaggatcaggcatccaactggttaagggatgccagaagggccgttggtgaggaaatttcaccatttggtctccccctttgtgggtcagcaggtggtcaagacagggggcagcagtaagaagctacagcccgccagcctgcagtctctgtggctccaggacacccaggtgaggttggtcctgcactttggtggtggtggcttcctggcattttataattgtcagttgtcttggagctcttccccagtggtcacacccacctgtgacatcctgtctgagaagttccatcgaggacaagccttagaagctctaggccaggctcagcctgtctgctatacactgctggaccagagatacttctcagggctagggaacatcattaagaatgaagccttgtacagagctgggatccatcccctttctctcggttcagtcctgagtgcctcgcgtcgggaggtcctggtggatcacgtggtggagttcagtacagcctggctgcagggcaagttccaaggcagaccgcagcacacacaggtctaccagaaagaacagtgccctgctggccaccaggtcatgaaggaggcgtttgggcccgaagatgggttacagaggctcacctggtggtgcccgcagtgccagccccagttgtcagaggagccagagcagtgccagttctcctaaggagctggtggtgctcctcacggaaccttgccgcttggggaacctgacgtctaagtgtccagaaaggaggatgtgggcagggacggggtacagaggatagt

SEQ ID NO: 51249 - DNA, 651 bp, Artificial Sequence
  derived and/or modified sequence
atgccagaaggccctctcgtccggaagttccaccacctggtgagcccatttgtcgggcagcaggtcgtcaagacaggaggcagctctaaaaaactgcagcccgcttccctccagtctctctggcttcaggatactcaggtgcgactggtgttgcacttcggtggcggaggatttcttgcgttctacaactgccagctgagttggagcagttctcccgttgtcacacctacttgtgacatcctctccgagaaatttcatagaggtcaagccctggaggcactggggcaagctcagcctgtctgctatacacttttggaccagagatatttctccggcctgggaaatatcatcaagaacgaggctttataccgcgcagggatccatcctctgtcactgggttcagtgctatccgcgtccaggcgtgaggttctcgtggatcacgtggtcgaattttccaccgcttggctccaaggcaaatttcagggccgaccgcagcatacccaagtatatcagaaagaacagtgccccgcagggcaccaagttatgaaggaggctttcggaccagaggatggactgcagagactaacctggtggtgccctcagtgtcagcctcagctcagtgaagaaccagagcagtgccagttcagctag

SEQ ID NO: 51250 - protein, 205 aa, Artificial Sequence
  derived and/or modified sequence
MAWQGLAAEFLQVPAVTRAYTAACVLTTAAVQLELLSPFQLYFNPHLVFRKFQVWRLVTNFLFFGPLGFSFFFNMLFVFRYCRMLEEGSFRGRTADFVFMFLFGGVLMTLLGLLGSLFFLGQALMAMLVYVWSRRSPRVRVNFFGLLTFQAPFLPWALMGFSLLLGNSILVDLLGIAVGHIYYFLEDVFPNQPGGKRLLQTPGFL

SEQ ID NO: 51251 - protein, 239 aa, Artificial Sequence
  derived and/or modified sequence
MAWQGLAAEFLQVPAVTRAYTAACVLTTAAVQLELLSPFQLYFNPHLVFRKFQVWRLVTNFLFFGPLGFSFFFNMLFVFRYCRMLEEGSFRGRTADFVFMFLFGGVLMTLLGLLGSLFFLGQALMAMLVYVWSRRSPRVRVNFFGLLTFQAPFLPWALMGFSLLLGNSILVDLLGIAVGHIYYFLEDVFPNQPGGKRLLQTPGFLGLQSSKAPAGSSLTIWTQQSQGGPGTAGELAAPS

SEQ ID NO: 51252 - DNA, 720 bp, Artificial Sequence
  derived and/or modified sequence
atggcctggcagggcctggccgccgagttcctgcaggtgcccgccgtgaccagagcctacaccgccgcctgcgtgctgaccaccgccgccgtgcagctggagctgctgagccccttccagctgtacttcaacccccacctggtgttcagaaagttccaggtgtggagactggtgaccaacttcctgttcttcggccccctgggcttcagcttcttcttcaacatgctgttcgtgttcagatactgcagaatgctggaggagggcagcttcagaggcagaaccgccgacttcgtgttcatgttcctgttcggcggcgtgctgatgaccctgctgggcctgctgggcagcctgttcttcctgggccaggccctgatggccatgctggtgtacgtgtggagcagaagaagccccagagtgagagtgaacttcttcggcctgctgaccttccaggcccccttcctgccctgggccctgatgggcttcagcctgctgctgggcaacagcatcctggtggacctgctgggcatcgccgtgggccacatctactacttcctggaggacgtgttccccaaccagcccggcggcaagagactgctgcagacccccggcttcctgggcctgcagagcagcaaggcccccgccggcagcagcctgaccatctggacccagcagagccagggcggccccggcaccgccggcgagctggccgcccccagctag

SEQ ID NO: 51253 - DNA, 1063 bp, Artificial Sequence
  derived and/or modified sequence
gcgtgcttgagaaggttcaatggcgtggcagggactagcggccgagttcctgcaggtgccggcggtgacgcgggcttacaccgcagcctgtgtcctcaccaccgccgcggtgcagctggagctcctcagcccctttcaactctacttcaacccgcaccttgtgttccggaagttccaggtctggaggctcgtcaccaacttcctcttcttcgggcccctgggattcagcttcttcttcaacatgctcttcgtgttccgctactgccgcatgctggaagagggctccttccgcggccgcacggccgacttcgtcttcatgtttctcttcgggggcgtccttatgaccctgctgggactcctgggcagcctgttcttcctgggccaggccctcatggccatgctggtgtacgtgtggagccgccgcagccctcgggtgagggtcaacttcttcggcctgctcactttccaggcaccgttcctgccttgggcgctcatgggcttctcgctgctgctgggcaactccatcctcgtggacctgctggggattgcggtgggccatatctactacttcctggaggacgtcttccccaaccagcctggaggcaagaggctcctgcagacccctggcttcctgggacttcagagcagcaaggccccagctggcagtagcctgaccatctggacacagcagagccagggcggcccagggacggcaggagagctcgcggcaccttcctgaggccaagcaaggggagcagggttagggctgttcctgaaaggcagagagcctcttgccctgagcctcacagctactcttctcagctctctgggtctggaaggagaacaggctgaggggagctgagaggagctgaggtgctacccggagccccattcacccccacctgcccacttgggaatctgaggcagaggagggtgaggcctgtgtgccaaccttgttcacataccaccttcgtccccccaggccccggccccactcctggctctcattatttttatgttaaaactttgaagaaattgaacatgacctgttgaagaaattgaa

SEQ ID NO: 51254 - DNA, 720 bp, Artificial Sequence
  derived and/or modified sequence
atggcctggcagggcctggcggctgagttcctacaggttccagcagtcacacgtgcgtataccgcagcctgcgtcctgactacagccgccgtgcaactcgagcttttgtcaccttttcagctctattttaatccccacctggtttttaggaagttccaggtatggcgcctggtcacaaactttttgtttttcgggcctcttggattcagcttctttttcaatatgctttttgtatttagatactgccgcatgctggaagagggatcatttcgggggaggacagccgatttcgtgtttatgttcctattcggaggggttcttatgacactgctgggcctgctcggatcattattttttctgggccaagccctgatggcaatgctcgtttacgtttggtctagacgctctcccagggttagagtaaatttctttggcctccttaccttccaagctcccttcctcccctgggccctaatgggattttcattgctgctgggtaattcaatcttggttgacttgctgggaatcgccgtgggtcatatctactactttctggaggacgtgttcccgaaccagcccggcggaaagagactgctgcagacgcctggattcttgggtttgcagagcagcaaagcaccagctggtagttccttgacaatctggacccagcaaagccagggagggcctggcacagcgggtgagctggctgcgccctcttag

SEQ ID NO: 51255 - DNA, 720 bp, Artificial Sequence
  derived and/or modified sequence
atggcctggcagggcctggccgctgagttcctgcaggtgcctgctgtgacccgggcctacacagctgcctgtgtgctgaccacagctgctgtgcagctggagctgctgagccccttccagctgtacttcaacccccacctggtgttcaggaagttccaggtgtggaggctggtgaccaacttcctgttcttcggccccctgggcttctccttcttcttcaacatgctgtttgtgttccgctactgcaggatgctggaggagggcagcttccggggccgcacagctgactttgtgttcatgttcctgtttggaggagtgctgatgaccctgctgggcctgctgggcagcctcttcttcctgggccaggccctgatggccatgctggtgtatgtgtggagccgccgcagcccccgggtgcgggtgaacttcttcggcctgctgaccttccaggcccccttcctgccctgggccctgatgggcttcagcctgctgctgggcaacagcatcctggtggacctgctgggcattgctgtgggccacatctactacttcctggaggatgtgttccccaaccagcccggcggcaagaggctgctgcagaccccaggcttcctgggcctgcagagcagcaaggccccagctggcagcagcctgaccatctggacccagcagagccagggcggccctggaacagctggggagctggccgcccccagctag

SEQ ID NO: 51256 - DNA, 720 bp, Artificial Sequence
  derived and/or modified sequence
atggcctggcagggcctggccgccgagttcctgcaggtgcccgccgttactcgggcctacaccgcagcatgtgtgttgaccactgctgctgtccagttagaactgttaagcccatttcagctgtatttcaatccacacctggtgtttaggaagttccaagtttggcgactggttactaattttttgtttttcggccctctgggattttcttttttcttcaacatgctgttcgtgtttaggtattgcaggatgttggaggagggctccttccgcggcagaaccgccgactttgtttttatgtttctctttggcggggtccttatgactttgttaggactcctcggctctctgttctttctaggccaggcactcatggccatgctcgtatatgtctggagccgtcggtcccctagggtccgcgttaatttcttcggtttattaaccttccaggccccatttcttccatgggctctcatggggttctcactgttgctcggaaactctattttggtcgacctacttgggatagcagttgggcatatctattacttcctcgaggatgtgttccctaaccaacctggcgggaagcggctattacagactcccggatttctgggactgcagtcttccaaagctccagctggaagttccttaaccatatggacacaacagagccagggcggccccgggactgccggcgagctggctgctccatcctag

SEQ ID NO: 51257 - DNA, 720 bp, Artificial Sequence
  derived and/or modified sequence
atggcgtggcagggactggcagctgaattcctacaggtgccggcagttaccagggcctacaccgctgcgtgcgttctcacaacggcagcagtgcaacttgagcttctgtcgcctttccagctctactttaatccgcacctggtctttcggaagttccaggtgtggaggctggttactaactttctcttcttcggccctttgggattctccttcttttttaatatgctgttcgtgtttaggtattgtcggatgctggaagaagggtcttttcgtggcaggactgctgactttgtatttatgttcttatttggtggagtgcttatgacactgctgggtctcctgggaagtctgttctttttaggacaggcccttatggcaatgcttgtgtatgtgtggagtcgtcggtctccaagggtgagagtgaattttttcggtctcctgacttttcaagcaccattcctgccctgggccctgatgggattcagcctcctcctgggtaatagtatcctagtggacctgttaggaattgccgtggggcatatttattacttccttgaggatgtctttccaaatcagcccggagggaagcggcttcttcagacgcccggattcctggggctccagtcttcgaaagcccctgccggttcaagtctgaccatatggacgcagcagtcccaaggcggaccaggtacagctggagagcttgccgcacctagttag

SEQ ID NO: 51258 - protein, 677 aa, Artificial Sequence
  derived and/or modified sequence
MEETMKLATMEDTVEYCLFLIPDESRDSDKHKEILQKYIERIITRFAPMLVPYIWQNQPFNLKYKPGKGGVPAHMFGVTKFGDNIEDEWFIVYVIKQITKEFPELVARIEDNDGEFLLIEAADFLPKWLDPENSTNRVFFCHGELCIIPAPRKSGAESWLPTTPPTIPQALNIITAHSEKILASESIRAAVNRRIRGYPEKIQASLHRAHCFLPAGIVAVLKQRPRLVAAAVQAFYLRDPIDLRACRVFKTFLPETRIMTSVTFTKCLYAQLVQQRFVPDRRSGYRLPPPSDPQYRAHELGMKLAHGFEILCSKCSPHFSDCKKSLVTASPLWASFLESLKKNDYFKGLIEGSAQYRERLEMAENYFQLSVDWPERLEVQWRDPGLLQAPPPGFTPFICLSLLSTWDNSSLAMSPGEEILTLLQTIPFDIEDLKKEAANLPPEDDDQWLDLSPDQLDQLLQEAVGKKESESVSKEEKEQNYDLTEVSESMKAFISKVSTHKGAELPREPSEAPITFDADSFLNYFDKILGPRPNESDSDDLDDEDFECLDSDDDLDFETHEPGEEASLKGTLDNLKSYMAQMDQELAHTCISKSFTTRNQVEPVSQTTDNNSDEEDSGTGESVMAPVDVDLNLVSNILESYSSQAGLAGPASNLLQSMGVQLPDNTDHRPTSKPTKN

SEQ ID NO: 51259 - DNA, 2034 bp, Artificial Sequence
  derived and/or modified sequence
atggaggagaccatgaagctggccaccatggaggacaccgtggagtactgcctgttcctgatccccgacgagagcagagacagcgacaagcacaaggagatcctgcagaagtacatcgagagaatcatcaccagattcgcccccatgctggtgccctacatctggcagaaccagcccttcaacctgaagtacaagcccggcaagggcggcgtgcccgcccacatgttcggcgtgaccaagttcggcgacaacatcgaggacgagtggttcatcgtgtacgtgatcaagcagatcaccaaggagttccccgagctggtggccagaatcgaggacaacgacggcgagttcctgctgatcgaggccgccgacttcctgcccaagtggctggaccccgagaacagcaccaacagagtgttcttctgccacggcgagctgtgcatcatccccgcccccagaaagagcggcgccgagagctggctgcccaccaccccccccaccatcccccaggccctgaacatcatcaccgcccacagcgagaagatcctggccagcgagagcatcagagccgccgtgaacagaagaatcagaggctaccccgagaagatccaggccagcctgcacagagcccactgcttcctgcccgccggcatcgtggccgtgctgaagcagagacccagactggtggccgccgccgtgcaggccttctacctgagagaccccatcgacctgagagcctgcagagtgttcaagaccttcctgcccgagaccagaatcatgaccagcgtgaccttcaccaagtgcctgtacgcccagctggtgcagcagagattcgtgcccgacagaagaagcggctacagactgcccccccccagcgacccccagtacagagcccacgagctgggcatgaagctggcccacggcttcgagatcctgtgcagcaagtgcagcccccacttcagcgactgcaagaagagcctggtgaccgccagccccctgtgggccagcttcctggagagcctgaagaagaacgactacttcaagggcctgatcgagggcagcgcccagtacagagagagactggagatggccgagaactacttccagctgagcgtggactggcccgagagactggaggtgcagtggagagaccccggcctgctgcaggcccccccccccggcttcacccccttcatctgcctgagcctgctgagcacctgggacaacagcagcctggccatgagccccggcgaggagatcctgaccctgctgcagaccatccccttcgacatcgaggacctgaagaaggaggccgccaacctgccccccgaggacgacgaccagtggctggacctgagccccgaccagctggaccagctgctgcaggaggccgtgggcaagaaggagagcgagagcgtgagcaaggaggagaaggagcagaactacgacctgaccgaggtgagcgagagcatgaaggccttcatcagcaaggtgagcacccacaagggcgccgagctgcccagagagcccagcgaggcccccatcaccttcgacgccgacagcttcctgaactacttcgacaagatcctgggccccagacccaacgagagcgacagcgacgacctggacgacgaggacttcgagtgcctggacagcgacgacgacctggacttcgagacccacgagcccggcgaggaggccagcctgaagggcaccctggacaacctgaagagctacatggcccagatggaccaggagctggcccacacctgcatcagcaagagcttcaccaccagaaaccaggtggagcccgtgagccagaccaccgacaacaacagcgacgaggaggacagcggcaccggcgagagcgtgatggcccccgtggacgtggacctgaacctggtgagcaacatcctggagagctacagcagccaggccggcctggccggccccgccagcaacctgctgcagagcatgggcgtgcagctgcccgacaacaccgaccacagacccaccagcaagcccaccaagaactag

SEQ ID NO: 51260 - DNA, 2034 bp, Artificial Sequence
  derived and/or modified sequence
atggaagaaacaatgaagttagccacgatggaggacacagtcgaatactgcctgttcctgatccccgacgagtcacgggattcagacaaacataaagagattttgcagaagtatatagaaaggattatcacccggttcgcccccatgctcgtaccatacatctggcagaaccagccatttaacctcaagtataagcctggcaaaggcggtgttcctgctcacatgtttggcgtgaccaaattcggagacaatattgaagatgaatggtttatcgtctacgtcattaaacaaattactaaggagtttccagaactggtggcacgtatagaggataatgacggcgagtttttgcttatcgaagccgcagactttctgcccaaatggctagatccagagaactcaaccaatcgggtctttttttgccacggcgagctctgcatcatcccagcgccccgaaagagtggtgcagagtcttggctgccaaccaccccccccacaattcctcaggctctgaatattataactgcacattccgagaagatcctcgcgtccgagtctatccgagccgctgtgaataggcggattcgagggtaccctgagaagatccaggcatccctgcaccgggctcattgttttcttccagccggaatcgtagctgtactaaagcagcgccccaggcttgtggctgccgccgttcaggccttctacctgcgggatcctattgacttgcgggcatgcagggtttttaagacttttttaccagaaacacggataatgaccagcgtgacctttactaaatgcctttacgctcagctggtgcagcagcgatttgtccccgatagacggtccgggtataggctgccacccccatccgacccacagtacagggctcacgagctcggcatgaagctagcccacgggttcgagatcctctgctccaagtgcagtccccatttttccgattgcaaaaagtctctcgttaccgctagccccttgtgggcgtcttttctcgagagcctgaagaagaatgattactttaaagggttgattgaagggagcgctcaataccgggaacgtctggagatggccgaaaattactttcaactttctgtggactggcccgagcggttggaggtgcagtggcgcgaccctggactcctgcaggccccaccaccaggatttaccccatttatctgcctcagtctcctgtcaacatgggacaattctagtctggccatgagccccggcgaggagatcctcacgttgttgcagactatcccattcgatatcgaggacctgaagaaggaagctgccaacctgcctcccgaggatgacgaccagtggctcgatctgagtcccgaccagcttgaccagcttttgcaagaagccgtcgggaagaaagagagcgaaagcgtaagcaaagaagaaaaggagcagaattacgacttgaccgaggtatccgaatcgatgaaggctttcataagcaaggtcagtacacacaagggcgcagaacttccacgggagccatccgaagcgcccataacgttcgacgcagattcctttttgaactactttgacaagattctgggcccccggcctaatgaatctgatagtgacgatttggatgacgaagacttcgaatgccttgattccgacgatgatctggattttgagacccacgagcccggagaggaggctagcctcaaaggaacattggataaccttaaatcttatatggcacaaatggaccaggagcttgcccacacttgcatctccaaatccttcaccacccggaatcaggtcgagccagtttcacagacaaccgataacaattcagacgaggaagacagtgggaccggagaaagcgtgatggcaccagtggatgtggatttgaatctggtgtctaacatcctcgagtcgtactcctctcaagccggtctggcaggacccgctagtaacctgctgcagagcatgggcgtgcagctccctgataatactgatcaccggcccacttccaagccaacaaagaactag

SEQ ID NO: 51261 - DNA, 2034 bp, Artificial Sequence
  derived and/or modified sequence
atggaggagaccatgaagctggccaccatggaggacacagtggagtactgcctcttcctgatcccagatgagagccgggacagcgacaagcacaaggagatcctgcagaagtacatcgagcgcatcatcaccaggtttgcccccatgctggtgccctacatctggcagaaccagcccttcaacctgaagtacaagccaggcaagggcggcgtgcctgcccacatgtttggagtgaccaagtttggagacaacattgaagatgagtggttcatcgtgtatgtgatcaagcagatcaccaaggagttccctgagctggtggccagaattgaggacaatgatggagagttcctgctgattgaagctgctgacttcctgcccaagtggctggaccctgagaacagcaccaacagagtcttcttctgccacggggagctgtgcatcatcccagcccccaggaagagcggggctgagagctggctgcccaccaccccacccaccatcccccaggccctgaacatcatcacagcccacagcgagaagatcctggccagcgagagcatccgggctgctgtgaacagacgcatccggggctacccagagaagatccaggccagcctgcaccgggcccactgcttcctgcctgctggcatcgtggccgtgctgaagcagaggccccggctggtggccgctgctgtgcaggccttctacctgcgggaccccatcgacctgcgggcctgcagggtcttcaagaccttcctgcctgagacccgcatcatgacctctgtgaccttcaccaagtgcctgtatgcccagctggtgcagcagagatttgtgcctgacagaagaagtggctaccgcctgcccccacccagcgacccccagtaccgggcccacgagctgggcatgaagctggcccacggctttgagatcctgtgcagcaagtgcagcccccacttcagtgactgcaagaagagcctggtgacagccagccccctgtgggccagcttcctggagagcctgaagaagaatgactacttcaagggcctcatcgagggcagcgcccagtaccgggagcggctggagatggccgagaactacttccagctgtctgtggactggccagagcggctggaggtgcagtggagggaccccggcctgctgcaggcccctcctcctggcttcacccccttcatctgcctgagcctgctgagcacctgggacaacagcagcctggccatgagccctggagaggagatcctgaccctgctgcagaccatcccctttgatattgaggacctgaagaaggaggccgccaacctgcccccagaagatgatgaccagtggctggacctgagcccagaccagctggaccagctgctgcaggaggccgtgggcaagaaggagagcgagagcgtgtccaaggaggagaaggagcagaactatgacctgacagaggtgtctgagagcatgaaggccttcatcagcaaggtgtccacccacaagggagctgagctgccccgggagcccagcgaggcccccatcacctttgatgctgacagcttcctgaactactttgacaagatcctgggcccccggcccaatgaaagtgacagtgatgacctggatgatgaggactttgaatgtctggacagtgatgatgacctggactttgagacccatgagcccggggaggaggccagcctgaagggcaccctggacaacctgaagagctacatggcccagatggaccaggagctggcccacacctgcatcagcaagagcttcaccaccaggaaccaggtggagcctgtgtcccagaccacagacaacaacagtgatgaagaagattctggaactggagagagcgtgatggcccctgtggatgtggacctgaacctggtgagcaacatcctggagagctacagcagccaggccggcctggccggccctgccagcaacctgctgcagagcatgggcgtgcagctgcctgacaacacagaccaccggcccaccagcaagcccaccaagaactag

SEQ ID NO: 51262 - DNA, 2034 bp, Artificial Sequence
  derived and/or modified sequence
atggaggagaccatgaagctggccaccatggaggacaccgtggagtattgcctgttcctcataccagacgagagtcgcgattccgacaagcacaaagaaatacttcaaaagtacatagagaggataatcacccgattcgctccaatgttggttccgtatatttggcagaaccagccatttaatttgaagtataaacctggcaaaggcggcgtaccagcacacatgttcggagttactaagtttggtgacaacatagaagacgagtggttcatcgtgtatgtaatcaagcagattacaaaagagtttccagaacttgtcgcaagaatcgaggataatgacggcgagttcctgctcatcgaggcagcagactttcttccaaagtggctcgatccagaaaactccaccaaccgggttttcttttgtcacggcgaactgtgtatcatacctgcaccacggaaatctggggcagagagctggttgcctacaacacctcctacaatccctcaagccctgaacattatcaccgcacactccgagaagatcctggcatccgagtccatccgagccgccgtcaaccgcagaattcggggataccccgagaaaatccaggcctcgcttcatcgtgcacattgtttcttgcctgcaggtatcgtggccgttttgaagcagagacctcgtctggtagcagccgcggtccaagccttctaccttcgtgatcctatcgacttacgagcttgccgggttttcaagacattcctccctgaaacaagaatcatgacatcagtcacctttaccaaatgcctgtacgctcagttggtccagcagcggttcgttcccgatagacgctccggttatagattacctccaccatccgaccctcagtatcgcgctcatgaactgggcatgaaactagctcacggtttcgagatactctgcagcaagtgttcacctcatttctctgattgcaaaaagtccctcgtgacggcctcacctctgtgggccagctttctcgagtcactcaaaaaaaacgattacttcaagggtctcatcgagggctccgcacagtatcgggaacgcctcgagatggcagagaattactttcagttgagtgttgattggccagaacggctcgaggttcagtggcgtgacccgggcctgttgcaggccccccccccaggctttacaccgttcatttgcctgtccctcctgtctacttgggacaactcatccctggccatgtcgccaggcgaggagatcttgaccctattgcagacaatcccattcgacatagaagatctgaaaaaggaggcggccaatcttcctccagaagacgatgatcaatggctagacctaagccccgatcagctggaccagttactgcaggaagcggtcgggaaaaaggagtcagagtctgtgtcaaaggaggaaaaggagcaaaactatgacttgacggaggtatctgagtcaatgaaagcatttatttctaaagtgagtactcacaagggcgcggaactcccccgggagccaagcgaggcccccatcacattcgatgcggattccttcctcaactacttcgacaagatcctcggaccacgacctaacgagagcgattccgatgacctagacgatgaggattttgaatgcctagactcagatgacgacctcgactttgagacccacgagcccggcgaagaggcctctctcaaggggacactggacaacctcaagagttatatggcccagatggaccaggagctggcacacacttgcatctctaagtccttcacaactagaaaccaagtcgagccggttagccaaaccactgataataattcagacgaagaagactctggaaccggggaatccgtgatggctcccgtggatgttgacctgaatctggtgagtaacatacttgaaagctactccagccaggctggcttggccggtcccgcttctaatcttctccaatcaatgggcgtccaattgccagacaataccgaccacaggcccacctctaaacctacaaagaattag

SEQ ID NO: 51263 - DNA, 2034 bp, Artificial Sequence
  derived and/or modified sequence
atggaggagactatgaaactggcgaccatggaagatacagttgagtattgcttgtttttgattcccgatgaaagccgagattcagataagcataaagaaatcttgcagaagtacattgaacggatcatcacgaggttcgcccctatgctggtgccatatatctggcagaaccagccctttaacctcaagtacaaacctggaaagggaggagtgccagctcatatgtttggcgttacaaaattcggagacaatatcgaggatgaatggttcattgtatacgtgatcaagcagattacgaaggagtttcctgagctggtcgccaggatagaagacaatgacggcgaattcctcctgatcgaggcagccgacttcctacccaagtggcttgatcccgaaaactcaactaatagagttttcttctgccacggcgagctctgtattattcctgcccctcgcaaaagcggtgccgaaagctggctccccaccactccaccgacaatcccccaagcactgaacataataacagcacactcggagaagattttagctagcgagtcgattcgagccgcagtaaatcgtcgcatccgcggatacccggagaagatacaggcttctctacacagagcacactgttttctgcccgctggaatcgtggctgtgttgaaacaacggccacgcttggtcgctgctgccgtccaggctttctatctccgagacccaattgatctgagggcctgtagagtgtttaagacatttctgccagagacccgaattatgaccagtgttacgtttacgaaatgcctttatgcgcaactcgtacaacagcgcttcgtgcccgaccgacgctccggttaccggctccctcccccatctgacccccagtatagagcacacgaactggggatgaaacttgcacacggcttcgagatcctgtgctctaagtgcagtcctcacttttccgattgcaagaaatccctcgttaccgcgtcccccctctgggcctcttttctggagtccttaaaaaagaacgactacttcaagggcctgatcgaaggcagtgcacagtatcgcgaacgcctcgaaatggcagagaattatttccagctttccgtggattggcctgagcgcttagaggtgcaatggcgagacccgggtctgctgcaagctcctccgcctggatttacccctttcatatgcctgagtctgctgtcaacctgggacaactcgagccttgccatgagtcctggagaggaaatcctgaccctgctacagacaattccattcgacatcgaagacttgaagaaagaagctgccaatttgccacctgaagatgacgatcagtggctggatctgagccctgatcagctggatcagctgttacaggaagcggtgggtaagaaagaatctgaatcagtaagtaaggaagaaaaggaacaaaattacgacctgaccgaggtgtctgagagcatgaaggcgtttatttccaaagtgtcgacccacaagggggctgagctcccacgcgagcctagtgaggctcccataacttttgacgctgacagctttttgaattactttgacaagattctgggtccacggccaaacgagagcgattctgacgatctggatgatgaagatttcgagtgtctggactcagacgacgaccttgacttcgaaacgcatgagcccggtgaggaagcttccctaaaaggaaccctggacaatttgaagtcatatatggcgcagatggaccaggagctagcccacacatgcatctcaaagtccttcacgactcgtaaccaggtcgaacctgtgtctcagactactgataataacagcgatgaggaggatagcggaaccggggagtccgttatggccccagtggacgtcgatctgaatctcgtaagtaacatactggagagttatagttctcaggccggactggctggccctgcgagcaacctgctgcagtcgatgggagtacagctgccagataacaccgatcataggccaacaagcaagcccaccaagaactag

SEQ ID NO: 51264 - DNA, 2335 bp, Artificial Sequence
  derived and/or modified sequence
aaaatgctcccgccgacgcacagcagtgacgacacacaaggtttcggggactgagtgggtttcagactttctctcaggatttccgctggcttcaggttccggtcaggcgtcgggacagagcctgatccaggcttcggcggccggtggcagctctcgatcagctctcgcagtcggagaggcggctaaggaaaggtgccacagcagagacgcgaaggagaggccctagaaccttttcaaagaagaatggaagaaaccatgaagcttgctacgatggaagacacagtggagtactgcctgttcctgataccagatgagtcaagggactcagataaacataaagagattcttcagaagtacattgagagaataatcactcggtttgcacctatgctggtcccctacatctggcagaatcagcctttcaatcttaaatataaacctgggaaaggaggtgttcctgctcatatgtttggcgtgacaaagtttggggataacattgaggatgaatggtttattgtttatgtaataaagcagatcacaaaggaatttccagagttagtagcaaggattgaagacaatgatggtgaattcttgttaatagaagctgctgactttctccctaaatggctggatcctgaaaatagcaccaatagggtatttttctgccatggggaattgtgtattatccctgcaccaagaaaatctggagcagaatcttggttacccaccacacccccaacaattccacaagcattgaatataatcacagcacattcagaaaaaatacttgcttcagaatctatacgagctgctgtgaataggcgcatcagagggtacccagaaaaaattcaggcctcacttcatcgagcacactgcttccttccagctggcattgtggcagtgctaaagcagcgccccagattggtggctgcagcagtccaggcattttacctacgagaccctattgacctgcgagcttgtcgtgttttcaagacattcttgcctgaaacacgaataatgacatcggtcacattcactaaatgtctatatgcacaattggtgcaacaaaggtttgtgccagaccggcggagtggatacaggctgcctcctccatctgatccccagtaccgagcccatgaattgggcatgaaattggctcatggatttgagatcttatgctccaaatgtagcccacatttttctgactgcaagaaatcccttgtgactgcctcaccactctgggccagtttccttgaaagtctgaaaaagaatgattactttaagggactgatagaaggttctgctcagtaccgggaaaggctagaaatggcagagaattacttccagctctcagtagactggccagaaaggttggaggtgcagtggcgcgatcctggcttactgcaagctccacctcctgggttcacgccattcatctgcctcagcctcctgagtacctgggacaacagttctcttgctatgagccctggtgaagaaatcttaaccttattacagacaataccatttgatatagaagaccttaagaaagaagcagctaatcttcccccagaggatgatgaccagtggttagatctctcaccagatcagctggaccagctgctgcaggaagctgttggcaaaaaagaatccgagtctgtttccaaggaggagaaggagcagaactatgacttaactgaagtctcagagagcatgaaagctttcatatccaaagtctcaacccacaagggagcagagctgcctcgagaaccttctgaggctccaatcacttttgatgcagattcttttcttaattattttgataagattttagggccaaggcctaatgagtcagattctgatgatctggatgatgaagactttgaatgtttagatagtgatgatgacttggactttgaaacacacgaacctggcgaagaggcttccctgaaaggaacacttgataatctcaagtcatacatggcccagatggaccaggaactagcacacacctgcatcagcaaaagtttcaccactaggaaccaagtggaacctgtatcccagactaccgataacaattcagatgaggaagattctggtacgggagaatctgttatggcaccagtagatgtagacctgaacctggtttcaaatatattggaatcctatagctcccaagctggactggcaggacctgcttccaatcttttacaaagcatgggagtgcagctgcctgacaacaccgatcacagaccaacaagtaagccaacaaaaaattaaccagcacatttagcttctcttttttctttttaaataaatattgaatatgattctgttc

SEQ ID NO: 51265 - protein, 217 aa, Artificial Sequence
  derived and/or modified sequence
MEETMKLATMEDTVEYCLFLIPDESRDSDKHKEILQKYIERIITRFAPMLVPYIWQNQPFNLKYKPGKGGVPAHMFGVTKFGDNIEDEWFIVYVIKQITKEFPELVASTNRVFFCHGELCIIPAPRKSGAESWLPTTPPTIPQALNIITAHSEKILASESIRAAVNRRIRGYPEKIQASLHRAHCFLPAGIVAVLKQRPRLVAAAVQAFYLRDPIDL

SEQ ID NO: 51266 - protein, 601 aa, Artificial Sequence
  derived and/or modified sequence
MEETMKLATMEDTVEYCLFLIPDESRDSDKHKEILQKYIERIITRFAPMLVPYIWQNQPFNLKYKPGKGGVPAHMFGVTKFGDNIEDEWFIVYVIKQITKEFPELVARIEDNDGEFLLIEAADFLPKWLDPENSTNRVFFCHGELCIIPAPRKSGAESWLPTTPPTIPQALNIITAHSEKILASESIRAAVNRRIRGYPEKIQASLHRAHCFLPAGIVAVLKQRPRLVAAAVQAFYLRDPIDLRACRVFKTFLPETRIMTSAHGFEILCSKCSPHFSDCKKSLVTASPLWASFLESLKKNDYFKGLIEGSAQYRERLEMAENYFQLSVDWPESSLAMSPGEEILTLLQTIPFDIEDLKKEAANLPPEDDDQWLDLSPDQLDQLLQEAVGKKESESVSKEEKEQNYDLTEVSESMKAFISKVSTHKGAELPREPSEAPITFDADSFLNYFDKILGPRPNESDSDDLDDEDFECLDSDDDLDFETHEPGEEASLKGTLDNLKSYMAQMDQELAHTCISKSFTTRNQVEPVSQTTDNNSDEEDSGTGESVMAPVDVDLNLVSNILESYSSQAGLAGPASNLLQSMGVQLPDNTDHRPTSKPTKN

SEQ ID NO: 51267 - DNA, 654 bp, Artificial Sequence
  derived and/or modified sequence
atggaggagaccatgaagctggccaccatggaggacaccgtggagtactgcctgttcctgatccccgacgagagcagagacagcgacaagcacaaggagatcctgcagaagtacatcgagagaatcatcaccagattcgcccccatgctggtgccctacatctggcagaaccagcccttcaacctgaagtacaagcccggcaagggcggcgtgcccgcccacatgttcggcgtgaccaagttcggcgacaacatcgaggacgagtggttcatcgtgtacgtgatcaagcagatcaccaaggagttccccgagctggtggccagcaccaacagagtgttcttctgccacggcgagctgtgcatcatccccgcccccagaaagagcggcgccgagagctggctgcccaccaccccccccaccatcccccaggccctgaacatcatcaccgcccacagcgagaagatcctggccagcgagagcatcagagccgccgtgaacagaagaatcagaggctaccccgagaagatccaggccagcctgcacagagcccactgcttcctgcccgccggcatcgtggccgtgctgaagcagagacccagactggtggccgccgccgtgcaggccttctacctgagagaccccatcgacctgtag

SEQ ID NO: 51268 - DNA, 1806 bp, Artificial Sequence
  derived and/or modified sequence
atggaggagaccatgaagctggccaccatggaggacaccgtggagtactgcctgttcctgatccccgacgagagcagagacagcgacaagcacaaggagatcctgcagaagtacatcgagagaatcatcaccagattcgcccccatgctggtgccctacatctggcagaaccagcccttcaacctgaagtacaagcccggcaagggcggcgtgcccgcccacatgttcggcgtgaccaagttcggcgacaacatcgaggacgagtggttcatcgtgtacgtgatcaagcagatcaccaaggagttccccgagctggtggccagaatcgaggacaacgacggcgagttcctgctgatcgaggccgccgacttcctgcccaagtggctggaccccgagaacagcaccaacagagtgttcttctgccacggcgagctgtgcatcatccccgcccccagaaagagcggcgccgagagctggctgcccaccaccccccccaccatcccccaggccctgaacatcatcaccgcccacagcgagaagatcctggccagcgagagcatcagagccgccgtgaacagaagaatcagaggctaccccgagaagatccaggccagcctgcacagagcccactgcttcctgcccgccggcatcgtggccgtgctgaagcagagacccagactggtggccgccgccgtgcaggccttctacctgagagaccccatcgacctgagagcctgcagagtgttcaagaccttcctgcccgagaccagaatcatgaccagcgcccacggcttcgagatcctgtgcagcaagtgcagcccccacttcagcgactgcaagaagagcctggtgaccgccagccccctgtgggccagcttcctggagagcctgaagaagaacgactacttcaagggcctgatcgagggcagcgcccagtacagagagagactggagatggccgagaactacttccagctgagcgtggactggcccgagagcagcctggccatgagccccggcgaggagatcctgaccctgctgcagaccatccccttcgacatcgaggacctgaagaaggaggccgccaacctgccccccgaggacgacgaccagtggctggacctgagccccgaccagctggaccagctgctgcaggaggccgtgggcaagaaggagagcgagagcgtgagcaaggaggagaaggagcagaactacgacctgaccgaggtgagcgagagcatgaaggccttcatcagcaaggtgagcacccacaagggcgccgagctgcccagagagcccagcgaggcccccatcaccttcgacgccgacagcttcctgaactacttcgacaagatcctgggccccagacccaacgagagcgacagcgacgacctggacgacgaggacttcgagtgcctggacagcgacgacgacctggacttcgagacccacgagcccggcgaggaggccagcctgaagggcaccctggacaacctgaagagctacatggcccagatggaccaggagctggcccacacctgcatcagcaagagcttcaccaccagaaaccaggtggagcccgtgagccagaccaccgacaacaacagcgacgaggaggacagcggcaccggcgagagcgtgatggcccccgtggacgtggacctgaacctggtgagcaacatcctggagagctacagcagccaggccggcctggccggccccgccagcaacctgctgcagagcatgggcgtgcagctgcccgacaacaccgaccacagacccaccagcaagcccaccaagaactag

SEQ ID NO: 51269 - DNA, 654 bp, Artificial Sequence
  derived and/or modified sequence
atggaggaaaccatgaagctcgcaacaatggaggatacagtggagtattgtttgtttctaatccccgacgagagtcgggactcagacaaacataaggaaattctccagaagtacatcgaacgcatcatcacgcggttcgcacccatgctcgtgccttatatttggcagaatcagccctttaatctaaagtacaagcctgggaaaggaggagtgcctgctcatatgttcggggtgaccaaattcggcgataatatcgaggacgaatggttcattgtttacgtgattaaacagattaccaaggagtttcctgagctggtggcaagcaccaatcgagtgttcttctgccacggcgagttatgcataatcccggcacctaggaaaagcggcgctgagtcatggctgccgacaacccctccaaccattccccaggcactgaacattattactgctcattccgaaaaaatcctggcttcagaatctatcagagccgctgttaataggagaatcagaggttatcccgagaaaatccaggcatccctccaccgagcccactgctttctccctgccggcatagtggctgttctcaagcagcggccgagactggtggctgccgccgtccaagccttctaccttagagatccaatcgatctgtag

SEQ ID NO: 51270 - DNA, 1806 bp, Artificial Sequence
  derived and/or modified sequence
atggaggaaacgatgaagctcgctactatggaggatactgtcgaatactgtttgttcttgattcccgatgagagtcgagattcagataagcacaaagagatcctccaaaagtatattgagcgcatcatcacccggttcgctcctatgctcgttccatacatttggcaaaatcaacctttcaatcttaagtataaacctggcaaaggtggcgtaccagcacatatgttcggggtaacaaagtttggtgataacatcgaggatgagtggtttatagtctacgtcattaaacagatcactaaagagttccccgagctcgtggctaggatcgaagacaatgatggcgaattcctcttgattgaggcagctgatttcttacccaagtggctggaccccgaaaactctaccaaccgagttttcttctgtcatggagagttgtgtatcatacccgccccccgaaaaagtggagccgaatcttggctccccacaacaccacctactatccctcaagctctgaacattattacagcacacagcgagaaaatacttgcatccgagtccatcagggccgcggtgaacaggcgcattcgcggctacccagagaagattcaggcttctctccaccgtgcccattgcttccttccagccggaatagttgctgtgctgaagcagagaccaagactggtggctgctgcggtgcaggcgttctacctgcgggatccaatcgacctaagggcttgccgcgtgtttaagacttttttgccggaaaccagaatcatgacctccgcccacgggtttgaaatcctatgcagtaaatgttccccccatttctccgattgcaaaaagtccctggttacggcatcccctttatgggccagcttcttagagagcctgaaaaagaatgactacttcaagggactgatagaggggagcgcacagtacagagagcgtttggaaatggccgagaattatttccagctgtccgtggactggccagagagttcactggcaatgtccccgggggaagaaattctgacgttgctgcagacgataccattcgacattgaagatctgaaaaaggaggctgctaacctgccccccgaggatgacgaccagtggctggacctgtcacccgaccagttggaccaactcttgcaggaagcagtgggaaaaaaagaaagtgaaagcgtctccaaggaagagaaggaacagaattacgacctgaccgaggtgagcgagtccatgaaggcattcattagtaaagtcagcacccacaagggtgcggaactcccaagggagccttcagaggccccaattaccttcgatgcggactcatttctgaactattttgacaaaattctggggcccagacccaacgaatccgattctgacgatcttgatgatgaagactttgagtgcctggacagtgatgacgacctggacttcgagactcacgagcccggagaagaggcatcgttgaagggaactctagataatttaaaatcatatatggcccagatggatcaggagctagcccatacctgcatctctaagtctttcactacccgaaatcaggtcgagccagtgtcccagaccaccgataacaatagcgatgaagaggatagcggaactggggaaagcgttatggcgccagtggacgttgacctgaaccttgtgtccaatatcctggagtcctactctagtcaagcggggctggccggaccagctagtaacctcctgcagtctatgggcgtgcagctgccggataataccgaccataggcccactagtaagcctactaagaactag

SEQ ID NO: 51271 - DNA, 654 bp, Artificial Sequence
  derived and/or modified sequence
atggaggagaccatgaagctggccaccatggaggacacagtggagtactgcctcttcctgatcccagatgagagccgggacagcgacaagcacaaggagatcctgcagaagtacatcgagcgcatcatcaccaggtttgcccccatgctggtgccctacatctggcagaaccagcccttcaacctgaagtacaagccaggcaagggcggcgtgcctgcccacatgtttggagtgaccaagtttggagacaacattgaagatgagtggttcatcgtgtatgtgatcaagcagatcaccaaggagttccctgagctggtggccagcaccaacagagtcttcttctgccacggggagctgtgcatcatcccagcccccaggaagagcggggctgagagctggctgcccaccaccccacccaccatcccccaggccctgaacatcatcacagcccacagcgagaagatcctggccagcgagagcatccgggctgctgtgaacagacgcatccggggctacccagagaagatccaggccagcctgcaccgggcccactgcttcctgcctgctggcatcgtggccgtgctgaagcagaggccccggctggtggccgctgctgtgcaggccttctacctgcgggaccccatcgacctgtag

SEQ ID NO: 51272 - DNA, 1806 bp, Artificial Sequence
  derived and/or modified sequence
atggaggagaccatgaagctggccaccatggaggacacagtggagtactgcctcttcctgatcccagatgagagccgggacagcgacaagcacaaggagatcctgcagaagtacatcgagcgcatcatcaccaggtttgcccccatgctggtgccctacatctggcagaaccagcccttcaacctgaagtacaagccaggcaagggcggcgtgcctgcccacatgtttggagtgaccaagtttggagacaacattgaagatgagtggttcatcgtgtatgtgatcaagcagatcaccaaggagttccctgagctggtggccagaattgaggacaatgatggagagttcctgctgattgaagctgctgacttcctgcccaagtggctggaccctgagaacagcaccaacagagtcttcttctgccacggggagctgtgcatcatcccagcccccaggaagagcggggctgagagctggctgcccaccaccccacccaccatcccccaggccctgaacatcatcacagcccacagcgagaagatcctggccagcgagagcatccgggctgctgtgaacagacgcatccggggctacccagagaagatccaggccagcctgcaccgggcccactgcttcctgcctgctggcatcgtggccgtgctgaagcagaggccccggctggtggccgctgctgtgcaggccttctacctgcgggaccccatcgacctgcgggcctgcagggtcttcaagaccttcctgcctgagacccgcatcatgaccagcgcccacggctttgagatcctgtgcagcaagtgcagcccccacttcagtgactgcaagaagagcctggtgacagccagccccctgtgggccagcttcctggagagcctgaagaagaatgactacttcaagggcctgattgagggcagcgcccagtaccgggagcggctggagatggccgagaactacttccagctgtctgtggactggccagagagcagcctggccatgagccctggagaggagatcctgaccctgctgcagaccatcccctttgatattgaggacctgaagaaggaggccgccaacctgcccccagaagatgatgaccagtggctggacctgagcccagaccagctggaccagctgctgcaggaggccgtgggcaagaaggagagcgagagcgtgtccaaggaggagaaggagcagaactatgacctgacagaggtgtctgagagcatgaaggccttcatcagcaaggtgtccacccacaagggagctgagctgccccgggagcccagcgaggcccccatcacctttgatgctgacagcttcctgaactactttgacaagatcctgggcccccggcccaatgaaagtgacagtgatgacctggatgatgaggactttgaatgtctggacagtgatgatgacctggactttgagacccatgagcccggggaggaggccagcctgaagggcaccctggacaacctgaagagctacatggcccagatggaccaggagctggcccacacctgcatcagcaagagcttcaccaccaggaaccaggtggagcctgtgtcccagaccacagacaacaacagtgatgaagaagattctggaactggagagagcgtgatggcccctgtggatgtggacctgaacctggtgagcaacatcctggagagctacagcagccaggccggcctggccggccctgccagcaacctgctgcagagcatgggcgtgcagctgcctgacaacacagaccaccggcccaccagcaagcccaccaagaactag

SEQ ID NO: 51273 - DNA, 654 bp, Artificial Sequence
  derived and/or modified sequence
atggaggagaccatgaagctggccaccatggaggacaccgtggagtattgcctcttcctgatccccgacgagagccgcgatagcgataagcacaaagagattctgcaaaagtacatcgaaagaattataacgcgcttcgcaccaatgttggtgccatacatatggcagaatcaaccatttaatctgaaatacaagccaggtaaggggggagtgcccgcccatatgttcggagtgaccaagtttggtgacaacatcgaggacgaatggtttatagtctacgtgatcaagcagattactaaagaatttcctgagttagttgccagtaccaaccgggtgttcttttgccacggggagctgtgcattattccggcccctaggaaaagcggtgcagagtcctggctaccaacaacccccccaacaatcccccaggcactaaatatcattacagcccacagcgagaagattctggcaagcgaatccatccgagccgccgttaaccgtcgaatccgtggttaccccgaaaaaatccaggcgtccctgcacagagcccactgcttcttgcccgcagggattgttgctgtgctcaaacagaggcccaggttggtggccgctgccgtgcaagcattttacctgagggacccgatcgacttgtag

SEQ ID NO: 51274 - DNA, 1806 bp, Artificial Sequence
  derived and/or modified sequence
atggaggagaccatgaagctggccaccatggaggacaccgtggagtactgcctgtttttgattcccgacgaaagccgggatagcgataagcacaaagagatcctgcagaagtatattgaaaggatcattacccggttcgcccccatgctggtaccttacatatggcagaatcagccatttaacctcaaatataaaccaggcaaaggcggggtgccagcccacatgttcggagtgacaaagtttggcgataacatcgaagatgagtggtttatcgtatatgttattaagcaaatcacaaaggaatttcccgagctggttgcaagaatcgaagacaacgatggggaatttctgctcatcgaggctgcagatttcttacccaagtggctggacccagagaatagtacgaaccgggtgtttttttgtcatggggagctgtgcataattcccgcgccgagaaagagtggggccgaatcttggcttcccactacacctcctaccattccccaagccctgaacatcataactgctcattccgaaaagatccttgcaagtgagagcatcagggcagccgtaaatagaaggatcagggggtatccggagaaaatccaggctagcctccaccgcgcacactgtttcttgccggcaggcattgttgctgtgttgaagcagcggcccagactggtggccgctgcagtacaggcgttttacctgcgggacccaatcgatctacgagcatgccgcgtgttcaaaaccttcctcccagaaacgaggattatgacaagcgcacacggattcgaaattctttgctccaagtgctctccccacttttctgactgtaagaagtccctcgtgactgcgagtcccttatgggcttctttcctggagtccttgaagaaaaacgattactttaaaggtctgatcgagggatccgcacagtaccgagagaggttggaaatggccgagaattattttcagcttagtgttgattggccggagtcttcattggctatgagtccgggagaagagatcctaactctgctgcagactatccctttcgatatcgaggacctgaaaaaggaagccgcaaatctgccaccggaggacgatgatcaatggttggacctatcccccgatcagttagaccagctcctgcaggaagcagttggtaaaaaagagtcagaatcggtgagcaaggaagagaaggagcaaaactatgacctgacagaagtgagtgaaagcatgaaagcattcatttccaaagtgtccacacacaagggtgctgagttgcctcgagagccatccgaggctccaataaccttcgacgctgattcctttcttaactacttcgacaagatactcgggccacgccccaacgagtccgattccgatgatcttgatgatgaggactttgaatgcctggattctgatgatgaccttgatttcgaaacccacgagcccggagaggaagcatctcttaagggcaccttggataacctgaagtcctatatggctcagatggaccaggagctagcccacacgtgtatttctaaatcatttaccactagaaatcaagtggagccggtgtcccagactacagataataactcagacgaagaagattctgggactggtgagtccgtgatggcacccgttgacgtggaccttaacctcgtatcgaatattctcgagagctacagttctcaagccggccttgcgggacccgcaagcaatctgctgcagtccatgggcgtgcagctgccggacaataccgatcatcggcccactagcaagccaaccaaaaactag

SEQ ID NO: 51275 - DNA, 877 bp, Artificial Sequence
  derived and/or modified sequence
gcacagcagtgacgacacacaaggtttcggggactgagtgggtttcagactttctctcaggatttccgctggcttcaggttccggtcaggcgtcgggacagagcctgatccaggcttcggcggccggtggcagctctcgatcagctctcgcagtcggagaggcggctaaggaaaggtgccacagcagagacgcgaaggagaggccctagaaccttttcaaagaagaatggaagaaaccatgaagcttgctacgatggaagacacagtggagtactgcctgttcctgataccagatgagtcaagggactcagataaacataaagagattcttcagaagtacattgagagaataatcactcggtttgcacctatgctggtcccctacatctggcagaatcagcctttcaatcttaaatataaacctgggaaaggaggtgttcctgctcatatgtttggcgtgacaaagtttggggataacattgaggatgaatggtttattgtttatgtaataaagcagatcacaaaggaatttccagagttagtagcaagcaccaatagggtatttttctgccatggggaattgtgtattatccctgcaccaagaaaatctggagcagaatcttggttacccaccacacccccaacaattccacaagcattgaatataatcacagcacattcagaaaaaatacttgcttcagaatctatacgagctgctgtgaataggcgcatcagagggtacccagaaaaaattcaggcctcacttcatcgagcacactgcttccttccagctggcattgtggcagtgctaaagcagcgccccagattggtggctgcagcagtccaggcattttacctacgagaccctattgacctg

SEQ ID NO: 51276 - DNA, 654 bp, Artificial Sequence
  derived and/or modified sequence
atggaggagacaatgaagctggctactatggaggatactgtagagtactgtttattcctgatcccagacgaatctcgcgatagtgacaagcacaaggagatcctgcagaagtacatagaacgtataatcacccgcttcgcaccaatgctcgtgccctatatctggcagaaccaaccctttaacctcaagtataaaccaggcaaggggggagtgccagcacacatgtttggggtgaccaagtttggggacaacattgaggatgaatggttcatagtatatgtcattaagcagataacaaaggagttcccagaactggtcgcttctaccaaccgggtgttcttttgccacggcgaactgtgtatcatcccggctcccagaaagagcggtgctgaaagttggctgccgacgacacccccaaccattccccaagccctcaatataattacggctcacagcgagaaaatcctcgctagcgaatccatacgggctgcagttaatagacgtatccgtggttaccccgaaaaaatacaagcttcactgcatagggcccactgcttcctgccggctggcatagtggcggttctgaaacaacgtccccgactggtggccgctgcagtacaggccttctatctgcgggatcccattgacctttag

SEQ ID NO: 51277 - DNA, 1806 bp, Artificial Sequence
  derived and/or modified sequence
atggaagaaactatgaagttagccaccatggaagataccgttgaatattgtttgtttctcattccagacgaatcccgagactcagataagcacaaagagatactgcaaaaatacattgaacgaataataacgcggtttgctccaatgctcgttccctatatatggcagaaccagccgttcaacctgaagtacaagccaggaaaaggcggtgtgcccgcacatatgttcggagtgaccaaattcggggataatatcgaggatgagtggtttattgtgtacgtgattaaacagattactaaggaatttccagagctggtggccaggatcgaagacaatgacggcgaatttctgctgatcgaggccgctgattttcttcccaaatggctggatcccgagaactccaccaatagagtcttcttctgccatggcgaactgtgtattattcctgctcctagaaaatcgggggcagaaagttggctgcccactacgccaccaaccattcctcaggcattaaatatcattaccgcccattcagaaaaaatcctggcaagtgagtccatccgcgcagcagtaaataggcgtatcagaggctaccccgagaaaatccaggccagtctgcatcgcgcacactgcttcctgcctgcagggattgtagctgtgctgaagcagaggcccagacttgttgcagccgctgtgcaggcattttatctccgggatcctattgatctacgcgcttgtagggtgtttaaaacattccttcctgagactaggataatgacctcagcccatggatttgagattctgtgtagcaaatgttcccctcatttttcggactgcaagaagagcctggtcactgccagtcccctgtgggcttcttttctggaatccctcaaaaaaaatgattattttaagggcctgatcgaagggtctgcccagtacagggagcgcctggagatggcagagaactactttcaactctctgtggactggcctgagagctccctggctatgtcgccaggtgaggagatcctgacgctgttgcagacaattccttttgacatcgaagatctcaagaaagaagcggcaaatctgccgccagaggatgacgatcaatggttagatctgtcgcctgaccagctggaccagctgctgcaggaagctgtcggaaagaaggaaagcgagtcagttagcaaggaggagaaggagcagaattatgatctcacggaggtgtccgagagcatgaaagcgttcatttcgaaagtgtcgacacataaaggggctgaattgccgagagaaccttctgaggctcctataacatttgatgctgacagctttctgaattacttcgataagatccttggtccgcgacccaatgagagtgatagcgacgacctagatgatgaggattttgagtgtctcgattctgatgacgacctggacttcgagacccatgagcccggagaagaagcttccctcaagggtacccttgataacttgaagtcttacatggctcaaatggaccaggagctggctcacacatgtatctccaagtcatttacaacccgaaatcaagtcgagccagtatcacagacgactgataataattcagacgaggaggactctggaaccggcgaatcagtgatggcgcctgtggatgtggatttgaatctggtgtccaacattttggaatcatacagctcccaggcagggctggctggtcccgctagtaatttactgcagagcatgggagttcagttacccgataacactgaccaccgccctacttccaagcccacgaaaaattag

SEQ ID NO: 51278 - DNA, 2107 bp, Artificial Sequence
  derived and/or modified sequence
aaaatgctcccgccgacgcacagcagtgacgacacacaaggtttcggggactgagtgggtttcagactttctctcaggatttccgctggcttcaggttccggtcaggcgtcgggacagagcctgatccaggcttcggcggccggtggcagctctcgatcagctctcgcagtcggagaggcggctaaggaaaggtgccacagcagagacgcgaaggagaggccctagaaccttttcaaagaagaatggaagaaaccatgaagcttgctacgatggaagacacagtggagtactgcctgttcctgataccagatgagtcaagggactcagataaacataaagagattcttcagaagtacattgagagaataatcactcggtttgcacctatgctggtcccctacatctggcagaatcagcctttcaatcttaaatataaacctgggaaaggaggtgttcctgctcatatgtttggcgtgacaaagtttggggataacattgaggatgaatggtttattgtttatgtaataaagcagatcacaaaggaatttccagagttagtagcaaggattgaagacaatgatggtgaattcttgttaatagaagctgctgactttctccctaaatggctggatcctgaaaatagcaccaatagggtatttttctgccatggggaattgtgtattatccctgcaccaagaaaatctggagcagaatcttggttacccaccacacccccaacaattccacaagcattgaatataatcacagcacattcagaaaaaatacttgcttcagaatctatacgagctgctgtgaataggcgcatcagagggtacccagaaaaaattcaggcctcacttcatcgagcacactgcttccttccagctggcattgtggcagtgctaaagcagcgccccagattggtggctgcagcagtccaggcattttacctacgagaccctattgacctgcgagcttgtcgtgttttcaagacattcttgcctgaaacacgaataatgacatcggctcatggatttgagatcttatgctccaaatgtagcccacatttttctgactgcaagaaatcccttgtgactgcctcaccactctgggccagtttccttgaaagtctgaaaaagaatgattactttaagggactgatagaaggttctgctcagtaccgggaaaggctagaaatggcagagaattacttccagctctcagtagactggccagaaagttctcttgctatgagccctggtgaagaaatcttaaccttattacagacaataccatttgatatagaagaccttaagaaagaagcagctaatcttcccccagaggatgatgaccagtggttagatctctcaccagatcagctggaccagctgctgcaggaagctgttggcaaaaaagaatccgagtctgtttccaaggaggagaaggagcagaactatgacttaactgaagtctcagagagcatgaaagctttcatatccaaagtctcaacccacaagggagcagagctgcctcgagaaccttctgaggctccaatcacttttgatgcagattcttttcttaattattttgataagattttagggccaaggcctaatgagtcagattctgatgatctggatgatgaagactttgaatgtttagatagtgatgatgacttggactttgaaacacacgaacctggcgaagaggcttccctgaaaggaacacttgataatctcaagtcatacatggcccagatggaccaggaactagcacacacctgcatcagcaaaagtttcaccactaggaaccaagtggaacctgtatcccagactaccgataacaattcagatgaggaagattctggtacgggagaatctgttatggcaccagtagatgtagacctgaacctggtttcaaatatattggaatcctatagctcccaagctggactggcaggacctgcttccaatcttttacaaagcatgggagtgcagctgcctgacaacaccgatcacagaccaacaagtaagccaacaaaaaattaaccagcacatttagcttctcttttttctttttaaataaatattgaatatgattctgttc

SEQ ID NO: 51279 - protein, 372 aa, Artificial Sequence
  derived and/or modified sequence
MARAMAAAWPLLLVALLVLSWPPPGTGDVVVQAPTQVPGFLGDSVTLPCYLQVPNMEVTHVSQLTWARHGESGSMAVFHQTQGPSYSESKRLEFVAARLGAELRNASLRMFGLRVEDEGNYTCLFVTFPQGSRSVDIWLRVLAKPQNTAEVQKVQLTGEPVPMARCVSTGGRPPAQITWHSDLGGMPNTSQVPGFLSGTVTVTSLWILVPSSQVDGKNVTCKVEHESFEKPQLLTVNLTVYYPPEVSISGYDNNWYLGQNEATLTCDARSNPEPTGYNWSTTMGPLPPFAVAQGAQLLIRPVDKPINTTLICNVTNALGARQAELTVQVKEGPPSEHSGTEHASASANGHVSYSAVSRENSSSQDPQTEGTR

SEQ ID NO: 51280 - DNA, 1119 bp, Artificial Sequence
  derived and/or modified sequence
atggcccgggccatggcagctgcttggccactcctgttagtggcattactcgtcctgtcttggcctccccctggcactggggatgtcgtagtgcaggctcccactcaggtcccaggctttctgggagactcagtgaccctgccatgttacctgcaggtaccgaatatggaggtgacccatgtgagtcagcttacgtgggctcgacatggagaaagcggcagtatggctgtgttccatcagacacaaggacccagctactctgaaagcaagagattggagtttgtggccgcccggctaggggcagaactcaggaatgcgtcgctccgcatgttcggtctgcgcgtggaagatgaaggcaattatacatgcctcttcgttactttcccacagggatccaggtctgtggatatctggcttagagtgttagctaaaccacaaaacacagcggaggttcaaaaggtgcagctgactggggaaccagtgcccatggccaggtgcgtctcaaccggtggtcggccacctgcccagatcacttggcactccgacttgggcgggatgcctaatactagccaagtcccaggatttttaagcggcaccgtaacggtcacctcactgtggatcctggtcccttcatcccaggttgacggcaagaatgtaacatgcaaagtggaacacgaatcattcgaaaagcctcagctattgaccgtgaacctgacagtgtactaccctcccgaagtgtcaatctcaggctatgacaataattggtatctgggtcagaatgaggccaccctaacatgtgatgcaagatctaatcctgaaccaacaggctataattggtctaccaccatgggacccctgccgccatttgctgtagcccaaggggcacagctgctaatccggccggtggataagcctattaacacaaccctgatctgtaatgttactaacgcgttgggagcacgccaggctgagttaaccgtccaggtgaaggagggccctcctagtgagcatagcgggaccgaacacgcctccgccagcgccaatggtcatgtgtcatactccgctgtttctcgcgaaaattcttcttcccaggatccacagaccgaagggacccgttag

SEQ ID NO: 51281 - DNA, 1119 bp, Artificial Sequence
  derived and/or modified sequence
atggcccgggccatggctgctgcctggcccctgctgctggtggccctgctggtgctgtcctggcccccacctggcactggagatgtggtggtgcaggcccccacccaggtgcccggcttcctgggggacagcgtgaccctgccctgctacctgcaggtgcccaacatggaggtgacccacgtgtcccagctgacctgggcccggcatggagagagcggctccatggctgtgttccaccagacccagggccccagctacagcgagagcaagaggctggagtttgtggccgcccggctgggcgctgagctgagaaatgccagcctgaggatgtttggcctgcgggtggaggatgagggcaactacacctgcctgtttgtgaccttcccccagggcagccgctctgtggacatctggctgcgggtgctggccaagccccagaacacagctgaggtgcagaaggtgcagctgactggagagcctgtgcccatggcccgctgtgtgtccactggaggccggcccccagcccagatcacctggcacagcgacctgggcggcatgcccaacaccagccaggtgcccggcttcctgtctggaacagtgacagtgaccagcctgtggatcctggtgcccagcagccaggtggatggcaagaatgtgacctgcaaggtggagcacgagagctttgagaagccccagctgctgactgtgaacctgactgtgtactacccacctgaggtgtccatcagcggctatgacaacaactggtacctgggccagaatgaggccaccctgacctgtgatgcccggagcaaccctgagcccaccggctacaactggagcaccaccatgggccccctgcccccatttgctgtggcccagggcgcccagctgctgatccggcctgtggacaagcccatcaacaccaccctcatctgcaatgtgaccaatgccctgggcgcccggcaggccgagctgactgtgcaggtgaaggagggccccccatctgagcacagcggcacagagcacgccagcgccagcgccaacggccacgtgtcctacagcgctgtgtcccgggagaacagcagcagccaggacccccagacagagggcaccaggtag

SEQ ID NO: 51282 - DNA, 1119 bp, Artificial Sequence
  derived and/or modified sequence
atggcccgggccatggccgccgcctggcccctgctgctggtggccctgctcgtgcttagctggcccccccccggaacgggtgatgtcgtggtccaggcccccacccaagtccccggattcctaggcgattctgtcaccttgccctgttatctgcaggtcccgaatatggaagtgacacatgtatctcagttgacttgggccagacacggagagagtgggagtatggccgtgtttcatcagacccagggaccctcgtattccgaaagcaaaaggctcgaattcgtggccgctaggctgggtgcagagctgcgtaacgcttctctgcgtatgttcggcctacgcgtagaggatgaaggcaactatacatgtctgtttgtgaccttcccacagggcagcaggtccgttgatatctggttgcgcgtgctcgccaaaccacaaaataccgccgaggtgcagaaagtgcagctaactggtgaaccagtgcctatggccaggtgtgtgtccaccggtggccggccaccagcacaaattacatggcactccgacctgggaggcatgcccaatacaagccaggtccccggcttcctgtcaggaacagttaccgtaacctctctgtggatcctagtgcctagctcccaagttgatggaaagaacgtcacctgcaaggtcgagcacgagtcatttgagaaaccccaactgctcaccgtgaatttgaccgtgtattacccgcccgaggtcagtatcagcggatacgacaacaactggtacctaggccagaacgaagcaacacttacatgcgacgctagatccaacccggaacccacagggtataactggagcacaacgatgggccctctgccaccgttcgccgttgcccagggtgcccagctgttgatcagacctgtggataagccaatcaacaccacgctcatttgcaacgtcaccaatgctctgggggcccgccaagccgagttgacagtacaggtcaaggaagggcctccatcagaacattccgggaccgagcacgcttcggccagcgccaacgggcatgtctcatacagtgctgtgagtagagaaaattctagctctcaagatccccagactgaaggaaccagatag

SEQ ID NO: 51283 - DNA, 2891 bp, Artificial Sequence
  derived and/or modified sequence
atggcccgagccatggccgccgcgtggccgctgctgctggtggcgctactggtgctgtcctggccacccccaggaaccggggacgtcgtcgtgcaggcgcccacccaggtgcccggcttcttgggcgactccgtgacgctgccctgctacctacaggtgcccaacatggaggtgacgcatgtgtcacagctgacttgggcgcggcatggtgaatctggcagcatggccgtcttccaccaaacgcagggccccagctattcggagtccaaacggctggaattcgtggcagccagactgggcgcggagctgcggaatgcctcgctgaggatgttcgggttgcgcgtagaggatgaaggcaactacacctgcctgttcgtcacgttcccgcagggcagcaggagcgtggatatctggctccgagtgcttgccaagccccagaacacagctgaggttcagaaggtccagctcactggagagccagtgcccatggcccgctgcgtctccacagggggtcgcccgccagcccaaatcacctggcactcagacctgggcgggatgcccaatacgagccaggtgccagggttcctgtctggcacagtcactgtcaccagcctctggatattggtgccctcaagccaggtggacggcaagaatgtgacctgcaaggtggagcacgagagctttgagaagcctcagctgctgactgtgaacctcaccgtgtactaccccccagaggtatccatctctggctatgataacaactggtaccttggccagaatgaggccaccctgacctgcgatgctcgcagcaacccagagcccacaggctataattggagcacgaccatgggtcccctgccaccctttgctgtggcccagggcgcccagctcctgatccgtcctgtggacaaaccaatcaacacaactttaatctgcaacgtcaccaatgccctaggagctcgccaggcagaactgaccgtccaggtcaaagagggacctcccagtgagcactcaggtacagagcatgccagcgcctcagctaatgggcatgtctcctattcagctgtgagcagagagaacagctcttcccaggatccacagacagagggcacaaggtgacagcgtcgggactgagaggggagagagactggagctggcaaggacgtgggcctccagagttggacccgaccccaatggatgaagaccccctccaaagagaccagcctccctccctgtgccagacctcaaaacgacgggggcaggtgcaagttcataggtctccaagaccaccctcctttcatttgctagaaggactcactagactcaggaaagctgttaggctcacagttacagtttattacagtaaaaggacagagattaagatcagcaaagggaggaggtgcacagcacacgttccacgacagatgaggcgacggcttccatctgccctctcccagtggagccatataggcagcacctgattctcacagcaacatgtgacaacatgcaagaagtactgccaatactgccaaccagagcagctcactcgagatctttgtgtccagagttttttgtttgtcttgagacagggtctggctctgttggcagactagagtacagtggtgagatcacagttcattgcagccttgacttctcaacgccaagtcatcctcccacctcagcctcctgagtagctatgactacaggtatgtgccaccacgtctggctaatctttttattatttgtaaagtcgaggtttccctgtgttgcccaggctggtcttgaactcttggctccaagtgatacttctgccttggcctcccaaagtgctgaattaagcagctcaccatccacacggctgacctcatacatcaagccaataccgtgtggcccaagacccccaccataaatcacatcattagcatgaaccacccagagtggcccaagactcccagatcagctaccaggcaggatattccaagggcttagagatgaatgcccaggagctgaggataaagggcccgatctttctttgggcaaggttaagcctttactgcatagcagaccacacagaagggtgtgggccaccagagaattttggtaaaaatttggcctctggccttgagcttctaaatctctgtatccgtcagatctctgtggttacaagaaacagccactgaccctggtcaccagaggctgcaattcaggccgcaagcagctgcctggggggtgtccaaggagcagagaaaactactagatgtgaacttgaagaaggttgtcagctgcagccactttctgccagcatctgcagccactttctgccagcatctgcagccagcaagctgggactggcaggaaataacccacaaaagaagcaaatgcaatttccaacacaagggggaagggatgcagggggaggcagcgctgcagttgctcaggacacgctcctataggaccaagatggatgcgacccaagacccaggaggcccagctgctcagtgcaactgacaagttaaaaaggtctatgatcttgagggcagacagcagaattcctcttataaagaaaactgtttgggaaaatacgttgagggagagaagaccttgggccaagatgctaaatgggaatgcaaagcttgagctgctctgcaagagaaaataagcaggacagaggatttgctctggacagagatggaagagccgggaacagagaagtgtggggaagagataggaaccagcaggatggcaggggcaaagggctcaagggtgaggaggccagtgggaccccacagagttggggagataaaggaacattggttgctttggtggcacgtaagctccttgtctgtctccagcacccagaatctcattaaagcttatttattgtacctcca

SEQ ID NO: 51284 - DNA, 1119 bp, Artificial Sequence
  derived and/or modified sequence
atggcacgagctatggcggctgcatggcctttgctcctagtcgccctcctagtgctcagttggccaccaccaggcactggagacgtagtggtgcaagcgcctacacaggtacctggattcctcggcgactccgtcacgctcccatgctacctgcaagtgccaaatatggaggtgacccacgtcagccagcttacttgggcaaggcacggcgagagcggcagcatggcagtgtttcaccaaacccagggaccaagttatagtgagtcgaaacgcctggaatttgtggctgctcgattgggggctgaattgaggaatgctagcctgagaatgtttgggctgcgtgttgaggacgagggaaactacacatgcctgtttgtgacctttccccagggcagtcgttctgtagatatttggctccgcgtgctggccaaaccccaaaacacagcagaggttcaaaaggtgcaactgacaggggaacccgttcctatggccagatgcgtgtctactgggggtagacctcctgcacagattacatggcacagtgacctaggaggaatgccaaacacatcacaggtccctggctttttatcagggacggtgacagtcacctccctctggatcctggtaccttcctcccaggtggatggtaagaatgtgacctgcaaagtggaacacgagagtttcgagaagccacaactgctgactgtcaaccttactgtttactaccctcctgaggtgagtatctcaggctacgataacaattggtatctcggccagaatgaggccaccctcacatgcgacgccagaagcaaccccgaaccaaccggatataactggtctactactatggggccactgcccccatttgccgtcgcacagggcgcacagctactgatccgccctgtagacaaacctataaatactactctgatttgcaatgtgacaaatgccctgggggcaaggcaggctgaactgacagttcaagtgaaagagggaccgccatccgagcactccgggaccgagcacgccagtgcatctgccaacggtcatgtgagttactcagcagtctcaagagaaaactcgagctctcaggatcctcagaccgagggcactcggtag

SEQ ID NO: 51285 - DNA, 1119 bp, Artificial Sequence
  derived and/or modified sequence
atggccagagccatggccgccgcctggcccctgctgctggtggccctgctggtgctgagctggcccccccccggcaccggcgacgtggtggtgcaggcccccacccaggtgcccggcttcctgggcgacagcgtgaccctgccctgctacctgcaggtgcccaacatggaggtgacccacgtgagccagctgacctgggccagacacggcgagagcggcagcatggccgtgttccaccagacccagggccccagctacagcgagagcaagagactggagttcgtggccgccagactgggcgccgagctgagaaacgccagcctgagaatgttcggcctgagagtggaggacgagggcaactacacctgcctgttcgtgaccttcccccagggcagcagaagcgtggacatctggctgagagtgctggccaagccccagaacaccgccgaggtgcagaaggtgcagctgaccggcgagcccgtgcccatggccagatgcgtgagcaccggcggcagaccccccgcccagatcacctggcacagcgacctgggcggcatgcccaacaccagccaggtgcccggcttcctgagcggcaccgtgaccgtgaccagcctgtggatcctggtgcccagcagccaggtggacggcaagaacgtgacctgcaaggtggagcacgagagcttcgagaagccccagctgctgaccgtgaacctgaccgtgtactacccccccgaggtgagcatcagcggctacgacaacaactggtacctgggccagaacgaggccaccctgacctgcgacgccagaagcaaccccgagcccaccggctacaactggagcaccaccatgggccccctgccccccttcgccgtggcccagggcgcccagctgctgatcagacccgtggacaagcccatcaacaccaccctgatctgcaacgtgaccaacgccctgggcgccagacaggccgagctgaccgtgcaggtgaaggagggcccccccagcgagcacagcggcaccgagcacgccagcgccagcgccaacggccacgtgagctacagcgccgtgagcagagagaacagcagcagccaggacccccagaccgagggcaccagatag

SEQ ID NO: 51286 - protein, 364 aa, Artificial Sequence
  derived and/or modified sequence
MARAMAAAWPLLLVALLVLSWPPPGTGDVVVQAPTQVPGFLGDSVTLPCYLQVPNMEVTHVSQLTWARHGESGSMAVFHQTQGPSYSESKRLEFVAARLGAELRNASLRMFGLRVEDEGNYTCLFVTFPQGSRSVDIWLRVLAKPQNTAEVQKVQLTGEPVPMARCVSTGGRPPAQITWHSDLGGMPNTSQVPGFLSGTVTVTSLWILVPSSQVDGKNVTCKVEHESFEKPQLLTVNLTVYYPPEVSISGYDNNWYLGQNEATLTCDARSNPEPTGYNWSTTMGPLPPFAVAQGAQLLIRPVDKPINTTLICNVTNALGARQAELTVQVKGTEHASASANGHVSYSAVSRENSSSQDPQTEGTR

SEQ ID NO: 51287 - DNA, 1095 bp, Artificial Sequence
  derived and/or modified sequence
atggctagggccatggctgccgcttggccccttctgctcgttgcgcttctggtgcttagttggcctcccccggggacgggcgatgtagtggttcaggcaccgactcaggttcccggctttttgggagatagcgtcaccctcccatgctacctgcaggtaccgaatatggaggtaacacacgtgagccagcttacttgggcgcgacatggagagtctggctcgatggccgtgtttcaccagacacaagggcccagttacagcgagagtaagaggcttgagtttgtcgcagctcgattaggagccgagcttaggaatgcaagtctccggatgttcggccttagggtggaggacgagggcaattacacctgtcttttcgttacctttcctcagggtagccgctcagttgacatctggctccgagtgctggccaaacctcagaacacagccgaagtgcagaaggttcaactaacaggggaaccggtacccatggcacgatgtgtgagcactggcggccgacctcctgcacagataacgtggcactccgacctgggggggatgcccaacacatcccaggtgcccggatttctctccggaaccgtcaccgtcactagtctatggatcctcgtgccttccagtcaagtggacggtaaaaatgtcacgtgtaaagtggagcacgaatcgttcgagaagccgcagcttctgacagttaatctgacagtctactacccccccgaggtgagtatttctggttacgataataattggtacctgggccagaacgaagcgacccttacgtgtgacgctcggtctaatccagaacctaccggatataattggagcactaccatgggaccactgcctccatttgctgtggcccagggtgctcagcttcttattcgccctgtggacaaacctattaacacaacactgatttgtaacgtgactaacgccctgggcgccaggcaggcagagttgacagtgcaggtgaaaggtaccgagcacgccagtgcctcagcgaacggccacgtgagttacagcgccgtgtctcgcgagaattccagctcccaggacccccaaacagagggcacgcgatag

SEQ ID NO: 51288 - DNA, 1095 bp, Artificial Sequence
  derived and/or modified sequence
atggcccgggccatggctgctgcctggcccctgctgctggtggccctgctggtgctgtcctggcccccacctggcactggagatgtggtggtgcaggcccccacccaggtgcccggcttcctgggggacagcgtgaccctgccctgctacctgcaggtgcccaacatggaggtgacccacgtgtcccagctgacctgggcccggcatggagagagcggctccatggctgtgttccaccagacccagggccccagctacagcgagagcaagaggctggagtttgtggccgcccggctgggcgctgagctgagaaatgccagcctgaggatgtttggcctgcgggtggaggatgagggcaactacacctgcctgtttgtgaccttcccccagggcagccgctctgtggacatctggctgcgggtgctggccaagccccagaacacagctgaggtgcagaaggtgcagctgactggagagcctgtgcccatggcccgctgtgtgtccactggaggccggcccccagcccagatcacctggcacagcgacctgggcggcatgcccaacaccagccaggtgcccggcttcctgtctggaacagtgacagtgaccagcctgtggatcctggtgcccagcagccaggtggatggcaagaatgtgacctgcaaggtggagcacgagagctttgagaagccccagctgctgactgtgaacctgactgtgtactacccacctgaggtgtccatcagcggctatgacaacaactggtacctgggccagaatgaggccaccctgacctgtgatgcccggagcaaccctgagcccaccggctacaactggagcaccaccatgggccccctgcccccatttgctgtggcccagggcgcccagctgctgatccggcctgtggacaagcccatcaacaccaccctcatctgcaatgtgaccaatgccctgggcgcccggcaggccgagctgactgtgcaggtgaagggcacagagcacgccagcgccagcgccaacggccacgtgtcctacagcgctgtgtcccgggagaacagcagcagccaggacccccagacagagggcaccaggtag

SEQ ID NO: 51289 - DNA, 1095 bp, Artificial Sequence
  derived and/or modified sequence
atggcccgggccatggccgccgcctggcccctgctgctggtggccttgttagtactttcctggcctccacccggcacaggagacgttgtcgtgcaggcccccacccaggtgcccggtttcctgggggactccgtgactctgccatgttacctccaggtccccaatatggaggtgactcacgtgagtcagcttacatgggcccgacacggggagtctggcagcatggcagtcttccaccagacgcaaggcccgtcgtatagtgagagtaagcgcctagaatttgtcgcagcccgcttgggcgctgaattgcggaacgcttcccttagaatgtttggcttgcgtgttgaagacgaagggaattacacttgtctgttcgttacattcccacaggggtctagaagcgtcgatatatggttgagggtccttgctaagccgcagaatactgccgaggtacagaaagtccagttaaccggcgagccagtgcccatggcgagatgtgtcagcaccgggggcagacccccggcccagatcacctggcacagtgatctgggcggcatgccaaatacttcccaggtccccggtttccttagcggaaccgtgaccgtcacctcactgtggattctggtgccttctagccaggtcgacggcaaaaacgtgacgtgtaaagtggaacacgagtccttcgaaaaaccccaactccttaccgtgaacctgaccgtgtattatccacccgaggtgtctatttctggctatgataacaactggtacctgggccaaaatgaggcaactttaacatgtgacgcccggtctaaccctgagcctacaggttataattggagtactaccatgggcccactgccgccattcgcagtcgcccaaggggcacagctcctgataagacccgtagacaagcctattaatacaaccctaatttgtaatgtcactaatgccctgggcgcacgacaggctgaattaaccgtccaagttaaaggaaccgagcacgcctcagcctctgcaaatggtcacgtgtcatatagtgctgttagcagagaaaattcttcttcacaagatccccagactgaaggtacacgatag

SEQ ID NO: 51290 - DNA, 5745 bp, Artificial Sequence
  derived and/or modified sequence
agcgggactgagcgccgggagagacctgcgcaggcgcaggcgcgcgggaagggccagcctgggtggcccaccccgcgcctggcgggactggccgccaactcccctccgctccagtcacttgtctggagcttgaagaagtgggtattccccttcccaccccaggcactggaggagcggccccccggggattccaggacctgagctccgggagctggactcgcagcgaccgcggcagagcgagcgggcgccgggaagcgaggagacgcccgcgggaggcccagctgctcggagcaactggcatggcccgagccatggccgccgcgtggccgctgctgctggtggcgctactggtgctgtcctggccacccccaggaaccggggacgtcgtcgtgcaggcgcccacccaggtgcccggcttcttgggcgactccgtgacgctgccctgctacctacaggtgcccaacatggaggtgacgcatgtgtcacagctgacttgggcgcggcatggtgaatctggcagcatggccgtcttccaccaaacgcagggccccagctattcggagtccaaacggctggaattcgtggcagccagactgggcgcggagctgcggaatgcctcgctgaggatgttcgggttgcgcgtagaggatgaaggcaactacacctgcctgttcgtcacgttcccgcagggcagcaggagcgtggatatctggctccgagtgcttgccaagccccagaacacagctgaggttcagaaggtccagctcactggagagccagtgcccatggcccgctgcgtctccacagggggtcgcccgccagcccaaatcacctggcactcagacctgggcgggatgcccaatacgagccaggtgccagggttcctgtctggcacagtcactgtcaccagcctctggatattggtgccctcaagccaggtggacggcaagaatgtgacctgcaaggtggagcacgagagctttgagaagcctcagctgctgactgtgaacctcaccgtgtactaccccccagaggtatccatctctggctatgataacaactggtaccttggccagaatgaggccaccctgacctgcgatgctcgcagcaacccagagcccacaggctataattggagcacgaccatgggtcccctgccaccctttgctgtggcccagggcgcccagctcctgatccgtcctgtggacaaaccaatcaacacaactttaatctgcaacgtcaccaatgccctaggagctcgccaggcagaactgaccgtccaggtcaaaggtacagagcatgccagcgcctcagctaatgggcatgtctcctattcagctgtgagcagagagaacagctcttcccaggatccacagacagagggcacaaggtgacagcgtcgggactgagaggggagagagactggagctggcaaggacgtgggcctccagagttggacccgaccccaatggatgaagaccccctccaaagagaccagcctccctccctgtgccagacctcaaaacgacgggggcaggtgcaagttcataggtctccaagaccaccctcctttcatttgctagaaggactcactagactcaggaaagctgttaggctcacagttacagtttattacagtaaaaggacagagattaagatcagcaaagggaggaggtgcacagcacacgttccacgacagatgaggcgacggcttccatctgccctctcccagtggagccatataggcagcacctgattctcacagcaacatgtgacaacatgcaagaagtactgccaatactgccaaccagagcagctcactcgagatctttgtgtccagagttttttgtttgtcttgagacagggtctggctctgttggcagactagagtacagtggtgagatcacagttcattgcagccttgacttctcaacgccaagtcatcctcccacctcagcctcctgagtagctatgactacaggtatgtgccaccacgtctggctaatctttttattatttgtaaagtcgaggtttccctgtgttgcccaggctggtcttgaactcttggctccaagtgatacttctgccttggcctcccaaagtgctgaattaagcagctcaccatccacacggctgacctcatacatcaagccaataccgtgtggcccaagacccccaccataaatcacatcattagcatgaaccacccagagtggcccaagactcccagatcagctaccaggcaggatattccaagggcttagagatgaatgcccaggagctgaggataaagggcccgatctttctttgggcaaggttaagcctttactgcatagcagaccacacagaagggtgtgggccaccagagaattttggtaaaaatttggcctctggccttgagcttctaaatctctgtatccgtcagatctctgtggttacaagaaacagccactgaccctggtcaccagaggctgcaattcaggccgcaagcagctgcctggggggtgtccaaggagcagagaaaactactagatgtgaacttgaagaaggttgtcagctgcagccactttctgccagcatctgcagccactttctgccagcatctgcagccagcaagctgggactggcaggaaataacccacaaaagaagcaaatgcaatttccaacacaagggggaagggatgcagggggaggcagcgctgcagttgctcaggacacgctcctataggaccaagatggatgcgacccaagacccaggaggcccagctgctcagtgcaactgacaagttaaaaaggtctatgatcttgagggcagacagcagaattcctcttataaagaaaactgtttgggaaaatacgttgagggagagaagaccttgggccaagatgctaaatgggaatgcaaagcttgagctgctctgcaagagaaaataagcaggacagaggatttgctctggacagagatggaagagccgggaacagagaagtgtggggaagagataggaaccagcaggatggcaggggcaaagggctcaagggtgaggaggccagtgggaccccacagagttggggagataaaggaacattggttgctttggtggcacgtaagctccttgtctgtctccagcacccagaatctcattaaagcttatttattgtacctccagcggctgtgtgcaatggggtcttttgtggaaatcaaggagcagacaggtttcatgtgtactgtcaccacgtgggatggaaccagaggcatggaagcaagacgctaaatgaagagggccataagggctgggattcccaggcaccttaggaacagcttgtctttttttttttcctctccaaaaaaaatgtttaagggacggtgtctcctgtcacccaggctggagtgcaatggcacgatcatagctcattgcagcctctaactccggggctcaagcaatcctcccacctcagcctaccaagtagctgtgaccacagctgcccctcaccatgctaagctaatttttttaattagatagtacataaacgtcccaaaattagaagataaaaagacatgagggatccattctaatttgtgtttggagtgtaatggtccagctccattcttctgcacatggatatccagttttacacaacactgtgaatgtaatgaatgccactgaatcatacactcaaaaatagctaaaatggcaaattgtctgttatctctttttaaccaccatttttgaaaattaattataccaaaaaaccattgaatagtgcactttatttatttatttatttgtttatttatttatttattttagaaataagagtctcactttgttgcccaggctggagtgcggtggcgtgatcatggctcattgcagcctcgacctgctgggctcgggctatccttccatctcagcctcccgagtagctgggactataggtgggcgccaccccacctggctaaatctctttttaacttttgtagagataggcatctcgctatgttgcctaggctgggctggaactcctgggctcaagtgctcctcctgccttggcctcccaaagcgctaggattacagatgtgagccaccgcgcccaccctgaaccttactttttttgctcagtttctggtaattcagagaatgcctcctgagttgttctacacccacctcatattccatgggagggctgtacagggcttttttaacgaggcctctaaggacaggcatttgtatcctttccagcctttcactattacaatgttgtagtgaataactttacacactgtcatttattttacttttttttttttttattttagagaaaggaatcttgccatcttgcccaggctggtctcaaattcctgggcccaaacaatcctcccgccttggcctcctaaagtactgggatttataggcataagccaccgtgcctggccaatgcacactgtcatttagctcatgttaacacctgagtgtaggacacactcctggaggtggaattgctgggccaaagagtatgtttcttgtcattgtgatagatattgacaaatgaaccctcacagaagttgtgctgagttctgttcccaccagcgacgtaggcgatgacctttttctggagggagggggcatccttggagtccacagagccaggaatggagagtgggcccagaattttggtataggtgttgtataaacttatagtaaggttaagaaaaccgccactatccttatcagagacttggcggggggcagggtatgatggagatcataaggaggctaaaacactccacaccctccctctgcattgctcctgcacaggagtcgggaatcttttcaggttgatacgatctcaccttgaggagctgtgaggtcccagaagcctctgggttgcagattgcttggggtgaaaatgtctgtgctactgaaatctaactttttacaaaaaattacgggctgggcgcagtggctcacgcctgtaatcccagcactttgggaggctgcagcgggtggatcacttgaggtaaggagttcaagaccagaccatagtgaaaccgtgtctctacaaaaaaaattagccaggtgtggtggtgcatgcttgtaatcccagctactcagaaggctgaggtgggagaatcccttgaacccgggaagtggaggctggagtaaaccatgatcgagttactgcactccagcctgggtgacaagagtgagactctgtctccaaaaaaaaaaaaaaaaaaaaaaaaaactggattgcctggctctactccgggcacagcatgcaggcccagttctgctgctctgctgtttgttctgctttcctccacatattggcatcaccctctggtgccaagatggctgctgcattccaggcatcacatccagactcagacccagagaagctgcccatccctacctgggtgagcctttgtaggaacgagaaaccgcatccagcagcagaaacctcacccagcagcgtcttttccggtctcattcaccagcgccgcccaccgctcaaccaatccctggccaaaagaatgggaccgcctggaaggctggaccaaacaggacctgccctctggggctggggagaggcccagatgaaggctgcaggacaggatggactcctagacctctgttaccagcagtgactacctctgtctgggtggttggaacatgtttgaattttattctaagtactgtctacaagttctgcaataaaccttgactcttcttttaataatgcaaa

SEQ ID NO: 51291 - DNA, 1095 bp, Artificial Sequence
  derived and/or modified sequence
atggctcgcgcaatggctgccgcttggcctctccttctggtggcactgcttgtgctgagttggccccctccgggaaccggagacgtcgtcgtgcaggccccaacacaggttccaggctttctcggggactccgtgacactcccttgttaccttcaggtccctaacatggaggtcacacacgtctcccagcttacgtgggcccgacacggcgaatccgggtcaatggctgtctttcaccagacacagggcccttcgtactcagagtctaagagactcgagttcgtcgctgcacggctgggcgctgagctgcgaaacgcatctctgcggatgttcgggctgcgggtcgaagacgagggaaattatacgtgcttgttcgtgactttccctcagggatctcggtccgtcgacatctggctgagagtcttagccaaacctcagaacaccgctgaagtacagaaggtacaattgacaggagaaccagtaccaatggctcgatgcgtatcgaccggaggaagaccccctgctcagatcacctggcactccgatctgggcggtatgcccaacacatcacaggtccccggttttctgagtggcaccgtgacagtcaccagtctgtggattctggtgccgagcagccaggttgacggaaaaaatgtgacctgcaaggtggagcatgaaagcttcgaaaaaccacaattactgacagttaaccttaccgtgtactaccctccagaagtaagtatttctgggtacgacaataactggtacctgggacagaatgaagccactctgacatgtgacgccagatcaaacccagagcctaccgggtacaactggtccaccactatgggtccactgcctcctttcgccgtggcacagggcgctcagttacttatcaggcctgttgacaagcctattaacaccaccctaatatgtaacgtgacgaatgctctgggtgccagacaagctgaactgactgttcaggtgaaaggcaccgaacacgcctctgcttcagctaatggccatgtcagctactctgcggtctctagagaaaatagttcttcccaggatccccaaaccgaggggactcgctag

SEQ ID NO: 51292 - DNA, 1095 bp, Artificial Sequence
  derived and/or modified sequence
atggccagagccatggccgccgcctggcccctgctgctggtggccctgctggtgctgagctggcccccccccggcaccggcgacgtggtggtgcaggcccccacccaggtgcccggcttcctgggcgacagcgtgaccctgccctgctacctgcaggtgcccaacatggaggtgacccacgtgagccagctgacctgggccagacacggcgagagcggcagcatggccgtgttccaccagacccagggccccagctacagcgagagcaagagactggagttcgtggccgccagactgggcgccgagctgagaaacgccagcctgagaatgttcggcctgagagtggaggacgagggcaactacacctgcctgttcgtgaccttcccccagggcagcagaagcgtggacatctggctgagagtgctggccaagccccagaacaccgccgaggtgcagaaggtgcagctgaccggcgagcccgtgcccatggccagatgcgtgagcaccggcggcagaccccccgcccagatcacctggcacagcgacctgggcggcatgcccaacaccagccaggtgcccggcttcctgagcggcaccgtgaccgtgaccagcctgtggatcctggtgcccagcagccaggtggacggcaagaacgtgacctgcaaggtggagcacgagagcttcgagaagccccagctgctgaccgtgaacctgaccgtgtactacccccccgaggtgagcatcagcggctacgacaacaactggtacctgggccagaacgaggccaccctgacctgcgacgccagaagcaaccccgagcccaccggctacaactggagcaccaccatgggccccctgccccccttcgccgtggcccagggcgcccagctgctgatcagacccgtggacaagcccatcaacaccaccctgatctgcaacgtgaccaacgccctgggcgccagacaggccgagctgaccgtgcaggtgaagggcaccgagcacgccagcgccagcgccaacggccacgtgagctacagcgccgtgagcagagagaacagcagcagccaggacccccagaccgagggcaccagatag

SEQ ID NO: 51293 - protein, 392 aa, Artificial Sequence
  derived and/or modified sequence
MARAMAAAWPLLLVALLVLSWPPPGTGDVVVQAPTQVPGFLGDSVTLPCYLQVPNMEVTHVSQLTWARHGESGSMAVFHQTQGPSYSESKRLEFVAARLGAELRNASLRMFGLRVEDEGNYTCLFVTFPQGSRSVDIWLRVLAKPQNTAEVQKVQLTGEPVPMARCVSTGGRPPAQITWHSDLGGMPNTSQVPGFLSGTVTVTSLWILVPSSQVDGKNVTCKVEHESFEKPQLLTVNLTVYYPPEVSISGYDNNWYLGQNEATLTCDARSNPEPTGYNWSTTMGPLPPFAVAQGAQLLIRPVDKPINTTLICNVTNALGARQAELTVQVKEGPPSEHSGISRNAIIFLVLGILVFLILLGIGIYFYWSKCSREVLWHCHLCPSSEHHQSCRN

SEQ ID NO: 51294 - DNA, 1179 bp, Artificial Sequence
  derived and/or modified sequence
atggctcgggctatggctgccgcctggccactgctgctcgtagccctactggtgctgtcatggcctcctcccgggactggtgacgtggtggtccaggctccgacacaggtgcctggattcctgggagatagcgttacacttccctgttatcttcaggtgcctaatatggaggttacacacgtctcacagttgacctgggccagacatggggaaagtggctcaatggccgtgttccaccagacccagggacctagctactctgaatctaagcgcctagaattcgtggccgcccgcctgggggctgagctacgaaatgcaagcctacggatgttcggcctcagggtggaagatgaaggcaactatacctgtctcttcgtgacttttccacagggtagtagaagtgttgatatctggctgagggtcctcgcgaagccgcagaatacagccgaagtgcagaaagtgcagttgaccggagaaccagtgccaatggcgaggtgcgtgagcactggtgggagaccccccgcacagatcacttggcatagcgacttagggggcatgcctaatacctcccaggtacccggttttttatccgggactgtcactgtaacttctttgtggattcttgttcccagttctcaggtggatggaaagaatgtgacttgtaaggtcgaacacgaatctttcgaaaaacctcagctgctaactgtcaatctaaccgtgtactatcctcccgaggttagcataagtgggtatgacaataactggtatctcggacagaacgaagcgactctgacatgtgatgcccgctctaatccagaacccaccggctacaactggagcacgactatggggccccttcccccgttcgcagtagcgcagggtgctcaactgttgatccggcctgtcgacaaacctatcaacacaactctgatctgtaatgtgaccaatgcactgggcgcccgccaggcagaacttactgtccaggttaaggaaggacctccctccgagcattccgggatctcccggaacgcaattatttttctggtgttgggcatcctagtcttcctcatcctgctaggcattgggatctacttttactggtcaaaatgctcccgggaggttctctggcactgtcacctgtgcccatccagtgaacatcatcaatcatgtcgtaactag

SEQ ID NO: 51295 - DNA, 1179 bp, Artificial Sequence
  derived and/or modified sequence
atggcccgggccatggctgctgcctggcccctgctgctggtggccctgctggtgctgtcctggcccccacctggcactggagatgtggtggtgcaggcccccacccaggtgcccggcttcctgggggacagcgtgaccctgccctgctacctgcaggtgcccaacatggaggtgacccacgtgtcccagctgacctgggcccggcatggagagagcggctccatggctgtgttccaccagacccagggccccagctacagcgagagcaagaggctggagtttgtggccgcccggctgggcgctgagctgagaaatgccagcctgaggatgtttggcctgcgggtggaggatgagggcaactacacctgcctgtttgtgaccttcccccagggcagccgctctgtggacatctggctgcgggtgctggccaagccccagaacacagctgaggtgcagaaggtgcagctgactggagagcctgtgcccatggcccgctgtgtgtccactggaggccggcccccagcccagatcacctggcacagcgacctgggcggcatgcccaacaccagccaggtgcccggcttcctgtctggaacagtgacagtgaccagcctgtggatcctggtgcccagcagccaggtggatggcaagaatgtgacctgcaaggtggagcacgagagctttgagaagccccagctgctgactgtgaacctgactgtgtactacccacctgaggtgtccatcagcggctatgacaacaactggtacctgggccagaatgaggccaccctgacctgtgatgcccggagcaaccctgagcccaccggctacaactggagcaccaccatgggccccctgcccccatttgctgtggcccagggcgcccagctgctgatccggcctgtggacaagcccatcaacaccaccctcatctgcaatgtgaccaatgccctgggcgcccggcaggccgagctgactgtgcaggtgaaggagggccccccatctgagcacagcggcatcagcagaaatgccatcatcttcctggtgctgggcatcctggtgttcctgatcctgctgggcatcggcatctacttctactggagcaagtgcagccgggaggtgctgtggcactgccacctgtgccccagcagcgagcaccaccagagctgcagaaattag

SEQ ID NO: 51296 - DNA, 1179 bp, Artificial Sequence
  derived and/or modified sequence
atggcccgggccatggccgccgcctggcccctgctgctggtggccctcttggtgttaagttggccaccaccggggaccggggacgtagttgtacaggctcctacccaagtgcctggctttcttggggacagcgtaaccctcccctgctacctgcaagttcccaatatggaagttacacacgtttcacagctcacatgggcgcgtcacggcgagtctggcagcatggccgtctttcaccagacccaggggccatcatattctgaatcaaagcggctagagtttgttgcagcccgactgggcgcagagctgagaaatgccagtttgcgcatgtttggcctccgagtggaagacgaaggaaattacacatgtctctttgtcacttttcctcaggggagtcgtagtgtggacatttggctgcgtgttctagccaagccacagaacacagcagaagtacagaaggtacagctgactggcgaacctgtccctatggcccgatgcgtgagcacgggagggcgtcccccagcccaaataacatggcactcagacctcgggggaatgcccaacacttcccaggtgcctggatttctgtcagggacagttaccgtgacttccttgtggatcctggtgccttcctcacaggtggatggtaaaaacgtaacctgcaaagtggagcatgagtccttcgagaaacctcaattacttaccgtgaatttaacagtttattacccgccagaagtgtctatttcaggttatgacaacaattggtatctgggccagaacgaagccactcttacttgcgacgcaagatccaatccagagcccacaggatacaactggtccacaaccatgggacctctccccccatttgcggtcgctcagggcgcccagcttctgattcgacccgtcgataaacccataaataccacactgatttgtaatgtgactaacgcgttaggcgcccgacaggccgagttaaccgtacaggtgaaggaaggcccccctagtgaacacagcgggatcagcaggaatgctatcattttcctggtactaggcatcctggtctttctgatcctgttgggcatcgggatttatttctactggtcaaaatgcagccgtgaagtcctctggcattgtcatctgtgccctagctctgagcaccaccagagctgtcgaaattag

SEQ ID NO: 51297 - DNA, 1347 bp, Artificial Sequence
  derived and/or modified sequence
atggcccgagccatggccgccgcgtggccgctgctgctggtggcgctactggtgctgtcctggccacccccaggaaccggggacgtcgtcgtgcaggcgcccacccaggtgcccggcttcttgggcgactccgtgacgctgccctgctacctacaggtgcccaacatggaggtgacgcatgtgtcacagctgacttgggcgcggcatggtgaatctggcagcatggccgtcttccaccaaacgcagggccccagctattcggagtccaaacggctggaattcgtggcagccagactgggcgcggagctgcggaatgcctcgctgaggatgttcgggttgcgcgtagaggatgaaggcaactacacctgcctgttcgtcacgttcccgcagggcagcaggagcgtggatatctggctccgagtgcttgccaagccccagaacacagctgaggttcagaaggtccagctcactggagagccagtgcccatggcccgctgcgtctccacagggggtcgcccgccagcccaaatcacctggcactcagacctgggcgggatgcccaatacgagccaggtgccagggttcctgtctggcacagtcactgtcaccagcctctggatattggtgccctcaagccaggtggacggcaagaatgtgacctgcaaggtggagcacgagagctttgagaagcctcagctgctgactgtgaacctcaccgtgtactaccccccagaggtatccatctctggctatgataacaactggtaccttggccagaatgaggccaccctgacctgcgatgctcgcagcaacccagagcccacaggctataattggagcacgaccatgggtcccctgccaccctttgctgtggcccagggcgcccagctcctgatccgtcctgtggacaaaccaatcaacacaactttaatctgcaacgtcaccaatgccctaggagctcgccaggcagaactgaccgtccaggtcaaagagggacctcccagtgagcactcaggcatatcccgtaacgccatcatcttcctggttctgggaatcctggtttttctgatcctgctggggatcgggatttatttctattggtccaaatgttcccgtgaggtcctttggcactgtcatctgtgtccctcgagtgagcatcaccagagctgccgtaattgagcacctactacgggctctgtgctgagtccttccagtgtgcctctcactgaatcctcaccccactgccatgaggtttcccccatttgactgatgagggtgcagagccagggagccttgttcactggttcattgattacatttacaaatattatttacagagtgggagaa

SEQ ID NO: 51298 - DNA, 1179 bp, Artificial Sequence
  derived and/or modified sequence
atggcccgtgccatggccgctgcatggccactgctcctcgttgctctccttgtgctgtcgtggccacctccagggacaggagacgtagtagttcaggctcccacgcaagtgcccggattcctaggcgatagtgtgacgctgccctgttatctgcaagtacccaatatggaagtgactcacgtgtcgcagctgacttgggccagacatggagagtctggctccatggctgtgttccaccagacccaaggtccaagttacagtgaaagcaagcggctggagtttgtagccgctaggttgggtgctgaactgcgcaacgcctccctcagaatgtttggactgcgtgtggaggacgaaggaaactacacatgtttgttcgtgaccttcccacaaggctccagatcagtggacatctggttgcgggtactcgccaagccccagaatacagctgaggtgcaaaaagttcagttaaccggggagcctgttcccatggctcgctgcgtgagcactggcggacggccaccagcccagatcacctggcattcagatttgggtggaatgccaaatacttcccaggtaccgggatttctgagcggcacagtgactgtgactagcctgtggatcctcgtgccatcttcccaggttgacgggaagaatgtcacctgcaaggtggagcatgagagtttcgagaaaccccaactcctcacagtgaacctaaccgtctactatccccctgaggtgtccataagtgggtatgacaacaactggtatctcgggcaaaatgaggcgaccctgacctgtgatgccagaagcaaccctgaaccaaccggctacaactggagcactaccatgggacccctccctccttttgccgtcgcccagggcgctcagctgctgattcggccagttgacaagcccatcaataccacgctcatttgtaatgtaacaaatgctttgggcgctcgccaggcagagttgacagttcaggtcaaggaggggccaccatctgaacacagtggcattagcaggaatgcaattatttttttggtgctgggcatcttggtctttttaatcctcctgggtattggaatttatttttactggtccaagtgttccagggaagtcctgtggcactgtcacctgtgcccctcctccgagcatcaccagtcatgtagaaattag

SEQ ID NO: 51299 - DNA, 1179 bp, Artificial Sequence
  derived and/or modified sequence
atggccagagccatggccgccgcctggcccctgctgctggtggccctgctggtgctgagctggcccccccccggcaccggcgacgtggtggtgcaggcccccacccaggtgcccggcttcctgggcgacagcgtgaccctgccctgctacctgcaggtgcccaacatggaggtgacccacgtgagccagctgacctgggccagacacggcgagagcggcagcatggccgtgttccaccagacccagggccccagctacagcgagagcaagagactggagttcgtggccgccagactgggcgccgagctgagaaacgccagcctgagaatgttcggcctgagagtggaggacgagggcaactacacctgcctgttcgtgaccttcccccagggcagcagaagcgtggacatctggctgagagtgctggccaagccccagaacaccgccgaggtgcagaaggtgcagctgaccggcgagcccgtgcccatggccagatgcgtgagcaccggcggcagaccccccgcccagatcacctggcacagcgacctgggcggcatgcccaacaccagccaggtgcccggcttcctgagcggcaccgtgaccgtgaccagcctgtggatcctggtgcccagcagccaggtggacggcaagaacgtgacctgcaaggtggagcacgagagcttcgagaagccccagctgctgaccgtgaacctgaccgtgtactacccccccgaggtgagcatcagcggctacgacaacaactggtacctgggccagaacgaggccaccctgacctgcgacgccagaagcaaccccgagcccaccggctacaactggagcaccaccatgggccccctgccccccttcgccgtggcccagggcgcccagctgctgatcagacccgtggacaagcccatcaacaccaccctgatctgcaacgtgaccaacgccctgggcgccagacaggccgagctgaccgtgcaggtgaaggagggcccccccagcgagcacagcggcatcagcagaaacgccatcatcttcctggtgctgggcatcctggtgttcctgatcctgctgggcatcggcatctacttctactggagcaagtgcagcagagaggtgctgtggcactgccacctgtgccccagcagcgagcaccaccagagctgcagaaactag

SEQ ID NO: 51300 - protein, 615 aa, Artificial Sequence
  derived and/or modified sequence
MAPPGSSTVFLLALTIIASTWALTPTHYLTKHDVERLKASLDRPFTNLESAFYSIVGLSSLGAQVPDAKISISNETKDLLLAAVSEDSSVTQIYHAVAALSGFGLPLASQEALSALTARLSKEETVLATVQALQTASHLSQQADLRSIVEEIEDLVARLDELGGVYLQFEEGLETTALFVAATYKLMDHVGTEPSIKEDQVIQLMNAIFSKKNFESLSEAFSVASAAAVLSHNRYHVPVVVVPEGSASDTHEQAILRLQVTNVLSQPLTQATVKLEHAKSVASRATVLQKTSFTPVGDVFELNFMNVKFSSGYYDFLVEVEGDNRYIANTVELRVKISTEVGITNVDLSTVDKDQSIAPKTTRVTYPAKAKGTFIADSHQNFALFFQLVDVNTGAELTPHQTFVRLHNQKTGQEVVFVAEPDNKNVYKFELDTSERKIEFDSASGTYTLYLIIGDATLKNPILWNVADVVIKFPEEEAPSTVLSQNLFTPKQEIQHLFREPEKRPPTVVSNTFTALILSPLLLLFALWIRIGANVSNFTFAPSTIIFHLGHAAMLGLMYVYWTQLNMFQTLKYLAILGSVTFLAGNRMLAQQAVKRIAAEQSSRLAKYRTLRTAH

SEQ ID NO: 51301 - DNA, 1848 bp, Artificial Sequence
  derived and/or modified sequence
atggccccgccagggtcgagcactgtctttctgctggcactcacaattattgcctcaacctgggcactcactccaactcattatttaacaaagcacgacgtcgagagattgaaggccagtcttgataggccctttacaaatctagagtctgctttctacagcattgttggcctatcatcgctaggggcacaggtccccgacgcaaaaatttccatcagcaatgagactaaagacttattgctggcagcagtttcggaggatagttcggtaacacaaatctatcatgctgtggctgcactatctggttttggactgccgctggctagtcaggaggccctcagtgctttgaccgcacggttgtcgaaagaagagacagtgttagcgactgtccaggcattacagacggcctcacatctcagccagcaggccgatttgaggtcaattgtggaagagatcgaggatcttgtggctcggctggacgagctgggtggggtgtatctccagtttgaagaaggcctggagacgaccgctttattcgtggccgctacctataagctgatggaccacgttgggaccgaaccttccattaaggaggaccaggtgattcaactgatgaatgccatcttctcgaaaaaaaactttgagtccctgtcagaagcctttagcgtcgcatccgctgctgctgtgctgtctcacaacagatatcatgtgcctgtggtggttgtgcctgagggatcagcgtctgatacgcacgaacaggccattcttcggttgcaggtgaccaacgtcctgtcgcagcctcttacacaggctactgtaaagctcgaacacgcaaaatcggtcgcatctagagctacagtcctgcaaaagacttctttcacccctgttggagatgtcttcgaactcaattttatgaacgtaaaattttcttccggctattatgattttctcgtggaagttgaaggcgacaacaggtacatcgcaaatacggttgagttgcgggttaagatctccaccgaggtaggaattactaatgtcgatctgtccaccgtggataaagaccaatctatcgctccaaagacaactcgggtgacatatcccgccaaggccaagggaacattcattgccgatagtcaccagaacttcgcgctgttcttccagctggttgatgtcaataccggcgctgaactcaccccccaccaaacatttgtgcggttacacaatcagaaaaccggccaggaggtagtgtttgtggccgagccagacaataaaaacgtttataaattcgagctggatacttccgagcggaaaatcgagtttgactccgccagtgggacctacacattatacttgattatcggagatgccaccttaaagaatcccattctctggaatgtggccgacgtggtcatcaaatttcctgaggaggaagccccttcaacggtccttagtcagaatctgttcacacctaaacaggaaattcagcacctgttccgcgagcctgagaagaggcctcctaccgttgtctctaacacattcactgccctgattctctctcctttgctgcttctttttgccctgtggatcaggatcggcgcgaatgtgagcaactttaccttcgcgcctagcactattatcttccacctaggccatgcagccatgttgggcttaatgtacgtctattggacccagctgaacatgtttcagaccctgaaatacctggcgattttgggcagtgtgaccttcttggcagggaataggatgctggcccagcaggcagtgaaaagaattgcagcagagcagtctagccgtctggccaagtataggacccttcgaacagcccactag

SEQ ID NO: 51302 - DNA, 441 bp, Artificial Sequence
  derived and/or modified sequence
ggaacctacacactgtatctcatcattggagatgccacacttaagaaccccatactctggaacgtcgccgacgtagttatcaaattccctgaggaggaggcccccagcaccgtgctgagtcagaatctcttcacccccaagcaggaaattcagcacctgttcagggagcctgagaagagacctccaaccgtggtgtcaaatacatttaccgccttaatcctctccccgctccttctgctgtttgccctctggatcaggatcggtgctaacgtgagcaatttcactttcgcacccagtactatcatttttcatctagggcacgccgagcagcacattagctctaggcgcaagatggagatactgaagactgaatgtcaggaaaaggaatctcgtaccatccacagcatgaggaggaaaatggagaaaaagaattttatttag

SEQ ID NO: 51303 - DNA, 444 bp, Artificial Sequence
  derived and/or modified sequence
tgaggaacttacacactgtacttaattattggtgatgcaacgttgaagaaccccatactgtggaacgttgcggacgtagtgatcaagtttccagaagaggaggcaccatcaactgtcctttcccagaacctgtttacacccaaacaagagattcagcacttgttccgcgaacccgagaaaaggccgcctacagtggtgagtaacacctttacagctcttattctgtctcccctgttgctcttgtttgcactgtggattcgcattggggctaacgtgtctaattttactttcgccccttcgaccatcatatttcaccttggacatgcagagcagcatatctcttcaagaaggaagatggagatcctcaagacagagtgtcaggagaaagagagcagaactatccactccatgcgaaggaagatggaaaagaaaaattttatatag

SEQ ID NO: 51304 - DNA, 1848 bp, Artificial Sequence
  derived and/or modified sequence
atggcccctcctggcagcagcaccgtcttcctgctggccctgaccatcatcgccagcacctgggccctgacccccacccactacctgaccaagcatgatgtggagcggctgaaggccagcctggaccggcccttcaccaacctggagagcgccttctacagcatcgtgggcctgagcagcctgggcgcccaggtgcctgatgccaagatcagcatcagcaatgagaccaaggacctgctgctggccgctgtgtctgaggacagctctgtgacccagatctaccacgctgtggccgccctgagcggcttcggcctgcccctggccagccaggaggccctgagcgccctgacagcccggctgagcaaggaggagaccgtgctggccaccgtgcaggccctgcagacagccagccacctgagccagcaggccgacctgcggagcatcgtggaggagattgaggacctggtggcccggctggatgagctgggcggcgtgtacctgcagtttgaggagggcctggagaccacagccctgtttgtggccgccacctacaagctgatggaccacgtgggcacagagcccagcatcaaggaggaccaggtgatccagctgatgaatgccatcttcagcaagaagaactttgagagcctgtctgaggccttctctgtggccagcgctgctgctgtgctgagccacaaccgctaccacgtgcctgtggtggtggtgcctgagggcagcgccagtgacacccatgagcaggccatcctgcggctgcaggtgaccaacgtgctgagccagcccctgacccaggccaccgtgaagctggagcacgccaagtctgtggccagccgggccaccgtgctgcagaagaccagcttcacccctgtgggagatgtgtttgagctgaacttcatgaatgtgaagttcagcagcggctactatgacttcctggtggaggtggagggggacaaccgctacatcgccaacacagtggagctgcgggtgaagatcagcacagaggtgggcatcaccaacgtggacctgagcacagtggacaaggaccagagcatcgcccccaagaccaccagggtgacctacccagccaaggccaagggcaccttcatcgctgacagccaccagaactttgccctcttcttccagctggtggatgtgaacacaggagctgagctgaccccccaccagacctttgtgcggctgcacaaccagaagacaggccaggaggtggtgtttgtggccgagccagacaacaagaatgtgtacaagtttgagctggacaccagcgagaggaagattgaatttgacagcgccagcggcacctacaccctgtacctgatcattggagatgccaccctgaagaaccccatcctgtggaatgtggctgatgtggtgatcaagtttcctgaggaggaggcccccagcacagtgctgagccagaacctcttcacccccaagcaggagatccagcacctgttccgggagcctgagaagaggcccccaacagtggtgagcaacaccttcaccgccctgatcctgagccccctgctgctgctgtttgccctgtggatcagaattggagccaacgtgagcaacttcacctttgcccccagcaccatcatcttccacctgggccacgccgccatgctgggcctgatgtatgtgtactggacccagctgaacatgttccagaccctgaagtacctggccatcctgggctctgtgaccttcctggccggcaacaggatgctggcccagcaggccgtgaagagaattgctgctgagcagagcagccggctggccaagtaccgcaccctgaggacagcccactag

SEQ ID NO: 51305 - DNA, 441 bp, Artificial Sequence
  derived and/or modified sequence
ggcacctacaccctgtacctgatcattggagatgccaccctgaagaaccccatcctgtggaatgtggctgatgtggtgatcaagtttcctgaggaggaggcccccagcacagtgctgagccagaacctcttcacccccaagcaggagatccagcacctgttccgggagcctgagaagaggcccccaacagtggtgagcaacaccttcaccgccctgatcctgagccccctgctgctgctgtttgccctgtggatcagaattggagccaacgtgagcaacttcacctttgcccccagcaccatcatcttccacctgggccacgccgagcagcacatcagcagcaggaggaagatggagatcctgaagacagagtgccaggagaaggagagcaggaccatccacagcatgaggaggaagatggagaagaagaacttcatctag

SEQ ID NO: 51306 - DNA, 444 bp, Artificial Sequence
  derived and/or modified sequence
tgaggaacctacaccctgtacctgatcattggagatgccaccctgaagaaccccatcctgtggaatgtggctgatgtggtgatcaagtttcctgaggaggaggcccccagcacagtgctgagccagaacctcttcacccccaagcaggagatccagcacctgttccgggagcctgagaagaggcctcccaccgtggtgagcaacaccttcaccgccctgatcctgagccccctgctgctgctgtttgccctgtggatccgcatcggggccaacgtgagcaacttcacctttgcccccagcaccatcatcttccacctgggccatgctgagcagcacatcagcagcaggaggaagatggagatcctgaagacagagtgccaggagaaggagagcaggaccatccacagcatgaggaggaagatggagaagaagaacttcatctag

SEQ ID NO: 51307 - DNA, 1848 bp, Artificial Sequence
  derived and/or modified sequence
atggccccccccggcagcagcaccgtgttcctgctggccctgaccataatcgccagcacctgggccctaaccccgactcactatttgactaagcacgacgtcgagagactcaaggccagtcttgaccgtccctttaccaatctggagtccgctttctacagtattgtggggctatcctctttgggtgcacaggtcccagacgcaaagatatctattagcaacgagacaaaagatctacttttggcagctgtgtccgaggactctagtgtgactcaaatttaccatgccgtagcagcactctccgggtttggcctcccactcgcatcccaagaagctttaagtgcacttactgcacgtctgtccaaagaagaaaccgtgctggccaccgttcaggccttgcaaaccgctagccacttgagccagcaggcagatcttagaagcatcgtcgaggagatcgaggatctggtggctagattagacgagcttggaggagtatatctccagttcgaggagggcctggagacaacagctttgttcgtcgccgcaacttacaaactcatggaccatgtgggcactgagcccagcataaaggaagaccaagtgattcaattgatgaacgcgattttctcgaaaaaaaacttcgaatccttatccgaggccttttccgtggccagcgccgcagccgtcttgtcccacaacagataccacgtacctgttgtggtggtcccggaaggttcggcaagtgatactcatgaacaggcaatccttagactccaggtgactaacgtgctatcacagccgctgactcaggccacggtaaagctggagcatgccaagtccgtggcctctcgggccactgttcttcagaaaacatcgttcacacccgttggcgatgtgtttgaactcaatttcatgaacgtaaagttctcctctggctattacgactttcttgtcgaggtcgaaggtgataaccgatacattgcaaacaccgttgaactcagggttaagatctccactgaagtcggcatcacgaatgttgatctgtcaacagtcgataaagatcaatcaatcgctcctaagaccacccgcgttacctatcccgcaaaggctaaggggacgtttatcgcagattcccaccaaaacttcgccttgttcttccagctcgttgatgtcaatacaggggccgagttgacaccccatcaaactttcgtgagacttcacaaccagaaaactgggcaggaagtggtgtttgtcgccgagcccgacaacaagaacgtgtataaatttgaactcgacacgagcgagcggaagatcgagttcgattctgcctcgggcacatatacgctttatcttatcattggggacgctacccttaagaaccccatactgtggaatgtggccgacgtggtgataaaatttcctgaggaggaggcaccaagtacagtgctgagccagaacttatttacacctaagcaggagatacagcacctctttcgcgagccggagaagcggcccccaaccgtggtgtctaacaccttcactgcactcattctttctcccctcctgctgctcttcgcgttgtggattagaataggcgccaacgtaagcaattttacgttcgccccctcgacaatcattttccacctaggccacgctgctatgctgggtctgatgtacgtctattggacacaacttaacatgttccaaactctgaagtatctggccatactggggtcagtgactttcctcgccggcaatcgcatgctcgctcaacaggcagtgaagaggatagcggccgagcaaagctccagactagctaagtatcgtacgcttagaactgctcattag

SEQ ID NO: 51308 - DNA, 441 bp, Artificial Sequence
  derived and/or modified sequence
ggcacctacaccctgtacctgatcatcggcgacgccaccctgaagaatcccattctctggaacgtggctgacgtcgtcattaagtttcctgaagaagaggctcccagtacagtattatcgcagaatttgttcacaccgaagcaggaaatccagcacctattccgtgaacctgagaaaagacctccaacagtcgtcagtaacacctttactgctctcatcctatcaccgcttctcctattatttgccctatggatcaggattggcgccaatgtgagcaatttcactttcgccccatccacgatcatattccacctggggcacgccgaacagcacatctccagccgtcgtaagatggaaattctcaagaccgaatgtcaggaaaaggagtcacggactatacattccatgcgaaggaaaatggaaaaaaagaattttatctag

SEQ ID NO: 51309 - DNA, 444 bp, Artificial Sequence
  derived and/or modified sequence
tgaggcacctacaccctgtacctgatcatcggcgacgccaccctgaagaaccccatcctctggaacgtggccgatgtcgttatcaagtttccagaagaggaggcgccttctactgtgctgagtcagaacctattcactcccaagcaggagatccagcacctctttcgtgagcctgagaagcggccaccaaccgtggtatctaacaccttcacagcccttatcctgtccccgctcctgctgctgtttgccctgtggatccggatcggcgccaatgtgagcaactttaccttcgcacccagcactatcatcttccacctaggtcatgccgagcagcacattagttcaaggagaaagatggaaattctcaaaaccgagtgtcaggagaaagagtcaaggacaatccactccatgcgaaggaagatggagaagaagaactttatctag

SEQ ID NO: 51310 - DNA, 1848 bp, Artificial Sequence
  derived and/or modified sequence
atggccccacccggttcctccaccgtttttctcttggcactgaccatcatcgcctctacctgggctctgactccaactcattatctcactaagcatgatgtggagcgcttgaaagcttccctggataggcctttcacaaatctggagtccgccttttactcgattgtgggcctgtcctcccttggcgctcaggtgccagacgcaaaaatctcaataagcaatgaaaccaaggacctcttgctcgctgctgtgtcagaagattcatcggtgactcagatctatcacgccgtggcggcactctcgggattcggattgcccttagcaagccaggaggccctgtccgcccttacagccaggctcagcaaagaagagaccgttctggctacagtgcaggctctccagactgcaagtcacctctcccagcaagctgatttgaggagcatagtggaagagatcgaagaccttgtcgcacgattggatgaacttggcggtgtttacctgcagtttgaggaaggtctcgagactacagctctgttcgtggccgctacctataagctgatggaccatgtgggcacagagccttcaattaaagaggaccaagtcattcagcttatgaacgccattttttcaaagaagaacttcgagtcattatcagaggcctttagcgtggccagcgccgcagctgtgctctcacataaccgctatcatgtacccgtcgtagtcgttccagagggatctgccagcgacacccacgagcaggcaatcttgagactccaggtgacgaatgtcctgtctcaaccattgacacaggcaacggtgaagcttgaacacgcaaaaagtgtagcgtcacgcgctaccgtgctccaaaaaacaagttttacgcccgtgggagacgtgtttgagctcaatttcatgaacgtgaaattttcttctgggtattatgattttttggtggaggtcgaaggtgataatcgatacatagctaataccgtcgaactgcgagtaaaaatctccacggaagtcggcatcaccaatgtggacctctctaccgttgataaagaccagagcattgccccaaagacgacacgagtgacctaccccgcaaaagccaagggcacctttattgcggattctcaccagaactttgcgctcttcttccagctggtggacgttaacaccggcgcagaactgaccccccaccagacattcgtcagactgcacaatcagaaaacgggtcaggaggtggtgttcgtagctgaacctgacaataaaaacgtatataaattcgaattagatacttctgagcgaaaaattgagtttgatagtgcttctggcacgtacacactatatctgatcatcggagatgccaccctgaagaatcccattctttggaatgtcgccgatgttgtgataaagttcccggaagaggaggcccctagcacagttttgtcccagaacctctttactcccaaacaggagattcagcatctgtttagagaacccgagaagcgaccacctaccgtagtgagtaacacatttacagccttgatcttgagtcctttgctactcttatttgcactttggattagaataggcgctaatgtgtccaatttcacattcgccccaagcacaatcatcttccaccttggtcacgcggctatgctagggcttatgtatgtttactggacccagttgaatatgttccagacacttaaatacctcgccatcctgggttcagtgacctttctggccggaaaccgcatgctggctcagcaggcggtaaagcggattgcagccgagcagtcttctaggttggccaagtacaggacactgcggacagcccactag

SEQ ID NO: 51311 - DNA, 441 bp, Artificial Sequence
  derived and/or modified sequence
ggcacttatacactgtatctgattatcggagacgccaccctgaagaacccaatactctggaatgtggcagatgtggtaattaagttcccggaagaggaagccccaagcaccgtactatcacagaacttattcactccaaagcaggagattcagcacctcttcagagaacctgaaaaacgaccgcctactgtcgtgtctaacactttcactgcactaattttgtctcctcttctactcctgttcgcgctgtggataaggatcggcgcaaacgttagcaatttcacctttgcccctagtactattatattccacctggggcatgccgaacaacacatcagcagtcgacgaaagatggagattctcaaaaccgaatgccaggaaaaggaaagccgtacaatccacagcatgagacggaagatggagaaaaagaactttatctag

SEQ ID NO: 51312 - DNA, 444 bp, Artificial Sequence
  derived and/or modified sequence
taggggacatacaccttgtatctaattattggggacgcaactcttaaaaaccctatcctgtggaatgttgccgatgtcgtcattaagttcccagaagaagaagccccttctaccgtcctgtcgcagaatctcttcacacctaagcaggaaatacagcatctctttcgagagccggagaaacggcctcccaccgtggtgagtaataccttcaccgcactgatactgtctcctctacttctgttgtttgccctgtggatccggataggagctaacgtgtctaacttcacatttgctccatctacgatcatctttcacctgggtcacgccgagcaacatatttcaagccggcgtaaaatggagatcctcaagacggagtgtcaggaaaaagaatcccgcactatccacagcatgcgcaggaaaatggagaagaaaaattttatttag

SEQ ID NO: 51313 - DNA, 2348 bp, Artificial Sequence
  derived and/or modified sequence
gactgggatcccggccgcggctgctggaagcgtcgaagctcagcggggccgcggacactgacctgtgcttagaactcatcctggcccgcagagcctgccgcgagtccctggcgtcccctgtggcgggctcttggagccactttcccgagcggaagtcagcccgcggctcggactccggcgggacctgctcggaggaatggcgccgccgggttcaagcactgtcttcctgttggccctgacaatcatagccagcacctgggctctgacgcccactcactacctcaccaagcatgacgtggagagactaaaagcctcgctggatcgccctttcacaaatttggaatctgccttctactccatcgtgggactcagcagccttggtgctcaggtgccagatgcaaagatctctatttcaaatgagaccaaagatctgcttctggcagctgtcagtgaggactcatctgttacccagatctaccatgcagttgcagctctaagtggctttggccttcccttggcatcccaagaagcactcagtgcccttactgctcgtctcagcaaggaggagactgtgctggcaacagtccaggctctgcagacagcatcccacctgtcccagcaggctgacctgaggagcatcgtggaggagattgaggaccttgttgctcgcctggatgaactcgggggcgtgtatctccagtttgaagaaggactggaaacaacagcgttatttgtggctgccacctacaagctcatggatcatgtggggactgagccatccattaaggaggatcaggtcatccagctgatgaacgcgatcttcagcaagaagaactttgagtccctctccgaagccttcagcgtggcctctgcagctgctgtgctctcgcataatcgctaccacgtgccagttgtggttgtgcctgagggctctgcttccgacactcatgaacaggctatcttgcggttgcaagtcaccaatgttctgtctcagcctctgactcaggccactgttaaactagaacatgctaaatctgttgcttccagagccactgtcctccagaagacatccttcacccctgtaggggatgtttttgaactaaatttcatgaacgtcaaattttccagtggttattatgacttccttgtcgaagttgaaggtgacaaccggtatattgcaaataccgtagagctcagagtcaagatctccactgaagttggcatcacaaatgttgatctttccaccgtggataaggatcagagcattgcacccaaaactacccgggtgacatacccagccaaagccaagggcacattcatcgcagacagccaccagaacttcgccttgttcttccagctggtagatgtgaacactggtgctgaactcactcctcaccagacatttgtccgactccataaccagaagactggccaggaagtggtgtttgttgccgagccagacaacaagaacgtgtacaagtttgaactggatacctctgaaagaaagattgaatttgactctgcctctggcacctacactctctacttaatcattggagatgccactttgaagaacccaatcctctggaatgtggctgatgtggtcatcaagttccctgaggaagaagctccctcgactgtcttgtcccagaaccttttcactccaaaacaggaaattcagcacctgttccgcgagcctgagaagaggccccccaccgtggtgtccaatacattcactgccctgatcctctcgccgttgcttctgctcttcgctctgtggatccggattggtgccaatgtctccaacttcacttttgctcctagcacgattatatttcacctgggacatgctgctatgctgggactcatgtatgtctactggactcagctcaacatgttccagaccttgaagtacctggccatcctgggcagtgtgacgtttctggctggcaatcggatgctggcccagcaggcagtcaagaggatcgctgcagagcagagcagtagattggcaaaatataggacactacgaacagcacattagttccagaagaaagatggaaattctgaaaactgaatgtcaagaaaaggagtcaagaacaattcacagtatgagaagaaaaatggaaaaaaaaaactttatttaaaaaagaaaaaagtccagattgtagttatacttttgcttgtttttcagtttccccaacacacagcagatacctggtgagctcagatagtctctttctctgacactgtgtaagaagctgtgaatattcctaacttacccagatgttgcttttgaaaagttgaaatgtgtaattgttttggaataaagagggtaacaataggaa

SEQ ID NO: 51314 - DNA, 1019 bp, Artificial Sequence
  derived and/or modified sequence
cgaagttgaaggtgacaaccggtatattgcaaataccgtagagctcagagtcaagatctccactgaagttggcatcacaaatgttgatctttccaccgtggataaggatcagagcattgcacccaaaactacccgggtgacatacccagccaaagccaagggcacattcatcgcagacagccaccagaacttcgccttgttcttccagctggtagatgtgaacactggtgctgaactcactcctcaccagacatttgtccgactccataaccagaagactggccaggaagtggtgtttgttgccgagccagacaacaagaacgtgtacaagtttgaactggatacctctgaaagaaagattgaatttgactctgcctctggcacctacactctctacttaatcattggagatgccactttgaagaacccaatcctctggaatgtggctgatgtggtcatcaagttccctgaggaagaagctccctcgactgtcttgtcccagaaccttttcactccaaaacaggaaattcagcacctgttccgcgagcctgagaagaggccccccaccgtggtgtccaatacattcactgccctgatcctctcgccgttgcttctgctcttcgctctgtggatccggattggtgccaatgtctccaacttcacttttgctcctagcacgattatatttcacctgggacatgctgaacagcacattagttccagaagaaagatggaaattctgaaaactgaatgtcaagaaaaggagtcaagaacaattcacagtatgagaagaaaaatggaaaaaaaaaactttatttaaaaaagaaaaaagtccagattgtagttatacttttgcttgtttttcagtttccccaacacacagcagatacctggtgagctcagatagtctctttctctgacactgtgtaagaagctgtgaatattcctaacttacccagatgttgcttttgaaaagttgaaatgtgtaattgttttggaataaagagggtaacaatagg

SEQ ID NO: 51315 - DNA, 453 bp, Artificial Sequence
  derived and/or modified sequence
tggcacctacactctctacttaatcattggagatgccactttgaagaacccaatcctctggaatgtggctgatgtggtcatcaagttccctgaggaagaagctccctcgactgtcttgtcccagaaccttttcactccaaaacaggaaattcagcacctgttccgcgagcctgagaagaggccccccaccgtggtgtccaatacattcactgccctgatcctctcgccgttgcttctgctcttcgctctgtggatccggattggtgccaatgtctccaacttcacttttgctcctagcacgattatatttcacctgggacatgctgaacagcacattagttccagaagaaagatggaaattctgaaaactgaatgtcaagaaaaggagtcaagaacaattcacagtatgagaagaaaaatggaaaaaaaaaactttatttaaaaaagaaaaaa

SEQ ID NO: 51316 - DNA, 1848 bp, Artificial Sequence
  derived and/or modified sequence
atggccccccccggcagcagcaccgtgttcctgctggccctgaccatcatcgccagcacctgggccctgacccccacccactacctgaccaagcacgacgtggagagactgaaggccagcctggacagacccttcaccaacctggagagcgccttctacagcatcgtgggcctgagcagcctgggcgcccaggtgcccgacgccaagatcagcatcagcaacgagaccaaggacctgctgctggccgccgtgagcgaggacagcagcgtgacccagatctaccacgccgtggccgccctgagcggcttcggcctgcccctggccagccaggaggccctgagcgccctgaccgccagactgagcaaggaggagaccgtgctggccaccgtgcaggccctgcagaccgccagccacctgagccagcaggccgacctgagaagcatcgtggaggagatcgaggacctggtggccagactggacgagctgggcggcgtgtacctgcagttcgaggagggcctggagaccaccgccctgttcgtggccgccacctacaagctgatggaccacgtgggcaccgagcccagcatcaaggaggaccaggtgatccagctgatgaacgccatcttcagcaagaagaacttcgagagcctgagcgaggccttcagcgtggccagcgccgccgccgtgctgagccacaacagataccacgtgcccgtggtggtggtgcccgagggcagcgccagcgacacccacgagcaggccatcctgagactgcaggtgaccaacgtgctgagccagcccctgacccaggccaccgtgaagctggagcacgccaagagcgtggccagcagagccaccgtgctgcagaagaccagcttcacccccgtgggcgacgtgttcgagctgaacttcatgaacgtgaagttcagcagcggctactacgacttcctggtggaggtggagggcgacaacagatacatcgccaacaccgtggagctgagagtgaagatcagcaccgaggtgggcatcaccaacgtggacctgagcaccgtggacaaggaccagagcatcgcccccaagaccaccagagtgacctaccccgccaaggccaagggcaccttcatcgccgacagccaccagaacttcgccctgttcttccagctggtggacgtgaacaccggcgccgagctgaccccccaccagaccttcgtgagactgcacaaccagaagaccggccaggaggtggtgttcgtggccgagcccgacaacaagaacgtgtacaagttcgagctggacaccagcgagagaaagatcgagttcgacagcgccagcggcacctacaccctgtacctgatcatcggcgacgccaccctgaagaaccccatcctgtggaacgtggccgacgtggtgatcaagttccccgaggaggaggcccccagcaccgtgctgagccagaacctgttcacccccaagcaggagatccagcacctgttcagagagcccgagaagagaccccccaccgtggtgagcaacaccttcaccgccctgatcctgagccccctgctgctgctgttcgccctgtggatcagaatcggcgccaacgtgagcaacttcaccttcgcccccagcaccatcatcttccacctgggccacgccgccatgctgggcctgatgtacgtgtactggacccagctgaacatgttccagaccctgaagtacctggccatcctgggcagcgtgaccttcctggccggcaacagaatgctggcccagcaggccgtgaagagaatcgccgccgagcagagcagcagactggccaagtacagaaccctgagaaccgcccactag

SEQ ID NO: 51317 - DNA, 441 bp, Artificial Sequence
  derived and/or modified sequence
ggcacctacaccctgtacctgatcatcggcgacgccaccctgaagaaccccatcctgtggaacgtggccgacgtggtgatcaagttccccgaggaggaggcccccagcaccgtgctgagccagaacctgttcacccccaagcaggagatccagcacctgttcagagagcccgagaagagaccccccaccgtggtgagcaacaccttcaccgccctgatcctgagccccctgctgctgctgttcgccctgtggatcagaatcggcgccaacgtgagcaacttcaccttcgcccccagcaccatcatcttccacctgggccacgccgagcagcacatcagcagcagaagaaagatggagatcctgaagaccgagtgccaggagaaggagagcagaaccatccacagcatgagaagaaagatggagaagaagaacttcatctag

SEQ ID NO: 51318 - DNA, 444 bp, Artificial Sequence
  derived and/or modified sequence
tgaggcacctacaccctgtacctgatcatcggcgacgccaccctgaagaaccccatcctgtggaacgtggccgacgtggtgatcaagttccccgaggaggaggcccccagcaccgtgctgagccagaacctgttcacccccaagcaggagatccagcacctgttcagagagcccgagaagagaccccccaccgtggtgagcaacaccttcaccgccctgatcctgagccccctgctgctgctgttcgccctgtggatcagaatcggcgccaacgtgagcaacttcaccttcgcccccagcaccatcatcttccacctgggccacgccgagcagcacatcagcagcagaagaaagatggagatcctgaagaccgagtgccaggagaaggagagcagaaccatccacagcatgagaagaaagatggagaagaagaacttcatctag

SEQ ID NO: 51319 - protein, 520 aa, Artificial Sequence
  derived and/or modified sequence
MGKPSSMDTKFKDDLFRKYVQFHESKVDTTTSRQRPGSDECLRVAASTLLSLHKVDPFYRFRLIQFYEVVESSLRSLSSSSLRALHGAFSMLETVGINLFLYPWKKEFRSIKTYTGPFVYYVKSTLLEEDIRAILSCMGYTPELGTAYKLRELVETLQVKMVSFELFLAKVECEQMLEIHSQVKDKGYSELDIVSERKSSAEDVRGCSDALRRRAEGREHLTASMSRVALQKSASERAAKDYYKPRVTKPSRSVDAYDSYWESRKPPLKASLSLRKEPVATDVGDDLKDEIIRPSPSLLTMASSPHGSPDVLPPASPSNGPALLRGTYFSTQDDVDLYTDSEPRATYRRQDALRPDVWLLRNDAHSLYHKRSPPAKESALSKCQSCGLSCSSSLCQRCDSLLTCPPASKPSAFPSKASTHDSLAHGASLREKYPGQTQGLDRLPHLHSKSKPSTTPTSRCGFCNRPGATNTCTQCSKVSCDACLSAYHYDPCYKKSELHKFMPNNQLNYKSTQLSHLVYR

SEQ ID NO: 51320 - protein, 383 aa, Artificial Sequence [sequence omitted]

SEQ ID NO: 51321 - DNA, 1563 bp, Artificial Sequence
  derived and/or modified sequence
atgggcaagcccagcagcatggacaccaagttcaaggacgacctgttcagaaagtacgtgcagttccacgagagcaaggtggacaccaccaccagcagacagagacccggcagcgacgagtgcctgagagtggccgccagcaccctgctgagcctgcacaaggtggaccccttctacagattcagactgatccagttctacgaggtggtggagagcagcctgagaagcctgagcagcagcagcctgagagccctgcacggcgccttcagcatgctggagaccgtgggcatcaacctgttcctgtacccctggaagaaggagttcagaagcatcaagacctacaccggccccttcgtgtactacgtgaagagcaccctgctggaggaggacatcagagccatcctgagctgcatgggctacacccccgagctgggcaccgcctacaagctgagagagctggtggagaccctgcaggtgaagatggtgagcttcgagctgttcctggccaaggtggagtgcgagcagatgctggagatccacagccaggtgaaggacaagggctacagcgagctggacatcgtgagcgagagaaagagcagcgccgaggacgtgagaggctgcagcgacgccctgagaagaagagccgagggcagagagcacctgaccgccagcatgagcagagtggccctgcagaagagcgccagcgagagagccgccaaggactactacaagcccagagtgaccaagcccagcagaagcgtggacgcctacgacagctactgggagagcagaaagccccccctgaaggccagcctgagcctgagaaaggagcccgtggccaccgacgtgggcgacgacctgaaggacgagatcatcagacccagccccagcctgctgaccatggccagcagcccccacggcagccccgacgtgctgccccccgccagccccagcaacggccccgccctgctgagaggcacctacttcagcacccaggacgacgtggacctgtacaccgacagcgagcccagagccacctacagaagacaggacgccctgagacccgacgtgtggctgctgagaaacgacgcccacagcctgtaccacaagagaagcccccccgccaaggagagcgccctgagcaagtgccagagctgcggcctgagctgcagcagcagcctgtgccagagatgcgacagcctgctgacctgcccccccgccagcaagcccagcgccttccccagcaaggccagcacccacgacagcctggcccacggcgccagcctgagagagaagtaccccggccagacccagggcctggacagactgccccacctgcacagcaagagcaagcccagcaccacccccaccagcagatgcggcttctgcaacagacccggcgccaccaacacctgcacccagtgcagcaaggtgagctgcgacgcctgcctgagcgcctaccactacgacccctgctacaagaagagcgagctgcacaagttcatgcccaacaaccagctgaactacaagagcacccagctgagccacctggtgtacagatag

SEQ ID NO: 51322 - DNA, 1152 bp, Artificial Sequence
  derived and/or modified sequence
atgggctacacccccgagctgggcaccgcctacaagctgagagagctggtggagaccctgcaggtgaagatggtgagcttcgagctgttcctggccaaggtggagtgcgagcagatgctggagatccacagccaggtgaaggacaagggctacagcgagctggacatcgtgagcgagagaaagagcagcgccgaggacgtgagaggctgcagcgacgccctgagaagaagagccgagggcagagagcacctgaccgccagcatgagcagagtggccctgcagaagagcgccagcgagagagccgccaaggactactacaagcccagagtgaccaagcccagcagaagcgtggacgcctacgacagctactgggagagcagaaagccccccctgaaggccagcctgagcctgagaaaggagcccgtggccaccgacgtgggcgacgacctgaaggacgagatcatcagacccagccccagcctgctgaccatggccagcagcccccacggcagccccgacgtgctgccccccgccagccccagcaacggccccgccctgctgagaggcacctacttcagcacccaggacgacgtggacctgtacaccgacagcgagcccagagccacctacagaagacaggacgccctgagacccgacgtgtggctgctgagaaacgacgcccacagcctgtaccacaagagaagcccccccgccaaggagagcgccctgagcaagtgccagagctgcggcctgagctgcagcagcagcctgtgccagagatgcgacagcctgctgacctgcccccccgccagcaagcccagcgccttccccagcaaggccagcacccacgacagcctggcccacggcgccagcctgagagagaagtaccccggccagacccagggcctggacagactgccccacctgcacagcaagagcaagcccagcaccacccccaccagcagatgcggcttctgcaacagacccggcgccaccaacacctgcacccagtgcagcaaggtgagctgcgacgcctgcctgagcgcctaccactacgacccctgctacaagaagagcgagctgcacaagttcatgcccaacaaccagctgaactacaagagcacccagctgagccacctggtgtacagatag

SEQ ID NO: 51323 - DNA, 1563 bp, Artificial Sequence
  derived and/or modified sequence
atgggcaagccatctagtatggatacgaagtttaaggacgacctattccgaaagtatgtgcagttccatgagtcaaaggttgacacaactacctctaggcagcggccaggaagcgacgagtgcttgagagtcgcagcttccactctattgtctctccataaggtagatcccttttacaggtttagactaatccagttctacgaggtggtcgagtcctcgttgcgctctcttagtagctcatccttgagggcgttacatggtgcgttttcgatgctcgagaccgttgggatcaatctgttcctgtacccttggaaaaaagaattcaggtctatcaaaacgtatacaggtccgtttgtgtattacgtgaagagtacactgcttgaggaagatatcagagccattttgtcgtgcatgggatacacccccgagctcggcaccgcctataaactaagagaactggtggagactttgcaggtgaaaatggtcagttttgaactgtttctcgctaaagttgagtgcgaacaaatgctcgagatccatagccaggtgaaagacaaggggtacagcgagttggacatagtgtctgagcggaagagtagtgcagaggatgttcggggttgcagtgatgccctccggcgtcgcgccgagggccgagagcatttgaccgctagcatgagtagagtcgccttgcagaagtcagcctccgagagggccgccaaggactactacaaacctcgtgtcacgaagccctcaaggtctgttgacgcttacgacagctattgggagtctcgtaagccgccgctcaaagcatcactgtcgctgcgcaaggagccagtcgcgacagacgttggtgacgatcttaaggatgaaatcatcaggccttcccccagcttgttgacgatggcctcatcccctcacggcagtcctgacgtactgcctcctgcttcccccagcaatggcccagctctgctgcggggcacctacttcagtactcaagacgatgtggatctctataccgattcagagccccgagccacataccgaaggcaggacgccctcaggcccgatgtatggctgttgcgcaatgatgcgcattccctgtatcataaacgctctcctcccgcgaaagagagtgccttaagtaaatgccaaagctgtggcctatcatgcagttccagcctgtgtcaaagatgtgattccctgttaacttgcccccccgcctccaaaccatctgccttcccaagtaaggcgagtacacatgattccctggcccacggagcatcattgcgggaaaaataccctggccaaacacaaggcctggatcgcctgccacacctccactccaaatccaagccttcgacaacccccactagcaggtgcggattctgcaacagacctggcgcgacaaatacttgcacccagtgctctaaggtgtcctgtgatgcatgcttatcagcctaccattatgacccctgttataagaaaagtgagctacacaagtttatgccaaataatcagttaaactataagtcaactcaactttcacatcttgtttaccgctag

SEQ ID NO: 51324 - DNA, 1563 bp, Artificial Sequence
  derived and/or modified sequence
atgggcaagcctagctccatggacacgaaattcaaagacgatctgttccggaagtatgtgcagttccacgaatcaaaggtggataccaccacaagtcgccagaggccaggaagcgatgaatgtcttagagtggctgcaagtacccttctctctctgcataaggtggatccgttctatcgttttcgactcatccagttttatgaagtcgtggagagttccctgcggagcctgtcctcaagcagtctgcgcgctctccacggcgccttctccatgttggagacagtgggcatcaacttattcctatacccctggaaaaaggagttcagatccataaaaacctacaccgggcccttcgtgtactacgtgaagagcacgcttctcgaggaagatatcagggccatactgagctgtatgggatacacccccgagctgggcaccgcttataagttacgcgagctggtggaaacacttcaggtgaaaatggtgagcttcgaactcttcctggcgaaggtggagtgtgaacagatgcttgagattcacagccaggtcaaggacaaaggatatagcgagctcgacatcgtctcagaacgtaagtcgagtgctgaggatgtcagagggtgttctgatgctctcaggcggcgagccgaggggagggaacacctcactgccagtatgagtcgagtggctctccagaagagcgcatccgagcgcgctgccaaagattattacaagcccagagtgaccaagcccagcagatcagttgatgcatacgattcctactgggaaagtcgtaaaccacctttgaaagcctcattgagcctgcgaaaagagccggtggctaccgatgtcggagatgacctgaaggatgaaatcatcagaccctccccctctcttttaaccatggcctctagcccacacggctcgcctgatgtccttccacccgcatccccctccaacggcccagccctgctgaggggtacctacttcagcacacaagatgacgtagacctgtacaccgactcggagccaagagctacctaccggagacaggatgctctgcggccagatgtgtggctgctgaggaacgacgcccacagcctctaccataaaagatcccctcctgctaaagagtcagctcttagcaagtgccagagttgcgggctatcttgcagttcatctttgtgccaacgatgcgacagcctgctgacctgtccacctgcttcaaaaccgagcgccttccctagcaaggcctcaactcatgacagcttggcccatggcgcctccctacgagagaaatatccgggacagactcagggtctggatcgcctgccgcacctccactctaaatcaaagccttctacaactcctacttctagatgcggtttctgcaatcgtccaggggcgaccaacacatgtactcaatgttccaaagtgagttgcgacgcgtgtctgtctgcctaccactacgatccatgttataaaaagagcgagcttcacaaatttatgccgaataatcagctgaattataaatcgactcagttaagtcaccttgtttatcggtag

SEQ ID NO: 51325 - DNA, 1152 bp, Artificial Sequence
  derived and/or modified sequence
atggggtatacacccgaattagggactgcctataagctgagagagctggtggagacattgcaggtcaaaatggtctcttttgagttattcctcgccaaggtcgagtgcgaacagatgctcgagattcatagccaggtgaaggacaaagggtactccgaattagatatagtctcagaaaggaagtccagtgccgaggatgttcgggggtgtagcgatgcgctcaggcgtagagctgagggccgagagcatctcaccgctagcatgtcaagagtagctctccaaaaatcggcatcagagcgcgcggcaaaagattactacaagccacgggtgacgaagccttcccggtcagttgacgcttacgacagctactgggaatctcggaaaccaccgttgaaggccagcttatccttaagaaaggagcccgtcgcaaccgacgtgggcgacgacctcaaagacgaaatcatacggcccagtccaagtctgcttaccatggccagtagcccccacgggtcgcccgatgtgctgccaccagcctccccgtccaatggcccagccctacttcgcggaacctatttctcgacacaggacgatgttgatctttatacagacagcgaacccagggcaacctataggaggcaggatgctctaagaccagacgtgtggttattgcgaaacgatgcccacagtctctatcacaagagaagtccgccagccaaagagtccgcgttaagcaaatgtcagagctgtgggctctcatgttcaagctccttgtgccagcgctgcgactcattactgacctgtcctcccgcaagcaaaccttcagccttcccctctaaagcatccacccacgattcgctcgcccacggcgcttctttgagggaaaaataccccggtcagacccaaggcctggaccggctacctcatctccactcgaagagcaaacccagtacgacgcccactagccgttgcggcttttgcaatcggcccggcgccactaacacgtgcacccaatgctcaaaggtgtcctgtgatgcttgcctgtccgcctaccattatgatccttgctacaaaaagagtgaattgcacaaattcatgcctaataatcagttgaattataagtcaacccagctgtctcacctggtctacaggtag

SEQ ID NO: 51326 - DNA, 1563 bp, Artificial Sequence
  derived and/or modified sequence
atgggcaagcccagctccatggacaccaagttcaaggatgacctcttcagaaaatatgtgcagttccacgagagcaaggtggacaccaccaccagccggcagaggcctggcagtgatgagtgcctgcgggtggccgccagcaccctgctgagcctgcacaaggtggaccccttctaccgcttccgcctcatccagttctatgaggtggtggagagcagcctgcggagcctgagcagcagcagcctgcgggccctgcacggggccttctccatgctggagaccgtgggcatcaacctcttcctgtacccctggaagaaggagttccgcagcatcaagacctacacaggcccctttgtgtactacgtgaagagcaccctgctggaggaggacatccgggccatcctgagctgcatgggctacaccccagagctgggcacagcctacaagctgcgggagctggtggagaccctgcaggtgaagatggtgtcctttgagctgttcctggccaaggtggagtgtgagcagatgctggagatccacagccaggtgaaggacaagggctacagcgagctggacatcgtgtctgagaggaagagcagcgcagaagatgtgcggggctgcagtgatgccctgcggaggagagctgagggccgggagcacctgacagcctccatgagccgggtggccctgcagaagagcgccagcgagcgggccgccaaggactactacaagccccgggtgaccaagcccagccgctctgtggatgcctatgacagctactgggagagcaggaagccacccctgaaggccagcctgagcctgaggaaggagcctgtggccacagatgtgggagatgacctgaaggatgagatcatccggcccagccccagcctgctgaccatggccagcagcccccacggcagcccagatgtgctgcccccagccagccccagcaatggacctgccctgctgcggggcacctacttcagcacccaggatgatgtggacctgtacacagattctgagccccgggccacctaccgccggcaggatgccctgcggccagatgtgtggctgctgagaaatgatgcccacagcctgtaccacaagaggagccccccagccaaggagagcgccctgagcaagtgccagagctgtggcctgagctgcagcagcagcctgtgccagagatgtgacagcctgctgacctgccccccagccagcaagcccagcgccttccccagcaaggccagcacccatgacagcctggcccatggagccagcctgcgggagaagtacccaggccagacccagggcctggaccggctgccccacctgcacagcaagagcaagcccagcaccacccccaccagccgctgtggcttctgcaacagacctggggccaccaacacctgcacccagtgcagcaaggtgtcctgtgatgcctgcctgagcgcctaccactatgacccctgctacaagaagtctgagctgcacaagttcatgcccaacaaccagctgaactacaagagcacccagctgagccacctggtgtacagatag

SEQ ID NO: 51327 - DNA, 1152 bp, Artificial Sequence
  derived and/or modified sequence
atgggctacaccccagagctgggcacagcctacaagctgcgggagctggtggagaccctgcaggtgaagatggtgtcctttgagctgttcctggccaaggtggagtgtgagcagatgctggagatccacagccaggtgaaggacaagggctacagcgagctggacatcgtgtctgagaggaagagcagcgcagaagatgtgcggggctgcagtgatgccctgcggcggcgggcagagggccgggagcacctgacagcctccatgagccgggtggccctgcagaagagcgccagcgagagagctgccaaggactactacaagccccgggtgaccaagcccagccgctctgtggatgcctatgacagctactgggagagcaggaagccacccctgaaggccagcctgagcctgaggaaggagcctgtggccacagatgtgggagatgacctgaaggatgagatcatccggcccagccccagcctgctgaccatggccagcagcccccacggcagcccagatgtgctgcccccagccagccccagcaatggacctgccctgctgcggggcacctacttcagcacccaggatgatgtggacctgtacacagacagcgagccccgggccacctaccgccggcaggatgccctgcggccagatgtgtggctgctgagaaatgatgcccacagcctgtaccacaagaggagccccccagccaaggagagcgccctgagcaagtgccagagctgtggcctgagctgcagcagcagcctgtgccagagatgtgacagcctgctgacctgccccccagccagcaagcccagcgccttccccagcaaggccagcacccatgacagcctggcccacggggccagcctgcgggagaagtacccaggccagacccagggcctggaccggctgccccacctgcacagcaagagcaagcccagcaccacccccaccagccgctgtggcttctgcaacagacctggggccaccaacacctgcacccagtgcagcaaggtgtcctgtgatgcctgcctgagcgcctaccactatgacccctgctacaagaagtctgagctgcacaagttcatgcccaacaaccagctgaactacaagagcacccagctgagccacctggtgtacagatag

SEQ ID NO: 51328 - DNA, 1563 bp, Artificial Sequence
  derived and/or modified sequence
atgggcaagcccagcagcatggacaccaagttcaaggacgacctgttcaggaagtatgtccagtttcacgagagcaaggtggacaccaccacctctcgtcagcggcccggttcagacgagtgtctgagggtggctgctagtacgctgctgtccctccataaagtggatcctttctaccgatttcgtctcattcagttctatgaggttgttgaaagttctctccgaagcctgagcagctctagtctgcgggcactgcacggcgcgttcagcatgctcgagaccgttggcattaatctctttctgtatccgtggaagaaagagttccggagtatcaaaacctacaccggacctttcgtatattatgtcaagtctacactgctggaggaggacattagagccattctgagttgtatgggctacaccccagagctgggcacagcgtataaactgagggaactggtcgagactttgcaggtgaagatggtgagctttgagctgtttctggcaaaggtcgaatgtgagcagatgctggaaatccattcacaggtgaaagacaagggctattcggaactcgatatcgtgagtgagcgtaagtcctctgccgaggatgtgagaggatgttctgatgctctgcgacgccgagcggaaggcagggaacacctcaccgcgtcgatgagcagagttgctctgcagaaatctgcttcagagagggcagctaaagactattacaagcccagggtcacaaagcctagtcgcagcgtggacgcctacgacagttattgggaatccaggaaacctccgctcaaagcctcgctgagccttcggaaagagccggtcgccacagacgtgggagacgatctgaaggatgagattatccgcccgtctccctccctgctgacaatggcttctagccctcacgggtcccctgatgtgctgcctcccgcatccccgtcaaatggtcccgccctcctgcgtgggacatacttttccacccaggatgacgtggacctgtatacagattccgaaccccgggccacatataggagacaggatgctttgcgacccgacgtttggctgctgcgcaacgatgcccattctctctaccacaagagatctcccccagctaaagagagtgctttgagcaagtgtcagagttgtggcctctcctgtagctccagcctgtgtcaaagatgcgactctctgttgacgtgccccccagcctcaaagccgtccgccttccccagcaaggcttccactcatgacagcctagctcacggcgcttctctcagagaaaaatatcccgggcagacacaggggttagatcgacttcctcatctccactctaagtctaagccatctactaccccaacttcccgctgcggtttttgcaataggccgggcgctacaaacacctgcacccagtgtagtaaagtgtcctgtgatgcctgcctcagcgcataccactatgatccatgttacaaaaagtctgaactgcataaattcatgccaaacaaccagcttaactacaagtcaacacaactgtcacacctggtgtaccgctag

SEQ ID NO: 51329 - DNA, 1563 bp, Artificial Sequence
  derived and/or modified sequence
atgggcaagcccagcagcatggacaccaagttcaaggacgacctgttccggaaatatgttcagtttcatgaaagtaaagttgatacaacaacgtccagacagaggccggggtccgacgaatgcctccgagttgctgccagcacactgttgagcctgcataaagtcgaccctttctatcggttccggctgatccagttctatgaagtagtcgagtctagcctgcgttctctttcctccagttctctacgggctttgcacggcgctttcagcatgctcgaaaccgtcgggatcaacctcttcttatacccctggaagaaggaattcagatccatcaaaacttatactgggccgtttgtgtattatgtcaaatcaacactgctcgaggaggacatccgggccatcctgagctgcatggggtacaccccggagttgggtacagcttacaaactccgcgagctcgtggaaaccttgcaggtgaagatggtgtccttcgaactgttcctggctaaagtcgagtgtgagcaaatgctggaaattcacagtcaggttaaggacaagggatatagcgagctcgatatcgtcagcgaacgcaagtcttccgcggaggatgttagaggatgcagcgacgccctgaggcggcgggcagaaggtagggagcatctcacggcttccatgtcgcgcgtggctctccagaaaagtgcaagcgagagagccgccaaagattactacaagcctagagtcaccaagccctcgcgctcagtggatgcttacgattcatattgggaatccaggaaaccacctctaaaagcttcactgagcctgcggaaagagcctgtggcgaccgacgttggagacgatctgaaagatgaaataattagaccttcaccttctctcctgaccatggcttcatcgccgcacggcagtcccgacgtcctgcctcctgccagcccaagcaacgggcctgctctcctgcgcgggacctacttctccacacaggacgatgtggacctttatactgattccgagcccagggctacgtacagacgccaagacgccctaagacctgatgtctggttgctgcgcaatgatgcacatagcctgtatcacaagcgcagtccacctgccaaggagtcagcactttcaaaatgtcagtcatgcggactatcttgcagctcctcactgtgccaacgctgcgattctctgctcacctgcccccctgcttctaagcccagcgccttcccgagcaaggcgagcacccacgactcgctcgcgcacggcgccagtctgagggaaaaataccctggccaaacccaaggactagatcgactcccccatctgcacagcaagagcaagcctagcacgacccctacatccagatgtgggttttgtaacagaccaggcgcaaccaacacctgcacgcagtgtagcaaagtctcttgcgatgcttgtctaagtgcctatcactacgatccatgctataagaagtctgagctacacaagtttatgccgaacaatcagctcaactataagtccacacagctgtcacacctagtgtaccggtag

SEQ ID NO: 51330 - DNA, 1152 bp, Artificial Sequence
  derived and/or modified sequence
atgggctacacccccgagctgggcaccgcctacaagctgcgggagctggtcgaaactctgcaagtgaaaatggtctcattcgagttattcctggccaaggtggaatgcgaacagatgctcgagattcactcccaggtcaaggacaaaggctactcagagcttgacattgtctcagaacgcaagtcttcagccgaagacgtgcgcggatgtagcgacgcattaagacgaagagcagaaggccgggagcacttaaccgcgtccatgagccgggtcgccctgcaaaagtccgctagtgagcgagccgccaaagattattataaacctcgcgtgactaagcctagtcgctctgtggacgcctacgactcttactgggagagcaggaaacctcctctgaaagccagcctgagtctgcgcaaggagccggtcgctaccgatgtgggagatgacttgaaggatgagatcatcaggccatctccctctctgctcaccatggcctcctcaccccacgggtctccggacgtcctgcctccagctagccctagtaatggacctgctctgcttaggggcacttacttctccacacaggacgacgtcgacctgtataccgactctgaaccgagagccacatataggcgacaggatgctctgcgcccggatgtatggttgctaagaaacgatgcccattccctgtaccacaaacgatccccacccgccaaggagagtgccctatctaagtgccagagctgtggcctcagctgctctagcagcctatgccagcggtgcgactctctcctgacttgtcctcccgcaagcaagccatctgccttcccttccaaggcctctacccatgattccctcgcccatggagcatctctgagggagaaataccccggacagacacaaggccttgatcgactgcctcatctccattcgaagtcgaaaccctcaacaacaccaacaagtcgctgcggcttttgtaatcgtcccggagctacaaatacctgtacgcagtgcagcaaggtgtcttgtgacgcctgtctgtcagcgtatcattacgatccatgttacaaaaaatctgagctgcataaattcatgcctaacaaccagctcaactacaagtccacccaactttcccatctggtgtacagatag

SEQ ID NO: 51331 - DNA, 1563 bp, Artificial Sequence
  derived and/or modified sequence
atgggcaagcctagcagcatggacacaaaatttaaagacgatctcttcagaaagtatgttcagtttcacgagtctaaagtggataccaccacgagcagacagcgaccaggatccgacgagtgtcttcgagtggcagcctccactttactgtcccttcataaggtggaccctttttatcggttccgcttaattcaattctacgaggtggtggagagcagtcttaggtctctgagctccagttccctgcgcgctctgcacggtgccttctcaatgttagaaacggtaggcatcaatctgttcttgtacccctggaaaaaggaatttaggagcattaaaacatatactggaccattcgtgtactatgtaaagagcacattgcttgaggaagatattcgagcgatcttgagctgtatgggctacaccccagaactcggaactgcctacaagctacgagagctcgtggaaactttgcaggtgaagatggtgagcttcgaactgtttttggccaaggtcgaatgtgaacaaatgctggagatacattcacaggtaaaggacaaaggatattccgagctagatatcgttagcgagcgaaagtcgtccgctgaagacgtgcgtgggtgcagcgacgctttgaggagacgtgccgaaggcagggagcacttgacagcaagcatgtcccgggtggctctccagaaaagcgcttcggaacgagctgccaaggattactacaaacctcgggttacaaagcccagccggtcagtagacgcctacgacagctattgggaatctagaaagccgccactcaaggcgtcattgagcctcaggaaggaacctgtggctaccgacgtgggcgatgaccttaaggacgagattattcggccaagtcccagcttgctcaccatggcatcatccccccacggctctcccgatgttctgcctcctgctagcccatcgaatggcccagctttgcttagaggtacctactttagcacgcaggatgatgtcgatctgtatactgactccgagcccagagcaacctaccggagacaggatgccctgagacctgacgtctggttgctccggaacgacgcccattcactataccacaaaagaagtcctccggctaaagaaagcgctttgagcaaatgtcaatcttgcggactctcctgcagtagcagcctgtgccagaggtgcgactctttgttgacatgcccccctgccagtaaaccctcagctttccccagcaaggcaagcacacacgatagtttagcccatggcgcaagcttaagagagaaatacccgggtcagactcaggggttggatcgcctgccccaccttcactcaaaaagtaagccctcaaccacccctacttcccgatgtgggttttgcaaccgcccaggtgctaccaacacctgtactcagtgttctaaggttagctgcgacgcctgtctgagtgcctaccattacgacccctgctacaagaaaagcgagctgcataaattcatgccaaacaatcagctgaattataagtccactcaacttagtcacttggtgtaccgctag

SEQ ID NO: 51332 - DNA, 1563 bp, Artificial Sequence
  derived and/or modified sequence
atgggcaagccctccagtatggacactaagttcaaggatgacttgtttcggaaatacgtgcagtttcacgagtctaaagttgacaccacaactagtcgccagcgcccaggttctgatgagtgcttacgggttgcagctagcaccttgctgagcttgcacaaagtggatcctttctataggttccggctgatccagttttacgaggtggtggaatcttctttgcggtccctatcgtcatcttcactccgggctctgcacggcgcttttagtatgttggagaccgtgggcatcaacctcttcctgtacccctggaagaaagagtttaggtctataaaaacctatacggggccttttgtgtactatgtgaagtccactttgcttgaggaagatattagggcaatcctttcctgtatggggtacacccccgaactgggaacagcttacaaacttcgcgaacttgttgagacactgcaagtcaaaatggtttcatttgagctgttcttagccaaggtggagtgcgagcagatgcttgagatccactcccaggtgaaagacaagggatatagcgagctcgatattgtgtccgaacgcaagagcagtgcagaagacgttagaggctgcagtgacgctctgcgaagacgggctgagggcagggagcacctcaccgcctcgatgagccgcgtcgcactgcaaaagagcgcctcggaacgggcagccaaagattactacaagcccagagtgactaagcctagccgcagcgtagatgcctacgattcttactgggagagccgaaagcccccactcaaggcatcactgtccctccgcaaagaaccagtggcaaccgatgtcggcgatgatctaaaggatgagattattcgcccaagtcccagcctcctcacgatggccagcagtcctcatgggtctcctgatgtgctgccccctgcttcacctagtaatggtcccgcacttctgcgcggtacctacttttcgacccaggacgatgtggacctttatacagacagtgaaccacgcgctacctataggagacaggatgcacttcgccctgatgtctggcttctgcgcaacgacgcccatagtctctaccataagcgctccccacctgctaaagaaagcgcactctctaagtgccagtcctgtggactaagttgctcctcctcactgtgtcagagatgtgattcactcttgacgtgtccacccgctagtaaaccctctgccttcccctcaaaggcttccactcatgactctctggcacatggagccagcttgcgggaaaagtatccgggtcagactcagggtctggatagactcccccatctgcacagtaaatcaaaacccagtacgacccccacgtcaagatgcggcttttgcaaccggccaggcgcaaccaatacttgcacacagtgctctaaagtatcctgtgacgcgtgcctgagcgcctatcactacgatccctgctacaagaagtccgagcttcacaaatttatgcccaataatcaactcaattacaagtccacccaactctctcacctcgtttatcgatag

SEQ ID NO: 51333 - DNA, 1152 bp, Artificial Sequence
  derived and/or modified sequence
atgggttacacacccgaactgggtactgcctataaactgcgggaattggtggaaaccctgcaggttaagatggtatccttcgaactgtttctggctaaagtcgagtgtgagcagatgttggagatacatagccaggtaaaggataagggttattcagaattggacatcgtttcagaacgcaagagcagcgccgaggatgtgcggggatgctcagacgccctgaggcgacgagctgaggggagggagcatttaaccgcttctatgagtcgggtggcgctgcagaagtcggcttctgagcgggcagcaaaagactattacaagcccagagtgaccaaaccctctcggagtgtcgatgcctacgactcctactgggaatcacgcaaaccgccactcaaggctagtctttccctgcggaaggagccagtggccacggatgtgggtgacgacctaaaagatgagatcatccggccatccccgtctctcttgaccatggcctcctcaccgcacggctcccctgatgtgctgccccctgctagcccatcgaatggacctgccctgctcagagggacctacttttcgactcaggacgacgttgatctatatactgatagcgagcctcgcgcaacctatagaagacaagatgctctgcgtccagatgtttggttgcttcggaatgatgcacattccctttaccacaagcggtcaccacctgcgaaagagagcgcgctatctaagtgtcagagttgcggtttaagttgctcttcatctctgtgccagaggtgcgatagtctcttgacttgtcctccagctagcaagcctagcgcgttcccgtctaaggcctctactcatgacagcctggctcacggggcatctctccgggaaaaataccccggacagacccagggacttgaccggctgccccacctccattccaagtccaaacccagcactactccgacatccaggtgcggtttctgcaatcggcctggggcaacaaatacctgtacccagtgcagcaaggtgtcttgtgacgcctgcctttctgcatatcattatgatccctgctataagaagagtgaactgcacaagtttatgccaaacaatcagttgaactataaatccacacagctttcccatctcgtatatcgatag

SEQ ID NO: 51334 - DNA, 4022 bp, Artificial Sequence
  derived and/or modified sequence
cccgggtactggtctcagtacccctgcagccggccggagaggctagagcccgacggggcccggctccggcggcagccgcgcctctcgcttgcttccctcggccgggccgtcctcggcggcagtgtcaggagcactccgctggtccaggcggcaacatgtccatgcttttagtgatgtccctgcctctaatccagaagccatggaggagataaggtagcccccctcgatcggatggggaagcccagttcaatggatactaaattcaaggatgacttatttcggaagtacgtgcagttccatgagagcaaagtggataccaccaccagcaggcagcggcctggcagcgatgagtgcctgcgggtggcagcctcaaccctgctcagcctgcacaaggtggatcccttttatcgattccggctgatccagttctatgaggtggtggagagctccttgcgctcgctcagctcctctagcctgcgggctctgcacggcgccttcagcatgctggagacggtgggcatcaacctcttcctctacccgtggaagaaggaattcagaagcatcaagacctacacgggcccttttgtttattatgtcaagtcgacattactggaagaggacatccgagccatcctgagctgcatgggctacacacctgagctgggcactgcatacaagctcagagagctcgtggagaccctccaggtgaagatggtctcctttgagctctttctggccaaagtcgagtgtgagcagatgctagaaatccactcacaagtgaaggacaagggctactccgagctggacattgtgagcgagcgcaagagcagtgcagaggatgtgcgcggctgctcggacgccctgcggcggcgggcagagggccgggagcacctgacggcctccatgtcacgagtggcactccagaagtcggccagcgagcgggcggccaaggactactacaagccccgcgtgaccaagccctcgaggtcagtggatgcctatgacagctactgggagagccggaagccacccctgaaggcctcattgagtcttcggaaggagcctgtggcaacggatgtgggggacgacctcaaggatgagatcatccgcccatccccttcgctgctgaccatggccagctccccccacggcagcccggatgtgcttccacccgcctcccccagcaacggcccggccctgctgcgcggtacctacttctccactcaggatgacgtggatctgtacacagactctgaacccagggccacctaccgtcggcaggatgctctgcggccggatgtgtggctgctcagaaacgatgcccactccctctaccacaagcgctcgccccctgccaaagagtccgccctctccaagtgccaaagctgcgggctgtcctgcagctcctccctctgccagcgctgtgacagcctgctcacctgtcctccagcttccaagcccagcgccttccccagcaaggcctcgactcatgacagcctggcccacggggcatctctgcgggagaagtacccaggccagactcagggcctcgaccgcctcccgcaccttcactccaaatccaagccctccaccacgcccacttcccgctgtggcttctgcaaccgcccaggcgccaccaacacctgcacccagtgttcaaaagtctcatgtgacgcctgcctcagcgcttaccattatgacccctgctacaaaaagagtgagctgcacaagttcatgcccaacaaccagctgaactacaagtccacccagctctcccatctcgtgtacagatagaccggcctcgccccttccagctccaagggctacatcaaccgacctttcgggtttcacggtgaagaagtactaacgcattgatctcagaggcggaggcctgcacttgaccatgtaggtggcagagatcgtgggctggctgtgtccacgtgggagttcacttagcgactcagatatctcaaccaatggctgctttgttgtctgacaagggagaaggtggcacttccgttcagattcattttgctaatctctccactccctgttcagttggttctttttttggggttttgttttgttttgttttgttgttttgttttttcctttaaagaggatttctgtctctgggaccctcgctgcacctacccctcccattgcaaagccaacttggactgggaagggcccttcaggtcaccaaacatccacctggagcggcgagctagaggcctgttggcttgtgaaatgagccctcctgccacacggggcctctcccaaaggctcatcccttggccgcccccttcctaaacacaaggatccccagctggactccccaccccctggcttccccacctctccaggtgtcaaaggtgaaccgagtccagtattagctgaatgtcatttcgtacaccacagctcagtcagcccatggccttcgtgaactttgctccaacacactgatgtgtgggcttcccacagcaggactgacttccccctttctgttgtttgcacatgcccctcttactgtactgtcaatagatatttttgagatttatttttaaataaatattcaacttgctgtgtgtttcaacgtggttaaaaaaatgaattatgtagctatttattaaatgccctgggttctttagtcttccaagggagggcctcgcgcccattcgtgttgtatcctccactcactatggcccgaggggagaggagagtttggggcagggaggaacagacatgaagcctccttttcttgagctggtggagagccactgtcttccctgcagtaactatctatacacctacctccagtgtgcacttagggggtgagcgcgggtgtcgaggtctgtgtgtctgcagactgctaacctatgacaattcagggacctcacctgtcggacctatagcttgctgagcaggaaccttgcacttcacacttcttgagtctcgtttcagaaggaaaatcatttgggattcctactgcccctccatctcaatcctcttctcttcaccagtttccaggactcatctgcaacatttgcaatctttttgcactaaaagtgggcaggagtcggcatgtgcccatcagagagacggctcctcagatgctcagctaagcctaagcgcttccaagcctgaaggccccttcagcttctcatgtgaattaccaacccctggattttccttgtgggggtacaagagcaggagtggggcaagagtttgaaaataaagccgcttccttgtgaactaactatattttagccataactgtttgtgatgtacacaatgttaagggatttatatgcagtgggcttttctgggagaaagttattcagctcttgagcaagtttaagtctggctgaatcctgaggccactgtgaatttgctgatgttcttccaactcagttgagtgattttaaggttttccaaatcttctatggctctctttttaatatatatatatatatatatatatatatatatatatatatatatatatatctatctggtagatcacatgtagatgtacagtgtgtatattaagctgaatttcaaccaactttattactaagaccagcctagcagggcattcatctttgatgttcttccttttcacatttcagaatcggcaatgcctggcccactcctgagagctctagttttctagttttccatttccagattgcgccagcattacagtaactaactctttctaaccaaccgtgatgccacgtaacttaccctatggacaaaagcaggaatgactaacacatcctaggagggaaagtccagtgtacctgtcatcacggacgcactgtggtcacagactggaatacgaaatactacagccctgctcccaggtgtgcatcttactggatgaggttgctgtgattgagatagttaaatacatgctaatttaaaaatgcagatgttttacatttgatttctaccaagagttgaaatgttgagagatgattaaaaataataataataaagtgtcttccattgttaaa

SEQ ID NO: 51335 - DNA, 4138 bp, Artificial Sequence
  derived and/or modified sequence
gagcttacatcatatagagattagctctcctagccccattcggtgtgggaagatgggaattttgctactacaggaatttttgtaactcaactctgctcgcgccgccataaggcattctaacttagccaaacactttcgagtagagctgtccagcagatgcagcaggatggctttgcaagagtcggagttttggcgttagacctaggttcagagctcagatccacttcttcctagccttacgacttaggagcactccgctggtccaggcggcaacatgtccatgcttttagtgatgtccctgcctctaatccagaagccatggaggagataaggtagcccccctcgatcggatggggaagcccagttcaatggatactaaattcaaggatgacttatttcggaagtacgtgcagttccatgagagcaaagtggataccaccaccagcaggcagcggcctggcagcgatgagtgcctgcgggtggcagcctcaaccctgctcagcctgcacaaggtggatcccttttatcgattccggctgatccagttctatgaggtggtggagagctccttgcgctcgctcagctcctctagcctgcgggctctgcacggcgccttcagcatgctggagacggtgggcatcaacctcttcctctacccgtggaagaaggaattcagaagcatcaagacctacacgggcccttttgtttattatgtcaagtcgacattactggaagaggacatccgagccatcctgagctgcatgggctacacacctgagctgggcactgcatacaagctcagagagctcgtggagaccctccaggtgaagatggtctcctttgagctctttctggccaaagtcgagtgtgagcagatgctagaaatccactcacaagtgaaggacaagggctactccgagctggacattgtgagcgagcgcaagagcagtgcagaggatgtgcgcggctgctcggacgccctgcggcggcgggcagagggccgggagcacctgacggcctccatgtcacgagtggcactccagaagtcggccagcgagcgggcggccaaggactactacaagccccgcgtgaccaagccctcgaggtcagtggatgcctatgacagctactgggagagccggaagccacccctgaaggcctcattgagtcttcggaaggagcctgtggcaacggatgtgggggacgacctcaaggatgagatcatccgcccatccccttcgctgctgaccatggccagctccccccacggcagcccggatgtgcttccacccgcctcccccagcaacggcccggccctgctgcgcggtacctacttctccactcaggatgacgtggatctgtacacagactctgaacccagggccacctaccgtcggcaggatgctctgcggccggatgtgtggctgctcagaaacgatgcccactccctctaccacaagcgctcgccccctgccaaagagtccgccctctccaagtgccaaagctgcgggctgtcctgcagctcctccctctgccagcgctgtgacagcctgctcacctgtcctccagcttccaagcccagcgccttccccagcaaggcctcgactcatgacagcctggcccacggggcatctctgcgggagaagtacccaggccagactcagggcctcgaccgcctcccgcaccttcactccaaatccaagccctccaccacgcccacttcccgctgtggcttctgcaaccgcccaggcgccaccaacacctgcacccagtgttcaaaagtctcatgtgacgcctgcctcagcgcttaccattatgacccctgctacaaaaagagtgagctgcacaagttcatgcccaacaaccagctgaactacaagtccacccagctctcccatctcgtgtacagatagaccggcctcgccccttccagctccaagggctacatcaaccgacctttcgggtttcacggtgaagaagtactaacgcattgatctcagaggcggaggcctgcacttgaccatgtaggtggcagagatcgtgggctggctgtgtccacgtgggagttcacttagcgactcagatatctcaaccaatggctgctttgttgtctgacaagggagaaggtggcacttccgttcagattcattttgctaatctctccactccctgttcagttggttctttttttggggttttgttttgttttgttttgttgttttgttttttcctttaaagaggatttctgtctctgggaccctcgctgcacctacccctcccattgcaaagccaacttggactgggaagggcccttcaggtcaccaaacatccacctggagcggcgagctagaggcctgttggcttgtgaaatgagccctcctgccacacggggcctctcccaaaggctcatcccttggccgcccccttcctaaacacaaggatccccagctggactccccaccccctggcttccccacctctccaggtgtcaaaggtgaaccgagtccagtattagctgaatgtcatttcgtacaccacagctcagtcagcccatggccttcgtgaactttgctccaacacactgatgtgtgggcttcccacagcaggactgacttccccctttctgttgtttgcacatgcccctcttactgtactgtcaatagatatttttgagatttatttttaaataaatattcaacttgctgtgtgtttcaacgtggttaaaaaaatgaattatgtagctatttattaaatgccctgggttctttagtcttccaagggagggcctcgcgcccattcgtgttgtatcctccactcactatggcccgaggggagaggagagtttggggcagggaggaacagacatgaagcctccttttcttgagctggtggagagccactgtcttccctgcagtaactatctatacacctacctccagtgtgcacttagggggtgagcgcgggtgtcgaggtctgtgtgtctgcagactgctaacctatgacaattcagggacctcacctgtcggacctatagcttgctgagcaggaaccttgcacttcacacttcttgagtctcgtttcagaaggaaaatcatttgggattcctactgcccctccatctcaatcctcttctcttcaccagtttccaggactcatctgcaacatttgcaatctttttgcactaaaagtgggcaggagtcggcatgtgcccatcagagagacggctcctcagatgctcagctaagcctaagcgcttccaagcctgaaggccccttcagcttctcatgtgaattaccaacccctggattttccttgtgggggtacaagagcaggagtggggcaagagtttgaaaataaagccgcttccttgtgaactaactatattttagccataactgtttgtgatgtacacaatgttaagggatttatatgcagtgggcttttctgggagaaagttattcagctcttgagcaagtttaagtctggctgaatcctgaggccactgtgaatttgctgatgttcttccaactcagttgagtgattttaaggttttccaaatcttctatggctctctttttaatatatatatatatatatatatatatatatatatatatatatatatatatctatctggtagatcacatgtagatgtacagtgtgtatattaagctgaatttcaaccaactttattactaagaccagcctagcagggcattcatctttgatgttcttccttttcacatttcagaatcggcaatgcctggcccactcctgagagctctagttttctagttttccatttccagattgcgccagcattacagtaactaactctttctaaccaaccgtgatgccacgtaacttaccctatggacaaaagcaggaatgactaacacatcctaggagggaaagtccagtgtacctgtcatcacggacgcactgtggtcacagactggaatacgaaatactacagccctgctcccaggtgtgcatcttactggatgaggttgctgtgattgagatagttaaatacatgctaatttaaaaatgcagatgttttacatttgatttctaccaagagttgaaatgttgagagatgattaaaaataataataataaagtgtcttccattgtt

SEQ ID NO: 51336 - DNA, 1669 bp, Artificial Sequence
  derived and/or modified sequence
tttccgggccgagtgtttccgggtcgctgctggcccccgggtactggtctcagtacccctgcagccggccggagaggctagagcccgacggggcccggctccggcggcagccgcgcctctcgcttgcttccctcggccgggccgtcctcggcggcagtgtcaggacctacacgggcccttttgtttattatgtcaagtcgacattactggaagaggacatccgagccatcctgagctgcatgggctacacacctgagctgggcactgcatacaagctcagagagctcgtggagaccctccaggtgaagatggtctcctttgagctctttctggccaaagtcgagtgtgagcagatgctagaaatccactcacaagtgaaggacaagggctactccgagctggacattgtgagcgagcgcaagagcagtgcagaggatgtgcgcggctgctcggacgccctgcggcggcgggcagagggccgggagcacctgacggcctccatgtcacgagtggcactccagaagtcggccagcgagcgggcggccaaggactactacaagccccgcgtgaccaagccctcgaggtcagtggatgcctatgacagctactgggagagccggaagccacccctgaaggcctcattgagtcttcggaaggagcctgtggcaacggatgtgggggacgacctcaaggatgagatcatccgcccatccccttcgctgctgaccatggccagctccccccacggcagcccggatgtgcttccacccgcctcccccagcaacggcccggccctgctgcgcggtacctacttctccactcaggatgacgtggatctgtacacagactctgaacccagggccacctaccgtcggcaggatgctctgcggccggatgtgtggctgctcagaaacgatgcccactccctctaccacaagcgctcgccccctgccaaagagtccgccctctccaagtgccaaagctgcgggctgtcctgcagctcctccctctgccagcgctgtgacagcctgctcacctgtcctccagcttccaagcccagcgccttccccagcaaggcctcgactcatgacagcctggcccacggggcatctctgcgggagaagtacccaggccagactcagggcctcgaccgcctcccgcaccttcactccaaatccaagccctccaccacgcccacttcccgctgtggcttctgcaaccgcccaggcgccaccaacacctgcacccagtgttcaaaagtctcatgtgacgcctgcctcagcgcttaccattatgacccctgctacaaaaagagtgagctgcacaagttcatgcccaacaaccagctgaactacaagtccacccagctctcccatctcgtgtacagatagaccggcctcgccccttccagctccaagggctacatcaaccgacctttcgggtttcacggtgaagaagtactaacgcattgatctcagaggcggaggcctgcacttgaccatgtaggtggcagagatcgtgggctggctgtgtccacgtgggagttcacttagcgactcagatatctcaaccaatggctgctttgttgtctgacaagggagaaggtggcacttccgttcagattcattttgctaatctctccactccctgttcagttggttcttttttt

SEQ ID NO: 51337 - protein, 73 aa, Artificial Sequence
  derived and/or modified sequence
MASGSNRTPVFSFLDLTYWKRQKICCGIIYKGRFGEVLIDTHLFKPCCSNKKAAAEKPEEQGPEPLPISTQEW

SEQ ID NO: 51338 - DNA, 666 bp, Artificial Sequence
  derived and/or modified sequence
atgttcggcttccacaagcccaagatgtacagaagcatcgagggctgctgcatctgcagagccaagagcagcagcagcagattcaccgacagcaagagatacgagaaggacttccagagctgcttcggcctgcacgagaccagaagcggcgacatctgcaacgcctgcgtgctgctggtgaagagatggaagaagctgcccgccggcagcaagaagaactggaaccacgtggtggacgccagagccggccccagcctgaagaccaccctgaagcccaagaaggtgaagaccctgagcggcaacagaatcaagagcaaccagatcagcaagctgcagaaggagttcaagagacacaacagcgacgcccacagcaccaccagcagcgccagccccgcccagagcccctgctacagcaaccagagcgacgacggcagcgacaccgagatggccagcggcagcaacagaacccccgtgttcagcttcctggacctgacctactggaagagacagaagatctgctgcggcatcatctacaagggcagattcggcgaggtgctgatcgacacccacctgttcaagccctgctgcagcaacaagaaggccgccgccgagaagcccgaggagcagggccccgagcccctgcccatcagcacccaggagtggtag

SEQ ID NO: 51339 - DNA, 222 bp, Artificial Sequence
  derived and/or modified sequence
atggccagcggcagcaacagaacccccgtgttcagcttcctggacctgacctactggaagagacagaagatctgctgcggcatcatctacaagggcagattcggcgaggtgctgatcgacacccacctgttcaagccctgctgcagcaacaagaaggccgccgccgagaagcccgaggagcagggccccgagcccctgcccatcagcacccaggagtggtag

SEQ ID NO: 51340 - DNA, 405 bp, Artificial Sequence
  derived and/or modified sequence
atgttcggcttccacaagcccaagatgtacagaagcatcgagggctgctgcatctgcagagccaagagcagcagcagcagattcaccgacagcaagagatacgagaaggacttccagagctgcttcggcctgcacgagaccagaagcggcgacatctgcaacgcctgcgtgctgctggtgaagagatggaagaagctgcccgccggcagcaagaagaactggaaccacgtggtggacgccagagccggccccagcctgaagaccaccctgaagcccaagaaggtgaagaccctgagcggcaacagaatcaagagcaaccagatcagcaagctgcagaaggagttcaagagacacaacagcgacgcccacagcaccaccagcagcgccagccccgcccagagctag

SEQ ID NO: 51341 - DNA, 384 bp, Artificial Sequence
  derived and/or modified sequence
atgttcggcttccacaagcccaagatgtacagaagcatcgagggctgctgcatctgcagagccaagagcagcagcagcagattcaccgacagcaagagatacgagaaggacttccagagctgcttcggcctgcacgagaccagaagcggcgacatctgcaacgcctgcgtgctgctggtgaagagatggaagaagctgcccgccggcagcaagaagaactggaaccacgtggtggacgccagagccggccccagcctgaagaccaccctgaagcccaagaaggtgaagaccctgagcggcaacagaatcaagagcaaccagatcagcaagctgcagaaggagttcaagagacacaacagcgacgcccacagcaccaccagctag

SEQ ID NO: 51342 - DNA, 666 bp, Artificial Sequence
  derived and/or modified sequence
atgtttggcttccacaaacctaagatgtaccgatccattgagggttgttgcatctgcagggcaaagtctagttccagccgtttcacagactctaagcgctacgaaaaggatttccagtcttgctttggcttgcacgagactcgcagcggagatatctgcaatgcctgtgttctactcgttaagcgatggaagaagcttccagcgggaagcaagaaaaattggaaccacgtcgttgacgctcgagcaggacccagtctgaagaccaccctgaagcccaaaaaagtgaagaccttgagtggcaacaggatcaaaagtaaccaaattagcaagcttcagaaagagttcaaaagacacaactctgacgcccattcaactaccagctcggcctcccctgctcagtcgccatgttattctaaccagagtgatgatggcagcgataccgagatggcctcgggctctaacagaactccagtattctcatttctcgatctcacctactggaagaggcagaagatttgttgtggaatcatctacaaaggacgatttggtgaggtccttatcgacactcaccttttcaaaccctgttgttcaaacaagaaggctgcagcagaaaaacctgaggagcagggccctgagcctctccctatcagcactcaagagtggtag

SEQ ID NO: 51343 - DNA, 222 bp, Artificial Sequence
  derived and/or modified sequence
atggctagcgggagtaaccgcacccctgtattttcattccttgacctcacatattggaaacgccagaagatctgctgcgggattatctataagggcaggttcggcgaggtgctgatagatacccatttatttaaaccttgttgctccaacaaaaaagctgcagccgagaagcctgaagagcagggtccagagcccctgccaatctccacccaggaatggtag

SEQ ID NO: 51344 - DNA, 666 bp, Artificial Sequence
  derived and/or modified sequence
atgtttggctttcataagccaaagatgtatcggtctatcgaagggtgttgcatttgccgcgctaaatctagctcctctcggtttactgactccaagagatatgaaaaggatttccagagctgcttcggacttcatgaaactagatcaggcgacatttgcaatgcctgtgtgctgctggtcaagagatggaagaaactccccgccggcagtaaaaagaactggaatcacgtcgtggatgctagagccggacccagcttaaagactacccttaagccgaagaaggttaagacactctcagggaatcggataaaatcaaatcaaatcagcaagctgcaaaaggaattcaaacggcataactctgacgcccactccactacgtcctcagccagtcccgctcagtcgccctgttacagcaatcagtcagacgatggctcagacaccgagatggcctcaggaagtaaccgtacgcctgttttttccttccttgatctcacctactggaaacgccagaagatctgctgtggcatcatttataaaggccgtttcggggaagtgctgatcgatacacatctgttcaaaccctgttgtagcaataagaaggctgccgccgagaaaccagaagaacagggccctgagccgttgcctatctcgacccaggagtggtag

SEQ ID NO: 51345 - DNA, 405 bp, Artificial Sequence
  derived and/or modified sequence
atgtttggattccacaaacccaaaatgtacaggtccattgagggatgctgtatatgccgagctaagagttcgtcgtctcggttcaccgatagcaagcgctatgagaaggactttcaaagctgtttcggcttgcacgagactcgcagtggggatatttgcaatgcttgcgtgttacttgtaaagcgatggaaaaagctcccagccggtagcaaaaaaaattggaaccacgttgtggacgcccgcgcaggacctagtctgaagactacactgaaacctaagaaggtaaaaaccctgagcggcaataggataaaatccaaccagatctccaagctccaaaaagagttcaagagacacaacagcgatgcccatagcacaacttcctcggcgagtccagcccagagctag

SEQ ID NO: 51346 - DNA, 384 bp, Artificial Sequence
  derived and/or modified sequence
atgtttgggtttcacaagcctaaaatgtataggtcaatagaagggtgctgtatttgtcgggcgaaatcatcatccagcaggtttaccgactctaagcgatatgagaaagacttccagtcttgttttgggctgcacgaaactagatcgggtgatatttgcaacgcctgcgtacttttggtaaagcgctggaagaagctgccagctggttctaaaaagaactggaatcacgtggtggacgctcgcgcaggcccttcactcaaaaccacactgaaacctaagaaggtgaaaacgttgtctggaaatcgtattaaatctaatcagatttctaagcttcagaaggagttcaagaggcataacagcgacgcccacagtactacttcctag

SEQ ID NO: 51347 - DNA, 666 bp, Artificial Sequence
  derived and/or modified sequence
atgtttggcttccacaagcccaagatgtaccgcagcattgagggctgctgcatctgccgggccaagagcagcagcagccgcttcacagacagcaagagatatgagaaggacttccagagctgcttcggcctgcacgagaccaggtctggggacatctgcaatgcctgtgtgctgctggtgaagcgctggaagaagctgcctgctggcagcaagaagaactggaaccacgtggtggatgcccgggccggccccagcctgaagaccaccctgaagcccaagaaggtgaagaccctgagcggcaaccgcatcaagagcaaccagatcagcaagctgcagaaggagttcaagaggcacaacagtgatgcccacagcaccaccagcagcgccagccctgcccagagcccctgctacagcaaccagagtgatgatggcagtgacacagagatggccagcggcagcaacagaacacctgtgttctccttcctggacctgacctactggaagaggcagaagatctgctgcggcatcatctacaagggccgctttggagaggtgctgattgacacccacctgttcaagccctgctgcagcaacaagaaggctgctgctgagaagccagaggagcagggccctgagcccctgcccatcagcacccaggagtggtag

SEQ ID NO: 51348 - DNA, 222 bp, Artificial Sequence
  derived and/or modified sequence
atggccagcggcagcaacagaacacctgtgttctccttcctggacctgacctactggaagaggcagaagatctgctgcggcatcatctacaagggccgctttggagaggtgctgattgacacccacctgttcaagccctgctgcagcaacaagaaggctgctgctgagaagccagaggagcagggccctgagcccctgcccatcagcacccaggagtggtag

SEQ ID NO: 51349 - DNA, 405 bp, Artificial Sequence
  derived and/or modified sequence
atgtttggcttccacaagcccaagatgtaccgcagcattgagggctgctgcatctgccgggccaagagcagcagcagccgcttcacagacagcaagagatatgagaaggacttccagagctgcttcggcctgcacgagaccaggtctggggacatctgcaatgcctgtgtgctgctggtgaagcgctggaagaagctgcctgctggcagcaagaagaactggaaccacgtggtggatgcccgggccggccccagcctgaagaccaccctgaagcccaagaaggtgaagaccctgagcggcaaccgcatcaagagcaaccagatcagcaagctgcagaaggagttcaagaggcacaacagtgatgcccacagcaccaccagcagcgccagccctgcccagagctag

SEQ ID NO: 51350 - DNA, 384 bp, Artificial Sequence
  derived and/or modified sequence
atgtttggcttccacaagcccaagatgtaccgcagcattgagggctgctgcatctgccgggccaagagcagcagcagccgcttcacagacagcaagagatatgagaaggacttccagagctgcttcggcctgcacgagaccaggtctggggacatctgcaatgcctgtgtgctgctggtgaagcgctggaagaagctgcctgctggcagcaagaagaactggaaccacgtggtggatgcccgggccggccccagcctgaagaccaccctgaagcccaagaaggtgaagaccctgagcggcaaccgcatcaagagcaaccagatcagcaagctgcagaaggagttcaagaggcacaacagtgatgcccacagcaccaccagctag

SEQ ID NO: 51351 - DNA, 666 bp, Artificial Sequence
  derived and/or modified sequence
atgttcggcttccacaagcccaagatgtaccggagcatcgagggctgctgtatctgccgtgccaagtccagttcctccaggtttaccgactccaagcgttatgagaaagattttcagagctgtttcgggctgcacgagactagaagcggagacatctgtaacgcatgtgtgctcctggttaagagatggaaaaagctacctgccgggagcaaaaaaaactggaaccacgtggtcgacgcacgggcggggccttcactgaagacaacccttaagcctaaaaaggtgaaaaccttgtccggaaatcggattaaatccaaccaaatctcaaaactacaaaaagaatttaagaggcacaactccgacgcgcactcaactacgtccagcgcttcacccgcacagagcccctgctactcaaaccagtcagatgatggctccgatactgagatggcaagtggatctaataggaccccggttttctcattcctggatctgacctactggaagcgacagaagatatgttgcggcattatctacaaaggcagatttggcgaagtgctaattgacacacatctgttcaagccctgctgctcgaataagaaggcggcagctgaaaagccagaagagcagggtccggaacctctgcccattagcactcaggagtggtag

SEQ ID NO: 51352 - DNA, 222 bp, Artificial Sequence
  derived and/or modified sequence
atggccagcggcagcaaccggacccccgtgttcagcttcctggacctcacctattggaagcgccagaagatttgttgcgggataatatacaaaggacgattcggagaggtgttgatagacacccacctttttaagccttgttgttcaaataagaaagcagccgctgagaaaccagaggagcagggacccgagccattgccaatctcaacgcaggaatggtag

SEQ ID NO: 51353 - DNA, 666 bp, Artificial Sequence
  derived and/or modified sequence
atgttcggcttccacaagcccaagatgtaccggagcatcgagggctgttgcatctgccgggccaaatcctcctctagtcgctttactgattctaagcgctatgaaaaagatttccagtcatgttttgggctgcacgaaacacgcagcggggacatttgtaacgcatgcgtcctgctcgtaaagagatggaagaagctcccggcagggagcaaaaaaaactggaaccatgtggtggatgctcgcgccggcccttcactgaagacgaccctcaaacctaaaaaggtgaaaactctgagcggaaatcgcatcaagtcaaatcagatctcaaaactgcaaaaggagtttaagcgccacaattcagacgcccacagcaccacctcctctgctagtcctgcccaatccccatgctattccaaccagtccgatgacggttctgataccgagatggcatccggaagtaaccgcacccccgtgttctccttcctggacctgacttattggaagagacaaaagatctgctgcggcattatttacaaggggagattcggggaggtgctcatcgacacacacctcttcaaaccctgctgttccaacaagaaagccgctgcagagaagcctgaagagcagggtccagagccgttaccaatttccacccaggagtggtag

SEQ ID NO: 51354 - DNA, 405 bp, Artificial Sequence
  derived and/or modified sequence
atgttcggcttccacaagcccaagatgtaccggagcatcgagggctgctgtatatgtagagctaagtcctcaagcagcagattcaccgactcaaagcggtacgagaaggattttcagtcatgcttcgggcttcacgaaactcgcagcggcgatatctgcaatgcctgtgtgcttctggtgaagcgctggaaaaaactgcctgcaggctctaagaagaattggaaccatgtggtcgacgcaagagcaggtccatcgctcaagactacacttaaacctaagaaggtgaagacactctctgggaacagaataaagtccaatcagatcagtaagttgcagaaggaattcaaacgtcataattcagacgcacatagcacgacatccagcgcctcgccggctcagtcctag

SEQ ID NO: 51355 - DNA, 384 bp, Artificial Sequence
  derived and/or modified sequence
atgttcggcttccacaagcccaagatgtaccggagcatcgagggctgctgtatttgcagggccaaatcttcctcatcaagattcacagatagtaaacgctacgagaaagactttcaaagctgtttcggcctccacgagacacggtcaggagacatttgtaatgcctgcgtcttgcttgttaaaagatggaaaaaactccctgctggctctaagaaaaactggaaccacgtggtggatgctcgggcaggcccatccctcaagaccacactgaagccaaaaaaggtgaaaaccttgagcggcaatagaataaaatccaatcaaatttcgaaactgcagaaggagtttaagcggcacaattcagacgcccattccactactagctag

SEQ ID NO: 51356 - DNA, 666 bp, Artificial Sequence
  derived and/or modified sequence
atgtttggctttcacaaacctaagatgtacagaagcatagaggggtgctgcatttgtcgcgctaagtcctcctcatcacgattcaccgatagcaaaagatacgaaaaggacttccagagctgcttcggtctgcacgaaacacgttcaggtgatatttgtaacgcctgcgttctgcttgtgaagagatggaagaagctgcccgcaggttcaaaaaaaaattggaatcacgttgtggacgcgcgtgccggtccttctctgaaaaccactctaaaacctaaaaaagtcaaaactctctctggaaatcgaataaagtccaaccagattagcaagctgcagaaggagttcaaacgccacaatagcgatgcgcatagtacgacctcttctgcttctccagcacaatctccttgctactctaaccagagtgatgacggtagtgacactgagatggcctcggggagcaatcggacccctgttttctccttcctcgacctgacttactggaagagacaaaaaatttgttgtggcattatctacaaaggtcgcttcggagaagtgttgattgatactcatctgtttaaaccatgctgctcgaataagaaagctgccgcagaaaagcccgaagagcaggggcctgaacctctgcctatctctacccaagagtggtag

SEQ ID NO: 51357 - DNA, 222 bp, Artificial Sequence
  derived and/or modified sequence
atggcgtccgggtccaataggacgccagtcttttcttttctcgatctgacttactggaaaaggcaaaaaatttgctgcgggatcatttacaaaggaaggtttggcgaggttttgatcgacacccaccttttcaaaccgtgctgcagcaataagaaggctgctgctgaaaaacccgaggagcagggcccagaaccgctgcctatcagcactcaagagtggtag

SEQ ID NO: 51358 - DNA, 666 bp, Artificial Sequence
  derived and/or modified sequence
atgttcggattccataagcctaaaatgtaccgctccatagaagggtgttgcatttgccgggctaaaagtagctcatctcggtttactgattcgaaaaggtacgaaaaggacttccagagctgcttcgggttacacgaaacccgtagtggagacatttgcaatgcctgcgtgctgttggtaaagcggtggaagaaattgccagccggtagcaaaaagaattggaatcatgtcgtagatgctagagccggaccttcgctgaaaaccactctgaagcctaagaaagttaaaacgttgtcggggaatcgtatcaaatccaaccaaattagcaagctgcagaaggaatttaagcgtcacaatagcgatgcacattccaccacatcttccgccagccccgctcagtcgccttgctatagcaaccagtccgatgacggcagtgacacagagatggctagcggcagtaaccgaacccctgttttcagcttcctagatctgacttactggaagcgacagaagatctgctgtggcattatctataaagggaggttcggggaggttctgattgatactcatctctttaagccctgttgtagtaataaaaaggctgccgctgagaaacccgaggaacaaggacctgagcctttgccaatcagcactcaggaatggtag

SEQ ID NO: 51359 - DNA, 405 bp, Artificial Sequence
  derived and/or modified sequence
atgtttggctttcataagcccaaaatgtatcggagcatcgaaggctgctgtatctgtagagctaaaagttcttccagccggtttactgattcgaagcggtacgaaaaggatttccagtcatgctttggtttacacgagacgaggagtggggatatatgcaatgcatgtgtactcctggtcaaacgatggaagaaactgccagcaggctcaaaaaaaaattggaaccacgttgtcgacgcacgggctggaccgtctctcaaaacaaccttaaaaccaaagaaagtgaaaacgctgtcagggaacaggattaagtccaaccagatctccaagttacagaaggagttcaaacgccacaacagcgatgcacacagcacgacctcgtcagcctcccctgcacaaagctag

SEQ ID NO: 51360 - DNA, 384 bp, Artificial Sequence
  derived and/or modified sequence
atgtttggctttcacaagccgaagatgtaccgatcaatagaaggctgctgcatatgtcgcgcaaagagttctagcagccgattcactgactcaaaacgatacgagaaggacttccagagctgtttcggcctgcacgagacgagatctggtgacatctgcaatgcctgtgttctgcttgtcaaacggtggaagaaactgcccgctgggtctaagaagaattggaaccatgtggtggacgcgagggctgggcctagtctgaagaccaccctaaagccaaaaaaggtcaagacactctccgggaatagaattaaatcaaatcagatctcaaagctgcagaaagaattcaaaagacataactccgatgctcacagtacgaccagctag

SEQ ID NO: 51361 - DNA, 510 bp, Artificial Sequence
  derived and/or modified sequence
atgggctgttgcggctgttctggaggctgcggcagcagctgcggaggatgtgattcaagttgtggctcatgcggatcaggctgcagaggatgcggcccatcttgctgcgcccctgtgtactgttgtaaacccgtgtgttgttgcgtccccgcatgtagctgtagcagttgcggaaaacgcggatgcggttcttgcggaggctcgaagggcggttgtgggtcgtgcggctgctcccaatgttcatgctgcaagccctgttgctgctccagcgggtgcggcagctcttgttgccagtgttcctgttgtaagccttattgttcgcaatgcagctgttgcaaaccctgctgctcttcctccgggagaggttcatcatgttgccaatcttcttgttgtaagccttgttgtagcagttccggctgtggctcctcttgttgtcagtctagttgttgcaagccatgctgcagccagtcccgttgctgcgtcccagtttgctatcagtgcaaaatttag

SEQ ID NO: 51362 - protein, 100 aa, Artificial Sequence
  derived and/or modified sequence
MGISEEGNLLSTVSPTVKALFGKTRVSPIFPFSPRSPFQPLIPRTPGSPWGPVGPASPLGPGFPIGPMGPGKPVGPKGPMLPLGPSGPVGPTSPLFPFCP

SEQ ID NO: 51363 - protein, 1320 aa, Artificial Sequence
  derived and/or modified sequence
MYATDSRGHSPAFLQPQNGNSRHPSGYVPGKVVPLRPPPPPKSQASAKFTSIRREDRATFAFSPEEQQAQRESQKQKRHKNTFICFAITSFSFFIALAIILGISSKYAPDENCPDQNPRLRNWDPGQDSAKQVVIKEGDMLRLTSDATVHSIVIQDGGLLVFGDNKDGSRNITLRTHYILIQDGGALHIGAEKCRYKSKATITLYGKSDEGESMPTFGKKFIGVEAGGTLELHGARKASWTLLARTLNSSGLPFGSYTFEKDFSRGLNVRVIDQDTAKILESERFDTHEYRNESRRLQEFLRFQDPGRIVAIAVGDSAAKSLLQGTIQMIQERLGSELIQGLGYRQAWALVGVIDGGSTSCNESVRNYENHSSGGKALAQREFYTVDGQKFSVTAYSEWIEETPQFLHMGEIIDGVDMRAEVGILTRNIVIQGEVEDSCYAENQCQFFDYDTFGGHIMIMKNFTSVHLSYVELKHMGQQQMGRYPVHFHLCGDVDYKGGYRHATFVDGLSIHHSFSRCITVHGTNGLLIKDTIGFDTLGHCFFLEDGIEQRNTLFHNLGLLTKPGTLLPTDRNNSMCTTMRDKVFGNYIPVPATDCMAVSTFWIAHPNNNLINNAAAGSQDAGIWYLFHKEPTGESSGLQLLAKPELTPLGIFYNNRVHSNFKAGLFIDKGVKTTNSSAADPREYLCLDNSARFRPHQDANPEKPRVAALIDRLIAFKNNDNGAWVRGGDIIVQNSAFADNGIGLTFASDGSFPSDEGSSQEVSESLFVGESRNYGFQGGQNKYVGTGGIDQKPRTLPRNRTFPIRGFQIYDGPIHLTRSTFKKYVPTPDRYSSAIGFLMKNSWQITPRNNISLVKFGPHVSLNVFFGKPGPWFEDCEMDGDKNSIFHDIDGSVTGYKDAYVGRMDNYLIRHPSCVNVSKWNAVICSGTYAQVYVQTWSTQNLSMTITRDEYPSNPMVLRGINQKAAFPQYQPVVMLEKGYTIHWNGPAPRTTFLYLVNFNKNDWIRVGLCYPSNTSFQVTFGYLQRQNGSLSKIEEYEPVHSLEELQRKQSERKFYFDSSTGLLFLYLKAKSHRHGHSYCSSQGCERVKIQAATDSKDISNCMAKAYPQYYRKPSVVKRMPAMLTGLCQGCGTRQVVFTSDPHKSYLPVQFQSPDKAETQRGDPSVISVNGTDFTFRSAGVLLLVVDPCSVPFRLTEKTVFPLADVSRIEEYLKTGIPPRSIVLLSTRGEIKQLNISHLLVPLGLAKPAHLYDKGSTIFLGFSGNFKPSWTKLFTSPAGQGLGVLEQFIPLQLDEYGCPRATTVRRRDLELLKQASKAH

SEQ ID NO: 51364 - DNA, 3963 bp, Artificial Sequence
  derived and/or modified sequence
atgtacgccaccgacagcagaggccacagccccgccttcctgcagccccagaacggcaacagcagacaccccagcggctacgtgcccggcaaggtggtgcccctgagacccccccccccccccaagagccaggccagcgccaagttcaccagcatcagaagagaggacagagccaccttcgccttcagccccgaggagcagcaggcccagagagagagccagaagcagaagagacacaagaacaccttcatctgcttcgccatcaccagcttcagcttcttcatcgccctggccatcatcctgggcatcagcagcaagtacgcccccgacgagaactgccccgaccagaaccccagactgagaaactgggaccccggccaggacagcgccaagcaggtggtgatcaaggagggcgacatgctgagactgaccagcgacgccaccgtgcacagcatcgtgatccaggacggcggcctgctggtgttcggcgacaacaaggacggcagcagaaacatcaccctgagaacccactacatcctgatccaggacggcggcgccctgcacatcggcgccgagaagtgcagatacaagagcaaggccaccatcaccctgtacggcaagagcgacgagggcgagagcatgcccaccttcggcaagaagttcatcggcgtggaggccggcggcaccctggagctgcacggcgccagaaaggccagctggaccctgctggccagaaccctgaacagcagcggcctgcccttcggcagctacaccttcgagaaggacttcagcagaggcctgaacgtgagagtgatcgaccaggacaccgccaagatcctggagagcgagagattcgacacccacgagtacagaaacgagagcagaagactgcaggagttcctgagattccaggaccccggcagaatcgtggccatcgccgtgggcgacagcgccgccaagagcctgctgcagggcaccatccagatgatccaggagagactgggcagcgagctgatccagggcctgggctacagacaggcctgggccctggtgggcgtgatcgacggcggcagcaccagctgcaacgagagcgtgagaaactacgagaaccacagcagcggcggcaaggccctggcccagagagagttctacaccgtggacggccagaagttcagcgtgaccgcctacagcgagtggatcgaggagaccccccagttcctgcacatgggcgagatcatcgacggcgtggacatgagagccgaggtgggcatcctgaccagaaacatcgtgatccagggcgaggtggaggacagctgctacgccgagaaccagtgccagttcttcgactacgacaccttcggcggccacatcatgatcatgaagaacttcaccagcgtgcacctgagctacgtggagctgaagcacatgggccagcagcagatgggcagataccccgtgcacttccacctgtgcggcgacgtggactacaagggcggctacagacacgccaccttcgtggacggcctgagcatccaccacagcttcagcagatgcatcaccgtgcacggcaccaacggcctgctgatcaaggacaccatcggcttcgacaccctgggccactgcttcttcctggaggacggcatcgagcagagaaacaccctgttccacaacctgggcctgctgaccaagcccggcaccctgctgcccaccgacagaaacaacagcatgtgcaccaccatgagagacaaggtgttcggcaactacatccccgtgcccgccaccgactgcatggccgtgagcaccttctggatcgcccaccccaacaacaacctgatcaacaacgccgccgccggcagccaggacgccggcatctggtacctgttccacaaggagcccaccggcgagagcagcggcctgcagctgctggccaagcccgagctgacccccctgggcatcttctacaacaacagagtgcacagcaacttcaaggccggcctgttcatcgacaagggcgtgaagaccaccaacagcagcgccgccgaccccagagagtacctgtgcctggacaacagcgccagattcagaccccaccaggacgccaaccccgagaagcccagagtggccgccctgatcgacagactgatcgccttcaagaacaacgacaacggcgcctgggtgagaggcggcgacatcatcgtgcagaacagcgccttcgccgacaacggcatcggcctgaccttcgccagcgacggcagcttccccagcgacgagggcagcagccaggaggtgagcgagagcctgttcgtgggcgagagcagaaactacggcttccagggcggccagaacaagtacgtgggcaccggcggcatcgaccagaagcccagaaccctgcccagaaacagaaccttccccatcagaggcttccagatctacgacggccccatccacctgaccagaagcaccttcaagaagtacgtgcccacccccgacagatacagcagcgccatcggcttcctgatgaagaacagctggcagatcacccccagaaacaacatcagcctggtgaagttcggcccccacgtgagcctgaacgtgttcttcggcaagcccggcccctggttcgaggactgcgagatggacggcgacaagaacagcatcttccacgacatcgacggcagcgtgaccggctacaaggacgcctacgtgggcagaatggacaactacctgatcagacaccccagctgcgtgaacgtgagcaagtggaacgccgtgatctgcagcggcacctacgcccaggtgtacgtgcagacctggagcacccagaacctgagcatgaccatcaccagagacgagtaccccagcaaccccatggtgctgagaggcatcaaccagaaggccgccttcccccagtaccagcccgtggtgatgctggagaagggctacaccatccactggaacggccccgcccccagaaccaccttcctgtacctggtgaacttcaacaagaacgactggatcagagtgggcctgtgctaccccagcaacaccagcttccaggtgaccttcggctacctgcagagacagaacggcagcctgagcaagatcgaggagtacgagcccgtgcacagcctggaggagctgcagagaaagcagagcgagagaaagttctacttcgacagcagcaccggcctgctgttcctgtacctgaaggccaagagccacagacacggccacagctactgcagcagccagggctgcgagagagtgaagatccaggccgccaccgacagcaaggacatcagcaactgcatggccaaggcctacccccagtactacagaaagcccagcgtggtgaagagaatgcccgccatgctgaccggcctgtgccagggctgcggcaccagacaggtggtgttcaccagcgacccccacaagagctacctgcccgtgcagttccagagccccgacaaggccgagacccagagaggcgaccccagcgtgatcagcgtgaacggcaccgacttcaccttcagaagcgccggcgtgctgctgctggtggtggacccctgcagcgtgcccttcagactgaccgagaagaccgtgttccccctggccgacgtgagcagaatcgaggagtacctgaagaccggcatcccccccagaagcatcgtgctgctgagcaccagaggcgagatcaagcagctgaacatcagccacctgctggtgcccctgggcctggccaagcccgcccacctgtacgacaagggcagcaccatcttcctgggcttcagcggcaacttcaagcccagctggaccaagctgttcaccagccccgccggccagggcctgggcgtgctggagcagttcatccccctgcagctggacgagtacggctgccccagagccaccaccgtgagaagaagagacctggagctgctgaagcaggccagcaaggcccactag

SEQ ID NO: 51365 - DNA, 1131 bp, Artificial Sequence
  derived and/or modified sequence
atgaccatcaccagagacgagtaccccagcaaccccatggtgctgagaggcatcaaccagaaggccgccttcccccagtaccagcccgtggtgatgctggagaagggctacaccatccactggaacggccccgcccccagaaccaccttcctgtacctggtgaacttcaacaagaacgactggatcagagtgggcctgtgctaccccagcaacaccagcttccaggtgaccttcggctacctgcagagacagaacggcagcctgagcaagatcgaggagtacgagcccgtgcacagcctggaggagctgcagagaaagcagagcgagagaaagttctacttcgacagcagcaccggcctgctgttcctgtacctgaaggccaagagccacagacacggccacagctactgcagcagccagggctgcgagagagtgaagatccaggccgccaccgacagcaaggacatcagcaactgcatggccaaggcctacccccagtactacagaaagcccagcgtggtgaagagaatgcccgccatgctgaccggcctgtgccagggctgcggcaccagacaggtggtgttcaccagcgacccccacaagagctacctgcccgtgcagttccagagccccgacaaggccgagacccagagaggcgaccccagcgtgatcagcgtgaacggcaccgacttcaccttcagaagcgccggcgtgctgctgctggtggtggacccctgcagcgtgcccttcagactgaccgagaagaccgtgttccccctggccgacgtgagcagaatcgaggagtacctgaagaccggcatcccccccagaagcatcgtgctgctgagcaccagaggcgagatcaagcagctgaacatcagccacctgctggtgcccctgggcctggccaagcccgcccacctgtacgacaagggcagcaccatcttcctgggcttcagcggcaacttcaagcccagctggaccaagctgttcaccagccccgccggccagggcctgggcgtgctggagcagttcatccccctgcagctggacgagtacggctgccccagagccaccaccgtgagaagaagagacctggagctgctgaagcaggccagcaaggcccactag

SEQ ID NO: 51366 - DNA, 3963 bp, Artificial Sequence
  derived and/or modified sequence
atgtatgctactgacagccgggggcacagccccgcctttctgcagccccaaaatgggaattcaagacacccctccgggtacgtgccggggaaagtggttccgctgcggccgccgccgcctccaaagtcacaggctagtgccaagttcacttcaattagacgagaagatcgcgcaacgtttgcattctctcccgaggagcagcaagctcagcgtgaaagccagaagcagaaaagacacaaaaacacgttcatctgtttcgccataaccagcttttccttcttcatcgcgttggcaataatactcggcatcagctcaaagtacgcacctgacgaaaactgtccagaccagaaccccagactgaggaattgggacccagggcaggactcagctaaacaagttgttatcaaagaaggggatatgctccgtcttacgagtgatgcaaccgttcactccattgtgatccaagacggcggtcttctcgtcttcggggataataaggacggaagtagaaatatcactctaagaacacactacatcctgatccaggacggaggagcactccatatcggagctgaaaagtgtcgatataagtcaaaagctactatcaccctctatgggaaaagcgatgagggggagtccatgcctacgtttggcaagaagttcatcggagtagaagctgggggtaccctggagctccacggagctcgcaaggcgtcgtggactttgctcgccagaactctgaattcaagcggtctgccatttggttcgtatacatttgagaaagacttcagccgggggttgaacgtgcgggtgatcgaccaagatacagccaagattctagagtccgagaggttcgatactcacgagtataggaacgagtcccggaggttacaggagttcttaagattccaggaccccggacgtatcgtggctatcgcggtgggcgattctgctgcaaaaagtctgttgcagggaacgatacagatgatccaggagcgactcggttcagaactgatccaaggcctcggatataggcaggcttgggcactagtgggcgttatcgacgggggaagcacctcatgcaacgaatctgtgaggaactatgaaaaccattcatcagggggcaaagccctcgctcaacgcgaattttacactgtggatgggcagaaattcagtgtcaccgcgtactccgagtggatcgaggagacccctcagtttctccacatgggcgaaatcattgatggagtcgacatgagagcagaagtcgggatcctgacgcggaatattgtcatccaaggagaagtggaagattcttgctacgccgagaaccagtgccagttcttcgactatgataccttcggcggccacattatgatcatgaagaatttcactagtgtccacttgtcatatgtggaactgaagcacatgggtcaacagcagatgggcaggtacccagtgcatttccacctctgtggcgatgttgattataagggggggtaccgacacgctacatttgtggacggactttctattcaccacagcttcagcagatgcataaccgtgcatggaacgaatggcctactgattaaggacaccatcggattcgatactctggggcactgtttctttcttgaagatggaattgagcaacgcaacacattattccacaatcttggattgctcactaagccggggacactccttcccactgatagaaataattcgatgtgtacgactatgcgggataaggtgtttgggaattatataccagtccctgccactgactgtatggcagtgtctacgttctggattgcccatccaaacaacaacctaattaacaacgccgcggctgggagccaggacgcagggatttggtacctgtttcacaaggagcctacaggcgagtcaagtgggcttcaattattggcaaagcctgagctgacgccgctggggattttctacaataaccgggtacacagcaatttcaaggccggcctgttcattgacaagggagttaagaccactaactcctccgctgccgatcctagagagtatctgtgcttagacaacagtgcccggtttcgcccccaccaggatgcgaaccctgagaagccccgggtcgcagctctcatcgatcgcctaattgccttcaagaataatgacaacggcgcctgggtccgaggcggcgacatcatagtgcagaacagtgcattcgcggataacgggatcggcctgacattcgcctccgatggctccttccctagcgatgagggctctagtcaagaggtttccgagagcttattcgttggggaaagccgtaattacggatttcagggaggacaaaacaagtacgtcggcactggcggaattgatcagaagccccggactctgcctcgcaatcggacctttccaattagaggtttccaaatctatgacggccccatccacttaacacgatctactttcaagaagtatgtaccaacccccgacagatattcctctgctattggatttcttatgaaaaactcttggcagattactcctagaaacaatataagtttagtcaagttcggaccacacgtgagtctgaatgtgtttttcggaaagcccggaccatggtttgaggactgcgaaatggatggcgataaaaactccatttttcatgatatcgatggaagtgtgaccggctacaaagacgcctatgtaggaaggatggacaattatctaatccgccacccctcatgcgtgaacgtctcgaagtggaatgccgtcatctgttccgggacatacgctcaagtgtatgtacagacatggtctactcagaacctgtcgatgactatcacgcgagacgaataccctagtaaccccatggtgcttaggggcatcaaccagaaggccgccttcccccagtaccagccggtggtgatgcttgagaagggatacacgatccactggaacggaccggcacctcggactaccttcctgtatctcgttaattttaataagaatgactggatcagggttggactctgttatccctccaatacttcatttcaggtgaccttcggataccttcagcggcaaaacggtagcttatccaagattgaggagtatgaaccagtgcacagccttgaagagcttcagaggaaacagtccgagaggaaattctattttgactcttcaacaggactcctgttcctttatcttaaagcgaagtcacatcggcacggtcactcctactgctcttcacagggatgcgagcgcgtcaagatacaggcagccacggattccaaagacattagtaactgcatggccaaggcctatccacagtactaccgcaagcccagtgtggtgaaaaggatgccagccatgctaaccggattatgccaggggtgcggcacacgccaggtcgtgtttactagcgaccctcacaagtcatacttgcccgttcagtttcagtcgcccgacaaagctgaaacacaaaggggggacccttccgtcatctccgtgaatggaactgattttactttcagatctgccggggtgctgctgttagtcgtggacccttgttctgtaccctttcgactaacagagaagaccgtgttccccttggctgacgtcagccggattgaagaatacctgaagacgggcatccctccacggtctatcgttctgctgagtaccagaggagaaatcaagcaactcaatatctcgcatctgctcgtgcccttaggcctggcgaagcccgcacatctatatgacaaggggagtactatctttctgggctttagcgggaatttcaaacctagctggacaaaattgtttacatcccctgctggtcaagggttgggggtcctagagcagttcatacccctgcagctggatgaatacggctgtcctcgcgcaactaccgtcaggcgccgcgatctagagctgcttaagcaagccagcaaggctcattag

SEQ ID NO: 51367 - DNA, 1131 bp, Artificial Sequence
  derived and/or modified sequence
atgacaataactcgggatgaatacccttccaatcccatggttctgagaggaatcaaccagaaggccgcattccctcagtaccaaccagtcgtgatgctggagaaaggatataccattcactggaatggccccgcccctcgaacaaccttcctttatttggttaattttaataagaatgactggatccgcgtggggttatgctacccctccaacacatcttttcaggtaaccttcggatacctccagaggcagaacggctccctctcaaagatcgaggaatacgaaccagtccacagtctggaggaacttcagaggaagcagagcgagcgcaagttctatttcgactcttctaccggcctcctgttcctgtatctgaaagcgaagtcgcatagacacggccactcctattgctccagtcaaggctgcgaacgggtgaaaatacaagccgctacagactcgaaggacatttcgaactgcatggcaaaggcttatccacagtactaccgcaagcccagcgtcgtaaagcgcatgcccgcaatgctaacaggcctttgtcagggatgtggtacacggcaggtcgttttcacaagtgatccgcataaaagctatctgccagtccaatttcagtctcccgacaaggccgagacacaacggggtgatccctccgtgattagcgtgaatgggacagacttcacctttagatccgctggagttcttctgctcgtcgtggacccatgctcagtgccttttcgtttaaccgaaaaaaccgtattcccgctggccgacgtctcgcgcatcgaggaatatctgaagacaggtatccccccgaggagcatcgtgctgttatcaactcgcggcgagatcaagcagcttaacatctcgcatcttctggtccctctggggctggcaaagccagctcacctctacgacaagggatctacaatctttctcggattttcaggcaactttaagccgtcgtggacaaagctttttacttcaccggccggccagggccttggggtgctggaacagttcatccccttgcaacttgatgaatatggatgcccgcgagcaacgacagtacggcgtcgcgacctggagctcctaaaacaggcgtcaaaggcacattag

SEQ ID NO: 51368 - DNA, 3963 bp, Artificial Sequence
  derived and/or modified sequence
atgtatgccacagacagccggggccacagccctgccttcctgcagccccagaatggaaacagccgccaccccagcggctacgtgcctgggaaggtggtgcccctgcggcccccacctccacccaagagccaggccagcgccaagttcaccagcatcagaagagaagatcgggccacctttgccttcagccctgaggagcagcaggcccagcgggagagccagaagcagaagaggcacaagaacaccttcatctgctttgccatcaccagcttctccttcttcatcgccctggccatcatcctgggcatcagcagcaaatatgccccagatgagaactgcccagaccagaacccccggctgaggaactgggaccccggccaggacagcgccaagcaggtggtgatcaaggagggggacatgctgcggctgaccagtgatgccaccgtgcacagcatcgtcatccaggacggcggcctgctggtgtttggagacaacaaggatggcagcaggaacatcaccctgcggacccactacatcctgatccaggatggaggagccctgcacatcggggctgagaagtgccgctacaagagcaaggccaccatcaccctgtatggcaagagtgatgaaggagagagcatgcccaccttcggcaagaagttcatcggcgtggaggccggcggcaccctggagctgcatggagccaggaaggcctcctggaccctgctggcccggaccctgaacagcagcggcctgcccttcggcagctacacctttgagaaggacttcagccggggcctgaatgtgcgggtcatcgaccaggacacagccaagatcctggagagcgagagatttgacacccatgagtacagaaatgaaagccggcggctgcaggagttcctgcgcttccaggaccccggcagaattgtggccatcgctgtgggggacagcgctgccaagagcctgctgcagggcaccatccagatgatccaggagcggctgggcagcgagctgatccagggcctgggctaccggcaggcctgggccctggtgggcgtgattgatggcggcagcaccagctgcaatgaatctgtgaggaactatgagaaccacagcagcggcggcaaggccctggcccagcgggagttctacacagtggatggccagaagttctctgtgacagcctacagcgagtggattgaggagaccccccagttcctgcacatgggagagatcattgatggagtggacatgagagctgaggtgggcatcctgaccagaaatattgtcatccagggcgaggtggaggacagctgctacgccgagaaccagtgccagttctttgattatgacacctttggaggccacatcatgatcatgaagaacttcacctctgtgcacctgtcctatgtggagctgaagcacatgggccagcagcagatgggccgctaccctgtgcacttccacctgtgtggagatgtggactacaagggcggctacagacatgccacctttgtggatggcctgagcatccaccacagcttcagccgctgcatcaccgtgcacggcaccaacggcctgctgatcaaggacaccatcggctttgacaccctgggccactgcttcttcctggaggatggcatcgagcagaggaacaccctcttccacaacctgggcctgctgaccaagccaggcaccctgctgcccacagacaggaacaacagcatgtgcaccaccatgagggacaaggtgtttggaaactacatccctgtgcctgccacagactgcatggctgtgtccaccttctggatcgcccaccccaacaacaacctgatcaacaatgctgctgctggcagccaggatgctggcatctggtacctgttccacaaggagcccactggagagagcagcggcctgcagctgctggccaagccagagctgacccccctgggcatcttctacaacaacagagtgcacagcaacttcaaggccggcctcttcatcgacaagggcgtgaagaccaccaacagcagcgctgctgacccccgggagtacctgtgcctggacaacagcgcccgcttccggccccaccaggatgccaaccctgagaagccccgggtggccgccctgattgaccggctgattgccttcaagaacaatgacaacggggcctgggtgcggggcggggacatcatcgtgcagaacagcgcctttgctgacaatggaattggcctgacctttgccagtgatggcagcttccccagtgatgagggcagcagccaggaggtgtctgagagcctgtttgtgggggagagcagaaattatggcttccagggcggccagaacaagtatgtgggcactggaggcatcgaccagaagcccaggaccctgcccaggaacagaaccttccccatccggggcttccagatctatgatggccccatccacctgaccaggagcaccttcaagaagtatgtgcccaccccagaccgctacagcagcgccatcggcttcctgatgaagaacagctggcagatcaccccaagaaacaacatcagcctggtgaagtttggcccccacgtgtccctgaatgtgttcttcggcaagccaggcccctggtttgaggactgtgagatggatggagacaagaacagcatcttccatgacattgatggctctgtgacaggctacaaggatgcctacgtgggccgcatggacaactacctgatccgccaccccagctgtgtgaatgtgtccaagtggaatgctgtgatctgcagcggcacctacgcccaggtgtatgtgcagacctggagcacccagaacctgtccatgaccatcaccagagatgagtaccccagcaaccccatggtgctgcggggcatcaaccagaaggccgccttcccccagtaccagcctgtggtgatgctggagaagggctacaccatccactggaatggacctgcccccaggaccaccttcctgtacctggtgaacttcaacaagaatgactggatccgggtgggcctgtgctaccccagcaacaccagcttccaggtgaccttcggctacctgcagaggcagaatggcagcctgagcaagattgaggagtatgagcctgtgcacagcctggaggagctgcagaggaagcagagcgagaggaagttctactttgacagcagcacaggcctgctcttcctgtacctgaaggccaagagccaccgccacggccacagctactgcagcagccagggctgtgagcgggtgaagatccaggccgccacagacagcaaggacatcagcaactgcatggccaaggcctacccccagtactacaggaagcccagcgtggtgaagaggatgcctgccatgctgaccggcctgtgccagggctgcggcacccggcaggtggtgttcaccagtgacccccacaagagctacctgcctgtgcagttccagagcccagacaaggccgagacccagagaggagaccccagcgtcatctctgtgaatggaacagacttcaccttccgctctgctggggtgctgctgctggtggtggacccctgcagcgtgcccttccggctgacagagaagacagtgttccccctggctgatgtgagccgcatcgaggagtacctgaagacaggcatccccccaagaagcatcgtgctgctgagcaccagaggagagatcaagcagctgaacatcagccacctgctggtgcccctgggcctggccaagccagcccacctgtatgacaagggcagcaccatcttcctgggcttcagcggcaacttcaagcccagctggaccaagctgttcaccagccctgctggccagggcctgggcgtgctggagcagttcatccccctgcagctggatgaatatggctgcccccgggccaccaccgtgagaagaagagacctggagctgctgaagcaggccagcaaggcccactag

SEQ ID NO: 51369 - DNA, 1131 bp, Artificial Sequence
  derived and/or modified sequence
atgaccatcaccagagatgagtaccccagcaaccccatggtgctgcggggcatcaaccagaaggccgccttcccccagtaccagcctgtggtgatgctggagaagggctacaccatccactggaatggacctgcccccaggaccaccttcctgtacctggtgaacttcaacaagaatgactggatccgggtgggcctgtgctaccccagcaacaccagcttccaggtgaccttcggctacctgcagaggcagaatggcagcctgagcaagattgaggagtatgagcctgtgcacagcctggaggagctgcagaggaagcagagcgagaggaagttctactttgacagcagcacaggcctgctcttcctgtacctgaaggccaagagccaccgccacggccacagctactgcagcagccagggctgtgagcgggtgaagatccaggccgccacagacagcaaggacatcagcaactgcatggccaaggcctacccccagtactacaggaagcccagcgtggtgaagaggatgcctgccatgctgaccggcctgtgccagggctgcggcacccggcaggtggtgttcaccagtgacccccacaagagctacctgcctgtgcagttccagagcccagacaaggccgagacccagagaggagaccccagcgtcatctctgtgaatggaacagacttcaccttccgctctgctggggtgctgctgctggtggtggacccctgcagcgtgcccttccggctgacagagaagacagtgttccccctggctgatgtgagccgcatcgaggagtacctgaagacaggcatccccccaagaagcatcgtgctgctgagcaccagaggagagatcaagcagctgaacatcagccacctgctggtgcccctgggcctggccaagccagcccacctgtatgacaagggcagcaccatcttcctgggcttcagcggcaacttcaagcccagctggaccaagctgttcaccagccctgctggccagggcctgggcgtgctggagcagttcatccccctgcagctggatgaatatggctgcccccgggccaccaccgtgagaagaagagacctggagctgctgaagcaggccagcaaggcccactag

SEQ ID NO: 51370 - DNA, 3963 bp, Artificial Sequence
  derived and/or modified sequence
atgtacgccaccgacagccggggccacagccccgccttcctgcagccacagaacggcaacagccggcatccaagtggctatgtccccgggaaggtggtgcccttgaggcccccaccgccgccaaaatcccaggctagtgcgaagtttacctctatccgccgcgaggatagagctacttttgctttctctcccgaagaacagcaggcccagcgcgaatctcagaaacaaaagcggcataaaaacacctttatttgcttcgccatcacctccttttcattctttatcgcccttgctatcatcctgggcatcagttctaagtatgctccggacgagaattgtcctgaccagaatccgcggctgagaaattgggacccgggacaggatagcgccaaacaagttgtgatcaaggagggagatatgctgagactgacgagcgacgccacggttcattccatcgtgattcaagacggcggattacttgtgtttggagacaacaaggatggaagccgtaatattacgttaaggacccactacatcctgatccaggacggaggcgccttgcatattggggctgagaagtgcaggtacaaatccaaagctaccatcaccctgtacggtaagtctgatgaaggtgagtccatgcccacctttggcaagaagtttatcggcgtcgaggccggcggcactctggaacttcacggtgcacggaaagccagctggactcttcttgctagaaccttgaactcatcagggctgcctttcgggagctacacatttgaaaaggattttagtcgggggttgaatgttagagtaattgaccaggataccgccaaaatactcgaatcagagcggtttgacacacacgagtaccgaaacgaatcacgcaggctgcaagagtttctccggttccaggatccagggagaatcgtagcaatagccgttggcgatagtgcggccaaatcacttctccagggtaccatccagatgatccaagaaaggctgggatctgagttaattcaaggcctgggatacagacaggcctgggctctcgtcggggtaattgatggaggatctactagctgcaacgaaagcgtgcggaattatgagaaccattcctcaggaggaaaagctctcgcccagagggagttttacactgtggatgggcagaagttttccgttacagcctactctgagtggatcgaggaaactcctcaatttcttcacatgggcgaaatcatcgatggtgtagatatgagggccgaggtcggtatcctaactcgcaacatcgtgattcagggggaggtggaggacagttgttatgctgagaaccagtgccagttcttcgactatgatacctttgggggtcatattatgatcatgaaaaacttcacatctgtgcacttatcatacgttgagctgaagcacatgggtcagcaacagatgggtcgctatcccgtgcactttcatctgtgtggtgacgttgattataagggcgggtataggcacgctaccttcgtggatggactgagcatccatcactcctttagccggtgtattaccgtacatggcacgaacggtctgctaattaaggacaccattgggttcgatactctgggacattgcttcttcctcgaagacggcattgagcagaggaacacgctgttccacaacctggggctcctgacaaagcctggcacacttctgccgactgaccgcaataattcgatgtgtactactatgcgggataaggtctttggaaactatatccccgttccagcaacggactgcatggcagtgtcaactttctggattgctcaccctaacaacaacttgatcaacaatgctgccgctggcagtcaggacgccggcatctggtacctgtttcataaagaacccactggagagagctctggtcttcagttgctggcaaaacccgagctcactccacttggtatattttacaataaccgagtgcatagtaatttcaaggccggcttattcatcgacaaaggtgtgaagacaaccaatagttctgctgctgatcctcgagagtatctttgcctcgacaattccgcacgtttccggcctcaccaggacgctaaccctgagaaacctcgagtggctgctttaatcgatcgcttgattgcattcaagaacaatgacaacggcgcttgggtgagaggcggggatatcattgttcaaaactctgctttcgccgacaatggcatcggcctgacgtttgcttctgacgggtcattcccttctgatgagggatcttcccaggaagtatcagaatctcttttcgtgggggaaagtagaaactacggcttccagggaggacagaacaaatacgttggcaccggaggaattgaccagaagccacgcaccctgccccggaatcgcacttttcccattaggggtttccagatttacgatgggccaatccaccttactcgttcgactttcaagaagtacgtgcctactcccgatagatattcatctgcaatcgggttcctaatgaaaaactcatggcagatcactccccggaacaacattagtctggtcaagttcgggccccacgtatcccttaacgtgttttttggaaagcctggcccctggtttgaggactgcgagatggacggggacaagaactcgatctttcacgacatagacgggtctgtgaccggctataaggatgcatacgttgggcgcatggacaattacttaatccgacacccctcctgtgtcaacgttagcaaatggaatgccgtgatatgctcagggacctatgcccaggtgtacgtacaaacatggtccactcagaacctgtcgatgaccattacacgagatgagtatcccagtaaccctatggtgctcagaggtattaatcaaaaggccgctttcccccaataccagcctgtagttatgctggagaagggatacacaatccactggaacggcccggcacctcgtaccacctttctctacctggttaattttaacaaaaatgactggatccgcgttgggctgtgctacccatctaataccagtttccaggtgacctttggatacctacagaggcaaaacggctcactctccaagatcgaagagtacgagcccgttcactcactggaggaattacagcgcaagcagtctgaacggaaattttactttgacagcagcacaggtctgctttttctatacctgaaggctaagtctcaccgacatggacactcctactgttctagccagggctgtgaaagggtgaaaatccaagccgcgacggacagcaaagatatatctaactgtatggcgaaggcttatccacagtactatcgcaaacctagtgtcgtcaagaggatgccagcaatgctgactggcttgtgccagggatgcgggacccggcaggtggtcttcactagcgaccctcacaagagctacctaccggtacagtttcaatctccagataaggccgaaacccaacgaggggacccatcagtgatctccgtcaatggcacggacttcactttccggtcagccggtgtgcttttgctcgtggtggacccatgttcggtgccatttcgtttgacagaaaaaactgtatttccgctggctgatgtctccaggatcgaggaatacctgaagaccgggatccctccacggagcattgtcctcctgtctactaggggggaaattaagcagttgaacatctctcacctacttgtccccctgggcctcgctaaacccgcccacctgtatgataaaggcagcacaatctttttgggcttctcagggaatttcaaaccgagctggacgaagctgttcacctcccctgctggccaaggccttggagtgcttgagcagttcatcccactgcagctggacgaatatggttgtcctagagcaacaaccgtgagacgccgggatctcgagctactgaaacaggcaagcaaagcccactag

SEQ ID NO: 51371 - DNA, 1131 bp, Artificial Sequence
  derived and/or modified sequence
atgaccatcacccgggacgagtaccccagcaaccccatggtgctgaggggaattaaccaaaaagctgcctttccccaataccagcctgtagttatgctggaaaaaggctatacaatccactggaatgggccagctcctaggaccacatttctttacttggtcaatttcaacaagaacgattggattcgcgtgggcttgtgttatcctagtaacacatcattccaggtgacatttggctacctccagagacagaatggctctttaagtaagatcgaagaatatgagcccgtgcacagcctcgaggaacttcagcgcaagcagtcagaaagaaagttttactttgactcttctactgggctgctcttcctgtatcttaaggccaagtcccaccgacacggtcactcctactgctctagccaggggtgcgagagggtgaagatccaggctgcgacggactccaaagatatcagcaattgtatggcaaaggcatatccgcagtactacaggaagccgagtgtggtgaaaagaatgcctgccatgttgaccgggctgtgccaggggtgcggtacaaggcaggtcgtgttcacttcagaccctcacaaatcctatctgcctgtgcaattccagagcccagataaagccgagacccagcgaggcgatcctagcgttatctccgtaaacggcaccgattttacattccgttccgccggcgtcttgctgctagtcgttgatccttgcagcgttccctttaggctgaccgaaaagaccgtctttccattagccgatgttagcagaatcgaggagtaccttaaaactggaataccaccccgctctatcgtgctcctaagtacgaggggggagatcaagcagctcaacatctcccatttgctcgtgcccctcggcctggcaaaacccgctcatttgtacgacaaaggcagtacaatcttcttgggttttagcggcaattttaagcccagctggaccaaactcttcacttctcctgcaggacaaggacttggggtgctagaacagttcattccactccagctggatgagtatggatgcccccgagcaaccaccgttcgcagaagggatctcgagctgctgaagcaagcctcaaaagctcactag

SEQ ID NO: 51372 - DNA, 3963 bp, Artificial Sequence
  derived and/or modified sequence
atgtacgccaccgattcacggggacactcccccgcattcctacaaccccagaatggtaactcacgacatcccagcgggtatgtgcctggcaaagtagttccactgaggcctcccccacccccaaagtctcaggccagtgccaagttcactagtatacgcagagaagatcgagccacctttgcattctctccagaagaacagcaggcccagagagaaagccagaagcagaagcgacacaagaatacattcatctgcttcgccataacctcattcagttttttcatcgccctcgctataatcctggggatttcttccaagtatgcccctgatgaaaactgtccagatcagaatccccgtctgcgcaactgggatcccggtcaagacagcgcaaaacaggtggtgataaaagagggagacatgttgcggctcacctccgacgcaactgttcattcgatagtcattcaggacggcggtctgctggtgtttggggacaacaaagacgggagccggaacatcacgcttcgaacccactatattctgatccaggacgggggagcgctccacataggagcagaaaagtgtaggtataaaagcaaagcaaccattacactctatgggaaatcagatgagggcgagtccatgcctaccttcggtaagaaattcatcggagtcgaagccggaggcaccctggaactgcacggcgcacgcaaagcttcatggacgctgctggccaggactcttaacagctcaggtctgcccttcggctcctacacttttgaaaaggattttagcagaggcctgaatgtgagggtgatagaccaagatactgctaagattcttgaatcggagaggtttgatacacacgagtaccggaatgaaagccgcagacttcaggaatttctgcgcttccaggatcctggtcggatcgtggcaatagcagtcggcgattccgcagccaagtccttactgcaggggaccattcagatgattcaggaacgcttgggatccgagctgatccagggtctcggctacaggcaggcctgggctctcgtgggcgtgattgacgggggatctactagctgtaacgaatccgtgagaaattatgagaatcactccagtggcggtaaggcactggcgcagagggagttttacacagtcgatggccagaaattttctgttacagcttacagcgagtggattgaagaaaccccacagttcttgcacatgggcgaaatcatcgacggagttgacatgcgggcagaagttgggattttaacaagaaatattgttattcagggagaggttgaggactcttgttacgccgaaaatcaatgccagttcttcgactatgatacctttggtggccacatcatgatcatgaaaaacttcacgtcggtgcacctttcttatgtggagctgaagcatatgggacagcagcagatgggtcgttacccagtgcactttcacctttgcggcgatgttgactacaaaggtggctatcgtcacgccacgttcgtcgatggtctctctattcaccacagtttttccagatgtatcactgtacatggcacaaatggactcctgattaaagatacgatagggtttgatacactgggacactgcttcttcttggaagatggaattgagcagagaaatacactgtttcacaacttaggcctccttaccaagccagggactctcctacccacggacagaaacaattccatgtgtactaccatgcgggataaagtgttcggaaactatatcccagtgcccgcaacggattgtatggccgtttccacattctggatagcccaccctaacaacaacttaatcaataacgcggctgccggatcgcaggacgcaggcatctggtacctcttccacaaggagccaacaggagagagctcgggactgcagttgctagccaagccagaattgacaccactgggtatattttacaacaacagagttcattccaattttaaggcaggcctgttcattgataaaggggtcaaaaccaccaatagttctgcggcagacccccgagaatatctgtgtcttgacaattcagcaagatttaggccgcaccaagatgccaatcctgaaaaaccgagagtcgccgctctcattgacagattgattgcgttcaagaacaatgataatggggcttgggtccgcggaggcgatataatagtgcagaatagcgcttttgcggacaatggaatcggcctgacctttgccagtgatggatcgtttccaagtgacgagggctcttctcaggaagtgtcggagagtctgtttgtcggagagtccagaaattacggctttcaggggggacaaaataagtatgttggcactggtggaatcgatcagaagcctaggacgttgcctagaaacagaaccttccccatcaggggtttccagatttatgacggaccaatccatttaactagaagtacttttaaaaaatatgtgccgacgcctgatagatactctagtgctattggctttctaatgaagaacagttggcaaatcaccccacggaacaatatctctctggtgaagttcggtccacatgtgtctttgaatgttttcttcgggaaacctggaccctggtttgaggactgcgagatggatggagataaaaattctatttttcatgatattgacggctccgtgacggggtacaaggatgcctacgtgggcagaatggacaactacctcatacgccacccctcctgtgtcaacgtcagcaaatggaacgccgtcatatgttccgggacatatgcccaagtgtacgttcaaacatggagtacccagaatctgtcgatgacaatcacccgagacgaatatccttctaatcccatggttttaagagggattaatcaaaaggcagcgttcccgcagtaccagcccgtggtcatgctggagaaagggtacaccatccattggaacggcccagctcccaggacgaccttcctgtatttggtgaacttcaacaaaaacgattggatcagagtcgggctgtgctacccctccaacacctcctttcaggtcacgttcggctatctgcagcgacaaaacgggagcctttccaaaatcgaggagtatgaacctgtccatagtctagaagaactacagaggaagcagtccgagcgaaaattttactttgattctagcacaggcctgctgtttctgtatcttaaggctaagagccatcgtcacgggcacagctactgcagctctcagggctgtgagcgcgtgaagatacaggccgcaactgactccaaggacatcagtaactgcatggccaaggcctatccacagtactacagaaagcctagtgtcgtgaagaggatgcccgcaatgctgaccggattatgccaaggatgtggcacaagacaggtcgtcttcaccagcgatccccataagtcgtatctgcccgtgcagtttcagtctccagataaagcagaaactcagagaggggacccatcagtgatttcggtgaatgggaccgactttactttcaggtcagcaggcgtcctcctgttggtcgtcgatccctgctctgtgccctttaggcttactgagaagactgtctttccattagctgacgtctcacggatcgaagagtacctaaagacagggatccctcccagaagtatagttctcctaagcacaagaggtgagattaagcagttgaacattagccacctgctcgtaccgttggggctcgccaagcctgcacatctttacgataagggctcaacaatcttcctggggtttagcggaaatttcaagccctcttggacgaagttatttaccagcccggctggtcaagggctgggggtcctggaacagttcattccgttgcagttggacgaatacgggtgtccgcgagcaactaccgtgagaaggcgggacctcgagctgctcaagcaggcatcaaaagcccattag

SEQ ID NO: 51373 - DNA, 1131 bp, Artificial Sequence
  derived and/or modified sequence
atgaccattactcgtgacgaatacccatccaacccaatggttctgcgagggatcaaccagaaagccgcattcccgcagtaccagccagtggtaatgctggaaaaaggttacactattcattggaacggcccagcacccagaaccacctttctctacctcgtcaattttaacaagaatgattggatccgggtaggcctttgctacccgagtaatacctctttccaggtgacatttggttaccttcaaaggcagaacgggagtctctcaaagattgaggagtacgaacccgtacactcccttgaggagctccagcggaagcagtcagaaagaaagttctattttgactcctctactggactgttattcttgtacttaaaagctaagagccaccggcacggccacagctattgttccagccagggttgcgagcgcgtgaaaattcaggccgctactgattcaaaagatatctcaaactgcatggcaaaggcatacccgcagtactaccgaaaaccttctgtagtaaagcgcatgcccgctatgctcactggcttatgccaggggtgtggcacacgccaggtggttttcacatctgacccgcataagtcatacttacccgtgcaatttcagagccctgataaagctgaaacccagcgcggtgatccatcagtgataagtgtcaacgggacggactttacgttccgatcagcaggggtacttctgctggtcgttgatccctgcagcgttcctttccgtctgaccgagaagactgtctttccccttgctgacgtctctcgcattgaggagtatctcaagacaggcatcccgcctaggtcaatagtgttgttgtctactcggggagagattaaacagctgaacatttctcatctgctggtccctttaggcctggccaaaccagctcacctgtatgataaaggcagcactatcttcttaggcttttcaggcaatttcaaaccaagctggacgaaattgtttacctccccagccggacaagggcttggggtcttggagcagttcattcctctgcaactagatgagtacggatgccctcgggctactactgttcgacggcgtgaccttgagttgttgaagcaggcaagcaaggcgcattag

SEQ ID NO: 51374 - DNA, 5217 bp, Artificial Sequence
  derived and/or modified sequence
gttaacggacgctaagcggggtaggggaagtaacagtgtatcatgtatgccactgattccaggggacactcccctgctttcctccaacctcagaatggaaatagtcgtcacccatctggctatgttccagggaaggttgtcccattgcgtccccctcctcctccaaagagtcaagcttcagccaaatttacctccatcagacgagaagaccgggcaaccttcgcattctcacctgaagaacagcaagcccagagagaaagtcaaaagcaaaagagacacaaaaatactttcatttgttttgctattactagtttctcattttttattgcacttgcaatcattttaggaatatcctcaaaatatgctccagatgaaaattgcccagatcaaaatcctcgtctcaggaattgggatccaggacaagattctgcaaagcaagttgttatcaaggagggagatatgctccgtctgacctcagacgccaccgtgcattctatagtcattcaggatggaggactgcttgtatttggggacaataaagatggatccagaaatattactttgaggactcattacatcctgatccaggatggtggggcgcttcatattggagcagaaaaatgccgctataaatccaaagcgacaattaccttgtatggcaagtcagatgaaggtgaaagtatgccaacatttggcaaaaagtttattggtgtggaagctggcgggacactggagttacatggggcacggaaggcatcgtggacgttgttggcaaggaccctgaattcctcaggcttgccctttgggtcctatacctttgaaaaggacttttcccggggcctcaatgtgagggtcattgaccaagacacggccaaaattttggaaagtgagagatttgatacccatgaataccgcaatgagagcaggcggcttcaggagtttctgagattccaggatccaggtcggattgttgccatagctgtcggggattcagccgctaaaagtctcttacaaggaaccatccagatgatccaggaacggttgggaagtgaactgatccaaggactgggctacaggcaagcttgggctttagttggtgtcattgatggtggaagcacttcttgcaatgaatccgtgagaaactatgaaaatcatagcagtggcgggaaggctcttgcccaaagagaattttatactgtggatggccagaagttctctgtgacagcttatagtgaatggattgaagaaacccctcagttcctgcacatgggtgagatcatagacggtgtagacatgagagctgaggttggaattcttacccggaatattgtgatccaaggagaagtggaggactcatgctacgcagaaaatcagtgccaattttttgattatgatacctttgggggacacattatgataatgaaaaattttacttcagtccatctttcttatgtggaattgaaacacatgggtcagcagcagatggggcgataccctgttcattttcacctgtgtggtgacgtggattataaaggaggatacagacatgcaacatttgtggacggcctgtctattcatcacagcttctcaaggtgcatcactgtgcatgggacaaatggcttgctaataaaagacaccattgggtttgacacactaggtcattgtttctttttggaagatggtattgaacagaggaatactttgttccacaatctgggactcctcaccaagccgggtactctcctgcccaccgataggaacaactccatgtgtaccaccatgcgagataaagtgtttggaaattacattcctgtgcctgctactgactgtatggctgtttcaactttctggattgctcatcccaacaataatctgattaataatgcagctgcaggctcacaggatgctggaatatggtatttattccacaaggaaccaactggggaatccagtggattgcagctcttggcaaaaccagaactcactccattgggtatattttataacaacagggtccattcaaattttaaggctggcttatttattgacaaaggtgtcaaaacaaccaactctagtgctgctgacccaagggaatacctctgtttggacaatagtgcaagatttcgacctcatcaggatgcaaaccccgaaaaaccacgtgttgctgctctaattgacaggctcattgcttttaaaaataatgataatggagcttgggtcagaggaggagatattatcgttcaaaattcagcatttgcagataatggaataggactgacctttgccagtgatggaagcttcccaagtgatgaaggttccagccaagaggtatctgaatctctctttgttggggagagcaggaattacggctttcagggtggtcagaacaagtatgtaggcactggaggaatagaccagaagcctcgaacattacccaggaacaggacgttcccaattagaggctttcagatttatgatgggcccattcatctcacaaggagcactttcaaaaaatatgtgccaactccagataggtacagcagtgcaattggcttcctcatgaagaattcctggcagataacccccaggaataatatctccctcgtgaagtttggtccacatgtctctctgaatgtcttttttggaaagcctggtccctggtttgaagattgtgagatggatggtgataagaactccatattccatgacattgatggctctgtgacaggatacaaggatgcttatgtgggaagaatggacaactacctgatccgccatccaagctgtgtaaatgtgtctaagtggaatgcagtgatctgcagtgggacctatgcacaggtctatgtacagacatggagcactcagaatctttctatgaccattacacgagatgagtatccgtccaaccctatggtgctccgaggtattaatcagaaggctgcctttccacagtaccagcctgtcgtcatgctggagaagggttataccatccactggaatgggccggcaccacggactacatttctatacctcgtcaacttcaacaagaatgactggattcgagttggcctttgctatccatcaaacacaagttttcaagttacctttggctatttgcagcggcagaatggctcattatccaaaatcgaagaatatgagcctgtgcattcactggaagaactgcaaagaaagcaatccgagaggaaattctattttgactccagcacggggttactgtttttgtatctcaaagccaaaagccacaggcatggccacagttactgttcatctcagggatgtgaaagagtcaagatccaagcagccacagactcaaaggacatcagtaactgcatggccaaagcatacccacagtactacagaaagccgtcagtggtcaagcggatgccggccatgctcactggactctgtcaaggctgtggcactcggcaggtggtgtttactagtgatcctcataaaagttacctccctgtgcaattccagtcacctgataaagcagaaacccagcgtggagacccgtctgttatttctgtcaatggcactgactttaccttccgaagtgcaggcgtcctcctccttgttgtggatccgtgcagcgttccattccgcttgacggaaaaaacggtttttcctcttgctgatgtcagtcgcattgaagagtatttaaaaacaggcatccctccaaggtccattgttctgttgagcacaagaggagaaataaagcagttaaacatttcacacttactagtacctctgggattagccaaaccagctcatctttatgacaaagggagtaccatatttttgggattcagtggaaactttaaaccatcatggactaagctatttaccagtcctgctggacagggccttggggtgcttgaacaattcatacctttgcagctggacgaatatggttgtcccagagccaccactgtccgcagaagagacctggaactgctaaagcaagcttcaaaagcacattagagactaactgtaacttaagtgctgggggaaaaaaaatgtgaactaacttatttaatttatggcattttaaaatgacactgttaacccaacggaaccattttccagtttgatacagaatggggagaaaagaaagcgtttgaaattattgcttggataccagcttcatgcaccttctagttgtacaaaatgttaaagacgttgtttgtatttgtaaggctggtgtattcagagagcagatctcttattcctcactttccacccccgtattttgtaatgaccatgagcaatgtttttactttttgtataatggggtggggtggagtgggggcttctgagagtcagcctgaggtctttagaggaccagctattgtagcaccttggatacttgaagtttaatgctcagttgggtcgggtggcagttgacttggtggctggcatgttcagcagtgcctggggccctgtttctgggcagcctttgaggattttctatgatattgaatgacagttttaagtggcaactcaggcccagctcatgcccttttttgcctggacatgtgctatttttattcacttatatatcaattacttgtaagggttaaactttcaaacaggaagtatattgggacaaaagggctcttggggattagatatccctttaatctgtgaccattgggcaaaaaattttcctgcagcaaaagtctgaggctgttgggaccatttttgcagctttaatccttagcctcttttgactgtatatttgtgtttaaaatgcagagctcaactgaatatttccttttttgttttgttttgttttgttttaagaagtaggttgttttcctgaaccgtaaacttgtatcattttaacttgcacaaaggaagtctgttcttggtattgctcttgcacttgggttttttgttattgttttgtgtggattttttaaagcttttctgttcaccctcctgccaggaaaatcccagaaagcttaatgataccccaaaatgattacacccagggaggaaaaaaaggagcgctttctagggtcagaatcgtggagagaatactcagaaatgaacctctttaaagccttgcaggaatgagtcactcttacttaatgaaatgttaaagccaattaaaaagcatgctgtgatgcccagcttccctttccacagggtgcatgcgtctcctgctggtgaatcacatgcggcaagagg

SEQ ID NO: 51375 - DNA, 1437 bp, Artificial Sequence
  derived and/or modified sequence
cacttagtctggcacagatcacagaatctcccttttcaaagttgagacacttgactttgtgctgaaaatgtctttttagctgtttaaattttcattctcttccctttacttcttgattattttttcaaggtctatgtacagacatggagcactcagaatctttctatgaccattacacgagatgagtatccgtccaaccctatggtgctccgaggtattaatcagaaggctgcctttccacagtaccagcctgtcgtcatgctggagaagggttataccatccactggaatgggccggcaccacggactacatttctatacctcgtcaacttcaacaagaatgactggattcgagttggcctttgctatccatcaaacacaagttttcaagttacctttggctatttgcagcggcagaatggctcattatccaaaatcgaagaatatgagcctgtgcattcactggaagaactgcaaagaaagcaatccgagaggaaattctattttgactccagcacggggttactgtttttgtatctcaaagccaaaagccacaggcatggccacagttactgttcatctcagggatgtgaaagagtcaagatccaagcagccacagactcaaaggacatcagtaactgcatggccaaagcatacccacagtactacagaaagccgtcagtggtcaagcggatgccggccatgctcactggactctgtcaaggctgtggcactcggcaggtggtgtttactagtgatcctcataaaagttacctccctgtgcaattccagtcacctgataaagcagaaacccagcgtggagacccgtctgttatttctgtcaatggcactgactttaccttccgaagtgcaggcgtcctcctccttgttgtggatccgtgcagcgttccattccgcttgacggaaaaaacggtttttcctcttgctgatgtcagtcgcattgaagagtatttaaaaacaggcatccctccaaggtccattgttctgttgagcacaagaggagaaataaagcagttaaacatttcacacttactagtacctctgggattagccaaaccagctcatctttatgacaaagggagtaccatatttttgggattcagtggaaactttaaaccatcatggactaagctatttaccagtcctgctggacagggccttggggtgcttgaacaattcatacctttgcagctggacgaatatggttgtcccagagccaccactgtccgcagaagagacctggaactgctaaagcaagcttcaaaagcacattagagactaactgtaacttaagtgctgggggaaaaaaaatgtgaactaacttatttaatttatggcattttaaaatgacactgttaacccaacggaaccattttccagtttgatacagaatggggagaaaagaaagcgtttgaa

SEQ ID NO: 51376 - DNA, 533 bp, Artificial Sequence
  derived and/or modified sequence
accacttcacttgtgtgtgaacataagaagtatgactctgaaatgaatgcttcatgacagcaaggatcatgtctttctttcttgttcaacaccctatgtccagtgccttgaacagttcctgacccatgattttctgaaaactttactcctttgctgcacttcaagtctgcaaaattgacaaatgaaagtgtcggggcagttggggagaaagaggccttcagatatactctataaatcatcaaaatatgatgtgctatatattctcggcataaactggaaatgaaaaaaacttgctacaaataggagtgactcctttgggcttaaattggattggcagcaacacagattctgctgtggattgaagtcattttctacctcggcactactcagtccatggggaatggtgaagttatgattttgcagcaagattctgggagcaggccagcatctacatctgttctaaacttaacagtgtatcatgtatgccactgattccaggggacactcccctgctttcctccaacctcagaatg

SEQ ID NO: 51377 - protein, 419 aa, Artificial Sequence
  derived and/or modified sequence
MPLSRWLRSVGVFLLPAPYWAPRERWLGSLRRPSLVHGYPVLAWHSARCWCQAWTEEPRALCSSLRMNGDQNSDVYAQEKQDFVQHFSQIVRVLTEDEMGHPEIGDAIARLKEVLEYNAIGGKYNRGLTVVVAFRELVEPRKQDADSLQRAWTVGWCVELLQAFFLVADDIMDSSLTRRGQICWYQKPGVGLDAINDANLLEACIYRLLKLYCREQPYYLNLIELFLQSSYQTEIGQTLDLLTAPQGNVDLVRFTEKRYKSIVKYKTAFYSFYLPIAAAMYMAGIDGEKEHANAKKILLEMGEFFQIQDDYLDLFGDPSVTGKIGTDIQDNKCSWLVVQCLQRATPEQYQILKENYGQKEAEKVARVKALYEELDLPAVFLQYEEDSYSHIMALIEQYAAPLPPAVFLGLARKIYKRRK

SEQ ID NO: 51378 - DNA, 1478 bp, Artificial Sequence
  derived and/or modified sequence
gagtacccgccaacaagcgggaccgagcaggaatccgtatctgggaacaggtgagagaggatgtgtgctgggccttggaggaagggggccgagaccgggccttacttctgtaacgatactgtgaggcatcggaaggccagcctgttgtgtccgttttgaaggatgcccctgtcccgctggttgagatctgtgggggtcttcctgctgccagccccctactgggcaccccgggagaggtggctgggttccctacggcggccctccctggtgcacgggtacccagtcctggcctggcacagtgcccgctgctggtgccaagcgtggacagaggaacctcgagccctttgctcctccctcagaatgaacggagaccagaattcagatgtttatgcccaagaaaagcaggatttcgttcagcacttctcccagatcgttagggtgctgactgaggatgagatggggcacccagagataggagatgctattgcccggctcaaggaggtcctggagtacaatgccattggaggcaagtataaccggggtttgacggtggtagtagcattccgggagctggtggagccaaggaaacaggatgctgatagtctccagcgggcctggactgtgggctggtgtgtggaactgctgcaagctttcttcctggtggcagatgacatcatggattcatcccttacccgccggggacagatctgctggtatcagaagccgggcgtgggtttggatgccatcaatgatgctaacctcctggaagcatgtatctaccgcctgctgaagctctattgccgggagcagccctattacctgaacctgatcgagctcttcctgcagagttcctatcagactgagattgggcagaccctggacctcctcacagccccccagggcaatgtggatcttgtcagattcactgaaaagaggtacaaatctattgtcaagtacaagacagctttctactccttctaccttcctatagctgcagccatgtacatggcaggaattgatggcgagaaggagcacgccaatgccaagaagatcctgctggagatgggggagttctttcagattcaggatgattaccttgacctctttggggaccccagtgtgaccggcaaaattggcactgacatccaggacaacaaatgcagctggctggtggttcagtgtctgcaacgggccactccagaacagtaccagatcctgaaggaaaattacgggcagaaggaggctgagaaagtggcccgggtgaaggcgctatatgaggagctggatctgccagcagtgttcttgcaatatgaggaagacagttacagccacattatggctctcattgaacagtacgcagcacccctgcccccagccgtctttctggggcttgcgcgcaaaatctacaagcggagaaagtgacctagagattgcaagggcggggagaggaggctctcaataaataatcgtgtaacctt

SEQ ID NO: 51379 - DNA, 1431 bp, Artificial Sequence
  derived and/or modified sequence
agtgtggggagagcgggaactactcgacccacagagccgatcgcggagcggattctgcttttaggagtacccgccaacaagcgggaccgagcaggaatccgtatctgggaacaggatgcccctgtcccgctggttgagatctgtgggggtcttcctgctgccagccccctactgggcaccccgggagaggtggctgggttccctacggcggccctccctggtgcacgggtacccagtcctggcctggcacagtgcccgctgctggtgccaagcgtggacagaggaacctcgagccctttgctcctccctcagaatgaacggagaccagaattcagatgtttatgcccaagaaaagcaggatttcgttcagcacttctcccagatcgttagggtgctgactgaggatgagatggggcacccagagataggagatgctattgcccggctcaaggaggtcctggagtacaatgccattggaggcaagtataaccggggtttgacggtggtagtagcattccgggagctggtggagccaaggaaacaggatgctgatagtctccagcgggcctggactgtgggctggtgtgtggaactgctgcaagctttcttcctggtggcagatgacatcatggattcatcccttacccgccggggacagatctgctggtatcagaagccgggcgtgggtttggatgccatcaatgatgctaacctcctggaagcatgtatctaccgcctgctgaagctctattgccgggagcagccctattacctgaacctgatcgagctcttcctgcagagttcctatcagactgagattgggcagaccctggacctcctcacagccccccagggcaatgtggatcttgtcagattcactgaaaagaggtacaaatctattgtcaagtacaagacagctttctactccttctaccttcctatagctgcagccatgtacatggcaggaattgatggcgagaaggagcacgccaatgccaagaagatcctgctggagatgggggagttctttcagattcaggatgattaccttgacctctttggggaccccagtgtgaccggcaaaattggcactgacatccaggacaacaaatgcagctggctggtggttcagtgtctgcaacgggccactccagaacagtaccagatcctgaaggaaaattacgggcagaaggaggctgagaaagtggcccgggtgaaggcgctatatgaggagctggatctgccagcagtgttcttgcaatatgaggaagacagttacagccacattatggctctcattgaacagtacgcagcacccctgcccccagccgtctttctggggcttgcgcgcaaaatctacaagcggagaaagtgacctagagattgcaagggcggggagaggaggctctcaataaataatcgtgtaacctt

SEQ ID NO: 51380 - DNA, 1260 bp, Artificial Sequence
  derived and/or modified sequence
atgcctctgagcagatggcttcgcagcgtaggggtcttcctgctgccagcaccatattgggcgcctagagaacggtggttaggcagtctccggagaccatctctggtgcacggctaccccgttttggcgtggcactcagcccggtgctggtgccaagcatggacagaagaacctagagctctctgttctagtctccgcatgaacggcgaccagaattccgacgtctatgcccaagaaaagcaggatttcgtgcagcactttagccagatcgtgcgcgtgttaacagaggacgagatgggccaccctgagattggcgacgccatagccaggctaaaagaagtacttgagtataatgccatcggcggcaaatataaccgggggctgactgtggtcgtggccttcagagagctcgtggagccccgaaaacaggatgctgacagccttcagagagcttggaccgttggttggtgtgttgaacttcttcaggctttttttctcgtggcggatgatatcatggacagctccctgaccagacgcggtcagatttgttggtatcagaaaccaggggtgggactggatgctattaatgatgctaatctgctcgaagcttgcatttaccgcctcttgaaactctactgtagagaacagccctattacttaaacttgatcgagctcttcctccagtcctcatatcagacagaaatcgggcagacactggatctcctcacagcgccccagggaaatgtagacctggtgaggtttactgagaagcgctataaaagcattgtcaaatacaaaaccgcattctatagcttttatctccccatcgctgcagctatgtacatggccgggatagatggagaaaaggagcatgccaatgcaaagaaaattctcctggagatgggagaattcttccagattcaggatgactacctcgatctcttcggcgatccatctgtgaccgggaagattggcactgacattcaggataataagtgctcttggctcgttgtgcagtgtttacagcgcgcaacacctgagcaatatcagattctgaaagagaattatggccagaaggaagccgaaaaagtggccagggttaaagccctgtacgaggagctggacctgcccgctgtgttcctgcagtatgaggaggactcctattctcatatcatggccctgatcgaacagtacgccgcaccattaccaccagccgtatttctgggcctggcccgcaagatctacaaaagacgcaagtag

SEQ ID NO: 51381 - DNA, 1260 bp, Artificial Sequence
  derived and/or modified sequence
atgccactcagcaggtggcttcgcagcgtcggcgttttcctgttgcccgcaccatattgggccccacgagagcgctggctgggttcactgcgaagaccatctttggtccacggctatccggtgctcgcctggcattccgccagatgttggtgtcaggcatggacagaggaacctcgagccctgtgtagcagcctgagaatgaatggtgatcagaattcagacgtctatgcacaggaaaaacaggactttgtccagcacttcagtcagattgtacgcgtgctcacggaagatgagatggggcacccggagataggtgacgccattgccaggctgaaggaggtcctagagtacaatgctatcggcggcaagtataacaggggcctcaccgtggtggtggcatttcgggagcttgtggagcccagaaagcaggacgcagatagcctgcagcgcgcttggactgttggttggtgtgtggaactgctgcaggcatttttcttagtggccgatgatatcatggactcttcactgactaggagagggcaaatatgctggtaccaaaagcctggcgtgggacttgacgccatcaatgatgccaaccttcttgaggcctgtatttatagacttctgaaactatactgccgcgagcaaccctactatctgaacctgattgaactcttcctccaatccagctaccagactgaaataggacaaacactggatctgctaaccgcccctcagggcaacgtggacctggtcaggttcactgaaaagcgctacaaaagcatagtcaaatataagacagcattttattctttctaccttccgatcgccgcggcaatgtatatggctggtatcgatggcgaaaaggagcatgctaacgcaaaaaaaatacttctggagatgggcgagttcttccagatccaagacgactacctggacctcttcggcgatccctcagtaacaggtaagataggcactgatatccaggataataagtgttcctggctcgttgtccagtgtttacagcgagccactcctgaacaataccaaatcttgaaggagaattacggtcagaaagaggccgagaaggtggcaagggtgaaagcactctacgaggagctggacctgccagctgtgttcctccagtatgaagaggattcttattcccacataatggcattgatagaacagtacgcagcgccactaccgccggctgtctttctgggattagctagaaagatatacaagcggagaaaatag

SEQ ID NO: 51382 - DNA, 1260 bp, Artificial Sequence
  derived and/or modified sequence
atgcccctgagccgctggctgcggtctgtgggcgtcttcctgctgcctgccccctactgggccccccgggagcgctggctgggcagcctgcggcggcccagcctggtgcacggctaccctgtgctggcctggcacagcgcccgctgctggtgccaggcctggacagaggagccccgggccctgtgcagcagcctgaggatgaatggagaccagaacagtgatgtgtatgcccaggagaagcaggactttgtgcagcacttcagccagatcgtgcgggtgctgacagaagatgagatgggccaccctgagattggagatgccatcgcccggctgaaggaggtgctggagtacaatgccatcggcggcaagtacaacagaggcctgactgtggtggtggccttccgggagctggtggagcccaggaagcaggatgctgacagcctgcagagggcctggacagtgggctggtgtgtggagctgctgcaggccttcttcctggtggctgatgacatcatggacagcagcctgacccggcggggccagatctgctggtaccagaagccaggagtgggcctggatgccatcaatgatgccaacctgctggaggcctgcatctaccgcctgctgaagctgtactgccgggagcagccctactacctgaacctgattgagctgttcctgcagagcagctaccagacagaaattggccagaccctggacctgctgacagccccccagggcaatgtggacctggtgcgcttcacagagaagcgctacaagagcatcgtgaagtacaagacagccttctacagcttctacctgcccatcgccgccgccatgtacatggccggcattgatggagagaaggagcacgccaatgccaagaagatcctgctggagatgggagagttcttccagatccaggatgactacctggacctgtttggagaccccagcgtgacaggcaagattggaacagacatccaggacaacaagtgctcctggctggtggtgcagtgcctgcagagggccaccccagagcagtaccagatcctgaaggagaactacggccagaaggaggccgagaaggtggcccgggtgaaggccctgtatgaggagctggacctgcctgctgtgttcctgcagtatgaagaagattcctacagccacatcatggccctgattgagcagtatgctgcccccctgcccccagctgtgttcctgggcctggccaggaagatctacaagaggaggaagtag

SEQ ID NO: 51383 - DNA, 1260 bp, Artificial Sequence
  derived and/or modified sequence
atgcccctgagccggtggctgcggagcgtgggcgtgttcctgctgcctgccccctactgggccccaagggaacgttggttggggtctttacggagaccaagccttgtgcacggctatcccgtcttggcctggcactctgccaggtgttggtgccaagcctggaccgaggagccacgtgcactgtgctctagcctccgtatgaatggcgatcagaattccgatgtatacgctcaggagaagcaggattttgtgcaacacttcagccagattgtgcgggtcctgactgaggatgagatgggccaccctgaaataggagatgctatcgccagattaaaggaggtcctggagtacaatgccatcggggggaagtacaacagggggctcaccgttgtggtggcctttcgggagctggtggagccacgtaaacaggacgccgactccctacagcgtgcatggactgtgggctggtgtgttgagcttctccaggccttcttcttggtggcagatgacatcatggatagctcactgactaggcgcggacaaatctgctggtaccaaaagcccggagtgggtctggacgcaattaatgatgcaaatcttctcgaggcctgcatctataggcttctcaaactctactgccgcgaacagccctattacctgaatttgatcgagctctttctacagtcaagctaccaaacggagatagggcagacgctagacttgctaaccgccccccagggcaacgttgatttggtgcgtttcaccgaaaaacgatataaaagtattgtgaaatataaaaccgccttttactccttttacctgcctattgctgccgctatgtacatggccgggattgatggggagaaggagcatgccaatgctaagaagattttgctcgagatgggtgagttcttccagatccaagacgactacctggatctttttggtgatccatctgtgacaggcaaaatcggtaccgatattcaggacaataaatgttcatggctcgtggtgcagtgtctgcagagggcaacgcctgagcagtatcagatcctcaaggagaattatggacagaaggaggccgaaaaagtggctcgggttaaggccctctatgaagagctcgatctccctgctgtgttcttacaatacgaagaagatagctacagccatatcatggcactcatcgaacaatatgccgcccctctgcctcctgctgtattcctcgggctggcccgcaagatttataaacgccgaaagtag

SEQ ID NO: 51384 - DNA, 1260 bp, Artificial Sequence
  derived and/or modified sequence
atgcccctgagccggtggctgcggagcgtgggcgtgttcctgctgccagcaccatattgggcacctcgcgaacgatggctaggctctctcagaaggccgtcgcttgtgcacggctacccagtgttagcgtggcacagtgccaggtgctggtgtcaggcctggactgaagagcccagagctttgtgcagtagcctccgaatgaatggggatcagaactccgatgtctatgctcaggaaaagcaggatttcgtgcaacacttctctcagatagtcagagttttaacggaagatgaaatgggccatcccgagatcggtgatgctatcgcacgtttaaaagaggtcctcgagtacaacgccatcggggggaaatacaaccgcggcctgactgtagtagtcgcatttagagaattggttgaacccagaaagcaggatgcggattcattgcagagggcttggacagttggctggtgtgtcgaactcctgcaggcattctttttggttgccgatgatatcatggactcgagcttgacaagacgcgggcagatctgctggtaccagaaacccggagttggcctggacgctatcaacgacgctaatctgttagaagcgtgcatctacaggctcctgaaactctactgccgtgagcagccgtactatctgaacttgattgagctgttcctacagtcttcgtatcagactgaaatcggccagactctggaccttctgacggctccgcaggggaatgttgatctggtgcgctttaccgagaagcgctataaaagtatcgtcaaatataaaactgctttttactccttctatctaccaatcgccgccgccatgtatatggcgggcattgacggagaaaaggaacatgccaatgccaaaaaaattctcctagagatgggagagttcttccaaattcaagacgattacctcgacctcttcggggaccccagcgttaccggaaaaataggaactgatattcaggataataagtgctcgtggctggtggtgcagtgtctgcaacgcgcgacaccagagcagtaccagatcttgaaagaaaattacggccaaaaggaagcagagaaggtggccagagtgaaggcgctgtatgaagaactggatcttcccgctgtcttccttcagtacgaagaggattcttattcccacataatggccctgattgagcagtatgcagctccacttccgcctgctgtattcctgggcctagcacggaagatctataaacgcagaaagtag

SEQ ID NO: 51385 - DNA, 1260 bp, Artificial Sequence
  derived and/or modified sequence
atgcctttgtctagatggcttagatcagttggagtattcctgctgcctgcgccttactgggctccgagagagaggtggctgggcagtctgcgaaggcccagtctagtccacggctatccggtgctggcatggcactccgccaggtgttggtgtcaggcctggacagaggagcctcgcgctctctgcagttctctgcggatgaacggagatcagaatagcgatgtctacgcccaggaaaaacaggacttcgtccaacacttcagtcagatagttcgagtgctgaccgaagacgaaatgggccatccagagataggagacgctatagcaagactgaaggaagtactggaatacaacgccattgggggtaagtataatagggggctgaccgtagtcgtcgctttcagagagctagtagagcccagaaagcaggacgccgactccttgcagcgggcttggaccgtgggttggtgcgtggagctgcttcaggctttttttttggttgccgatgatatcatggattcctcactgaccaggaggggtcagatctgttggtatcagaagcccggagtggggcttgatgctatcaacgatgctaacctgctggaagcctgcatctatcggctgctgaagctctattgtcgcgagcagccttactacctgaatctcatcgaattatttctgcagagttcttaccagacagagattggccagacgctcgacttgctaacagccccacagggcaacgtggacctggtgcggttcactgagaagcgctataaatctatagtgaagtacaaaacagctttctacagtttttatttacctattgccgcagcgatgtacatggcgggtattgacggggagaaggagcatgccaatgcaaaaaaaatactgctggagatgggtgagttcttccaaatccaggatgattaccttgacctgtttggcgatccttctgtgaccggcaagatagggactgacattcaggacaataaatgcagttggctggtcgttcagtgtcttcagcgagccaccccggagcagtaccagatcctaaaggagaactacgggcagaaggaggccgagaaggtggctagagtaaaggccctgtatgaggagttggatctgccagccgtttttctgcagtacgaagaagatagttattctcacatcatggcattaattgagcagtatgcggctcccctgcctcccgcagttttcctcggactggcgagaaagatctataaaaggcggaagtag

SEQ ID NO: 51386 - DNA, 1260 bp, Artificial Sequence
  derived and/or modified sequence
atgcctttgagtagatggctccgatcggtaggggtgttcttgttacccgcaccatactgggcacccagagaacgatggttggggtctctaagacgcccatcactggttcatggctatcccgttcttgcttggcattctgcgaggtgttggtgccaagcatggactgaggaaccgagagcactgtgctcctcgctgcgtatgaatggggatcagaattctgatgtgtatgcccaggaaaagcaggatttcgttcagcatttcagtcagattgtgagagtattgacggaggatgaaatggggcaccccgaaatcggtgatgcgatcgccagacttaaagaagttctagaatacaatgctatcgggggaaagtacaaccggggactgaccgttgtcgtagcattccgcgaactggtggaacctcgtaaacaggacgccgactctctgcagcgtgcatggacagtgggttggtgcgtagaactgctgcaagcctttttcttagtcgccgatgacattatggatagttccttaactaggcgcggacagatctgttggtatcagaagcctggcgtcggcctcgacgccattaacgacgctaatctcctggaggcctgcatttatcgtctgctgaagctctactgtcgagagcagccttactatctcaacttgattgaattatttttgcagtcttcttatcaaaccgaaattggacagacactggacctgttgactgccccacaggggaacgtggacctcgtccgctttacagaaaaacggtataaaagtattgtgaagtataagactgccttctatagcttctacctacctatagcagctgccatgtacatggctggaatcgatggcgagaaggaacatgcaaacgctaagaaaatcctcttagagatgggggagtttttccagatccaggacgactacttggacctgttcggtgacccctcggtgaccgggaagattgggacagatatccaggataacaaatgtagctggctcgtagtgcagtgtctgcagagagctacacctgaacagtaccagattctcaaagaaaactacggccaaaaggaggctgagaaggtggcacgcgtaaaggctctctatgaagagctagatctcccagccgtgtttttacagtatgaagaggactcctacagtcacattatggcactcatcgagcaatatgccgctccacttccccctgcagtgttcctcggcctggcccgtaagatctataagagaagaaagtag

SEQ ID NO: 51387 - DNA, 1260 bp, Artificial Sequence
  derived and/or modified sequence
atgcccctgagcagatggctgagaagcgtgggcgtgttcctgctgcccgccccctactgggcccccagagagagatggctgggcagcctgagaagacccagcctggtgcacggctaccccgtgctggcctggcacagcgccagatgctggtgccaggcctggaccgaggagcccagagccctgtgcagcagcctgagaatgaacggcgaccagaacagcgacgtgtacgcccaggagaagcaggacttcgtgcagcacttcagccagatcgtgagagtgctgaccgaggacgagatgggccaccccgagatcggcgacgccatcgccagactgaaggaggtgctggagtacaacgccatcggcggcaagtacaacagaggcctgaccgtggtggtggccttcagagagctggtggagcccagaaagcaggacgccgacagcctgcagagagcctggaccgtgggctggtgcgtggagctgctgcaggccttcttcctggtggccgacgacatcatggacagcagcctgaccagaagaggccagatctgctggtaccagaagcccggcgtgggcctggacgccatcaacgacgccaacctgctggaggcctgcatctacagactgctgaagctgtactgcagagagcagccctactacctgaacctgatcgagctgttcctgcagagcagctaccagaccgagatcggccagaccctggacctgctgaccgccccccagggcaacgtggacctggtgagattcaccgagaagagatacaagagcatcgtgaagtacaagaccgccttctacagcttctacctgcccatcgccgccgccatgtacatggccggcatcgacggcgagaaggagcacgccaacgccaagaagatcctgctggagatgggcgagttcttccagatccaggacgactacctggacctgttcggcgaccccagcgtgaccggcaagatcggcaccgacatccaggacaacaagtgcagctggctggtggtgcagtgcctgcagagagccacccccgagcagtaccagatcctgaaggagaactacggccagaaggaggccgagaaggtggccagagtgaaggccctgtacgaggagctggacctgcccgccgtgttcctgcagtacgaggaggacagctacagccacatcatggccctgatcgagcagtacgccgcccccctgccccccgccgtgttcctgggcctggccagaaagatctacaagagaagaaagtag

SEQ ID NO: 51388 - protein, 353 aa, Artificial Sequence
  derived and/or modified sequence
MNGDQNSDVYAQEKQDFVQHFSQIVRVLTEDEMGHPEIGDAIARLKEVLEYNAIGGKYNRGLTVVVAFRELVEPRKQDADSLQRAWTVGWCVELLQAFFLVADDIMDSSLTRRGQICWYQKPGVGLDAINDANLLEACIYRLLKLYCREQPYYLNLIELFLQSSYQTEIGQTLDLLTAPQGNVDLVRFTEKRYKSIVKYKTAFYSFYLPIAAAMYMAGIDGEKEHANAKKILLEMGEFFQIQDDYLDLFGDPSVTGKIGTDIQDNKCSWLVVQCLQRATPEQYQILKENYGQKEAEKVARVKALYEELDLPAVFLQYEEDSYSHIMALIEQYAAPLPPAVFLGLARKIYKRRK

SEQ ID NO: 51389 - DNA, 1338 bp, Artificial Sequence
  derived and/or modified sequence
tcagcgcggctcatcttcgcccagccaggacacgcaggatcgcgttatctgtccctcccgcgggcacattgggagttgtagtctaattatatatttccgcccttagtgtggggagagcgggaactactcgacccacagagccgatcgcggagcggattctgcttttaggagtacccgccaacaagcgggaccgagcaggaatccgtatctgggaacagaatgaacggagaccagaattcagatgtttatgcccaagaaaagcaggatttcgttcagcacttctcccagatcgttagggtgctgactgaggatgagatggggcacccagagataggagatgctattgcccggctcaaggaggtcctggagtacaatgccattggaggcaagtataaccggggtttgacggtggtagtagcattccgggagctggtggagccaaggaaacaggatgctgatagtctccagcgggcctggactgtgggctggtgtgtggaactgctgcaagctttcttcctggtggcagatgacatcatggattcatcccttacccgccggggacagatctgctggtatcagaagccgggcgtgggtttggatgccatcaatgatgctaacctcctggaagcatgtatctaccgcctgctgaagctctattgccgggagcagccctattacctgaacctgatcgagctcttcctgcagagttcctatcagactgagattgggcagaccctggacctcctcacagccccccagggcaatgtggatcttgtcagattcactgaaaagaggtacaaatctattgtcaagtacaagacagctttctactccttctaccttcctatagctgcagccatgtacatggcaggaattgatggcgagaaggagcacgccaatgccaagaagatcctgctggagatgggggagttctttcagattcaggatgattaccttgacctctttggggaccccagtgtgaccggcaaaattggcactgacatccaggacaacaaatgcagctggctggtggttcagtgtctgcaacgggccactccagaacagtaccagatcctgaaggaaaattacgggcagaaggaggctgagaaagtggcccgggtgaaggcgctatatgaggagctggatctgccagcagtgttcttgcaatatgaggaagacagttacagccacattatggctctcattgaacagtacgcagcacccctgcccccagccgtctttctggggcttgcgcgcaaaatctacaagcggagaaagtgacctagagattgcaagggcggggagaggaggctctcaataaataatcgtgtaaccttc

SEQ ID NO: 51390 - DNA, 1062 bp, Artificial Sequence
  derived and/or modified sequence
atgaatggagatcagaatagtgatgtgtacgcgcaggaaaagcaagattttgtgcagcacttttcccagatcgttcgcgttttgacggaagatgagatgggccaccctgaaatcggcgatgctatcgcccggctcaaggaggtgctggagtataatgctattggtggcaaatacaacaggggtttgacagtggtggtggcctttcgcgagcttgtcgaacctaggaagcaggatgcggactctctacagagagcctggaccgttggctggtgcgttgagctgcttcaggcattcttcttagtggccgacgacataatggactcgtctctgacgcgccgcggccagatttgctggtaccaaaagcccggggtaggactcgacgctatcaatgacgcaaacctgttagaagcatgtatttatagactccttaagttatattgccgggagcagccctactacttgaacctgattgaacttttcctgcaatcatcataccagacagagattggtcaaaccctcgatttgttgaccgcaccacagggaaacgtggaccttgtgagattcaccgaaaaacgttacaaaagcattgtcaagtacaagactgcattctactctttttaccttcctatcgccgctgccatgtatatggctggcatcgatggggagaaagaacacgctaacgccaagaagatcctcctggaaatgggagagtttttccagatccaggacgattatctcgatttgttcggagatccatcagtgacagggaaaataggaactgacattcaggacaataaatgtagctggttagttgtgcagtgtctgcagcgggccacacctgagcaatatcagattcttaaggaaaattatgggcaaaaggaagccgagaaagtagcaagggtgaaagcgctctacgaagaactggatcttcctgcagtgtttcttcaatatgaggaagattcctacagccacatcatggccctgattgagcagtacgctgcccctctcccacccgcggtgttcctcgggttagctcggaaaatctataaaaggaggaagtag

SEQ ID NO: 51391 - DNA, 1062 bp, Artificial Sequence
  derived and/or modified sequence
atgaatggagaccagaacagtgatgtgtatgcccaggagaagcaggactttgtgcagcacttcagccagatcgtgcgggtgctgacagaagatgagatgggccaccctgagattggagatgccatcgcccggctgaaggaggtgctggagtacaatgccatcggcggcaagtacaacagaggcctgactgtggtggtggccttccgggagctggtggagcccaggaagcaggatgctgacagcctgcagagggcctggacagtgggctggtgtgtggagctgctgcaggccttcttcctggtggctgatgacatcatggacagcagcctgacccggcggggccagatctgctggtaccagaagccaggagtgggcctggatgccatcaatgatgccaacctgctggaggcctgcatctaccgcctgctgaagctgtactgccgggagcagccctactacctgaacctgattgagctgttcctgcagagcagctaccagacagaaattggccagaccctggacctgctgacagccccccagggcaatgtggacctggtgcgcttcacagagaagcgctacaagagcatcgtgaagtacaagacagccttctacagcttctacctgcccatcgccgccgccatgtacatggccggcattgatggagagaaggagcacgccaatgccaagaagatcctgctggagatgggagagttcttccagatccaggatgactacctggacctgtttggagaccccagcgtgacaggcaagattggaacagacatccaggacaacaagtgctcctggctggtggtgcagtgcctgcagagggccaccccagagcagtaccagatcctgaaggagaactacggccagaaggaggccgagaaggtggcccgggtgaaggccctgtatgaggagctggacctgcctgctgtgttcctgcagtatgaagaagattcctacagccacatcatggccctgattgagcagtatgctgcccccctgcccccagctgtgttcctgggcctggccaggaagatctacaagaggaggaagtag

SEQ ID NO: 51392 - DNA, 1062 bp, Artificial Sequence
  derived and/or modified sequence
atgaacggcgaccagaacagcgacgtgtacgcccaggagaagcaggacttcgttcagcacttctctcagatagtgagagtcctcacagaagacgagatggggcaccccgaaatcggggacgccatcgcaaggctgaaggaagtgctcgagtataacgcaataggaggcaaatacaatcgcgggctgacagtagtagtagccttcagggagctggtggagccaaggaagcaggatgcagactccctgcagcgggcttggactgtcggctggtgtgtcgaactccttcaggcctttttcctggttgctgacgatataatggatagcagcctcaccagacgaggccagatttgctggtatcagaagcctggggtgggcctagatgccataaatgacgccaacttactggaagcgtgcatttaccggctgcttaagctctactgcagagaacagccctattatttaaacttaattgagctgttcctccagtcatcctatcagactgagatcggtcagacattggatcttttgacagcgccacagggaaatgtggatctggtgagatttacagagaaacgctacaaaagtatcgtgaagtacaaaacggcattctattcattttacctgcccatcgctgccgccatgtacatggctgggatcgatggggaaaaggaacatgcaaatgccaaaaagattcttttggagatgggggaattcttccaaatccaggatgactatctcgacctgttcggggacccttctgtaacaggcaaaatcggcacggacatacaggacaataaatgctcctggctggtggtgcaatgcctgcagcgggccacccccgagcagtaccaaattctgaaagagaactacggacaaaaagaggctgaaaaggtggctagagtaaaggctttgtacgaagagctggatctcccggccgtgtttttgcagtacgaagaagacagctactcccacatcatggccctcatcgagcagtacgccgcgcctctgcccccggctgtgttcttggggcttgcccgcaaaatctacaaaaggcggaagtag

SEQ ID NO: 51393 - DNA, 1062 bp, Artificial Sequence
  derived and/or modified sequence
atgaacggtgaccagaattccgacgtatatgcacaggaaaagcaggactttgtgcaacactttagtcaaatcgtgagagtgctcactgaagacgagatggggcacccggagattggcgacgcaatcgccagactcaaagaggttctggaatacaatgcgataggtgggaagtacaatcgcggattaaccgtcgtcgttgcattcagggaactagtcgagcctcggaagcaagatgccgacagcctgcagagagcttggaccgtggggtggtgtgtggagctgctgcaggcctttttcctcgttgccgacgacatcatggactctagtctcacccggagggggcagatctgctggtatcagaagcctggggttggccttgacgcaataaacgacgctaacctgctcgaagcttgcatctatcggcttctcaagttatattgtagagaacagccatactacctgaacctgatcgaactgttcttacaaagcagttatcagaccgaaattggtcaaactcttgatctcttaaccgctccccaaggaaatgttgatctggtgcggtttaccgagaagcgatataagtcaatcgtcaaatataagacggcattttactccttctatctgccaattgctgccgcaatgtatatggcgggaatagatggcgagaaagaacacgctaatgccaaaaagatcttactggagatgggagagttctttcagattcaggacgattacctggatctgttcggtgacccatcagtgacaggcaagatcggcacagacatccaggacaataagtgcagctggctcgtcgtgcaatgtctgcagcgcgctacaccagagcaatatcaaatcctcaaggagaactatggacaaaaagaggccgagaaggtggccagggtcaaagctctctatgaagagctagatctacccgctgtctttttgcaatatgaggaagattcatactcacatatcatggctctgatcgagcagtatgcggcacccctgccacccgctgtatttctcggcctggctagaaagatttataagagaagaaaatag

SEQ ID NO: 51394 - DNA, 1062 bp, Artificial Sequence
  derived and/or modified sequence
atgaacggcgaccagaacagcgacgtgtacgcccaggagaagcaggacttcgtgcagcacttcagccagatcgtgagagtgctgaccgaggacgagatgggccaccccgagatcggcgacgccatcgccagactgaaggaggtgctggagtacaacgccatcggcggcaagtacaacagaggcctgaccgtggtggtggccttcagagagctggtggagcccagaaagcaggacgccgacagcctgcagagagcctggaccgtgggctggtgcgtggagctgctgcaggccttcttcctggtggccgacgacatcatggacagcagcctgaccagaagaggccagatctgctggtaccagaagcccggcgtgggcctggacgccatcaacgacgccaacctgctggaggcctgcatctacagactgctgaagctgtactgcagagagcagccctactacctgaacctgatcgagctgttcctgcagagcagctaccagaccgagatcggccagaccctggacctgctgaccgccccccagggcaacgtggacctggtgagattcaccgagaagagatacaagagcatcgtgaagtacaagaccgccttctacagcttctacctgcccatcgccgccgccatgtacatggccggcatcgacggcgagaaggagcacgccaacgccaagaagatcctgctggagatgggcgagttcttccagatccaggacgactacctggacctgttcggcgaccccagcgtgaccggcaagatcggcaccgacatccaggacaacaagtgcagctggctggtggtgcagtgcctgcagagagccacccccgagcagtaccagatcctgaaggagaactacggccagaaggaggccgagaaggtggccagagtgaaggccctgtacgaggagctggacctgcccgccgtgttcctgcagtacgaggaggacagctacagccacatcatggccctgatcgagcagtacgccgcccccctgccccccgccgtgttcctgggcctggccagaaagatctacaagagaagaaagtag

SEQ ID NO: 51395 - protein, 124 aa, Artificial Sequence
  derived and/or modified sequence
MAVADLALIPDVDIDSDGVFKYVLIRVHSAPRSGAPAAESKEIVRGYKWAEYHADIYDKVSGDMQKQGCDCECLGGGRISHQSQDKKIHVYGYSMMRPTCVPLGASGPRIHHQGLWSCPARHFN

SEQ ID NO: 51396 - DNA, 375 bp, Artificial Sequence
  derived and/or modified sequence
atggcggtggcggacctggcactgattcccgacgtggacattgacagtgacggcgtgtttaaatacgtgctaatccgggtgcattccgctcctagatctggggcccctgcagccgagagtaaagaaatagtccggggttataaatgggccgagtatcatgcagatatttatgataaggtgagtggggatatgcaaaaacagggttgtgactgcgaatgcctgggaggagggcgaatttcacatcagtctcaggacaaaaaaatccatgtctacggctacagcatgatgagacccacatgcgtcccgcttggtgcgtcaggccccaggatccaccaccagggcctttggagctgcccagcccgccattttaattag

SEQ ID NO: 51397 - DNA, 375 bp, Artificial Sequence
  derived and/or modified sequence
atggcagtagctgatctagctctgattcccgatgtggacatcgactccgacggtgtgtttaagtacgttctcattagagtgcattctgccccgagatcaggagctcccgctgccgagagcaaggagattgtccgtgggtacaaatgggctgaataccatgccgatatctatgacaaagtgtctggcgatatgcagaagcaaggttgcgattgtgaatgcttgggcggaggaagaatttcccaccaatctcaggacaagaaaattcatgtctacggatatagtatgatgaggccaacatgcgtgcccctcggggctagcgggccacggatacaccaccagggactgtggtcttgccctgcacgacatttcaattag

SEQ ID NO: 51398 - DNA, 375 bp, Artificial Sequence
  derived and/or modified sequence
atggctgtggccgacctggccctgatcccagatgtggacatcgacagtgatggagtcttcaagtatgtgctgatccgggtgcacagcgcccccaggtctggggccccagctgctgagagcaaggagatcgtgcggggctacaagtgggccgagtaccacgccgacatctatgacaaggtgtctggggacatgcagaagcagggctgtgactgtgagtgcctgggcggcggccgcatcagccaccagagccaggacaagaagatccacgtgtatggctacagcatgatgaggcccacctgtgtgcccctgggcgccagcggcccccgcatccaccaccagggcctgtggagctgcccagcccggcacttcaactag

SEQ ID NO: 51399 - DNA, 375 bp, Artificial Sequence
  derived and/or modified sequence
atggccgtggccgacctggccctgatccccgacgtggacatcgactcagacggggtgttcaaatatgtcctgattcgcgtccacagtgcacccaggtctggcgcgcccgccgccgagtcaaaggaaatcgtccgcgggtacaaatgggccgaataccatgccgatatatacgataaggtctccggagacatgcaaaagcaagggtgcgattgcgagtgcctgggtggaggacgaattagccaccaatcacaggataaaaaaattcacgtctacgggtatagtatgatgcgacctacatgcgttccactgggagcgagcggacctcgcatccatcatcagggactttggtcttgccccgcgagacattttaactag

SEQ ID NO: 51400 - DNA, 375 bp, Artificial Sequence
  derived and/or modified sequence
atggccgtggccgacctggccctgatccccgacgtggacatcgacagtgatggggttttcaagtacgtgttaattagggtgcacagcgctcctagatctggggctcctgccgctgaatccaaggagatcgtcaggggatacaagtgggcagagtaccatgccgatatctatgacaaggtgagcggtgatatgcaaaaacagggatgtgattgcgaatgcctcggcggtggtaggatctcccaccaaagccaggacaaaaaaatccacgtctatggctattctatgatgagaccaacatgcgttccactcggtgcctcaggcccccggatccaccaccagggcctctggagttgccctgccaggcattttaactag

SEQ ID NO: 51401 - DNA, 985 bp, Artificial Sequence
  derived and/or modified sequence
ggccgggaacgcccctggaccggaataatttccagggggcaagagctttcgaaccaacctcgcgggccgcctaactgccccgttccaagggtgccaccggaccccgctggagaggaacttctccgttggctggatttcatcaccacccattcccgattccacgtttcctttaagcggggctggcggagccgcaaggcggcaaggaactggattgcgattggtcagcacgtgcctcggtcggcggtacaattggctgaggcgctgggccttgggaagcattccccgacgggattggtcgtcgctctcgcagagcccgcctcccgcagtacaagcggcccccgggtcgggtgggaggaggggactccgggaggaggaacatggcggtggcggacctcgctctcattcctgatgtggacatcgactccgacggcgtcttcaagtatgtgctgatccgagtccactcggctccccgctccggggctccggctgcagagagcaaggagatcgtgcgcggctacaagtgggctgagtaccatgcggacatctacgacaaagtgtcgggcgacatgcagaagcaaggctgcgactgtgagtgtctgggcggcgggcgcatctcccaccagagtcaggacaagaagattcacgtgtacggctattccatgatgagacccacgtgcgtccctctgggcgcctcaggccccaggatccaccatcaaggcctatggtcctgcccagcacgccatttcaactgagaaaatcaaagccaagtaccccgactacgaggtcacctgggctaacgacggctactgagcactcccagcccggggcctgctgcctccagcagccacttcagagcccccgcctttgcctgcactcctcttgcagggctggccctgcctgctcctgcggcagcctctggtgacgtgctgtccaccaggccttggagacaggctagcctggccacagaattaaacgtgttgccaca

SEQ ID NO: 51402 - DNA, 1249 bp, Artificial Sequence
  derived and/or modified sequence
ggctgccgttgcctccttgtaccggtagcggggttggggacggaagccttcggtcggtggagaggagaaagggagaggccttcgggcggtggacggggaagagagggagtccttcgggcggtggagggggtggagagcgaggccttcgggcggtggagagcggggaggggggaggccttcgggcggtgggagggggagagagggaggcctttgggcggtgggggccacggggagggtggtcttcggactacgtgcgggacaggaggtcagggctggcaagtccctcaggcctccctcgttgccccagcctcgcgggccgcctaactgccccgttccaagggtgccaccggaccccgctggagaggaacttctccgttggctggatttcatcaccacccattcccgattccacgtttcctttaagcggggctggcggagccgcaaggcggcaaggaactggattgcgattggtcagcacgtgcctcggtcggcggtacaattggctgaggcgctgggccttgggaagcattccccgacgggattggtcgtcgctctcgcagagcccgcctcccgcagtacaagcggcccccgggtcgggtgggaggaggggactccgggaggaggaacatggcggtggcggacctcgctctcattcctgatgtggacatcgactccgacggcgtcttcaagtatgtgctgatccgagtccactcggctccccgctccggggctccggctgcagagagcaaggagatcgtgcgcggctacaagtgggctgagtaccatgcggacatctacgacaaagtgtcgggcgacatgcagaagcaaggctgcgactgtgagtgtctgggcggcgggcgcatctcccaccagagtcaggacaagaagattcacgtgtacggctattccatgatgagacccacgtgcgtccctctgggcgcctcaggccccaggatccaccatcaaggcctatggtcctgcccagcacgccatttcaactgagaaaatcaaagccaagtaccccgactacgaggtcacctgggctaacgacggctactgagcactcccagcccggggcctgctgcctccagcagccacttcagagcccccgcctttgcctgcactcctcttgcagggctggccctgcctgctcctgcggcagcctctggtgacgtgctgtccaccaggccttggagacaggctagcctggccacagaattaaacgtgttgccacacctgccggcttctg

SEQ ID NO: 51403 - DNA, 375 bp, Artificial Sequence
  derived and/or modified sequence
atggccgtagctgatcttgcccttatccctgatgtagacatcgacagtgatggcgtgttcaagtacgtgttgatccgagtacactccgcacccagaagcggggctcccgctgccgaaagcaaagaaatagtacggggatataagtgggcagagtatcatgccgacatctacgacaaagtgtcaggagatatgcaaaagcaaggctgcgattgtgaatgtctcgggggaggaaggattagccaccagtcacaggacaaaaaaatccatgtgtacgggtattctatgatgaggcccacttgcgtgcccttgggggctagtggaccacggattcaccaccagggactgtggtcctgtccagcgagacactttaactag

SEQ ID NO: 51404 - DNA, 375 bp, Artificial Sequence
  derived and/or modified sequence
atggcggtggcggatcttgctctgatccccgacgttgacatagatagtgacggggttttcaagtatgtgctgatccgcgtgcatagcgccccaaggtccggcgcacctgcggcagagagcaaggagattgtgaggggatataagtgggccgagtatcacgctgacatctacgacaaggttagcggggacatgcagaaacaggggtgtgactgcgagtgtctgggcggaggaagaatttcccatcaatcacaggataaaaaaatacacgtatatggctactctatgatgcgcccaacatgcgtgcccttgggcgcaagcgggccaagaattcaccatcagggcctgtggtcctgtcctgccaggcactttaattag

SEQ ID NO: 51405 - DNA, 375 bp, Artificial Sequence
  derived and/or modified sequence
atggccgtggccgacctggccctgatccccgacgtggacatcgacagcgacggcgtgttcaagtacgtgctgatcagagtgcacagcgcccccagaagcggcgcccccgccgccgagagcaaggagatcgtgagaggctacaagtgggccgagtaccacgccgacatctacgacaaggtgagcggcgacatgcagaagcagggctgcgactgcgagtgcctgggcggcggcagaatcagccaccagagccaggacaagaagatccacgtgtacggctacagcatgatgagacccacctgcgtgcccctgggcgccagcggccccagaatccaccaccagggcctgtggagctgccccgccagacacttcaactag

SEQ ID NO: 51406 - protein, 173 aa, Artificial Sequence
  derived and/or modified sequence
MLLAWVQAFLVSNMLLAEAYGSGGCFWDNGHLYREDQTSPAPGLRCLNWLDAQSGLASAPVSGAGNHSYCRNPDEDPRGPWCYVSGEAGVPEKRPCEDLRCPETTSQALPAFTTEIQEASEGPGADEVQVFAPANALPARSEAAAVQPVIGISQRVRMNSKEKKDLGTLGGRI

SEQ ID NO: 51407 - DNA, 522 bp, Artificial Sequence
  derived and/or modified sequence
atgctgctggcctgggtgcaggccttcctggtgagcaacatgctgctggccgaggcctacggcagcggcggctgcttctgggacaacggccacctgtacagagaggaccagaccagccccgcccccggcctgagatgcctgaactggctggacgcccagagcggcctggccagcgcccccgtgagcggcgccggcaaccacagctactgcagaaaccccgacgaggaccccagaggcccctggtgctacgtgagcggcgaggccggcgtgcccgagaagagaccctgcgaggacctgagatgccccgagaccaccagccaggccctgcccgccttcaccaccgagatccaggaggccagcgagggccccggcgccgacgaggtgcaggtgttcgcccccgccaacgccctgcccgccagaagcgaggccgccgccgtgcagcccgtgatcggcatcagccagagagtgagaatgaacagcaaggagaagaaggacctgggcaccctgggcggcagaatctag

SEQ ID NO: 51408 - DNA, 522 bp, Artificial Sequence
  derived and/or modified sequence
atgctgctggcatgggtccaggcttttttagtatcaaatatgttattggctgaggcctatggttctggtggctgtttctgggacaacggccacctgtacagagaggatcagacgtcccccgcccccggacttcgctgtctgaattggctggacgctcagagtggtttggcctccgcccctgtctcgggagctggaaaccacagttactgcagaaaccctgatgaggacccaaggggaccttggtgctacgtgtctggcgaggccggggtcccggagaaaaggccctgcgaggatctcaggtgccctgaaacaaccagtcaggcccttccagcatttactaccgaaatccaggaggcttcagaaggacccggtgctgacgaagttcaggttttcgcaccagctaatgccctaccggctcggtcggaggcagccgcagtacagccagtgatcgggattagccagagggtccggatgaattccaaggaaaagaaagatttaggcaccctcggaggacggatctag

SEQ ID NO: 51409 - DNA, 522 bp, Artificial Sequence
  derived and/or modified sequence
atgctgctggcctgggtgcaggccttcctggtgagcaacatgctgctggccgaggcctacggcagcggcggctgcttctgggacaatggccacctgtaccgggaggaccagaccagccctgcccctggcctgcgctgcctgaactggctggatgcccagagcggcctggccagcgcccctgtgtctggggccggcaaccacagctactgcagaaatccagatgaggacccccggggcccctggtgctacgtgtctggagaggccggcgtgcctgagaagaggccctgtgaggacctgcgctgcccagagaccaccagccaggccctgcctgccttcaccacagagatccaggaggccagcgagggccctggagcagatgaggtgcaggtgtttgccccagccaatgccctgcctgcccggtctgaggccgctgctgtgcagcccgtcatcggcatcagccagagggtgaggatgaacagcaaggagaagaaggacctgggcaccctgggcggccgcatctag

SEQ ID NO: 51410 - DNA, 522 bp, Artificial Sequence
  derived and/or modified sequence
atgctgctggcctgggtgcaggccttcctggtgagcaacatgctgctggccgaggcttatggcagcgggggatgtttctgggataacggccatctctatcgggaggaccagacctccccagctcctggattaagatgtcttaactggttagatgcccaatctggtttagcctctgcacccgtgagcggcgccggtaaccactcctattgccggaacccagacgaggatccaagaggaccctggtgttatgttagtggggaagcgggggttccggaaaaaaggccatgtgaggatcttcggtgcccagaaacaaccagtcaggccttgcctgcattcacaacagagatccaggaggcctcggagggaccaggcgcggatgaagttcaggtttttgctccagccaatgccttgcctgctcggtctgaggctgctgcggtccagccagtgatcgggatctctcagagggtccgaatgaattcgaaagagaagaaggacctgggtacactaggtggccgcatatag

SEQ ID NO: 51411 - DNA, 522 bp, Artificial Sequence
  derived and/or modified sequence
atgttacttgcatgggtgcaggcctttctagtgagcaacatgctgctcgcagaagcgtatggttctggagggtgcttctgggataatggtcacctctaccgggaggaccagactagtcccgctcccggactaagatgcttaaactggctggacgcccagtccggcctggcttctgcccctgtcagtggagccggtaaccacagttattgtagaaatcccgatgaggatcctcggggtccctggtgttatgttagtggcgaggcaggggtgccagagaaacgaccctgtgaagatctccgttgccctgaaacgacatcccaggcgctgccagcttttacgactgagatccaggaagcctccgaggggccaggagccgatgaggttcaggtttttgcacccgcaaacgcactgcctgcgagaagcgaagcagcggcagtccagccggtaattggaattagtcagcgtgtgcgcatgaatagtaaagaaaagaaggatctggggacattaggaggccgaatttag

SEQ ID NO: 51412 - protein, 1165 aa, Artificial Sequence
  derived and/or modified sequence
MYFLSGWPKRLLCPLGSPAEAPFHVQSDPQRAFFAVLAAARLSIWYSRPSVLIVTYKEPAKSSTQFGSYKQAEWRPDSTMIAVSTANGYILFFHITSTRGDKYLYEPVYPKGSPQMKGTPHFKEEQCAPALNLEMRKILDLQAPIMSLQSVLEDLLVATSDGLLHLIHWEGMTNGRKAINLCTVPFSVDLQSSRVGSFLGFTDVHIRDMEYCATLDGFAVVFNDGKVGFITPVSSRFTAEQLHGVWPQDVVDGTCVAVNNKYRLMAFGCVSGSVQVYTIDNSTGAMLLSHKLELTAKQYPDIWNKTGAVKLMRWSPDNSVVIVTWEYGGLSLWSVFGAQLICTLGGDFAYRSDGTKKDPLKINSMSWGAEGYHLWVISGFGSQNTEIESDLRSVVKQPSILLFQFIKSVLTVNPCMSNQEQVLLQGEDRLYLNCGEASQTQNPRSSSTHSEHKPSREKSPFADGGLESQGLSTLLGHRHWHVVQISSTYLESNWPIRFSAIDKLGQNIAVVGKFGFAHYSLLTKKWKLFGNITQEQNMIVTGGLAWWNDFMVLACYNINDRQEELRVYLRTSNLDNAFAHVTKAQAETLLLSVFQDMVIVFRADCSICLYSIERKSDGPNTTAGIQVLQEVSMSRYIPHPFLVVSVTLTSVSTENGITLKMPQQARGAESIMLNLAGQLIMMQRDRSGPQIREKDSNPNNQRKLLPFCPPVVLAQSVENVWTTCRANKQKRHLLEALWLSCGGAGMKVWLPLFPRDHRKPHSFLSQRIMLPFHINIYPLAVLFEDALVLGAVNDTLLYDSLYTRNNAREQLEVLFPFCVVERTSQIYLHHILRQLLVRNLGEQALLLAQSCATLPYFPHVLELMLHEVLEEEATSREPIPDPLLPTVAKFITEFPLFLQTVVHCARKTEYALWNYLFAAVGNPKDLFEECLMAQDLDTAASYLIILQNMEVPAVSRQHATLLFNTALEQGKWDLCRHMIRFLKAIGSGESETPPSTPTAQEPSSSGGFEFFRNRSISLSQSAENVPASKFSLQKTLSMPSGPSGKRWSKDSDCAENMYIDMMLWRHARRLLEDVRLKDLGCFAAQLGFELISWLCKERTRAARVDNFVIALKRLHKDFLWPLPIIPASSISSPFKNGKYRTGNVDFMSLVQGELYFTPCIYTFCY

SEQ ID NO: 51413 - protein, 1086 aa, Artificial Sequence
  derived and/or modified sequence
MIAVSTANGYILFFHITSTRGDKYLYEPVYPKGSPQMKGTPHFKEEQCAPALNLEMRKILDLQAPIMSLQSVLEDLLVATSDGLLHLIHWEGMTNGRKAINLCTVPFSVDLQSSRVGSFLGFTDVHIRDMEYCATLDGFAVVFNDGKVGFITPVSSRFTAEQLHGVWPQDVVDGTCVAVNNKYRLMAFGCVSGSVQVYTIDNSTGAMLLSHKLELTAKQYPDIWNKTGAVKLMRWSPDNSVVIVTWEYGGLSLWSVFGAQLICTLGGDFAYRSDGTKKDPLKINSMSWGAEGYHLWVISGFGSQNTEIESDLRSVVKQPSILLFQFIKSVLTVNPCMSNQEQVLLQGEDRLYLNCGEASQTQNPRSSSTHSEHKPSREKSPFADGGLESQGLSTLLGHRHWHVVQISSTYLESNWPIRFSAIDKLGQNIAVVGKFGFAHYSLLTKKWKLFGNITQEQNMIVTGGLAWWNDFMVLACYNINDRQEELRVYLRTSNLDNAFAHVTKAQAETLLLSVFQDMVIVFRADCSICLYSIERKSDGPNTTAGIQVLQEVSMSRYIPHPFLVVSVTLTSVSTENGITLKMPQQARGAESIMLNLAGQLIMMQRDRSGPQIREKDSNPNNQRKLLPFCPPVVLAQSVENVWTTCRANKQKRHLLEALWLSCGGAGMKVWLPLFPRDHRKPHSFLSQRIMLPFHINIYPLAVLFEDALVLGAVNDTLLYDSLYTRNNAREQLEVLFPFCVVERTSQIYLHHILRQLLVRNLGEQALLLAQSCATLPYFPHVLELMLHEVLEEEATSREPIPDPLLPTVAKFITEFPLFLQTVVHCARKTEYALWNYLFAAVGNPKDLFEECLMAQDLDTAASYLIILQNMEVPAVSRQHATLLFNTALEQGKWDLCRHMIRFLKAIGSGESETPPSTPTAQEPSSSGGFEFFRNRSISLSQSAENVPASKFSLQKTLSMPSGPSGKRWSKDSDCAENMYIDMMLWRHARRLLEDVRLKDLGCFAAQLGFELISWLCKERTRAARVDNFVIALKRLHKDFLWPLPIIPASSISSPFKNGKYRTGNVDFMSLVQGELYFTPCIYTFCY

SEQ ID NO: 51414 - DNA, 3498 bp, Artificial Sequence
  derived and/or modified sequence
atgtacttcctgagcggctggcccaagagactgctgtgccccctgggcagccccgccgaggcccccttccacgtgcagagcgacccccagagagccttcttcgccgtgctggccgccgccagactgagcatctggtacagcagacccagcgtgctgatcgtgacctacaaggagcccgccaagagcagcacccagttcggcagctacaagcaggccgagtggagacccgacagcaccatgatcgccgtgagcaccgccaacggctacatcctgttcttccacatcaccagcaccagaggcgacaagtacctgtacgagcccgtgtaccccaagggcagcccccagatgaagggcaccccccacttcaaggaggagcagtgcgcccccgccctgaacctggagatgagaaagatcctggacctgcaggcccccatcatgagcctgcagagcgtgctggaggacctgctggtggccaccagcgacggcctgctgcacctgatccactgggagggcatgaccaacggcagaaaggccatcaacctgtgcaccgtgcccttcagcgtggacctgcagagcagcagagtgggcagcttcctgggcttcaccgacgtgcacatcagagacatggagtactgcgccaccctggacggcttcgccgtggtgttcaacgacggcaaggtgggcttcatcacccccgtgagcagcagattcaccgccgagcagctgcacggcgtgtggccccaggacgtggtggacggcacctgcgtggccgtgaacaacaagtacagactgatggccttcggctgcgtgagcggcagcgtgcaggtgtacaccatcgacaacagcaccggcgccatgctgctgagccacaagctggagctgaccgccaagcagtaccccgacatctggaacaagaccggcgccgtgaagctgatgagatggagccccgacaacagcgtggtgatcgtgacctgggagtacggcggcctgagcctgtggagcgtgttcggcgcccagctgatctgcaccctgggcggcgacttcgcctacagaagcgacggcaccaagaaggaccccctgaagatcaacagcatgagctggggcgccgagggctaccacctgtgggtgatcagcggcttcggcagccagaacaccgagatcgagagcgacctgagaagcgtggtgaagcagcccagcatcctgctgttccagttcatcaagagcgtgctgaccgtgaacccctgcatgagcaaccaggagcaggtgctgctgcagggcgaggacagactgtacctgaactgcggcgaggccagccagacccagaaccccagaagcagcagcacccacagcgagcacaagcccagcagagagaagagccccttcgccgacggcggcctggagagccagggcctgagcaccctgctgggccacagacactggcacgtggtgcagatcagcagcacctacctggagagcaactggcccatcagattcagcgccatcgacaagctgggccagaacatcgccgtggtgggcaagttcggcttcgcccactacagcctgctgaccaagaagtggaagctgttcggcaacatcacccaggagcagaacatgatcgtgaccggcggcctggcctggtggaacgacttcatggtgctggcctgctacaacatcaacgacagacaggaggagctgagagtgtacctgagaaccagcaacctggacaacgccttcgcccacgtgaccaaggcccaggccgagaccctgctgctgagcgtgttccaggacatggtgatcgtgttcagagccgactgcagcatctgcctgtacagcatcgagagaaagagcgacggccccaacaccaccgccggcatccaggtgctgcaggaggtgagcatgagcagatacatcccccaccccttcctggtggtgagcgtgaccctgaccagcgtgagcaccgagaacggcatcaccctgaagatgccccagcaggccagaggcgccgagagcatcatgctgaacctggccggccagctgatcatgatgcagagagacagaagcggcccccagatcagagagaaggacagcaaccccaacaaccagagaaagctgctgcccttctgcccccccgtggtgctggcccagagcgtggagaacgtgtggaccacctgcagagccaacaagcagaagagacacctgctggaggccctgtggctgagctgcggcggcgccggcatgaaggtgtggctgcccctgttccccagagaccacagaaagccccacagcttcctgagccagagaatcatgctgcccttccacatcaacatctaccccctggccgtgctgttcgaggacgccctggtgctgggcgccgtgaacgacaccctgctgtacgacagcctgtacaccagaaacaacgccagagagcagctggaggtgctgttccccttctgcgtggtggagagaaccagccagatctacctgcaccacatcctgagacagctgctggtgagaaacctgggcgagcaggccctgctgctggcccagagctgcgccaccctgccctacttcccccacgtgctggagctgatgctgcacgaggtgctggaggaggaggccaccagcagagagcccatccccgaccccctgctgcccaccgtggccaagttcatcaccgagttccccctgttcctgcagaccgtggtgcactgcgccagaaagaccgagtacgccctgtggaactacctgttcgccgccgtgggcaaccccaaggacctgttcgaggagtgcctgatggcccaggacctggacaccgccgccagctacctgatcatcctgcagaacatggaggtgcccgccgtgagcagacagcacgccaccctgctgttcaacaccgccctggagcagggcaagtgggacctgtgcagacacatgatcagattcctgaaggccatcggcagcggcgagagcgagaccccccccagcacccccaccgcccaggagcccagcagcagcggcggcttcgagttcttcagaaacagaagcatcagcctgagccagagcgccgagaacgtgcccgccagcaagttcagcctgcagaagaccctgagcatgcccagcggccccagcggcaagagatggagcaaggacagcgactgcgccgagaacatgtacatcgacatgatgctgtggagacacgccagaagactgctggaggacgtgagactgaaggacctgggctgcttcgccgcccagctgggcttcgagctgatcagctggctgtgcaaggagagaaccagagccgccagagtggacaacttcgtgatcgccctgaagagactgcacaaggacttcctgtggcccctgcccatcatccccgccagcagcatcagcagccccttcaagaacggcaagtacagaaccggcaacgtggacttcatgagcctggtgcagggcgagctgtacttcaccccctgcatctacaccttctgctactag

SEQ ID NO: 51415 - DNA, 3261 bp, Artificial Sequence
  derived and/or modified sequence
atgatcgccgtgagcaccgccaacggctacatcctgttcttccacatcaccagcaccagaggcgacaagtacctgtacgagcccgtgtaccccaagggcagcccccagatgaagggcaccccccacttcaaggaggagcagtgcgcccccgccctgaacctggagatgagaaagatcctggacctgcaggcccccatcatgagcctgcagagcgtgctggaggacctgctggtggccaccagcgacggcctgctgcacctgatccactgggagggcatgaccaacggcagaaaggccatcaacctgtgcaccgtgcccttcagcgtggacctgcagagcagcagagtgggcagcttcctgggcttcaccgacgtgcacatcagagacatggagtactgcgccaccctggacggcttcgccgtggtgttcaacgacggcaaggtgggcttcatcacccccgtgagcagcagattcaccgccgagcagctgcacggcgtgtggccccaggacgtggtggacggcacctgcgtggccgtgaacaacaagtacagactgatggccttcggctgcgtgagcggcagcgtgcaggtgtacaccatcgacaacagcaccggcgccatgctgctgagccacaagctggagctgaccgccaagcagtaccccgacatctggaacaagaccggcgccgtgaagctgatgagatggagccccgacaacagcgtggtgatcgtgacctgggagtacggcggcctgagcctgtggagcgtgttcggcgcccagctgatctgcaccctgggcggcgacttcgcctacagaagcgacggcaccaagaaggaccccctgaagatcaacagcatgagctggggcgccgagggctaccacctgtgggtgatcagcggcttcggcagccagaacaccgagatcgagagcgacctgagaagcgtggtgaagcagcccagcatcctgctgttccagttcatcaagagcgtgctgaccgtgaacccctgcatgagcaaccaggagcaggtgctgctgcagggcgaggacagactgtacctgaactgcggcgaggccagccagacccagaaccccagaagcagcagcacccacagcgagcacaagcccagcagagagaagagccccttcgccgacggcggcctggagagccagggcctgagcaccctgctgggccacagacactggcacgtggtgcagatcagcagcacctacctggagagcaactggcccatcagattcagcgccatcgacaagctgggccagaacatcgccgtggtgggcaagttcggcttcgcccactacagcctgctgaccaagaagtggaagctgttcggcaacatcacccaggagcagaacatgatcgtgaccggcggcctggcctggtggaacgacttcatggtgctggcctgctacaacatcaacgacagacaggaggagctgagagtgtacctgagaaccagcaacctggacaacgccttcgcccacgtgaccaaggcccaggccgagaccctgctgctgagcgtgttccaggacatggtgatcgtgttcagagccgactgcagcatctgcctgtacagcatcgagagaaagagcgacggccccaacaccaccgccggcatccaggtgctgcaggaggtgagcatgagcagatacatcccccaccccttcctggtggtgagcgtgaccctgaccagcgtgagcaccgagaacggcatcaccctgaagatgccccagcaggccagaggcgccgagagcatcatgctgaacctggccggccagctgatcatgatgcagagagacagaagcggcccccagatcagagagaaggacagcaaccccaacaaccagagaaagctgctgcccttctgcccccccgtggtgctggcccagagcgtggagaacgtgtggaccacctgcagagccaacaagcagaagagacacctgctggaggccctgtggctgagctgcggcggcgccggcatgaaggtgtggctgcccctgttccccagagaccacagaaagccccacagcttcctgagccagagaatcatgctgcccttccacatcaacatctaccccctggccgtgctgttcgaggacgccctggtgctgggcgccgtgaacgacaccctgctgtacgacagcctgtacaccagaaacaacgccagagagcagctggaggtgctgttccccttctgcgtggtggagagaaccagccagatctacctgcaccacatcctgagacagctgctggtgagaaacctgggcgagcaggccctgctgctggcccagagctgcgccaccctgccctacttcccccacgtgctggagctgatgctgcacgaggtgctggaggaggaggccaccagcagagagcccatccccgaccccctgctgcccaccgtggccaagttcatcaccgagttccccctgttcctgcagaccgtggtgcactgcgccagaaagaccgagtacgccctgtggaactacctgttcgccgccgtgggcaaccccaaggacctgttcgaggagtgcctgatggcccaggacctggacaccgccgccagctacctgatcatcctgcagaacatggaggtgcccgccgtgagcagacagcacgccaccctgctgttcaacaccgccctggagcagggcaagtgggacctgtgcagacacatgatcagattcctgaaggccatcggcagcggcgagagcgagaccccccccagcacccccaccgcccaggagcccagcagcagcggcggcttcgagttcttcagaaacagaagcatcagcctgagccagagcgccgagaacgtgcccgccagcaagttcagcctgcagaagaccctgagcatgcccagcggccccagcggcaagagatggagcaaggacagcgactgcgccgagaacatgtacatcgacatgatgctgtggagacacgccagaagactgctggaggacgtgagactgaaggacctgggctgcttcgccgcccagctgggcttcgagctgatcagctggctgtgcaaggagagaaccagagccgccagagtggacaacttcgtgatcgccctgaagagactgcacaaggacttcctgtggcccctgcccatcatccccgccagcagcatcagcagccccttcaagaacggcaagtacagaaccggcaacgtggacttcatgagcctggtgcagggcgagctgtacttcaccccctgcatctacaccttctgctactag

SEQ ID NO: 51416 - DNA, 3498 bp, Artificial Sequence
  derived and/or modified sequence
atgtatttcctgtccgggtggcctaagcggcttctgtgcccactaggatcgcccgccgaagccccttttcacgtccagtcagacccccagagggcctttttcgccgttcttgcagccgcacgactttccatttggtactcccgcccctctgtgctcattgttacttacaaagagcctgccaagagttccactcaattcggctcatacaagcaagccgagtggcggccagattccactatgatcgcggtaagcacagccaacggctatatcctgttttttcatatcacatccacccggggcgataagtacttatatgaaccagtttatcctaaaggctccccccaaatgaaaggaaccccccacttcaaagaggaacagtgtgcaccagccctgaatcttgagatgaggaagatcctggacttgcaggctcccattatgagcctccagagtgtgctggaagacctgcttgttgctacatccgacgggctcctccatctgattcactgggagggaatgaccaacggacgaaaagctatcaacctctgtacagttccgtttagtgtggatttacaatccagccgcgtcggaagttttctggggttcaccgatgtgcatattagggatatggaatactgtgccaccttggacgggtttgctgttgtctttaatgacgggaaggttgggttcattactcctgtttcctctcggtttacagctgaacaacttcacggggtgtggccccaggatgtggtcgacggtacctgcgtcgcggtgaataacaagtaccggctgatggcctttggctgtgtatcaggatctgtgcaagtctatacgatcgacaatagcactggcgccatgttgcttagtcacaaacttgagctaactgccaaacagtatcctgacatttggaataaaaccggggccgtcaagctgatgcgctggtcaccagataattctgtggtgatcgtcacctgggagtacggcggactttcgctctggagcgtgttcggggctcagctgatttgcaccctgggtggtgattttgcctacagaagtgatgggacaaaaaaggaccctctgaaaatcaactccatgtcttggggtgccgaggggtatcacctgtgggtgatctccgggttcggctctcagaacacagagatcgagtcagacttgagaagcgtcgtaaagcagcccagcatcctactcttccagttcattaagtcagtgcttaccgtcaacccttgcatgagcaaccaggaacaggttctcctccagggcgaagatagactttatctcaactgtggagaagcttctcagacacagaaccctcggagcagttctacacacagcgagcataagccgtcccgtgagaaatcccccttcgcagatggagggcttgagagccaaggcctgtccactttgctgggccatcgtcattggcatgtcgtgcagatttcatccacctatttggagtctaattggccaatccggttctcagcgattgacaagttgggccagaatatcgccgtagtggggaaattcggcttcgcacattatagtctgctgacaaagaaatggaaattgtttggcaatattacccaggagcagaatatgatcgtcaccggtggactcgcatggtggaatgatttcatggtacttgcctgttacaatattaatgataggcaagaggagctcagggtctatctccgaaccagtaatctggataacgcctttgcccacgtgaccaaagcgcaggctgaaacactgcttctgtcggtgtttcaggatatggtcatcgtgttccgggctgattgttcaatctgtctgtattctatcgaaagaaagtcagacggtccgaatacgactgccggaattcaagttcttcaggaggtcagcatgagccggtatataccccaccctttcctcgtcgtgtccgtgaccctgaccagcgtgtctactgagaacggcataaccctaaaaatgcctcagcaagcccgcggggccgagtccattatgctgaatttggctggccaactgattatgatgcagcgcgaccggagcgggcctcagataagggaaaaagactccaatcccaacaatcagcggaagctgctccccttttgcccacctgtggtactcgcccagagtgtggagaacgtgtggactacctgtcgtgccaacaaacagaaacgacatttgctggaagcgctgtggctcagctgtggaggggccgggatgaaagtgtggttgcccctgttcccacgggatcaccggaaacctcacagctttcttagtcagagaatcatgctgccgttccacattaacatttatcctttggctgttctgttcgaggatgccctcgtcctgggggccgtgaacgatactctgctgtacgatagtctttatacaagaaacaatgcacgcgaacagcttgaagtgctgttcccattttgcgtggtggaaagaacaagccaaatctatctgcaccacatcctccggcaactgcttgtacgcaatctgggtgaacaggccctactgcttgcgcaatcatgtgctaccctgccatactttccacatgtcctggagctcatgctgcacgaagttctcgaagaggaggcaacctcccgcgaacctatcccagacccacttctccctaccgttgccaaattcattaccgaatttcccctgttcctacagacagtagtgcactgtgctaggaagacagagtatgccctctggaattatttatttgctgcagtgggcaaccccaaggatctgtttgaagagtgcctcatggctcaagacctggacactgccgcatcctacctgattatcttgcaaaacatggaagtaccagcagtcagccgacaacacgccactttattatttaataccgcacttgaacagggcaagtgggatctatgcagacacatgattcggtttcttaaagccattggttcaggggagtctgaaactcctcctagcacccctaccgctcaggagccttcatcctctggcggtttcgaattctttcggaatagatcaatctctttgtctcagagtgccgaaaatgtgcccgcttctaagttcagcttgcagaagacactgagcatgcccagcgggccatctggtaagagatggagcaaggatagcgactgtgcggagaacatgtatatagacatgatgttgtggaggcacgccagaagattactggaggatgtacgccttaaagacctgggatgcttcgccgcacagctgggatttgaactgatcagctggctgtgtaaagagaggactagggcagcccgggtagacaactttgtaattgctctgaagaggttgcacaaggattttttatggccactccctatcatcccagccagttccatcagcagccccttcaagaacgggaagtatcggacaggcaatgtcgactttatgtcactcgttcaaggggaattatattttacaccttgcatttacacgttctgttattag

SEQ ID NO: 51417 - DNA, 3261 bp, Artificial Sequence
  derived and/or modified sequence
atgatagccgtgagcacagctaacggctacatcctcttctttcacatcacatctactcgcggagacaagtacctgtacgaaccggtataccccaaaggctcccctcaaatgaagggcacccctcactttaaggaggagcagtgcgcccccgccctcaacctagagatgaggaagattctggatctgcaggctcctattatgtcactgcagtcagtcctcgaagacctgctggtggcaactagcgacggtctgctccatcttattcactgggaaggcatgaccaacggaagaaaagccatcaacttgtgtactgttcccttttcagttgatctccagtcttcgcgtgtgggctcctttctggggtttacagacgtgcacatccgagatatggaatactgtgctaccctcgatggatttgccgttgtcttcaacgatggaaaggtcgggttcataacccccgtgtccagtcgcttcacagcagaacagcttcatggggtttggccccaagacgtcgtggatggaacttgtgttgccgtgaataacaaataccgcctcatggcttttgggtgcgtgtctggcagcgtacaggtgtacactatagacaattccacaggtgccatgctgctgtcccacaagctggaacttactgcgaagcagtatcccgatatttggaataagaccggcgccgttaagctgatgcgctggagtcctgacaacagcgtagtgattgtgacgtgggagtatggtggcctctcactgtggagtgtgtttggtgcgcagctaatctgtacactcggcggcgatttcgcctacagatctgatggcaccaagaaagatcccctcaaaatcaactcgatgagctggggagctgagggctaccatctatgggtgatttcaggcttcgggtcccagaacaccgagatcgaatccgacctcagaagtgtcgtcaagcagccctcaatcctgctgtttcagtttatcaagagcgttctgaccgtgaatccctgcatgagtaatcaggagcaggtcttgctccagggcgaggatcgtttgtacctaaactgcggcgaggcaagccagacacaaaaccctcggtcgtcgagtactcacagtgagcacaaaccaagcagggagaagagcccgttcgccgatgggggactcgagtcacagggcctctccacactgctgggccaccggcactggcacgtcgtgcagattagttctacctatctggagtctaattggccaattaggtttagcgctatagataaactgggtcagaatatagccgtggtgggtaagttcggctttgctcactacagtctgttgacaaagaagtggaagctgtttgggaatataacccaggagcagaatatgattgtaacgggaggcttagcttggtggaatgatttcatggtgttggcttgctacaatatcaatgatcggcaagaagaactgcgggtgtacctgcggacttccaatctggacaatgctttcgctcatgtcaccaaggcccaggccgagactctcctgctgagtgtattccaagatatggtgattgtgtttcgagcagattgctcaatttgtctatactcaattgagcgcaagtctgatgggccaaacaccactgccggcatccaggtgctgcaagaggtaagcatgtcccgctacattcctcatccttttttggtggtcagcgtaacgctgacttcggtatccacggagaatggtataacacttaaaatgccacagcaagctagaggagccgagtcaataatgctaaatcttgcaggtcagctgataatgatgcagcgtgaccgcagcggtccacagatccgggagaaggattccaatcccaacaatcaaagaaaactgctgcccttttgccctccagttgtcctggcccaatcggtggagaacgtgtggaccacctgtcgagctaataaacagaagcgccatctgctcgaggctctctggctgtcttgcggcggggctggcatgaaggtctggctccctctgttcccacgcgaccataggaagcctcattccttcctgtcgcaacgaataatgctgccattccatattaatatataccctttagccgttttgttcgaagatgccctggtgctgggggccgttaatgataccctcctctatgactctctctataccagaaataatgctagggaacagcttgaggtactgtttccattctgtgtagtggagcgcacttcccagatctacctccatcatattctcaggcagcttctggtgcggaacctgggcgagcaggctttactgcttgctcagtcctgcgccacgttaccatacttccctcatgttctggagctgatgctgcatgaagtgcttgaagaagaggccacttccagggagcctatcccggatcctctattaccgacagttgccaaatttattactgagttccctttattcctgcagaccgttgtccactgtgctagaaaaacagaatatgccctatggaattacctattcgctgccgttggtaatcccaaggaccttttcgaggaatgcctaatggcacaggatttagatacagctgccagctatctgatcattttacaaaacatggaggtgcccgccgtgtctaggcagcatgccaccctgttattcaataccgcgctggagcagggcaagtgggacttatgtaggcacatgatccggtttctcaaagccattggctccggggagagcgagacccctcccagtaccccgaccgcccaggaaccgagctcttccggcgggtttgaattcttccgtaaccggagtatttcactatctcagagtgcagaaaatgtacccgcttctaagttctctcttcagaaaacactgtccatgccctccgggccctccggcaaacggtggtcaaaggacagcgactgtgccgaaaacatgtatattgacatgatgttgtggagacatgcacggagattacttgaagatgtccggctgaaggacctgggatgttttgcggctcaactgggctttgagctgatcagttggctgtgtaaggagcgcacccgcgcagcccgggtggacaacttcgttatcgccctgaagcggttgcataaggattttttatggccacttcccatcattcccgcatctagcatctcaagtcccttcaagaatgggaaataccgcaccggtaacgtagactttatgtccttggtgcaaggagagctctactttacaccttgcatttacaccttttgctactag

SEQ ID NO: 51418 - DNA, 3498 bp, Artificial Sequence
  derived and/or modified sequence
atgtacttcctgagcggctggcccaagaggctgctgtgccccctgggcagccctgctgaggcccccttccacgtgcagagcgacccccagagggccttctttgctgtgctggccgccgcccggctgagcatctggtacagccggcccagcgtgctgattgtgacctacaaggagcccgccaagagcagcacccagtttggcagctacaagcaggccgagtggaggccagacagcaccatgattgctgtgtccacagccaacggctacatcctcttcttccacatcaccagcaccaggggggacaagtacctgtatgagcctgtgtaccccaagggcagcccccagatgaagggcaccccccacttcaaggaggagcagtgtgccccagccctgaacctggagatgaggaagatcctggacctgcaggcccccatcatgagcctgcagagcgtgctggaggacctgctggtggccaccagtgatggcctgctgcacctgatccactgggagggcatgaccaacggcaggaaggccatcaacctgtgcaccgtgcccttctctgtggacctgcagagcagccgggtgggcagcttcctgggcttcacagatgtgcacatccgggacatggagtactgtgccaccctggatggctttgctgtggtgttcaatgatggcaaggtgggcttcatcacccctgtgagcagccgcttcaccgctgagcagctgcatggagtgtggccccaggatgtggtggatggcacctgtgtggccgtgaacaacaagtaccgcctgatggccttcggctgtgtgtctggctctgtgcaggtgtacaccatcgacaacagcactggagccatgctgctgagccacaagctggagctgacagccaagcagtacccagacatctggaacaagacaggagctgtgaagctgatgcgctggagcccagacaacagcgtggtgattgtgacctgggagtatggaggcctgagcctgtggagcgtgtttggagcccagctgatctgcaccctgggcggggactttgcctacagaagtgatggcaccaagaaggaccccctgaagatcaacagcatgtcctggggcgctgagggctaccacctgtgggtgatcagcggcttcggcagccagaacacagaaattgaaagtgacctgcggtctgtggtgaagcagcccagcatcctgctcttccagttcatcaagtctgtgctgactgtgaacccctgcatgagcaaccaggagcaggtgctgctgcagggagaagatcggctgtacctgaactgtggggaggccagccagacccagaaccccaggagcagcagcacccacagcgagcacaagcccagccgggagaagagcccctttgctgatggcggcctggagagccagggcctgagcaccctgctgggccaccgccactggcacgtggtgcagatcagcagcacctacctggagagcaactggcccatccgcttcagcgccatcgacaagctgggccagaacattgctgtggtgggcaagtttggatttgcccactacagcctgctgaccaagaagtggaagctgtttggaaacatcacccaggagcagaacatgattgtgactggaggcctggcctggtggaatgacttcatggtgctggcctgctacaacatcaatgaccggcaggaggagctgcgggtgtacctgcggaccagcaacctggacaatgcctttgcccacgtgaccaaggcccaggccgagaccctgctgctgagcgtcttccaggacatggtgattgtgttccgggctgactgcagcatctgcctgtacagcattgaaaggaagagtgatggccccaacaccacagctggcatccaggtgctgcaggaggtgtccatgagccgctacatcccccaccccttcctggtggtgtctgtgaccctgacctctgtgtccacagaaaatggcatcaccctgaagatgccccagcaggcccggggagctgagagcatcatgctgaacctggccggccagctgatcatgatgcagagggacagaagtggcccccagatccgggagaaggacagcaaccccaacaaccagaggaagctgctgcccttctgcccccctgtggtgctggcccagagcgtggagaatgtgtggaccacctgccgggccaacaagcagaagaggcacctgctggaggccctgtggctgagctgtggcggggccggcatgaaggtgtggctgcccctcttcccccgggaccacaggaagccccacagcttcctgagccagaggatcatgctgcccttccacatcaacatctaccccctggccgtgctgtttgaagatgccctggtgctgggcgctgtgaatgacaccctgctgtatgacagcctgtacaccaggaacaatgcccgggagcagctggaggtgctcttccccttctgtgtggtggagaggaccagccagatctacctgcaccacatcctgcggcagctgctggtgaggaacctgggggagcaggccctgctgctggcccagagctgtgccaccctgccctacttcccccacgtgctggagctgatgctgcacgaggtgctggaggaggaggccaccagccgggagcccatcccagaccccctgctgcccaccgtggccaagttcatcacagagttccccctcttcctgcagacagtggtgcactgtgccaggaagacagaatatgccctgtggaactacctgtttgctgctgtgggcaaccccaaggacctgtttgaagaatgtctgatggcccaggacctggacacagctgccagctacctgatcatcctgcagaacatggaggtgcctgctgtgtcccggcagcacgccaccctgctcttcaacacagccctggagcagggcaagtgggacctgtgccgccacatgatccgcttcctgaaggccatcggcagcggggagagcgagaccccacccagcacccccacagcccaggagcccagcagcagcggcggctttgagttcttcaggaacagaagcatcagcctgagccagagcgcagaaaatgtgcctgccagcaagttcagcctgcagaagaccctgtccatgcccagcggccccagcggcaagcgctggagcaaggacagcgactgtgccgagaacatgtacatcgacatgatgctgtggaggcatgcccggcggctgctggaggatgtgcggctgaaggacctgggctgctttgctgcccagctgggctttgagctgatctcctggctgtgcaaggagaggaccagggctgcccgggtggacaactttgtgattgccctgaagaggctgcacaaggacttcctgtggcccctgcccatcatcccagccagcagcatcagcagccccttcaagaatggcaagtacagaactggaaatgtggacttcatgagcctggtgcagggcgagctgtacttcaccccctgcatctacaccttctgctactag

SEQ ID NO: 51419 - DNA, 3261 bp, Artificial Sequence
  derived and/or modified sequence
atgattgctgtgtccacagccaacggctacatcctcttcttccacatcaccagcaccaggggggacaagtacctgtatgagcctgtgtaccccaagggcagcccccagatgaagggcaccccccacttcaaggaggagcagtgtgccccagccctgaacctggagatgaggaagatcctggacctgcaggcccccatcatgagcctgcagagcgtgctggaggacctgctggtggccaccagtgatggcctgctgcacctgatccactgggagggcatgaccaatggaaggaaggccatcaacctgtgcaccgtgcccttctctgtggacctgcagagcagccgggtgggcagcttcctgggcttcacagatgtgcacatccgggacatggagtactgtgccaccctggatggctttgctgtggtgttcaatgatggcaaggtgggcttcatcacccctgtgagcagccgcttcaccgctgagcagctgcacggcgtgtggccccaggatgtggtggatggcacctgtgtggccgtgaacaacaagtaccgcctgatggccttcggctgtgtgtctggctctgtgcaggtgtacaccatcgacaacagcactggagccatgctgctgagccacaagctggagctgacagccaagcagtacccagacatctggaacaagacaggagctgtgaagctgatgcgctggagcccagacaacagcgtggtgattgtgacctgggagtatggaggcctgagcctgtggagcgtgtttggagcccagctgatctgcaccctgggcggggactttgcctacagaagtgatggcaccaagaaggaccccctgaagatcaacagcatgtcctggggcgctgagggctaccacctgtgggtgatcagcggcttcggcagccagaacacagaaattgaaagtgacctgcggtctgtggtgaagcagcccagcatcctgctcttccagttcatcaagtctgtgctgactgtgaacccctgcatgagcaaccaggagcaggtgctgctgcagggcgaggaccggctgtacctgaactgtggggaggccagccagacccagaaccccaggagcagcagcacccacagcgagcacaagcccagccgggagaagagcccctttgctgatggcggcctggagagccagggcctgagcaccctgctgggccaccgccactggcacgtggtgcagatcagcagcacctacctggagagcaactggcccatccgcttcagcgccatcgacaagctgggccagaacattgctgtggtgggcaagtttggatttgcccactacagcctgctgaccaagaagtggaagctgtttggaaacatcacccaggagcagaacatgattgtgactggaggcctggcctggtggaatgacttcatggtgctggcctgctacaacatcaatgaccggcaggaggagctgcgggtgtacctgcggaccagcaacctggacaatgcctttgcccacgtgaccaaggcccaggccgagaccctgctgctgtctgtgttccaggacatggtgattgtgttccgggctgactgcagcatctgcctgtacagcattgaaaggaagagtgatggccccaacaccacagctggcatccaggtgctgcaggaggtgtccatgagccgctacatcccccaccccttcctggtggtgtctgtgaccctgacctctgtgtccacagaaaatggcatcaccctgaagatgccccagcaggcccggggagctgagagcatcatgctgaacctggccggccagctgatcatgatgcagagggacaggagcggcccccagatccgggagaaggacagcaaccccaacaaccagaggaagctgctgcccttctgcccccctgtggtgctggcccagagcgtggagaatgtgtggaccacctgccgggccaacaagcagaagaggcacctgctggaggccctgtggctgagctgtggcggggccggcatgaaggtgtggctgcccctcttcccccgggaccacaggaagccccacagcttcctgagccagaggatcatgctgcccttccacatcaacatctaccccctggccgtgctgtttgaagatgccctggtgctgggcgctgtgaatgacaccctgctgtatgacagcctgtacaccagaaataatgcccgggagcagctggaggtgctcttccccttctgtgtggtggagaggaccagccagatctacctgcaccacatcctgcggcagctgctggtgaggaacctgggggagcaggccctgctgctggcccagagctgtgccaccctgccctacttcccccacgtgctggagctgatgctgcacgaggtgctggaggaggaggccaccagccgggagcccatcccagaccccctgctgcccaccgtggccaagttcatcacagagttccccctcttcctgcagacagtggtgcactgtgccaggaagacagaatatgccctgtggaactacctgtttgctgctgtgggcaaccccaaggacctgtttgaggagtgcctgatggcccaggacctggacacagctgccagctacctgatcatcctgcagaacatggaggtgcctgctgtgtcccggcagcacgccaccctgctcttcaacacagccctggagcagggcaagtgggacctgtgccgccacatgatccgcttcctgaaggccatcggcagcggggagagcgagaccccacccagcacccccacagcccaggagcccagcagcagcggcggctttgagttcttcaggaacagaagcatcagcctgagccagagcgcagaaaatgtgcctgccagcaagttcagcctgcagaagaccctgtccatgcccagcggccccagcggcaagcgctggagcaaggacagcgactgtgccgagaacatgtacatcgacatgatgctgtggaggcatgcccggcggctgctggaggatgtgcggctgaaggacctgggctgctttgctgcccagctgggctttgagctgatctcctggctgtgcaaggagaggacccgggccgcccgggtggacaacttcgtcatcgccctgaagaggctgcacaaggacttcctgtggcccctgcccatcatcccagccagcagcatcagcagccccttcaagaatggcaagtacagaactggaaatgtggacttcatgagcctggtgcagggcgagctgtacttcaccccctgcatctacaccttctgctactag

SEQ ID NO: 51420 - DNA, 3498 bp, Artificial Sequence
  derived and/or modified sequence
atgtacttcctgagcggctggcccaagcggctgctgtgccccctgggatcaccagccgaggctccctttcacgttcagtcagatccacagcgcgcctttttcgctgtcctggccgccgctcgtctgtctatttggtattcaagaccgagcgttctgatcgttacgtataaggagccggcaaaaagttctacacaatttgggtcatacaaacaagcggagtggcgcccagacagtacaatgatagccgtgagtacagctaacggttatattcttttttttcacataacctctacccgaggggacaagtatctgtatgaacccgtgtacccgaagggctcacctcagatgaaaggcactcctcacttcaaggaggaacagtgtgcacccgccctgaacttggaaatgaggaaaatcttagacttacaagcccccatcatgtcgctgcagagcgtgctggaagatctgctcgtggcaacatcggacgggctcctgcatctgatacactgggaaggtatgaccaatggcagaaaagccataaacttatgcacagtgccctttagcgttgatctccagagtagcagagttggctccttcttgggcttcaccgatgtccacattcgagatatggagtactgcgccacactcgacggttttgctgtcgtcttcaatgacggcaaagtcggcttcatcacgcctgtctcctcaagattcacggcggagcagctgcatggcgtgtggccgcaggacgttgtcgacgggacatgtgtggcggtcaataacaaatacagactcatggcattcgggtgtgtgagcggctcagtccaggtatacacaattgacaactctaccggagccatgttactatcacacaagctcgagttgacggcaaaacagtatccagatatttggaataaaacgggggctgttaagttgatgcgatggagccccgataatagcgtcgtcatcgtcacctgggaatacgggggtctttccctctggtctgtattcggtgcccagctgatatgtactctcggtggggactttgcctacaggtctgacggtactaagaaggacccattgaagatcaatagtatgagttggggggccgaggggtaccacctttgggttatctcggggtttgggagccagaacacagagattgagagcgacctccgtagtgtcgtgaaacaaccaagtattctcctgttccagtttatcaagagcgtcctcactgttaatccgtgtatgtccaaccaggaacaggtgttgttacaaggggaggaccgactctatctgaactgtggcgaggccagccaaacccagaaccctaggtcttcaagcacccactctgaacataagccttctcgcgagaagagcccgttcgccgacggcggcctagagagccagggactgtcaactttgttaggccaccggcattggcacgtggtgcaaatctcatcaacctatctggaatctaattggcctatccgtttctcagcaatcgacaagcttggccagaacatcgccgtggtcggaaagttcggctttgctcactactccctgctgacaaaaaagtggaagctgttcgggaacatcacgcaggaacagaatatgatcgtgactggaggccttgcgtggtggaatgactttatggtcctggcctgctataatataaacgacagacaggaggagcttcgggtctacctgcggacgtcaaacttagataacgcttttgcacacgtgactaaggctcaggcggagacactcttgttgtccgtgtttcaggatatggtcattgttttcagggccgattgctccatctgtctgtacagcattgagcgaaagtccgacggccccaacactaccgccggcattcaggtcctacaagaggtgtctatgtcccgatatattcctcacccattcttggtcgtgagcgtgactctgactagcgtgtcaaccgagaacgggatcacgcttaagatgccccagcaggcccggggagccgagagcattatgcttaatctggccggtcagttaatcatgatgcagcgggacaggagtggaccccagatcagagagaaagactctaacccaaataaccagaggaaacttttgcccttctgcccccctgtcgtcctcgcccaatcggtcgaaaacgtgtggaccacatgtcgggcaaacaaacagaagcgccatttattggaagccttgtggctgtcatgcgggggtgctggtatgaaagtttggctgccactctttcctcgagaccacaggaagccacatagctttcttagccagagaatcatgctcccattccatataaacatttacccactggctgttctgtttgaagacgccctggtgctgggggccgtaaacgatacccttctgtatgactccctgtacacacgtaacaacgcccgcgagcagctcgaagtgctttttcccttctgcgtggtcgagcgcacaagtcagatctatctgcatcatatcctgcggcaactactagtaaggaacttgggcgagcaggctctccttttggcacagtcatgcgcgactctcccttacttcccgcacgtcctcgaactcatgctgcacgaagtcttggaagaggaggctacgtctcgggagcccatccccgatcccctgctgccaactgtggcaaagttcataaccgaattcccccttttcctccagactgtggtgcactgcgctcgcaagactgaatatgcgctttggaattacctatttgctgcagtcggaaatcccaaagacctcttcgaggagtgcctcatggctcaggacctggatacggccgcctcctatctaattattttacagaacatggaagtgcctgcagtgtcacggcaacacgcaacacttttgttcaatacagccctggaacagggtaagtgggacctgtgtcgccacatgataagatttttgaaggctattggatcaggcgaatccgaaacccccccatccaccccgaccgcccaggagccgagcagttctgggggattcgagttttttcgaaatcgaagcattagcctttcccagagcgccgagaacgttcctgcatccaagttttccctgcaaaagactttgtcaatgccaagcggcccaagcggtaagcgctggtctaaggactcggactgtgccgagaacatgtatattgatatgatgttgtggcggcacgcccggaggcttctcgaagatgttcgccttaaagatttgggctgtttcgccgcgcagttaggtttcgagctcatttcatggctctgcaaagagcgtaccagggctgccagagtggacaacttcgtcattgctctcaagcggttacataaggacttcctgtggccccttcccattatccctgcctccagcatctcttctccattcaagaatggaaagtacagaacaggtaatgtagacttcatgtcgcttgtgcagggagaactgtacttcacaccctgcatctatacgttttgctactag

SEQ ID NO: 51421 - DNA, 3261 bp, Artificial Sequence
  derived and/or modified sequence
atgatcgccgtgagcaccgccaacggctacatcctgttcttccacatcaccagcaccaggggcgataaatatctctatgaacctgtgtatcctaaaggatctccccagatgaaagggaccccacatttcaaggaagagcaatgcgcgccagcgctcaatctcgaaatgagaaagatactggaccttcaggcgcccattatgtcactgcagtctgtgctagaagatctcctcgtcgcaaccagcgatggccttctgcatctgattcattgggaagggatgactaatggtcggaaagccataaatctttgtactgtgcctttttccgtggacttgcagtctagtagagtaggcagttttttaggctttactgacgttcacatcagggatatggagtactgtgctaccctggatggattcgccgtggtgtttaacgacggaaaagtgggttttatcactcctgtgtcgtcacgattcacagctgagcagctgcacggggtctggccccaagacgtggtcgatggcacatgcgtagcagtgaataataaatatcgtttgatggcctttggctgcgttagcgggtctgtgcaagtctacactatcgataacagcacaggcgcaatgctgctttcgcacaaacttgagctaactgccaagcagtatccagacatttggaataagacaggagctgttaaattaatgaggtggtctcccgataactccgtggtgatagtgacctgggagtacggaggcctctccctctggtctgtgttcggagctcaactaatctgtacactcgggggcgacttcgcttaccggagtgacggcactaaaaaggaccccctgaaaattaacagcatgtcctggggagccgagggctaccacctgtgggtgatttctgggtttgggagtcagaacactgagatcgagtctgacctgaggagcgttgtgaaacaaccctctatcctgctgtttcaattcattaagtctgtgctgaccgttaacccgtgtatgtctaatcaggagcaggtgctgctgcaaggagaggatcggctctacctgaactgtggagaagcatcccagacccaaaatccacggtcaagcagcacacattctgaacataagccttctagggaaaaaagtccatttgccgatggtggcttggagagtcagggtctgagtacccttctggggcatcggcactggcatgtggttcagatctcctctacgtatctcgagtctaactggccaattaggttttctgctatcgacaaattgggccagaacattgctgttgtgggaaaattcgggttcgcccactacagcctgttaacaaaaaagtggaaactatttggcaacataacgcaggagcagaacatgatagttaccggcggcctggcgtggtggaatgactttatggtgctggcctgttataacatcaatgatagacaggaagagctcagggtctatctgcgcacctcaaatcttgacaatgcatttgcccatgtgacaaaggcccaggcggagacgctgctgctctctgtattccaggatatggtcatcgtattccgcgcagactgctctatatgcctgtattctattgaaagaaaatccgacggccctaatactactgccggaatacaggtgcttcaagaggtcagcatgtcgagatacattccccatccttttttggttgtgagcgtcaccttgactagcgtcagcaccgagaacggtatcacactgaagatgccccagcaggctcgaggtgcagagagtattatgctcaacctggctgggcaacttattatgatgcagagagaccgaagtggccctcagatcagagaaaaggatagcaaccccaacaaccagcgcaaactactgccgttttgccctccagtggtcctggcccagtccgtcgagaacgtttggaccacatgcagagcgaataaacagaagcgacatcttctggaggccctttggttgtcctgtggaggcgcaggaatgaaggtctggctgcctttgttcccgcgcgatcacagaaagccccacagctttcttagccagcggattatgctcccattccatattaatatttaccccctggcagtgttgtttgaggacgcactggtgcttggagccgtgaacgatactttactctacgactctctgtatacccgcaacaacgctcgagagcagcttgaggtgttgtttcctttctgtgtggtggaaaggaccagccagatctacctgcatcatatcctaagacagctgctggtcagaaatctgggcgaacaggcactgctccttgctcaatcctgcgctacactcccttatttccctcatgtgttggaattaatgctccacgaggtgttagaggaagaggcaacaagccgggagcccatccccgatcctttgctaccaacagtcgccaagttcataaccgagtttcccctcttcctgcagactgtggtgcactgtgcacgtaagacagagtatgccttgtggaactatctattcgcggcggtaggaaacccaaaagatttgttcgaggagtgtctgatggcacaggacctggataccgccgcatcctacctgattattttgcaaaatatggaggtgcccgctgtcagcagacagcatgccacccttcttttcaacacagcactggagcagggcaaatgggatctatgcaggcatatgatccgctttctcaaagctattgggagtggcgaatcagagacgccaccgtccaccccgactgctcaggagccctcctctagcggcggatttgaatttttccggaatcggagtatttctttaagccagtcagctgagaacgtgcccgcctctaagttttctttacagaaaactctgtcaatgccaagtggacccagtggcaagaggtggtcaaaagattcagattgtgccgaaaatatgtatatcgatatgatgctctggcgacatgcaaggcgcctattggaggacgtgcgcttaaaggacctgggttgctttgccgcccagctgggtttcgaactcatctcctggctgtgtaaggagcgcactcgagcggcacgagtggacaatttcgtgatcgcgttgaagagactccacaaagatttcctttggcctctgcccattattccagccagcagtatctcttcaccttttaagaatggcaaataccgtactggtaatgttgactttatgtctctcgtgcaaggagagctatatttcacaccatgcatctacactttttgttactag

SEQ ID NO: 51422 - DNA, 4127 bp, Artificial Sequence
  derived and/or modified sequence
gaggaaggggcggggtcggggcgggcctccgcgctcctcccgccctctctgtgtccctactctccctccccttccctcccccacactcggccccgtcagcttgggggtgccttcgtcgcgcagccttgcgtcggcccggcccggccaggccagcgggcagatgccccgagctgccgccgccgccgccgccgactcggccggtggcggtgtgggaggtgggcgaccagcccggggccgctgagtgtgacggacgcaactgggggcgccgggggctccgcacggaccatgtattttctgagcggctggcccaagaggctgctgtgccctctggggagcccggccgaggcgcctttccacgttcagtccgacccgcagagggctttcttcgccgtgctggccgcggcccgcctcagcatctggtacagccgacctagtgtgttaattgtaacctacaaggagcctgcaaaatcatctactcagtttggatcctacaagcaagctgaatggaggccagatagtaccatgatagctgtatcaacggcaaatggatacatcttgttttttcatattacatctacaagaggggacaagtacctttatgaaccagtgtatcccaaaggaagtccacaaatgaaggggacaccccattttaaggaagaacagtgtgctccagcattaaatttggagatgaggaaaatactggatttacaagcacccatcatgagtttgcagtctgtgttggaagatctcctggttgctacttctgatggacttcttcatcttattcactgggaaggaatgacaaatggaaggaaagccattaatctttgcacagtacccttttcagtagacctgcagtcatctagagtaggttcattcctgggcttcacagacgtacacatcagagacatggaatactgtgccacacttgatgggtttgctgttgtatttaatgatggtaaagttggatttattacaccagtgtcaagtagatttactgcagagcagcttcatggagtttggccacaagatgttgttgacggaacgtgtgtagcagtaaataacaagtatcgactaatggcatttggctgtgtgagtggttctgtgcaggtctatacaatagataacagcactggagccatgctgctatctcataaattagagctaacagcaaaacagtatcctgacatttggaataaaacaggagctgttaaattgatgagatggtctcctgacaatagtgttgtaatagtgacctgggaatacggaggcctttctttatggagtgtttttggagcacagctgatttgtacacttggaggagattttgcttataggtctgatggcaccaaaaaagatccccttaagatcaactctatgagctggggtgcagaaggctatcacctatgggtaatcagcggatttggttctcaaaacactgaaattgagtctgacctcaggagtgtagttaaacagcccagcatcctgttatttcagtttattaagagtgtactcactgtaaacccttgtatgagtaaccaagagcaggtgttgcttcagggtgaggatcgcttgtacttgaactgtggagaggcttcacaaacccagaatcccaggagttcttcaacacactctgagcataagcccagtcgagaaaagagcccatttgcagatggaggtttagagtctcagggattaagcactttacttggacatcggcattggcatgttgtacagatttccagcacctatctagagagcaattggcctatacggttttcagctattgataagcttggacagaatattgctgtggttggcaagtttggttttgcacattactctttactcaccaaaaaatggaaactttttggaaacattacccaggagcaaaatatgatcgtgacaggtggcttagcctggtggaatgattttatggtccttgcgtgttataacataaatgaccgtcaagaagagcttagagtatacttgcgaacatcaaatctggacaatgcctttgctcatgtcaccaaagcacaagcagaaacattactgcttagtgtcttccaggacatggtaatagtatttagagcagactgttcaatatgcctttacagtattgaaagaaaatctgatggtccaaatactactgctggtattcaagttcttcaggaggtttccatgtcacgctacattcctcaccctttcctggtggtatctgtcactctgacatcagtgagtacagagaatggaatcaccttgaaaatgccacagcaggctcgtggtgcagagagcattatgttaaacctggcaggacagctcatcatgatgcagagggacaggtcaggcccacagatccgggagaaggacagtaaccctaataaccaaaggaaacttctgccattctgtcctcctgttgtactagcccagtctgttgaaaatgtctggacaacgtgtcgagcaaataaacagaaacgtcaccttctggaggccctctggctgagctgtggtggtgcagggatgaaagtttggctccctctcttccctagggatcaccgcaagccccattccttcttgtcccagcggatcatgctgcctttccacatcaacatttacccgctagctgttctgtttgaagatgctttagtccttggtgctgtcaatgacactttgctctatgattctttatatactcggaacaatgctagagaacagctggaggtgctcttccctttctgtgttgtggagagaacctctcagatctacctccaccacattctacgtcaacttctggtcagaaaccttggggagcaagccttgctcttggcccagtcctgtgccacattaccttacttccctcatgtgctggagctcatgctccatgaagtactggaagaagaagctacctcacgggagcccattcccgaccctctgcttcccactgtggcaaaatttatcactgagttccccctcttcctgcagacagttgtccattgtgccaggaagaccgaatatgccctgtggaattacctttttgcagctgttggaaaccctaaggacttgtttgaggagtgtttgatggctcaggatttggacacagctgcctcttaccttattatcttacagaatatggaagtccctgcagtaagtaggcaacatgctacccttctattcaacacagcactagaacaaggcaagtgggacctttgtcgacacatgattcgatttcttaaagccattggctctggagaatctgagacacctccatccacacccacagctcaggaacccagttcaagtggtggatttgagttcttcaggaatcgaagcatcagtttatcccagtcagctgaaaatgttcctgccagtaaattcagtttacagaaaacactaagtatgccatctggtccctctggaaaaagatggagcaaagacagtgactgtgctgagaacatgtatattgacatgatgctctggagacatgctcggcgcctcttagaagatgtgaggttaaaggaccttggctgctttgcagcccagctgggctttgaactaattagttggctatgcaaggaacgtacccgagccgcccgggtagacaactttgtaatagccctgaagagactccacaaagatttcctgtggccacttccaatcatcccagcctcttctatcagttctcctttcaaaaatggaaaataccgaactggtaatgtagacttcatgtcacttgtacaaggagaattgtattttactccgtgtatttacacattttgctattagttgatattcaaggaattattttcattccaaacttaggaatggataaaagccaactttttgtacatgagttggaatgcccactgtttgaccaaagatgtaaataaagtagaacctatgtctctaagtcttgtgaccttgaagtctaattcaaaaatctaatcatacttggattataaagaagttgagaactgcctgaatataaaagctaccatgcttatgttattgtgggaaggagttctggaatcagatagacatggacctcaaagtaagctgacagaactcattccaggggaacagtaaggccaccttctaaactaggagaggacaaactgaaagtgtatatt

SEQ ID NO: 51423 - DNA, 3603 bp, Artificial Sequence
  derived and/or modified sequence
ctggcccaagaggctgctgtgccctctggggagcccggccgaggcgcctttccacgttcagtccgacccgcagagggctttcttcgccgtgctggccgcggcccgcctcagcatctggtacagccgacctagtgtgttaattgtaacctacaaggagcctgcaaaatcatctactcagtttggatcctacaagcaagctgaatggaggccagatagtaccatgatagctgtatcaacggcaaatggatacatcttgttttttcatattacatctacaagaggggacaagtacctttatgaaccagtgtatcccaaaggaagtccacaaatgaaggggacaccccattttaaggaagaacagtgtgctccagcattaaatttggagatgaggaaaatactggatttacaagcacccatcatgagtttgcagtctgtgttggaagatctcctggttgctacttctgatggacttcttcatcttattcactgggaaggaatgacaaatggaaggaaagccattaatctttgcacagtacccttttcagtagacctgcagtcatctagagtaggttcattcctgggcttcacagacgtacacatcagagacatggaatactgtgccacacttgatgggtttgctgttgtatttaatgatggtaaagttggatttattacaccagtgtcaagtagatttactgcagagcagcttcatggagtttggccacaagatgttgttgacggaacgtgtgtagcagtaaataacaagtatcgactaatggcatttggctgtgtgagtggttctgtgcaggtctatacaatagataacagcactggagccatgctgctatctcataaattagagctaacagcaaaacagtatcctgacatttggaataaaacaggagctgttaaattgatgagatggtctcctgacaatagtgttgtaatagtgacctgggaatacggaggcctttctttatggagtgtttttggagcacagctgatttgtacacttggaggagattttgcttataggtctgatggcaccaaaaaagatccccttaagatcaactctatgagctggggtgcagaaggctatcacctatgggtaatcagcggatttggttctcaaaacactgaaattgagtctgacctcaggagtgtagttaaacagcccagcatcctgttatttcagtttattaagagtgtactcactgtaaacccttgtatgagtaaccaagagcaggtgttgcttcagggtgaggatcgcttgtacttgaactgtggagaggcttcacaaacccagaatcccaggagttcttcaacacactctgagcataagcccagtcgagaaaagagcccatttgcagatggaggtttagagtctcagggattaagcactttacttggacatcggcattggcatgttgtacagatttccagcacctatctagagagcaattggcctatacggttttcagctattgataagcttggacagaatattgctgtggttggcaagtttggttttgcacattactctttactcaccaaaaaatggaaactttttggaaacattacccaggagcaaaatatgatcgtgacaggtggcttagcctggtggaatgattttatggtccttgcgtgttataacataaatgaccgtcaagaagagcttagagtatacttgcgaacatcaaatctggacaatgcctttgctcatgtcaccaaagcacaagcagaaacattactgcttagtgtcttccaggacatggtaatagtatttagagcagactgttcaatatgcctttacagtattgaaagaaaatctgatggtccaaatactactgctggtattcaagttcttcaggaggtttccatgtcacgctacattcctcaccctttcctggtggtatctgtcactctgacatcagtgagtacagagaatggaatcaccttgaaaatgccacagcaggctcgtggtgcagagagcattatgttaaacctggcaggacagctcatcatgatgcagagggacaggtcaggcccacagatccgggagaaggacagtaaccctaataaccaaaggaaacttctgccattctgtcctcctgttgtactagcccagtctgttgaaaatgtctggacaacgtgtcgagcaaataaacagaaacgtcaccttctggaggccctctggctgagctgtggtggtgcagggatgaaagtttggctccctctcttccctagggatcaccgcaagccccattccttcttgtcccagcggatcatgctgcctttccacatcaacatttacccgctagctgttctgtttgaagatgctttagtccttggtgctgtcaatgacactttgctctatgattctttatatactcggaacaatgctagagaacagctggaggtgctcttccctttctgtgttgtggagagaacctctcagatctacctccaccacattctacgtcaacttctggtcagaaaccttggggagcaagccttgctcttggcccagtcctgtgccacattaccttacttccctcatgtgctggagctcatgctccatgaagtactggaagaagaagctacctcacgggagcccattcccgaccctctgcttcccactgtggcaaaatttatcactgagttccccctcttcctgcagacagttgtccattgtgccaggaagaccgaatatgccctgtggaattacctttttgcagctgttggaaaccctaaggacttgtttgaggagtgtttgatggctcaggatttggacacagctgcctcttaccttattatcttacagaatatggaagtccctgcagtaagtaggcaacatgctacccttctattcaacacagcactagaacaaggcaagtgggacctttgtcgacacatgattcgatttcttaaagccattggctctggagaatctgagacacctccatccacacccacagctcaggaacccagttcaagtggtggatttgagttcttcaggaatcgaagcatcagtttatcccagtcagctgaaaatgttcctgccagtaaattcagtttacagaaaacactaagtatgccatctggtccctctggaaaaagatggagcaaagacagtgactgtgctgagaacatgtatattgacatgatgctctggagacatgctcggcgcctcttagaagatgtgaggttaaaggaccttggctgctttgcagcccagctgggctttgaactaattagttggctatgcaaggaacgtacccgagccgcccgggtagacaactttgtaatagccctgaagagactccacaaagatttcctgtggccacttccaatcatcccagcctcttctatcagttctcctttcaaaaatggaaaataccgaactggtaatgtagacttcatgtcacttgtacaaggagaattgtattttactccgtgtatttacacattttgctattagttgatattcaaggaattattttcattccaaacttaggaatggataaaagccaactttttgtacatgagttggaatgcccactgtttgaccaaagatgtaaataaagtagaacctatgtctct

SEQ ID NO: 51424 - DNA, 3498 bp, Artificial Sequence
  derived and/or modified sequence
atgtatttcctgagtggatggccaaaacgactcttgtgtcctctcggctcgccagccgaagccccttttcacgtccagagcgacccccagcgagccttctttgcagtgcttgctgcagccaggttgtctatttggtacagccggccatccgtcctgatcgtgacatacaaggaacccgcaaagtcctcaactcagttcggctcctataagcaggccgagtggcgaccagattctacgatgatcgcagttagcactgctaacggatacattctttttttccacatcactagcactaggggggacaagtacctttatgaacccgtctatcctaaagggtctccccagatgaagggaactccccatttcaaagaagaacaatgcgcgccagctttgaatctcgagatgcggaagattctcgacctccaggctcctatcatgtccctgcagtccgtactggaggatctgctcgtggcaacatctgacggactgctacacttgatccattgggagggtatgaccaacggtcgcaaagctattaacctttgcacagtccctttcagcgtggatctgcaatcatctcgtgtcggctccttccttggtttcactgatgttcacatacgcgacatggaatattgtgcaacgctggatggttttgccgtggtcttcaatgacggcaaggtcggcttcattacgcccgtgtcatcacgcttcaccgcagagcaactacatggggtatggccgcaagatgttgttgatggcacctgcgtagcagtgaataataaatacaggttgatggccttcggttgtgtaagtgggtctgtccaggtgtacacgattgacaattcaacaggggcaatgctgttgagccataagctggagttaacggcgaaacagtatccggatatctggaataaaacaggtgccgtaaaacttatgcgctggtcacctgacaacagcgtcgtgatcgtgacctgggaatatggtggtctgtcgctgtggagtgtgttcggtgcacagcttatctgcaccctcggcggtgattttgcttaccgatccgatggaacaaagaaggaccccctcaagattaactccatgagttggggggctgaaggctatcacctatgggtgatctctggattcggcagtcagaacacggagattgagagcgaccttaggtctgtggtgaagcagcctagcatcttgctatttcagtttatcaagtctgtgttgactgtgaacccctgcatgagcaaccaggaacaggtgctgctgcagggcgaagaccgcctctacctgaattgtggcgaggcctcgcaaactcagaacccacggtcgagctctacacatagcgaacacaagcctagtcgcgaaaagtctcctttcgccgatggaggtcttgaatcgcaagggctgagcactctcttaggacataggcattggcacgtggtacagatctcctccacctatctagagtccaactggcctatacgtttctccgcaatcgacaagctgggtcagaacatagctgtggttggcaaattcggttttgcccactactcattacttaccaagaagtggaagctgtttggtaacatcacccaggagcagaatatgatcgtcacaggtgggctcgcatggtggaatgattttatggtgctggcctgctacaacattaatgaccggcaggaggagcttagggtctatctgaggacgagcaacttagacaacgctttcgcacacgtgaccaaagcccaggcggaaactctgctgctgagtgtctttcaggacatggtgatagtgtttagggcagattgcagtatttgtctctattctatcgagcgaaagagtgatggacctaacaccacagcagggatacaggttcttcaggaggtgagcatgtcccgctatatccctcacccatttctcgtcgtctccgtgaccctcaccagtgtgagcactgagaatggtataaccctcaagatgccccagcaggcgcgaggggcagagtcaatcatgctgaatctggccggtcaactcattatgatgcaaagagaccggtcaggtcctcagattcgcgagaaagattcaaatcctaacaaccagaggaagcttttgcccttttgccccccagtcgtgctagcacagtccgtggaaaacgtctggacgacatgccgcgcaaacaaacagaagcgacacctgctggaggcactttggctaagctgcggcggagccggtatgaaagtgtggctgccactgtttcccagggatcaccggaagccacattccttcttatcccaacgcattatgctcccctttcatatcaatatttatccgctggccgtcctctttgaggacgccttggtgttaggcgcagtgaatgatactttactgtatgatagtctttacacacgtaataatgcaagagagcaactggaagtcctgttccccttttgcgtggtcgaaaggacctcccaaatctatctacatcatatccttagacagctcctggtgcgtaacctaggggaacaggccctcttgctcgcccagtcgtgtgccactctcccctatttccctcatgtcttggaacttatgctgcatgaggtacttgaggaagaagcgacctctcgtgagcctatacctgacccactactccccactgtggcaaagtttatcacagaatttcccctgttcctacagacagtcgtacactgtgccaggaagactgagtacgccctgtggaactatttatttgctgccgttggaaatccgaaggacttgttcgaagagtgcctaatggcgcaggatctggacaccgcagcgtcctatttgattattttgcagaatatggaggtccccgctgtttctaggcaacacgccacactgctgtttaataccgctttagaacaggggaagtgggacctgtgcagacatatgataagatttctgaaagccatcgggagcggagagagtgagaccccgcctagcacaccaactgcccaggagccatcatcaagcggaggcttcgaattctttcgaaatcgttctattagcttgtcacagagcgccgaaaatgtgcccgcttccaagttctcactgcagaaaacactttctatgccatctggaccgagtggcaaacgctggagcaaggattcagactgtgcggaaaacatgtatatcgatatgatgctgtggcggcatgctcgtcggctgttggaggatgtgcggcttaaagacctcggatgcttcgctgctcagttgggctttgagctcatctcttggctgtgcaaggagagaacacgggcagccagagtagataactttgtaattgcactgaagcggttacacaaagattttctatggcccctgcctatcatccccgctagtagcatctcaagcccatttaaaaatggcaaatataggaccggaaatgtggattttatgtcacttgtgcagggagaactgtactttacaccctgcatttatactttctgttactag

SEQ ID NO: 51425 - DNA, 3261 bp, Artificial Sequence
  derived and/or modified sequence
atgattgcagtcagtacagccaatggctacattcttttctttcacatcaccagtactcgtggggacaagtacctatatgaacccgtctatcccaaagggagcccacaaatgaaaggtactccgcactttaaagaggagcagtgcgcccctgcgctgaacctcgagatgaggaagattcttgatcttcaagccccaatcatgagcctgcaaagcgtgttagaagatctgcttgtggcaacgtccgatggcctcctgcaccttattcattgggaaggaatgaccaacggaaggaaagcaatcaatttatgtaccgtacccttctctgtggacctgcagtcgagcagagttggatccttcctgggcttcacagatgtccatattcgggatatggaatattgtgccactctggacgggttcgccgtagtgttcaatgacgggaaagttggtttcattactccggtttcatcccggttcacagccgagcagcttcatggagtctggccgcaggatgttgtagacggaacctgtgtggccgtaaataataagtatcgcctgatggcctttggatgcgtgtcaggatccgtacaggtgtacactatcgacaacagcacaggcgcaatgctgttaagccataaattagagttgaccgccaaacagtaccctgatatctggaacaagactggggctgtgaaattaatgaggtggtctcccgataactcggtagtgatcgtgacttgggagtacgggggtctcagcctttggagcgtctttggcgcacagctgatctgcacattgggaggggatttcgcatacaggtctgacggcactaagaaggacccccttaagatcaactctatgagctggggggcagagggctatcacctgtgggtaatttccggtttcgggagccaaaacacggagattgagtctgacctacggtcagtagtgaagcagccgtccattctcctattccagttcataaaatctgtcctcaccgtgaacccatgcatgtcaaaccaagaacaggtgctgctgcagggcgaggatcggctgtatttgaattgcggtgaggcatcccaaacgcaaaaccccaggagcagttccacccatagtgaacacaaacccagccgcgagaaaagtccatttgccgacgggggtctagagtcccagggcctgtcaacactgctgggacacagacattggcacgttgtgcagatctccagcacttacttagagagcaactggccaattcggttctctgctatagacaagttaggccagaatatcgccgttgtcggtaagttcggttttgctcattattctctattaactaaaaaatggaagctgttcggaaacatcacccaagaacagaacatgatcgtgaccggaggtctggcttggtggaacgattttatggtattggcgtgctataacatcaacgaccgccaagaagaattacgggtgtacttgcgcacctccaatcttgataacgcctttgctcacgtcacaaaggcgcaggccgagacgttattgctgagcgttttccaggacatggtcattgtcttccgagccgactgcagtatctgcctctattctatcgagcgaaagagcgatggacctaatacgactgctggcatacaggttcttcaggaggtcagcatgtccaggtatatcccccacccattcctggtggtttctgtaaccttgacaagcgtcagtacagagaatggaataactctcaaaatgcctcaacaagccagaggcgctgagagtattatgttgaatctggccggacaactgataatgatgcagagggataggtctgggcctcagataagggaaaaggactcaaaccctaataaccagcgaaaactgttgccgttttgtccccctgtcgtcctggcacagtctgtggagaatgtgtggaccacatgccgcgcaaacaagcaaaaacgacacctcttggaagccctctggctgtcgtgcggcggagctgggatgaaagtctggctgcccctgttcccaagggatcatagaaagcctcacagctttttgtcccagagaatcatgctgccctttcacatcaacatttatccactcgccgtgctctttgaggacgcactcgtactcggtgctgtgaacgatacactgctctacgatagcttgtacactagaaacaatgcacgcgaacagctggaggttctgttcccattctgcgtggtggagcgaacgtcacagatttatctgcaccacatcctccgccaacttctggttagaaatctgggggagcaggccttgcttctagcccaatcttgtgccaccttgccttactttccacacgtgcttgaattgatgctgcacgaggttctggaagaagaggctacaagcagggaaccaatccccgatccactgctccccacagttgccaagttcattaccgaattcccactgtttctccagactgtcgtgcactgtgccagaaaaaccgagtacgcgttatggaactacctgtttgctgctgtgggcaaccccaaggatctgttcgaggagtgtctgatggcacaagatctggatacggccgcttcatacctcatcatcctgcagaatatggaagtcccagcagtttcaagacagcacgccactctactgttcaacactgccctggagcaaggaaagtgggacttatgccggcacatgatcagatttctcaaggccataggctctggcgaatcagaaacaccccctagtacacccacagctcaggaacctagtagctcagggggtttcgagttcttcagaaataggagcatctcgctgtcacagtcagcggagaacgtgccagcctctaagttcagccttcagaaaacattatcgatgccaagcggccctagcggtaagcggtggagtaaggactctgactgtgctgagaatatgtacatagacatgatgctgtggagacacgccagaaggctcctggaggatgtgcggttaaaggaccttggctgcttcgctgcccaactcggctttgaacttatttcatggctctgtaaagaacgcacgagagctgccagagtggataatttcgttatcgctctgaagcgcttgcacaaagatttcctctggcccttgcccattatccctgcttcgtcaatctcatcgccttttaaaaatggaaaataccgcacgggaaacgtagatttcatgagtctggtccaaggtgagctgtattttactccctgtatctacactttttgttattag

SEQ ID NO: 51426 - protein, 1590 aa, Artificial Sequence
  derived and/or modified sequence
MPGGACVLVIALMFLAWGEAQECSPGGHQFLRSPYRSVRFDSWHLQQSAVQDLICDHSLSPGWYRFLILDRPAEMPTKCVEMNHCGTQAPIWLSLRDSETLPSPGEIKQLTACATWQFLFSTTKDCCLFQIPVSVRNCGNFSVYLLQPTQGCMGYCAEAISDARLHPCGSDETETGGDCVRQLAASLPPPPAGRPEVLVELIESRLFCRCSFDVPATKNSVGFHIAWSRLSSQEVKEELTQETTVQAFSLLELDGINLRLGDRIFCSASVFFLENPHVQSVAIESQEFFAGFKLQPELSTISEDGKEYYLRIESTVPIICSEFSELDQECKISLKLKTIGQGREHLGLNLALSSCHVDLLQTSSCANGTCSHTFVYYTAVTDFSRDGDRVSNIVVQPIVNEDFLWNNYIPDSIQIKVKDVPTAYCYTFTDPHIITFDGRVYDNFKTGTFVLYKSMSRDFEVHVRQWDCRSLHYPVSCNCGFVAQEGGDIVTFDMCNGQLRESQPYLFIKSQDVTRNIKISESYLGRKVTIWFSSGAFIRADLGEWGMSLTIRAPSVDYRNTLGLCGTFDENPENDFHDKNGMQIDQNFNNYVAFINEWRILPGKSMSDTLPVSMTSPGKPSYCSCSLDTAAYPSSEDLDSVSRSEIALGCKDLNHVSLSSLIPELDVTSEYINSDTLVREINKHTSPEEYNLNLFLQEKKHINLTKLGLNVQKHPGNEKEDSLQYLANKKYTQGRGSHSQEMRYNRQNRWKRQNFHEFPPLFAFPSLSQTDLEELTYFFPEDHAEDVQQEFFPSWPTPSGLTEYSTLTLCQETLANSSIGRLCLAFLGKRLDSVIEMCVKDVLLKDDLSWAEAGVALLENECEKRIVEEGKYNTEEYGTSIEDILSVLKCPNLCSGNGQCMEWGCACSPSFSSYDCSDSYDKAPEITELGNAGFCDVQKYNCMMVRVFGKGFKELPSIKCEVTKLQYNSSEWMPGEPIYTQTVFHNSRAVDCQLPTDVQQFDTMDLVGGKPTGKWQLKVSNDGYKFSNPKITVIYDGACQVCGLYKNDSCTIKENVCIIDGLCYVEGDKNPTSPCLICRPKISRFTWSFLENNQPPVIQALQDKLQTFYGENFEYQFVAFDPEGSDIHFTLDSGPEGASVSSAGLFMWKTDLLTTQQITVRLNDDCDAETRVTIEVTVKSCDCLNGGSCVSDRNFSPGSGVYLCVCLPGFHGSLCEVDISGCQSNPCGLGSYISGFHSYSCDCPPELKVETQFVNQFTTQTVVLTRSDKSVNKEEDDKNAQGRKRHVKPTSGNAFTICKYPCGKSRECVAPNICKCKPGYIGSNCQTALCDPDCKNHGKCIKPNICQCLPGHGGATCDEEHCNPPCQHGGTCLAGNLCTCPYGFVGPRCETMVCNRHCENGGQCLTPDICQCKPGWYGPTCSTALCDPVCLNGGSCNKPNTCLCPNGFFGEHCQNAFCHPPCKNGGHCMRNNVCVCREGYTGRRFQKSICDPTCMNGGKCVGPSTCSCPSGWSGKRCNTPICLQKCKNGGECIAPSICHCPSSWEGVRCQIPICNPKCLYGGRCIFPNVCSCRTEYSGVKCEKKIQIRRH

SEQ ID NO: 51427 - protein, 944 aa, Artificial Sequence
  derived and/or modified sequence
MSLTIRAPSVDYRNTLGLCGTFDENPENDFHDKNGMQIDQNFNNYVAFINEWRILPGKSMSDTLPVSMTSPGKPSYCSCSLDTAAYPSSEDLDSVSRSEIALGCKDLNHVSLSSLIPELDVTSEYINSDTLVREINKHTSPEEYNLNLFLQEKKHINLTKLGLNVQKHPGNEKEDSLQYLANKKYTQGRGSHSQEMRYNRQNRWKRQNFHEFPPLFAFPSLSQTDLEELTYFFPEDHAEDVQQEFFPSWPTPSGLTEYSTLTLCQETLANSSIGRLCLAFLGKRLDSVIEMCVKDVLLKDDLSWAEAGVALLENECEKRIVEEGKYNTEEYGTSIEDILSVLKCPNLCSGNGQCMEWGCACSPSFSSYDCSDSYDKAPEITELGNAGFCDVQKYNCMMVRVFGKGFKELPSIKCEVTKLQYNSSEWMPGEPIYTQTVFHNSRAVDCQLPTDVQQFDTMDLVGGKPTGKWQLKVSNDGYKFSNPKITVIYDGACQVCGLYKNDSCTIKENVCIIDGLCYVEGDKNPTSPCLICRPKISRFTWSFLENNQPPVIQALQDKLQTFYGENFEYQFVAFDPEGSDIHFTLDSGPEGASVSSAGLFMWKTDLLTTQQITVRLNDDCDAETRVTIEVTVKSCDCLNGGSCVSDRNFSPGSGVYLCVCLPGFHGSLCEVDISGCQSNPCGLGSYISGFHSYSCDCPPELKVETQFVNQFTTQTVVLTRSDKSVNKEEDDKNAQGRKRHVKPTSGNAFTICKYPCGKSRECVAPNICKCKPGYIGSNCQTALCDPDCKNHGKCIKPNICQCLPGHGGATCDEEHCNPPCQHGGTCLAGNLCTCPYGFVGPRCETMVCNRHCENGGQCLTPDICQCKPGWYGPTCSTALCDPVCLNGGSCNKPNTCLCPNGFFGEHCQNAFCHPPCKNGGHCMRNNVCVCREGYTGRRFQKRHL

SEQ ID NO: 51428 - DNA, 4773 bp, Artificial Sequence
  derived and/or modified sequence
atgccaggcggagcatgcgtgctagtcatcgccttgatgtttttagcttggggggaggctcaggaatgctcgccaggaggccaccagtttttaagaagcccctaccgtagcgttcgcttcgacagctggcatctacagcaatccgccgtgcaggatttaatctgcgaccactctctgtctcccggttggtatcgcttcttgattttggaccgccctgccgaaatgcctactaaatgcgtggagatgaatcattgcggtacacaggccccaatatggctgagtctccgggatagcgagacacttcctagtccgggtgaaataaagcagttgacagcatgcgccacatggcaatttttgttctccaccacgaaagactgctgcttatttcagattcccgtgagcgtgcgaaactgtggtaacttctcagtatacctgcttcagcccacgcaggggtgcatgggctactgcgccgaggctatctcagacgccaggctgcatccttgcggcagcgatgaaactgagactgggggagactgtgtacggcagcttgccgctagcctccctccgccacccgcagggaggcccgaggtactggttgaactcattgaaagtcgccttttttgtcgctgtagttttgacgtgcctgcaacgaaaaattcggtgggttttcatattgcatggtcccggctcagctctcaagaagtaaaggaggaattgacacaagagaccacagtccaagccttctctttgctcgaacttgacggcataaacttacgactgggagacagaatcttctgctctgcctccgtattcttcctcgaaaacccccatgtgcagtccgttgccatcgaaagccaggagttttttgcgggttttaagctgcagccggagctcagcacaatttctgaagacggaaaggaatactacctgcgaatagagtcgactgtaccaatcatatgttccgaattttcggagctcgatcaggagtgcaagatctcacttaaactcaagacaattgggcagggacgcgaacacctgggactcaacttagcactgtcttcatgtcacgtggatctgcttcagacatcctcttgtgccaacggcacatgttcccacaccttcgtgtattatacagccgtcaccgatttttctcgcgatggggaccgagtgagtaatatagtcgtgcagccaatcgtcaatgaggattttttgtggaataattatattccagatagtattcagattaaggtgaaagatgttccaaccgcatactgttacactttcaccgacccacacattattacctttgatgggagggtgtatgataattttaagacgggaaccttcgtgctctacaagagcatgtcacgcgattttgaggtacacgtcaggcagtgggactgtcgctctctgcactatccagtcagttgcaactgtggctttgtagcacaggaagggggagatatagttacctttgatatgtgcaacggacagctgcgcgaatctcagccctacctatttatcaagtcccaggacgtcactcggaatattaaaatctccgagtcttacctggggagaaaagtcaccatctggttcagttccggggctttcattagagctgatttgggtgagtggggaatgtctctaacaatacgggcacccagcgtagactatcgcaacaccctggggttgtgcggaacattcgatgaaaatcccgaaaatgactttcacgacaagaacggaatgcaaatcgaccaaaactttaataattacgtcgcattcatcaacgagtggcggatacttcccggaaaatccatgagcgatacccttcccgtatcaatgacttctccaggcaaaccatcctactgttcctgctcactcgatactgccgcttatccttcttccgaagacctcgatagcgtgtccaggagtgagatcgctcttgggtgtaaggatctcaaccatgtatcactgtcctcccttattcctgagctggacgtgacgagtgagtatatcaactctgataccctcgtgcgagagataaacaaacatacttctccagaagaatataatttgaaccttttcctccaggagaaaaagcacatcaatttgactaaattgggcctgaatgtgcagaaacatccaggaaatgagaaggaggattctctgcagtaccttgcaaataagaagtacacacaagggagggggtcacacagccaggagatgcgatataacagacaaaaccgctggaaacggcagaactttcatgagttccccccactgtttgctttccctagcctgtcacaaaccgacctggaagagctcacctacttcttccctgaagatcacgccgaagacgtccaacaggagttttttcccagttggcccaccccctccggcctcacagagtacagcaccctgacactttgtcaggagacccttgccaattcctccattggccgactatgcttggcgttcttgggaaagcgcttggactctgttatcgagatgtgcgtcaaggacgtcttactgaaagatgacttatcctgggccgaggcgggtgtggctctcctggaaaatgaatgcgagaagcgaattgtggaagagggcaagtataacaccgaagaatatggcacttcgatcgaggatatcttatctgtactgaagtgccctaacctttgcagcggaaacgggcagtgcatggagtggggctgcgcttgctctcctagcttttcaagctatgactgttccgattcatacgacaaagctccggaaataaccgagctgggcaatgccggtttttgtgatgttcagaagtacaactgcatgatggttcgggtgttcggcaaaggctttaaagaactgcccagtatcaaatgtgaggttaccaagctgcagtacaattcttctgagtggatgcccggagaaccgatctacacccagaccgtattccataactcccgggctgtggattgccagctccctactgatgtccagcagttcgataccatggatctggtgggaggcaagcccaccgggaagtggcagcttaaagtgtccaatgacggttacaagttctccaatcctaaaatcaccgtgatctatgacggggcatgtcaggtatgcggactatacaagaacgattcatgtactattaaggagaacgtttgtattattgacggtttgtgctacgtggagggagataaaaatcctacaagtccatgcctaatatgtcggcctaagattagcagattcacatggagctttttagaaaataatcagccaccagtcattcaagcgttacaggataagctacagactttttatggagagaactttgaatatcaattcgtggctttcgaccccgagggatccgatatccactttacgctcgacagcgggccagaaggagccagcgtatcctctgccggtcttttcatgtggaaaactgacctactaacaacgcagcagatcactgttagattgaatgacgactgcgacgcagagacccgtgtgacgatcgaggttacagtgaagtcatgcgattgtctgaacggtggctcgtgtgtctctgaccgaaatttttcgcctggctcaggggtgtacctgtgtgtttgcctgcctggctttcacggttccttgtgcgaagtggacatatccggttgccaaagcaatccttgtggcctgggctcttacatcagtggttttcattcctactcgtgcgattgtccccctgagttgaaggttgagacgcaatttgtaaaccagttcaccactcagacagtggttctcacgagatcagataaaagcgtaaacaaagaagaagacgataagaatgcccagggtcggaagaggcacgtgaaaccgacgagtgggaatgcgtttaccatctgtaaatacccgtgcgggaaatctcgcgagtgcgttgcgcctaatatctgtaaatgtaagcctggttatattgggagtaactgtcaaaccgcattatgcgaccctgattgtaagaaccatggcaagtgtattaaacctaatatctgccagtgtctccccggacatggcggtgctacttgtgacgaagagcattgcaatccgccttgtcagcatgggggaacatgcttggcaggtaacctatgcacatgtccttatggtttcgtcgggccacgctgcgaaacaatggtgtgtaaccgccactgtgagaatggaggccagtgtttgacccccgatatttgtcaatgcaagcctggatggtacggacctacttgttcgaccgccttatgcgaccctgtctgcctgaacggcggaagctgtaacaagccaaatacctgcctgtgccccaacggtttttttggggagcattgccagaatgctttctgtcaccccccttgcaaaaacgggggacactgcatgcgcaataacgtctgtgtttgcagggaaggctataccggtcggcgtttccagaaaagtatttgcgaccctacctgcatgaacgggggaaagtgcgtcggaccgtcgacatgtagctgccctagtggctggtctggtaagagatgcaacacccctatatgtcttcagaaatgcaagaacggcggagagtgtatagctccctccatctgtcattgcccctcgtcctgggagggcgtcaggtgtcagatcccaatctgtaatcctaagtgtctatacggcggaagatgtatctttcccaacgtatgctcttgcaggaccgaatattctggagtcaagtgcgaaaagaaaatccagatacgacggcattag

SEQ ID NO: 51429 - DNA, 4773 bp, Artificial Sequence
  derived and/or modified sequence
atgccagggggggcatgcgtattggtcatcgctttaatgttccttgcctggggagaggctcaggagtgctcccctggaggacaccaattcttgagatccccttacagaagtgtgagattcgattcctggcaccttcagcagtctgccgtgcaagatctgatatgcgatcattcattgtcacccggatggtataggtttctgatcctggataggccggctgagatgcccactaagtgtgtggagatgaaccactgtggtactcaagcacccatctggctcagtctcagggatagtgagacccttccttctcccggagagattaagcaactcacagcttgtgccacatggcaatttttgtttagcactactaaggactgttgcctgtttcagatcccagtctcagtaaggaactgtggaaatttcagtgtttacctgctgcaacctactcaggggtgtatgggctactgtgccgaagccatcagcgatgcaagactccacccatgcggcagtgacgagacggagacaggcggggactgcgtgcggcaactggctgcttcccttccacctccgccagcagggcgcccagaagttttagttgaactgatagaaagccgattattttgccgctgtagttttgatgtgccagctactaaaaatagtgttggatttcacatcgcttggtccagactgagcagccaggaggtcaaagaggagttgacccaagaaacaacagtacaggcctttagtttattggagctcgatggcatcaacctgagactgggcgaccgtatcttctgctccgctagtgtcttctttctcgagaacccacatgtgcaatcagtagctatcgaatcccaggagtttttcgcgggcttcaaactccagcctgagctgagcactatttctgaggatggcaaagagtactacttgcgcatcgaatcaacagttccaataatttgctctgagtttagtgaactggaccaggagtgtaaaatcagtcttaagctgaagacaatcgggcaagggagagaacatcttggactgaaccttgctctctccagctgtcacgtcgatctcttacagacgtcatcatgcgccaacggaacctgctcacacaccttcgtgtattataccgctgtcactgactttagccgagacggcgacagggttagcaacatcgtggtgcaaccaattgtgaatgaggactttctgtggaataactacatcccagactctattcagataaaggtcaaagacgtaccgaccgcatactgctatactttcaccgacccgcacattattacattcgacggaagagtgtatgacaactttaaaaccgggaccttcgtgctgtacaaaagcatgagcagagacttcgaggtgcatgttcggcagtgggattgccggagcttgcattatcccgtcagctgtaactgcggtttcgtggcgcaggagggtggcgatatcgtgacattcgatatgtgtaacggacagctacgagagagccagccttatctttttataaaatcgcaagatgtcacaaggaatataaaaatctcagaatcatatctaggccgtaaagtgacaatttggttcagtagcggtgccttcattcgagctgacctcggtgagtggggaatgtccctgaccattcgagctccttcagtggactatagaaacacacttggcctctgcgggaccttcgatgagaacccagaaaatgactttcacgataaaaacggcatgcagattgatcaaaactttaacaattatgttgccttcatcaatgaatggaggatattgcctggcaagtcaatgagcgatacattgcctgtgagtatgacatcacccggaaagccctcatactgctcttgtagtttggatacagccgcgtacccgagttcagaagacctggactcagtcagtcgttccgagattgctctgggctgtaaggaccttaatcatgtcagtctgagcagcctgatccccgagctcgacgtgacctccgaatacattaatagcgacactcttgtcagggagatcaataaacataccagtcccgaagaatataacctgaatctgttcctgcaagagaagaaacacattaaccttaccaagctgggcttgaacgtacaaaagcaccctggcaacgagaaggaagacagcttacagtatctcgccaataaaaagtatacccagggacgtggctcgcacagtcaggagatgagatacaaccgtcagaacagatggaagaggcagaacttccacgaatttcctcccttatttgcgtttcctagcctgagccagacggacctggaggaattaacttatttcttccccgaggatcatgccgaggacgtgcagcaagaattctttcccagctggccaaccccaagcggcctgactgagtactccactttaaccttgtgccaggagacactagctaactctagcatcggccgactctgtcttgccttcttgggcaaaaggctggacagcgtaatcgagatgtgtgtgaaagacgtcctgctgaaggatgacctgagttgggccgaagctggcgtggctcttctagagaatgaatgtgaaaaacgcatcgttgaagaagggaagtataacacagaggaatacggcacatcaatcgaggatatcttgtccgtgcttaagtgcccaaatctgtgcagcgggaatgggcagtgcatggagtggggctgtgcatgttctccttctttctccagctatgactgctctgattcctacgacaaggcgcccgagattacagaactgggtaatgccggattttgtgatgtacagaagtataattgtatgatggtgcgagtgttcggcaagggctttaaggagttgccctctatcaagtgcgaggtgacgaaactacagtacaactctagcgagtggatgccaggcgagcccatctacacacagacagtctttcataacagccgggctgttgactgtcaactgcctacagatgtgcagcagtttgacacaatggacctagtgggcggtaaacctacgggtaagtggcagctaaaggtgtccaacgatggatacaaatttagtaatcccaaaataaccgtgatctatgatggcgcatgccaagtgtgcgggctgtataaaaacgactcctgtactattaaagaaaacgtctgtataatcgacggactttgctacgtagaaggtgataaaaatccaacctctccgtgcctgatctgtagacccaaaatcagtcggttcacttggtctttcctggagaataatcagcctcccgtgatacaggccctgcaggataagctccaaaccttctacggcgaaaacttcgagtatcagttcgtggccttcgatccggaaggttcagacatacactttaccttggattctggccccgagggggccagcgttagcagtgcgggacttttcatgtggaaaactgatctgctcaccactcagcaaatcacagttcgcctaaatgatgactgcgacgccgaaactcgcgtcacgattgaagtcaccgtgaagagctgtgattgccttaacggcggctcctgcgtctctgaccgcaacttctccccaggaagtggagtctatctgtgtgtatgcttacctggattccatggatccctttgcgaggttgacattagtgggtgtcagtccaatccttgtggtttgggatcctacatttcaggatttcattcctatagctgtgactgccctcccgaattgaaggtggagacacagtttgtgaatcagttcactacacagaccgtcgtgttgacaagatctgacaaaagcgtgaacaaggaagaagatgacaagaatgcccaagggaggaaaagacacgttaaaccaaccagcggcaacgccttcaccatatgtaagtatccatgcggcaaatctcgcgagtgtgtggctccaaatatatgcaagtgcaagcccgggtacatcgggtctaattgccagacagccctgtgcgatcccgactgtaaaaaccatggaaaatgtatcaaacccaatatttgtcaatgcttaccaggtcatggcggagctacatgtgacgaggagcactgcaaccctccatgccaacacggtggcacatgcctagcaggtaacctctgcacttgcccctacgggttcgtgggtccacgatgtgaaacaatggtctgcaacaggcactgtgaaaatggcggccaatgtctaaccccagacatttgtcagtgtaaaccgggctggtatggcccaacctgttcgaccgcgctttgtgatccagtctgtctaaatgggggatcctgcaataaaccaaacacttgcctgtgtccgaacggatttttcggggaacattgtcaaaatgcgttctgccatcctccctgcaaaaatggaggtcattgcatgcgcaacaatgtgtgtgtgtgtcgcgaagggtatactggaagacggtttcaaaagagcatttgtgaccctacttgtatgaacggcggtaaatgcgtcggaccatctacttgctcctgtccaagcgggtggagcgggaaacgatgcaatactcctatctgtctgcagaaatgtaagaacggcggggaatgtattgcaccctcaatctgccattgcccgagttcttgggagggcgttcgatgccaaatccctatatgcaatcctaagtgtctttatggagggcggtgtatctttccaaacgtctgttcttgtaggacagagtattctggtgtcaagtgtgagaagaaaatccagatccggaggcactag

SEQ ID NO: 51430 - DNA, 4773 bp, Artificial Sequence
  derived and/or modified sequence
atgcctggcggcgcttgcgtcctggtgatcgccctcatgtttctggcctggggcgaagcacaagaatgttcacccggaggacatcagtttttacggagcccatatcgaagcgtccggttcgactcctggcatttgcaacagtccgcagtccaggacctgatttgtgatcactcactttcacccggatggtaccggtttctaatccttgaccgccccgctgaaatgcccacaaaatgcgttgagatgaaccattgtggcacccaagctcccatatggctgagcctgagagacagcgaaactttgccttcacccggggagatcaaacagctcacagcctgtgcaacctggcagttcctgttttccaccaccaaggactgttgtctttttcaaattcccgtgagcgtgcgaaattgtggcaatttttccgtttatctgctgcagccaacacaaggatgcatgggttactgtgccgaagctatcagcgatgcgagattacatccgtgtggtagtgatgaaaccgagacaggcggggattgtgtgagacagctcgctgcgagcctgccgccgcctccagccggccggccagaagtgcttgtcgaactgattgaaagccgactgttctgtcgctgcagttttgacgtgcctgcaacaaagaattcagtcgggttccatattgcgtggtctcgcctgtcatcccaagaagtgaaggaagagttgacccaagaaacaaccgtgcaagccttttcactactggagttggacggtatcaacctgcgcctgggcgatagaattttctgtagtgctagtgttttctttttggaaaacccacacgtccagtccgttgctatcgaaagccaagaattctttgctggatttaaactacagcctgagctgagcaccataagcgaggacgggaaagaatactatttgcgaattgaatcaaccgtccctattatttgttccgaattttccgagttagaccaggaatgcaaaattagcttaaagcttaagaccatagggcaggggcgcgaacatctgggcctgaatctcgcactctcatcttgtcatgtggacctgctgcaaacatccagctgcgcaaatggcacctgctctcatacatttgtctactacactgctgtgaccgatttcagtcgagacggggatagggtaagcaatatagtggtccagccaattgtgaacgaagatttcctgtggaataactacattcccgacagtattcagattaaggttaaggacgtccctaccgcatattgttatacatttactgacccccacattattactttcgacggccgagtatatgataactttaagaccgggacattcgtgctgtataagagcatgtcacgcgacttcgaggtacacgtccggcaatgggactgccgctctttacattacccagtcagctgcaattgtggattcgtagcccaggaagggggagatatcgttaccttcgacatgtgtaatggtcagttaagagaatcccaaccttacctcttcatcaaatcccaagacgttacccgtaacataaagatctcggagagttaccttggccgcaaagttacaatttggtttagctcgggcgccttcatccgggccgatttgggggagtggggcatgtccctaactatcagggctccctccgtagactataggaacactcttggattgtgcggcacctttgatgagaatccagagaatgattttcacgataagaatggaatgcagatagatcagaactttaataattacgtggccttcatcaacgaatggcgtatcctacccggaaagagcatgtctgatacacttccagtctccatgaccagccccggtaagcccagttattgtagttgctccctggataccgcagcctacccctcaagcgaggatctcgactccgtcagtaggtctgaaatagccctgggttgcaaggatctgaatcacgtgtctttgtctagccttattccagaacttgacgttacatcagaatacattaacagcgacactttagttcgagagatcaacaagcacacaagccccgaagaatacaaccttaatctcttcctgcaggagaagaagcatattaaccttacaaaattaggccttaacgtgcagaaacatcctggaaacgagaaggaggacagtttacagtaccttgcgaataaaaagtacactcagggcagaggatctcacagtcaggagatgcggtacaacaggcagaatagatggaaaagacagaacttccacgaattcccacccctatttgcttttcccagtctgtcacaaacggatctcgaagagctcacttatttctttccagaggaccatgccgaagatgttcagcaggagttctttccaagttggcccactccctccggccttaccgagtattctacacttaccctttgtcaggagacccttgcaaatagttccattgggagactctgcctggctttccttggcaaaaggttggacagcgtcatcgaaatgtgtgtaaaggatgtgttgcttaaagacgacttgtcgtgggccgaggctggcgtcgccctgctcgagaacgagtgcgaaaagagaattgtcgaagaaggcaaatacaacacagaggagtatggaacatccattgaagatatcctgtcggtcctgaagtgccccaatctgtgttctggaaacggtcaatgtatggaatgggggtgtgcttgttccccatcgttctcttcctatgattgttctgattcatacgacaaagctcctgagatcaccgaactcggcaacgctggcttctgcgacgtccagaagtacaactgcatgatggtacgcgtcttcggaaagggattcaaggaattacctagtattaaatgtgaagtgactaagctccaatataactcaagtgaatggatgccgggcgagcccatttacacccagacagtgttccataactctagagcagtggattgtcagctccctaccgatgtccagcagttcgatacaatggatcttgtcggggggaagccaaccgggaaatggcagttaaaggtgagtaatgacggctacaaattttctaatccaaagataacagtgatctatgacggagcttgtcaggtttgcggattgtacaagaatgatagttgtaccataaaggagaatgtgtgcataattgatgggttatgctatgtcgagggcgacaagaacccaacttccccgtgcctgatctgccggccaaaaataagtcgcttcacatggagctttcttgagaataaccaaccacctgtgatacaggctttacaggacaaactccagaccttttacggcgagaacttcgagtatcaatttgttgccttcgacccggagggatccgatattcatttcacactagacagtggtcccgaaggggcctcagtgagctctgcaggactgtttatgtggaagaccgatctcctcacaacacaacagatcacagttcgacttaacgacgattgcgatgccgaaaccagagttacgattgaggtcacagtgaaatcgtgcgactgcttgaatgggggctcttgcgtatctgaccggaattttagccccggatccggtgtctatctgtgtgtttgtttgccaggatttcacggatcattgtgcgaagtagacatttccggttgccaatccaacccttgcggcctcggcagctatatttcaggatttcattcttactcctgcgattgcccacctgagttaaaggtggaaacccaattcgtgaaccaatttacgacacagaccgtggtgttaactagaagcgacaagagcgtgaacaaagaagaggacgataagaatgctcagggaagaaagagacacgtgaagccgacatcagggaacgccttcaccatttgcaagtacccctgtgggaaaagtagagagtgcgtggcccccaatatctgcaagtgcaaacccggttatatcggcagcaactgtcagaccgccctgtgtgacccagactgtaaaaatcacggaaagtgtatcaagcccaacatttgtcagtgtttaccaggacatgggggtgcaacttgtgatgaggaacattgtaatcctccctgtcagcatggcggaacatgcctagccggaaatctttgcacatgcccctacggctttgtcggccccagatgcgaaactatggtttgtaatcggcactgcgaaaatgggggacaatgcttaacaccagatatttgccaatgtaaaccgggttggtacggccccacatgttcaaccgccctgtgtgatcctgtgtgtctcaacggtgggagctgcaataaacccaatacctgtctctgtcccaacggattctttggcgaacactgccagaatgctttctgccaccccccttgcaaaaacggaggacattgcatgaggaacaatgtctgtgtttgccgagaagggtatacaggcaggcggttccaaaagagtatctgcgatcccacttgtatgaatggaggcaaatgcgtgggcccctcaacctgcagttgtccaagcggttggtccggtaaaaggtgtaacacgccaatctgcctccagaaatgtaagaacggaggagaatgtatcgccccttcaatttgccattgtcccagttcatgggagggcgtgagatgtcagatccccatatgtaatcccaaatgtctttatggcggaaggtgtattttcccgaacgtatgctcttgcagaaccgagtatagcggagtgaaatgcgagaagaagatccaaattcggagacactag

SEQ ID NO: 51431 - DNA, 5260 bp, Artificial Sequence
  derived and/or modified sequence
acgcgaaggctctatcccacgaaaggactgggtgcaccccagaacgaggacgcggagcttccctgttccaagcagcaacagactgagaaaatccaagaaaggaggcccgaggggctgctgtggccccatcctcctggcacccgcggcccgggctctgcgacgcctttcgccccacctgcggaagcagcgatgcctggcggagcctgcgtgctggtgatcgcgctgatgttcctggcctggggggaagctcaggagtgctctcctgggggacaccagtttcttcggagtccttatagaagtgtccgttttgactcatggcacctccagcagtcagctgttcaagacctaatatgtgaccattccctctcccctggatggtatagatttctcatccttgacagacctgccgagatgccaaccaaatgtgttgagatgaaccattgtggaactcaggcccccatctggctgtctctgagagattcagaaacactgccatctcctggggagatcaagcaattgacagcttgtgcaacatggcagtttttgttcagcactacaaaagactgctgtctctttcaaatcccagtgtctgtaagaaactgtgggaacttttctgtatacttactacaaccaactcagggatgtatgggctactgtgcggaagctatttctgatgcacgattacacccatgtggttctgatgaaactgaaacaggaggtgattgtgttcgtcagctggctgcctcattgccacctccacctgcaggaaggccagaggttctggtggagttgattgagtccaggcttttctgtaggtgttcttttgatgttcccgctacaaaaaactcagtgggatttcacatagcttggtctaggctttcttctcaagaagtcaaagaggagctgacacaagagaccacagttcaggcattctctcttttagaacttgatggcataaatctcagacttggagacaggatattctgcagcgcttctgtctttttcttggagaatcctcatgtacaaagtgtagccatcgaaagccaagaattttttgcaggctttaagctacagcctgaattgagcactatatcagaggatgggaaagaatactacctgaggatagaaagcacagttcctattatttgttctgaatttagtgagcttgatcaagaatgcaaaatctcattaaaactgaaaactattggtcaaggtagagagcacctaggcttaaatttggcactgtcttcctgtcatgtggaccttctccagacatcttcctgtgctaatggaacctgtagccacacttttgtgtactacactgctgtcacagatttttctcgagatggagatagagtctcaaacattgtagtgcaaccaatagttaatgaggatttcctgtggaacaactacattccagacagcatccagatcaaagtaaaggatgtcccaactgcttactgctatacatttactgacccacatataattacatttgatggcagggtatatgataatttcaagactggaacatttgtgctttataagagtatgtcacgtgattttgaagtccatgtacgtcagtgggactgcagaagccttcactatccagtgtcatgtaattgtgggtttgttgcccaggaaggaggtgatatagttacttttgatatgtgcaatggtcagctacgtgaatcacaaccatatttgttcataaaaagccaagatgtaaccaggaatatcaagataagtgaatcttacttaggaagaaaagtcacaatctggttttcttctggggcatttatccgtgctgatcttggtgaatggggcatgagtctaacgatcagagcccctagtgtagattacagaaacactctgggactttgtggaacctttgatgaaaatccggaaaatgatttccatgacaaaaatgggatgcaaattgatcaaaattttaacaattatgttgcttttattaatgaatggaggattttaccaggaaaaagcatgtctgacacactgccagtttctatgacatcacctggaaagccatcctattgtagctgttcattggacactgcagcgtatccgtcttccgaagatctggacagtgtttctcgatcagaaattgccttgggttgcaaagacctcaatcatgtcagcttatcttctttgataccagaactagatgtcacctccgaatatattaattcagacactcttgtcagagagataaacaagcatacatctccagaagaatataatctaaatttatttctgcaagaaaaaaaacacataaacctgactaaactcggcttaaatgtacaaaaacatcctggaaatgagaaagaagattcactacaatatttggccaataagaaatatacacaaggccggggaagccacagccaagaaatgaggtacaatcgacaaaacagatggaaacggcagaactttcatgagtttcctcctttgtttgctttcccgagtctcagccaaacggatctggaagaacttacttattttttcccagaggaccatgctgaggatgtacagcaagagtttttcccctcttggcccactccctctggcctcaccgagtatagcaccttgaccctctgtcaggagactctagccaactccagcataggaaggctgtgtcttgcttttcttggcaagagattagacagtgttatagagatgtgtgtgaaggatgttctgttaaaagatgatcttagttgggcagaagcaggtgtggcccttttagaaaatgaatgtgaaaagaggattgtggaggaggggaaatataacacagaagagtatggcacatcaattgaagacattctctcagtattaaaatgccccaatttatgcagcggcaatgggcagtgcatggaatgggggtgtgcgtgttccccaagctttagttcctatgactgcagtgattcctatgacaaagctcctgaaattacagagcttgggaatgctggattctgtgatgttcaaaaatataattgtatgatggtgagagtttttggcaaaggcttcaaagaattaccttcaattaaatgtgaagttactaagctacagtataatagcagtgaatggatgcctggagaacccatctatacacagactgttttccacaatagcagagctgttgattgtcagctgcccactgatgttcagcagtttgataccatggatctggtgggtgggaaaccaactgggaagtggcagttgaaggtatctaatgatggttataaattcagtaatcccaaaataacggtcatatatgatggtgcttgccaagtttgtggtctctataaaaatgactcatgtactataaaggaaaatgtttgcattattgatggactctgctatgttgaaggagacaaaaatccaaccagcccttgtttgatttgtagacccaaaatttcaagatttacttggtcatttttagaaaacaaccagcccccagtgattcaagcattgcaagacaaattacagacattttatggtgaaaactttgagtatcagttcgtggccttcgatccagaaggttctgacatccattttacgttggactctggtcctgaaggggcaagtgtttcctctgcagggctttttatgtggaaaacagatttactaactacccaacaaattactgtacgccttaatgatgactgcgatgctgaaactagagtcacgattgaggtgactgtgaagtcttgtgattgcttgaatggtggatcatgtgtatctgataggaacttttctccagggagtggagtgtacctgtgtgtctgcttgcctggcttccatggcagcctttgtgaagtggacattagtgggtgccaatccaacccttgtggtcttggcagctatattagtggttttcacagttattcctgtgattgtccacctgagctcaaagttgaaacacagtttgtaaatcaatttactacacaaactgtggttctcacaagatctgataaaagtgtaaataaagaagaggatgataaaaatgcccaagggagaaagaggcatgttaagccaacaagtggaaatgccttcaccatttgtaaatatccatgtggaaaaagtagggagtgtgttgccccaaacatctgcaaatgtaaacctggttacattggttctaactgccaaactgctctttgtgaccctgattgcaaaaaccatggaaaatgtattaagcctaacatttgtcagtgtcttccaggacatggtggagcaacctgtgatgaagaacattgtaacccaccttgtcaacatggtggcacatgcttggctgggaatctctgcacttgtccttatggttttgtaggaccaaggtgtgaaacaatggtttgtaacaggcactgtgaaaatggaggccagtgtcttacaccagatatttgccagtgcaaacctggctggtatggacccacctgtagtacagctttgtgcgaccctgtctgcctcaatggtggttcgtgtaataagccaaatacttgcctctgtccaaatggattctttggggaacactgtcagaatgctttctgtcaccctccctgtaagaatggtggccactgcatgagaaataatgtgtgcgtctgtcgtgaaggatacactggtaggagattccaaaaaagcatctgtgatcctacgtgcatgaatggaggaaaatgtgtgggaccaagcacttgctcttgtccttctggttggagtgggaaacgatgcaacacacctatctgcttgcagaaatgtaaaaacggtggtgaatgcattgcgcccagcatatgccattgtccttcctcctgggaaggagtgcggtgtcaaataccaatttgcaacccaaaatgtctttatggaggcagatgcatatttcccaatgtgtgttcctgccgcactgaatactctggagtcaaatgtgagaagaaaatacagataagacgccattgagtagcatcaagtatatgaattacaagcctgtatcttaagaatggaaatattttgttcagaaaaagttggagataacttggagtttatttgaacatcattcaaaaaatatcttaaagactgaagaaactaataaaatacataatgatctctgttgtaatcatagagaaaagcaaagaagaaatccaggtaatctaaatttgatgttgagatgggataggatatttacatattgagatgatgtatctgatattccacccattcacaatatttaataaactgaatattttctcagccctaa

SEQ ID NO: 51432 - DNA, 4773 bp, Artificial Sequence
  derived and/or modified sequence
atgcccggcggcgcctgcgtgctggtgatcgccctgatgttcctggcctggggcgaggcccaggagtgcagccccggcggccaccagttcctgagaagcccctacagaagcgtgagattcgacagctggcacctgcagcagagcgccgtgcaggacctgatctgcgaccacagcctgagccccggctggtacagattcctgatcctggacagacccgccgagatgcccaccaagtgcgtggagatgaaccactgcggcacccaggcccccatctggctgagcctgagagacagcgagaccctgcccagccccggcgagatcaagcagctgaccgcctgcgccacctggcagttcctgttcagcaccaccaaggactgctgcctgttccagatccccgtgagcgtgagaaactgcggcaacttcagcgtgtacctgctgcagcccacccagggctgcatgggctactgcgccgaggccatcagcgacgccagactgcacccctgcggcagcgacgagaccgagaccggcggcgactgcgtgagacagctggccgccagcctgccccccccccccgccggcagacccgaggtgctggtggagctgatcgagagcagactgttctgcagatgcagcttcgacgtgcccgccaccaagaacagcgtgggcttccacatcgcctggagcagactgagcagccaggaggtgaaggaggagctgacccaggagaccaccgtgcaggccttcagcctgctggagctggacggcatcaacctgagactgggcgacagaatcttctgcagcgccagcgtgttcttcctggagaacccccacgtgcagagcgtggccatcgagagccaggagttcttcgccggcttcaagctgcagcccgagctgagcaccatcagcgaggacggcaaggagtactacctgagaatcgagagcaccgtgcccatcatctgcagcgagttcagcgagctggaccaggagtgcaagatcagcctgaagctgaagaccatcggccagggcagagagcacctgggcctgaacctggccctgagcagctgccacgtggacctgctgcagaccagcagctgcgccaacggcacctgcagccacaccttcgtgtactacaccgccgtgaccgacttcagcagagacggcgacagagtgagcaacatcgtggtgcagcccatcgtgaacgaggacttcctgtggaacaactacatccccgacagcatccagatcaaggtgaaggacgtgcccaccgcctactgctacaccttcaccgacccccacatcatcaccttcgacggcagagtgtacgacaacttcaagaccggcaccttcgtgctgtacaagagcatgagcagagacttcgaggtgcacgtgagacagtgggactgcagaagcctgcactaccccgtgagctgcaactgcggcttcgtggcccaggagggcggcgacatcgtgaccttcgacatgtgcaacggccagctgagagagagccagccctacctgttcatcaagagccaggacgtgaccagaaacatcaagatcagcgagagctacctgggcagaaaggtgaccatctggttcagcagcggcgccttcatcagagccgacctgggcgagtggggcatgagcctgaccatcagagcccccagcgtggactacagaaacaccctgggcctgtgcggcaccttcgacgagaaccccgagaacgacttccacgacaagaacggcatgcagatcgaccagaacttcaacaactacgtggccttcatcaacgagtggagaatcctgcccggcaagagcatgagcgacaccctgcccgtgagcatgaccagccccggcaagcccagctactgcagctgcagcctggacaccgccgcctaccccagcagcgaggacctggacagcgtgagcagaagcgagatcgccctgggctgcaaggacctgaaccacgtgagcctgagcagcctgatccccgagctggacgtgaccagcgagtacatcaacagcgacaccctggtgagagagatcaacaagcacaccagccccgaggagtacaacctgaacctgttcctgcaggagaagaagcacatcaacctgaccaagctgggcctgaacgtgcagaagcaccccggcaacgagaaggaggacagcctgcagtacctggccaacaagaagtacacccagggcagaggcagccacagccaggagatgagatacaacagacagaacagatggaagagacagaacttccacgagttcccccccctgttcgccttccccagcctgagccagaccgacctggaggagctgacctacttcttccccgaggaccacgccgaggacgtgcagcaggagttcttccccagctggcccacccccagcggcctgaccgagtacagcaccctgaccctgtgccaggagaccctggccaacagcagcatcggcagactgtgcctggccttcctgggcaagagactggacagcgtgatcgagatgtgcgtgaaggacgtgctgctgaaggacgacctgagctgggccgaggccggcgtggccctgctggagaacgagtgcgagaagagaatcgtggaggagggcaagtacaacaccgaggagtacggcaccagcatcgaggacatcctgagcgtgctgaagtgccccaacctgtgcagcggcaacggccagtgcatggagtggggctgcgcctgcagccccagcttcagcagctacgactgcagcgacagctacgacaaggcccccgagatcaccgagctgggcaacgccggcttctgcgacgtgcagaagtacaactgcatgatggtgagagtgttcggcaagggcttcaaggagctgcccagcatcaagtgcgaggtgaccaagctgcagtacaacagcagcgagtggatgcccggcgagcccatctacacccagaccgtgttccacaacagcagagccgtggactgccagctgcccaccgacgtgcagcagttcgacaccatggacctggtgggcggcaagcccaccggcaagtggcagctgaaggtgagcaacgacggctacaagttcagcaaccccaagatcaccgtgatctacgacggcgcctgccaggtgtgcggcctgtacaagaacgacagctgcaccatcaaggagaacgtgtgcatcatcgacggcctgtgctacgtggagggcgacaagaaccccaccagcccctgcctgatctgcagacccaagatcagcagattcacctggagcttcctggagaacaaccagccccccgtgatccaggccctgcaggacaagctgcagaccttctacggcgagaacttcgagtaccagttcgtggccttcgaccccgagggcagcgacatccacttcaccctggacagcggccccgagggcgccagcgtgagcagcgccggcctgttcatgtggaagaccgacctgctgaccacccagcagatcaccgtgagactgaacgacgactgcgacgccgagaccagagtgaccatcgaggtgaccgtgaagagctgcgactgcctgaacggcggcagctgcgtgagcgacagaaacttcagccccggcagcggcgtgtacctgtgcgtgtgcctgcccggcttccacggcagcctgtgcgaggtggacatcagcggctgccagagcaacccctgcggcctgggcagctacatcagcggcttccacagctacagctgcgactgcccccccgagctgaaggtggagacccagttcgtgaaccagttcaccacccagaccgtggtgctgaccagaagcgacaagagcgtgaacaaggaggaggacgacaagaacgcccagggcagaaagagacacgtgaagcccaccagcggcaacgccttcaccatctgcaagtacccctgcggcaagagcagagagtgcgtggcccccaacatctgcaagtgcaagcccggctacatcggcagcaactgccagaccgccctgtgcgaccccgactgcaagaaccacggcaagtgcatcaagcccaacatctgccagtgcctgcccggccacggcggcgccacctgcgacgaggagcactgcaaccccccctgccagcacggcggcacctgcctggccggcaacctgtgcacctgcccctacggcttcgtgggccccagatgcgagaccatggtgtgcaacagacactgcgagaacggcggccagtgcctgacccccgacatctgccagtgcaagcccggctggtacggccccacctgcagcaccgccctgtgcgaccccgtgtgcctgaacggcggcagctgcaacaagcccaacacctgcctgtgccccaacggcttcttcggcgagcactgccagaacgccttctgccaccccccctgcaagaacggcggccactgcatgagaaacaacgtgtgcgtgtgcagagagggctacaccggcagaagattccagaagagcatctgcgaccccacctgcatgaacggcggcaagtgcgtgggccccagcacctgcagctgccccagcggctggagcggcaagagatgcaacacccccatctgcctgcagaagtgcaagaacggcggcgagtgcatcgcccccagcatctgccactgccccagcagctgggagggcgtgagatgccagatccccatctgcaaccccaagtgcctgtacggcggcagatgcatcttccccaacgtgtgcagctgcagaaccgagtacagcggcgtgaagtgcgagaagaagatccagatcagaagacactag

SEQ ID NO: 51433 - DNA, 4773 bp, Artificial Sequence
  derived and/or modified sequence
atgcctgggggcgcttgcgtgctggtgattgccttgatgttccttgcgtggggggaggctcaggaatgctctcctggcggccatcagtttctccgctctccctacaggagcgtaaggttcgactcttggcacctgcagcagtccgccgtacaggatttaatttgcgaccattccctgagcccaggatggtatcgcttcctaatcctggaccggcccgcagaaatgcctaccaaatgcgttgagatgaatcactgcggcacacaggcgccgatctggctgtccttgcgcgattccgagacactcccttccccaggtgagataaagcagcttactgcctgtgccacatggcagttcttgttctctaccaccaaggattgctgtctattccaaatccctgtgagcgtgcgtaattgtgggaacttctcagtgtacctgcttcaaccaacacagggctgcatggggtattgtgccgaggcaatctcagacgctagactccacccctgtggcagcgatgaaacagagacgggcggagactgcgtgagacagctggctgcatctctgcccccccctccagcaggaagaccggaagttcttgtggaattaattgaatcccggctattctgtcggtgttcctttgatgtgccagccacaaagaactctgtggggttccacatcgcctggagtagactgtcttctcaggaggtcaaggaggagctgacacaggagacaaccgtccaggccttctcactcctggaattggacggtataaatctccgcctgggggatagaattttctgcagcgctagcgtgttcttcctcgaaaacccgcacgttcagtccgtcgccattgagtctcaggaattcttcgcaggttttaaactccaaccagaactgtcgacaatctcagaggacgggaaagagtactacctgagaattgagtcaacagtgcctattatttgcagcgagttctctgagttagaccaagagtgtaagatttctctaaaactaaagacaataggccagggccgcgaacacttggggctgaacttggctctgtcgtcctgccacgtcgacctgttacagacctcctcttgcgctaacgggacttgttcccatacattcgtttactataccgccgtgaccgacttttcaagagatggggatagggttagcaacattgttgtgcagcctatagtgaacgaagatttcctgtggaataattatatcccagattcgatccagatcaaggtcaaggacgtgcctactgcgtactgctacaccttcaccgacccccacattattacattcgacggacgtgtctacgataactttaaaacaggcaccttcgtcctgtacaagtctatgtcccgcgattttgaagtccatgtacgtcagtgggactgccgatccctgcactatccagtatcctgcaactgcggttttgttgcccaagaagggggcgacatcgtgacattcgatatgtgtaatggacagcttcgggaaagtcaaccttacttatttataaaatcacaagacgttactaggaacataaagatttccgagagctatctgggtcgtaaggtcactatatggttcagttccggcgcatttatccgagccgacctgggggaatggggtatgtctctcaccataagggctcctagcgtggactataggaatacactcggactgtgtggaactttcgacgaaaaccccgagaatgatttccatgataagaacgggatgcaaatcgaccaaaactttaacaactatgtggcctttatcaacgagtggagaatcctccccggcaagagcatgagcgacacgttacctgtctccatgacatcaccaggcaagcctagctattgtagttgcagcctggacacagccgcgtacccctcatccgaagacctggattccgtctccagatcagaaattgcattgggatgcaaggatctcaatcacgtaagcctcagctccttaattcccgaactcgacgtcacttctgagtacatcaattctgacacgttagtgagagaaatcaataagcacacctccccagaggagtacaatcttaacctcttcttacaagagaaaaaacacattaacctgacaaaattgggcctgaatgtgcagaagcaccccggaaatgagaaggaggactccttgcagtaccttgctaataaaaagtatacccaggggcgcgggtcacactctcaggagatgcggtacaatcgccagaataggtggaagaggcagaatttccatgaattccccccactgttcgcttttccttcgttgagtcaaacggatctggaggaattgacctatttcttccccgaagatcacgccgaagatgtacagcaggaatttttcccttcctggccaacaccaagcggacttactgaatactccactctgaccctctgtcaggagactttggctaacagttctattggtagactgtgtttggcttttctcggtaagagactggactctgtcatagagatgtgtgtcaaagatgttctactcaaagatgacctatcatgggctgaggcgggtgtggctctactcgaaaacgagtgtgagaaaaggatcgtggaggaaggaaagtacaacaccgaggagtacggtactagcatcgaagacattttgtctgttctcaaatgtcccaatttatgttcaggcaacggtcagtgtatggagtggggatgcgcatgtagcccttcgttctcctcgtatgattgttcagactcctatgataaggctcccgaaatcaccgaactggggaacgctggcttttgcgacgttcagaaatacaattgtatgatggtgcgcgtcttcggcaaggggtttaaggagctgccaagtattaaatgcgaggtgacgaaactccagtacaacagttccgagtggatgccaggcgagcctatctacactcagacagtgtttcacaattcaagagcggtcgactgtcaactgcctacagatgtgcagcagttcgataccatggacctagtgggcggaaagcctacagggaaatggcaactcaaagtgagtaacgacggctacaaattctcaaatccaaaaattaccgtcatctacgatggggcatgccaggtctgtggcctctacaaaaatgactcctgtaccattaaagaaaacgtgtgcattatcgatggcttgtgttatgtcgagggcgacaagaacccaacgtccccctgtctgatctgtcgccccaagatttccagatttacttggtcttttctcgagaacaatcagccgcctgttatccaagccctgcaagataaactgcagactttctatggcgagaacttcgaataccagttcgtggccttcgaccctgagggctccgatatacacttcacattagatagcggacctgagggcgcatctgtgagttcagctggactattcatgtggaagacggatctgctgactacgcaacagatcaccgttaggctcaacgatgattgcgacgcggagactcgagtgacgatcgaagtgactgttaagtcatgtgactgtcttaatggaggaagttgtgtgagcgacagaaacttttctccaggttcaggggtgtacctgtgtgtgtgtctacccggctttcacggctccttgtgtgaggtcgacatctccgggtgtcagtccaacccctgcggactaggctcgtacatcagcgggtttcattcatactcctgtgactgtcccccagagctgaaggtggagactcagttcgttaatcagttcacaactcagacagtcgttctgacaaggtctgacaaaagcgtcaacaaggaggaggacgacaaaaatgcccagggacgcaagagacatgttaaacctactagtggcaatgcatttacaatttgcaaatacccatgcggtaaaagtagggaatgtgtggcccctaacatctgtaaatgcaaacctggatatataggcagcaactgccagacggccttgtgcgatcccgattgcaagaaccatgggaagtgtatcaagcccaacatttgtcagtgcctcccgggccacggcggcgcgacctgcgacgaggaacactgtaacccaccttgccaacacgggggtacttgccttgctggcaatctatgcacctgcccgtacgggttcgtgggaccgaggtgtgagactatggtgtgtaatcggcactgtgagaacggaggtcagtgtttgacaccagatatatgtcaatgcaaaccagggtggtatggacctacatgttcaactgcactttgcgacccagtgtgtctgaacgggggctcctgtaataagccaaatacgtgtctgtgtccaaacggcttttttggagaacactgtcagaacgccttttgccatcctccctgtaagaacgggggccattgtatgcgcaacaacgtctgcgtgtgtcgcgagggctacactggtcggcggtttcagaaaagcatttgcgatcccacctgcatgaacggtggaaagtgtgtgggaccctcaacctgctcttgtccgtcaggctggtcgggcaaaaggtgcaatacacccatttgtctgcagaagtgcaagaatggcggggaatgtatcgctccaagcatctgtcactgtccaagttcatgggaaggtgtcagatgtcagattccaatatgcaacccaaagtgtctgtacggaggccggtgcatcttccctaacgtgtgctcgtgtagaaccgagtattctggcgtaaaatgcgaaaaaaagattcagattcggagacactag

SEQ ID NO: 51434 - DNA, 4773 bp, Artificial Sequence
  derived and/or modified sequence
atgcctgggggcgcctgtgtgctggtgattgccctgatgttcctggcctggggcgaggcccaggagtgcagccctgggggccaccagttcctgcggagcccctacagatctgtgcgctttgacagctggcacctgcagcagagcgctgtgcaggacctgatctgtgaccacagcctgagccctggctggtaccgcttcctgatcctggacaggcctgctgagatgcccaccaagtgtgtggagatgaaccactgcggcacccaggcccccatctggctgagcctgcgggacagcgagaccctgcccagccctggagagatcaagcagctgacagcctgtgccacctggcagttcctgttcagcaccaccaaggactgctgcctcttccagatccctgtgtctgtgaggaactgtggcaacttctctgtgtacctgctgcagcccacccagggctgcatgggctactgtgccgaggccatcagtgatgcccggctgcacccctgtggcagtgatgaaacagaaacaggaggagactgtgtgcggcagctggccgccagcctgcccccacctcctgctggccggcctgaggtgctggtggagctgattgagagccgcctcttctgccgctgcagctttgatgtgcctgccaccaagaacagcgtgggcttccacatcgcctggagccggctgagcagccaggaggtgaaggaggagctgacccaggagaccaccgtgcaggccttcagcctgctggagctggatggcatcaacctgcggctgggggaccgcatcttctgcagcgcctctgtgttcttcctggagaacccccacgtgcagagcgtggccatcgagagccaggagttctttgctggcttcaagctgcagcctgagctgagcaccatcagtgaagatggcaaggagtactacctgcgcatcgagagcacagtgcccatcatctgcagcgagttcagcgagctggaccaggagtgcaagatcagcctgaagctgaagaccatcggccagggccgggagcacctgggcctgaacctggccctgagcagctgccacgtggacctgctgcagaccagcagctgtgccaacggcacctgcagccacacctttgtgtactacacagctgtgacagacttcagcagagatggagacagagtgagcaacatcgtggtgcagcccatcgtgaatgaagacttcctgtggaacaactacatcccagacagcatccagatcaaggtgaaggatgtgcccacagcctactgctacaccttcacagacccccacatcatcacctttgatggccgggtgtatgacaacttcaagacaggcacctttgtgctgtacaagtccatgagccgggactttgaggtgcacgtgcggcagtgggactgccgcagcctgcactaccctgtgtcctgcaactgtggctttgtggcccaggagggcggggacatcgtgacctttgacatgtgcaatggccagctgcgggagagccagccctacctgttcatcaagagccaggatgtgaccaggaacatcaagatcagcgagagctacctgggcaggaaggtgaccatctggttcagcagcggggccttcatccgggctgacctgggggagtggggcatgagcctgaccatccgggcccccagcgtggactacagaaacaccctgggcctgtgtggcacctttgatgagaacccagaaaatgacttccatgacaagaatggcatgcagattgaccagaacttcaacaactacgtggccttcatcaatgagtggaggatcctgcccgggaagtccatgtctgacaccctgcctgtgtccatgaccagccctgggaagcccagctactgcagctgcagcctggacacagctgcctaccccagcagcgaggacctggacagcgtgagccgctctgagatcgccctgggctgcaaggacctgaaccacgtgtccctgagcagcctcatccctgagctggatgtgaccagcgagtacatcaacagcgacaccctggtgcgggagatcaacaagcacaccagccctgaggagtacaacctgaacctcttcctgcaggagaagaagcacatcaacctgaccaagctgggcctgaatgtgcagaagcaccctggaaatgagaaggaggacagcctgcagtacctggccaacaagaagtacacccagggccggggcagccacagccaggagatgagatacaaccggcagaaccgctggaagaggcagaacttccacgagttcccccccctgtttgccttccccagcctgagccagacagacctggaggagctgacctacttcttcccagaagatcatgctgaagatgtgcagcaggagttcttccccagctggcccaccccatctggcctgacagagtacagcaccctgaccctgtgccaggagaccctggccaacagcagcatcggccgcctgtgcctggccttcctgggcaagaggctggacagcgtgattgagatgtgtgtgaaggatgtgctgctgaaggatgacctgtcctgggccgaggccggcgtggccctgctggagaatgaatgtgagaagagaattgtggaggagggcaagtacaacacagaggagtatggcaccagcattgaggacatcctgtctgtgctgaagtgccccaacctgtgcagcggaaatggccagtgcatggagtggggctgtgcctgcagccccagcttcagcagctatgactgcagcgacagctatgacaaggcccctgagatcacagagctgggcaatgccggcttctgtgatgtgcagaagtacaactgcatgatggtgcgggtgtttgggaagggcttcaaggagctgcccagcatcaagtgtgaggtgaccaagctgcagtacaacagcagcgagtggatgcctggagagcccatctacacccagaccgtcttccacaacagcagagctgtggactgccagctgcccacagatgtgcagcagtttgacaccatggacctggtgggcggcaagcccaccgggaagtggcagctgaaggtgtccaatgatggctacaagttcagcaaccccaagatcaccgtcatctatgatggagcctgccaggtgtgtggcctgtacaagaatgacagctgcaccatcaaggaaaatgtgtgcatcattgatggcctgtgctacgtggagggggacaagaaccccaccagcccctgcctgatctgccggcccaagatcagccgcttcacctggagcttcctggagaacaaccagccccctgtgatccaggccctgcaggacaagctgcagaccttctatggagaaaattttgagtaccagtttgtggcctttgatcctgagggcagtgacatccacttcaccctggacagcggccctgagggcgcctctgtgagcagcgctggcctcttcatgtggaagacagacctgctgaccacccagcagatcaccgtgcggctgaatgatgactgtgatgctgagaccagggtgaccatcgaggtgacagtgaagagctgtgactgcctgaatggaggcagctgtgtgtctgacaggaacttcagccctggcagcggcgtgtacctgtgtgtgtgcctgcccggcttccacggcagcctgtgtgaggtggacatcagcggctgccagagcaacccctgtggcctgggcagctacatcagcggcttccacagctacagctgtgactgccccccagagctgaaggtggagacccagtttgtgaaccagttcaccacccagacagtggtgctgaccaggagtgacaagtctgtgaacaaggaggaggatgacaagaatgcccagggcaggaagagacatgtgaagcccaccagcggaaatgccttcaccatctgcaagtacccctgtgggaagagcagagaatgtgtggcccccaacatctgcaagtgcaagccaggctacatcggcagcaactgccagacagccctgtgtgaccctgactgcaagaaccacggcaagtgcatcaagcccaacatctgccagtgcctgcccggccacggcggggccacctgtgatgaggagcactgcaaccccccctgccagcacggcggcacctgcctggccggcaacctgtgcacctgcccctacggctttgtgggcccccgctgtgagaccatggtgtgcaacagacactgtgaaaatggaggccagtgcctgaccccagacatctgccagtgcaagccaggctggtacggccccacctgcagcacagccctgtgtgaccctgtgtgcctgaatggaggcagctgcaacaagcccaacacctgcctgtgccccaacggcttctttggagagcactgccagaatgccttctgccaccccccctgcaagaatggaggccactgcatgaggaacaacgtgtgtgtgtgccgggagggctacacaggaagacgcttccagaagagcatctgtgaccccacctgcatgaatggaggaaaatgtgtgggccccagcacctgcagctgccccagcggctggagcggcaagcgctgcaacacccccatctgcctgcagaagtgcaagaatggaggagaatgtattgcccccagcatctgccactgccccagctcctgggagggcgtgcgctgccagatccccatctgcaaccccaagtgcctgtatggaggccgctgcatcttccccaacgtgtgcagctgcaggacagagtacagcggcgtgaagtgtgagaagaagatccagatccgccgccactag

SEQ ID NO: 51435 - DNA, 4773 bp, Artificial Sequence
  derived and/or modified sequence
atgcccggcggcgcctgcgtgctggtgatcgccctgatgttcctggcctggggagaggcccaggaatgttccccggggggacaccaattcctgaggtccccctaccggtctgttaggtttgatagctggcatctgcagcagtctgctgtccaagacctgatttgtgaccactccctgagccctggctggtaccgatttctgattttggataggccagccgagatgccaacaaagtgtgtggagatgaaccattgtgggactcaggctccgatatggctatccctcagggactctgaaacgctcccatccccgggtgagattaaacagctcacagcctgtgctacatggcaattccttttcagcacaacgaaggattgctgcctcttccagatacctgtcagcgtaaggaactgtggaaatttctctgtttatcttcttcaaccaactcaggggtgcatgggctattgtgcagaagcaatcagcgacgcccgtctgcacccatgcggctcagacgagacggaaactggaggggactgtgtacggcagctcgctgcctcacttccacccccgccagctggccgacctgaggttctcgtcgaactcatcgaatcccgactgttctgcagatgtagcttcgacgtcccagccacgaaaaacagtgttggatttcacatagcatggtcccgtctgtcatcccaggaggttaaggaggagcttacacaggagactacggtccaggctttctctctgttggagttggatggaatcaatcttcgccttggggaccgaattttctgttctgcgtcggtcttcttcctggagaatccacacgtgcaaagcgtcgcgatcgaatctcaggagttcttcgccgggtttaaattgcaacccgagctcagtaccattagtgaagacgggaaggaatactatttgcggatagagtccactgtgcctattatttgtagcgagttcagcgagttggaccaagaatgcaaaatatccctgaagctcaaaaccatcggtcaggggagggagcatctcggactcaaccttgccttatcatcatgccacgtcgacctcctacagacctcaagctgcgcaaatggcacctgttcacacacgttcgtgtactacacagccgtcaccgatttcagcagagacggagatagagtcagcaacatcgtcgtccagcctattgtgaacgaggactttctgtggaataactacattccagatagtatccagatcaaagttaaggacgtgccaaccgcctactgctacacttttaccgacccacatataatcacatttgacggtcgtgtgtacgataattttaaaaccggcacattcgtcctctacaaatccatgtctcgggacttcgaggtgcacgtgaggcagtgggactgtcggtctctgcattaccccgtgtcatgcaactgcggattcgtggcccaagagggtggggatatcgtcaccttcgacatgtgtaacggtcagctgagggagtcacaaccttatcttttcatcaaaagccaggatgtgacccgaaacatcaagatctccgagtcataccttggaagaaaagtaacgatctggttttcttctggagcgttcataagggcagacttgggggagtggggaatgagcttaacgattagagcgccaagcgtggactatagaaatacactcggcctctgtgggactttcgatgagaatcccgaaaacgattttcacgacaaaaatggcatgcagatagaccagaatttcaataactatgttgccttcatcaacgagtggagaatcctcccaggaaagtcgatgagcgacaccctcccggtcagtatgacatcccctgggaaacctagctattgtagctgtagcctcgacaccgcagcttatccgtcttctgaggacttggactcagtctctcggtcagaaatcgccttggggtgcaaagacttaaatcatgtgtctttgagttcactgatccctgagttggatgttacctctgagtatattaactcagacacccttgtgagggagatcaacaaacacacatcacccgaggaatacaatctcaacctgttcctccaggagaaaaaacacatcaatcttaccaagcttggcctcaatgttcagaagcatccagggaatgagaaggaggattccctacagtatttggccaacaagaagtacacccagggtcgggggagtcactctcaggagatgcgctataaccgtcagaatcgctggaaaaggcagaacttccatgagtttcccccccttttcgcttttccgtcattgtcccagaccgacctggaagaactaacctacttcttcccagaagatcatgctgaggacgttcagcaagagtttttcccctcttggcctacacctagcggcttaaccgagtactcaaccctgactctgtgccaagagacactcgctaactcatcaatcggaaggctttgtctggcgtttctggggaagcgcttagacagcgttatagagatgtgtgtaaaagatgtcctgctgaaggacgacttatcttgggcagaagctggtgtagccctgctggagaacgaatgtgaaaaacgcattgtggaggagggcaaatacaacacagaggaatatggcacatcaatcgaggacatcttatctgtgctgaagtgccccaacctctgttccggcaacggacagtgcatggagtggggctgtgcctgctcgccgagctttagttcatacgactgtagcgatagttacgacaaagctcctgaaattactgaattaggaaatgccggattttgtgatgttcaaaagtataactgtatgatggttcgggtcttcgggaaaggcttcaaggaacttcccagcatcaaatgcgaggtaaccaaactgcaatataacagcagtgagtggatgcctggcgagccgatttatactcaaactgtctttcacaattcccgcgccgttgactgtcagctgcctactgatgtccagcagttcgacaccatggacctggttggtggcaagcccaccgggaaatggcagctgaaggtgagtaacgacgggtataaattttcgaaccctaagatcactgtgatttacgacggagcttgtcaagtttgcggcctatataaaaacgatagctgcacgatcaaagagaacgtgtgcattattgatggcttgtgttacgttgagggggacaagaatccaacctctccatgtcttatctgcagacccaaaattagcaggttcacttggagcttcttagaaaacaaccaaccaccagtgattcaggcgctgcaggataagctccagacattctacggagagaactttgagtaccagtttgttgcgtttgatcccgaaggttcggacatccactttactctggattctggcccagagggagcttcagtgtcttcagccggcctgttcatgtggaaaactgatctattgacaacccagcagataacagtgcggctcaacgacgattgcgacgctgagacgagagtgactatagaggtgaccgtgaagtcctgtgattgcttgaatgggggatcttgtgtatctgaccgcaatttctctcctgggtcgggcgtctacctgtgtgtctgcttaccaggattccacggcagcctctgcgaagtagacatttctggctgccaaagtaatccttgcggactgggctcatatattagtggtttccacagctactcttgtgattgcccacccgagctgaaggttgaaacacagttcgttaatcagttcaccacacagacagtcgtcctaacccgaagcgacaagtccgttaataaggaggaggatgacaaaaatgcccaagggcgaaaacgacacgtcaagccgacatcaggaaatgcattcactatctgcaagtatccatgcggcaaatctcgagaatgcgtggctccgaacatctgcaagtgcaagcccggttacatcgggtccaactgtcaaaccgccctctgtgaccctgattgcaagaatcatggaaagtgcatcaagccaaacatctgtcaatgcctgcccgggcacggcggggctacttgcgacgaagaacactgcaatcccccgtgccagcacggtgggacttgtctggcagggaacctgtgcacttgcccctacggattcgtgggaccccgatgcgagaccatggtgtgtaacaggcactgcgagaatggcgggcagtgtttgacaccagacatttgtcaatgtaagcctggctggtatgggcccacctgttcgaccgccctgtgtgaccctgtgtgtctgaacggcggttcctgcaacaagcccaatacctgcctgtgtccaaatggctttttcggtgagcattgccaaaatgcgttttgccaccccccctgcaagaatggcggtcattgcatgagaaataacgtgtgtgtctgccgggagggctacaccggcaggcgattccaaaagagcatttgcgaccccacatgtatgaacggcggtaagtgcgttggcccgagcacctgttcctgtccctcaggctggagcggtaagcggtgcaatacgcctatctgcctccagaagtgtaaaaacgggggggaatgtatcgcaccttctatctgtcactgtccgagctcttgggagggcgttagatgtcagattccaatttgcaatcccaagtgtctctacggcgggcgctgtatctttccaaacgtttgctcctgccggacagaatattccggggtaaaatgcgaaaaaaaaatccaaatccggagacactag

SEQ ID NO: 51436 - DNA, 513 bp, Artificial Sequence
  derived and/or modified sequence
atgcccggcggcgcctgcgtgctggtgatcgccctgatgttcctggcctggggcgaggcccaggagtgcagccccggcggccaccagttcctgagaagcccctacagaagcgtgagattcgacagctggcacctgcagcagagcgccgtgcaggacctgatctgcgaccacagcctgagccccggctggtacagattcctgatcctggacagacccgccgagatgcccaccaagtgcgtggagatgaaccactgcggcacccaggcccccatctggctgagcctgagagacagcgagaccctgcccagccccggcgagatcaagcagctgaccgcctgcgccacctggcagttcctgttcagcaccaccaaggactgctgcctgttccagatccccgtgagcgtgagaaactgcggcaacttcagcgtgtacctgctgcagcccacccagggctgcatgggctactgcgccgagggcttcttcgccaagatcgtgaagagcccccacacctag

SEQ ID NO: 51437 - DNA, 513 bp, Artificial Sequence
  derived and/or modified sequence
atgccaggtggagcctgtgttctggttatcgccctcatgttcctggcctggggggaggcccaagagtgttccccagggggccatcagttcctcagaagcccctatagatccgtccggtttgattcatggcacctgcagcagtccgccgtgcaggacctgatatgcgatcattccttgtccccgggatggtacagattcttaattttggacaggcccgccgagatgcctacgaaatgtgtcgagatgaaccactgcggaactcaggccccaatctggctttctctgagggacagcgaaaccttgccaagccctggtgagatcaaacagctcactgcctgcgctacctggcagtttttattctcaactacaaaagactgctgcctgtttcagattccggtaagcgtccgcaattgtggaaatttttcagtttatttactacagcccacccaaggctgcatgggatattgcgccgaaggcttttttgccaaaattgtgaagagcccccacacgtag

SEQ ID NO: 51438 - DNA, 513 bp, Artificial Sequence
  derived and/or modified sequence
atgcctgggggcgcctgtgtgctggtgattgccctgatgttcctggcctggggcgaggcccaggagtgcagccctgggggccaccagttcctgcggagcccctacagatctgtgcgctttgacagctggcacctgcagcagagcgctgtgcaggacctgatctgtgaccacagcctgagccctggctggtaccgcttcctgatcctggacaggcctgctgagatgcccaccaagtgtgtggagatgaaccactgcggcacccaggcccccatctggctgagcctgcgggacagcgagaccctgcccagccctggagagatcaagcagctgacagcctgtgccacctggcagttcctgttcagcaccaccaaggactgctgcctcttccagatccctgtgtctgtgaggaactgtggcaacttctctgtgtacctgctgcagcccacccagggctgcatgggctactgtgccgagggcttctttgccaagatcgtgaagagcccccacacctag

SEQ ID NO: 51439 - DNA, 513 bp, Artificial Sequence
  derived and/or modified sequence
atgcccggcggcgcctgcgtgctggtgatcgccctgatgttcctggcatggggcgaggctcaagaatgttcacctggcggccaccagttcctgcgcagtccttatagatcggttcggttcgatagctggcatctgcagcagtccgccgtccaggatcttatttgtgaccacagccttagtccgggctggtatcgcttcctgatcctggataggccagccgagatgccgactaaatgtgttgagatgaaccactgtggcacacaagctccaatttggctttcgcttagggattcagagacgttaccttcccccggggagattaagcagttaactgcatgcgccacatggcaatttctcttctctacaaccaaagattgttgcctgttccagattcccgtcagtgtgagaaattgcggcaatttttctgtctatctcctacagcccactcagggttgtatgggctactgtgctgaaggtttttttgctaaaattgtcaagtcccctcacacctag

SEQ ID NO: 51440 - DNA, 513 bp, Artificial Sequence
  derived and/or modified sequence
atgcccggtggagcttgtgtgttggtaatagccctgatgttcctcgcctggggagaggcacaagagtgtagccctggcggtcaccagttcctcagaagcccgtaccgcagcgttagattcgactcatggcatctccagcaaagcgccgtccaagatctcatttgtgatcattctctgtcccccggatggtatagattcctgatcctggaccgaccagctgagatgcccactaagtgtgtcgagatgaatcattgcggcacccaagccccaatttggttgtcacttcgggacagcgagaccctcccttctcccggtgagatcaaacagctaactgcctgcgcaacttggcagttcctgttttctaccacaaaagactgttgccttttccagattcctgtgtcagttagaaattgtggcaactttagtgtgtacctgctgcagcccacccaagggtgtatggggtattgcgctgagggctttttcgcgaaaatcgtcaagtctccacacacctag

SEQ ID NO: 51441 - DNA, 4701 bp, Artificial Sequence
  derived and/or modified sequence
cagccaaaatgggaagggaggagtcgcagacggattacgcgaaggctctatcccacgaaaggactgggtgcaccccagaacgaggacgcggagcttccctgttccaagcagcaacagactgagaaaatccaagaaaggaggcccgaggggctgctgtggccccatcctcctggcacccgcggcccgggctctgcgacgcctttcgccccacctgcggaagcagcgatgcctggcggagcctgcgtgctggtgatcgcgctgatgttcctggcctggggggaagctcaggagtgctctcctgggggacaccagtttcttcggagtccttatagaagtgtccgttttgactcatggcacctccagcagtcagctgttcaagacctaatatgtgaccattccctctcccctggatggtatagatttctcatccttgacagacctgccgagatgccaaccaaatgtgttgagatgaaccattgtggaactcaggcccccatctggctgtctctgagagattcagaaacactgccatctcctggggagatcaagcaattgacagcttgtgcaacatggcagtttttgttcagcactacaaaagactgctgtctctttcaaatcccagtgtctgtaagaaactgtgggaacttttctgtatacttactacaaccaactcagggatgtatgggctactgtgcggaagctatttctgatgcacgattacacccatgtggttctgatgaaactgaaacaggaggtgattgtgttcgtcagctggctgcctcattgccacctccacctgcaggaaggccagaggttctggtggagttgattgagtccaggcttttctgtaggtgttcttttgatgttcccgctacaaaaaactcagtgggatttcacatagcttggtctaggctttcttctcaagaagtcaaagaggagctgacacaagagaccacagttcaggcattctctcttttagaacttgatggcataaatctcagacttggagacaggatattctgcagcgcttctgtctttttcttggagaatcctcatgtacaaagtgtagccatcgaaagccaagaattttttgcaggctttaagctacagcctgaattgagcactatatcagaggatgggaaagaatactacctgaggatagaaagcacagttcctattatttgttctgaatttagtgagcttgatcaagaatgcaaaatctcattaaaactgaaaactattggtcaagatctggttttcttctggggcatttatccgtgctgatcttggtgaatggggcatgagtctaacgatcagagcccctagtgtagattacagaaacactctgggactttgtggaacctttgatgaaaatccggaaaatgatttccatgacaaaaatgggatgcaaattgatcaaaattttaacaattatgttgcttttattaatgaatggaggattttaccaggaaaaagcatgtctgacacactgccagtttctatgacatcacctggaaagccatcctattgtagctgttcattggacactgcagcgtatccgtcttccgaagatctggacagtgtttctcgatcagaaattgccttgggttgcaaagacctcaatcatgtcagcttatcttctttgataccagaactagatgtcacctccgaatatattaattcagacactcttgtcagagagataaacaagcatacatctccagaagaatataatctaaatttatttctgcaagaaaaaaaacacataaacctgactaaactcggcttaaatgtacaaaaacatcctggaaatgagaaagaagattcactacaatatttggccaataagaaatatacacaaggccggggaagccacagccaagaaatgaggtacaatcgacaaaacagatggaaacggcagaactttcatgagtttcctcctttgtttgctttcccgagtctcagccaaacggatctggaagaacttacttattttttcccagaggaccatgctgaggatgtacagcaagagtttttcccctcttggcccactccctctggcctcaccgagtatagcaccttgaccctctgtcaggagactctagccaactccagcataggaaggctgtgtcttgcttttcttggcaagagattagacagtgttatagagatgtgtgtgaaggatgttctgttaaaagatgatcttagttgggcagaagcaggtgtggcccttttagaaaatgaatgtgaaaagaggattgtggaggaggggaaatataacacagaagagtatggcacatcaattgaagacattctctcagtattaaaatgccccaatttatgcagcggcaatgggcagtgcatggaatgggggtgtgcgtgttccccaagctttagttcctatgactgcagtgattcctatgacaaagctcctgaaattacagagcttgggaatgctggattctgtgatgttcaaaaatataattgtatgatggtgagagtttttggcaaaggcttcaaagaattaccttcaattaaatgtgaagttactaagctacagtataatagcagtgaatggatgcctggagaacccatctatacacagactgttttccacaatagcagagctgttgattgtcagctgcccactgatgttcagcagtttgataccatggatctggtgggtgggaaaccaactgggaagtggcagttgaaggtatctaatgatggttataaattcagtaatcccaaaataacggtcatatatgatggtgcttgccaagtttgtggtctctataaaaatgactcatgtactataaaggaaaatgtttgcattattgatggactctgctatgttgaaggagacaaaaatccaaccagcccttgtttgatttgtagacccaaaatttcaagatttacttggtcatttttagaaaacaaccagcccccagtgattcaagcattgcaagacaaattacagacattttatggtgaaaactttgagtatcagttcgtggccttcgatccagaaggttctgacatccattttacgttggactctggtcctgaaggggcaagtgtttcctctgcagggctttttatgtggaaaacagatttactaactacccaacaaattactgtacgccttaatgatgactgcgatgctgaaactagagtcacgattgaggtgactgtgaagtcttgtgattgcttgaatggtggatcatgtgtatctgataggaacttttctccagggagtggagtgtacctgtgtgtctgcttgcctggcttccatggcagcctttgtgaagtggacattagtgggtgccaatccaacccttgtggtcttggcagctatattagtggttttcacagttattcctgtgattgtccacctgagctcaaagttgaaacacagtttgtaaatcaatttactacacaaactgtggttctcacaagatctgataaaagtgtaaataaagaagaggatgataaaaatgcccaagggagaaagaggcatgttaagccaacaagtggaaatgccttcaccatttgtaaatatccatgtggaaaaagtagggagtgtgttgccccaaacatctgcaaatgtaaacctggttacattggttctaactgccaaactgctctttgtgaccctgattgcaaaaaccatggaaaatgtattaagcctaacatttgtcagtgtcttccaggacatggtggagcaacctgtgatgaagaacattgtaacccaccttgtcaacatggtggcacatgcttggctgggaatctctgcacttgtccttatggttttgtaggaccaaggtgtgaaacaatggtttgtaacaggcactgtgaaaatggaggccagtgtcttacaccagatatttgccagtgcaaacctggctggtatggacccacctgtagtacagctttgtgcgaccctgtctgcctcaatggtggttcgtgtaataagccaaatacttgcctctgtccaaatggattctttggggaacactgtcagaatgctttctgtcaccctccctgtaagaatggtggccactgcatgagaaataatgtgtgcgtctgtcgtgaaggatacactggtaggagattccaaaaaaggcatctgtgatcctacgtgcatgaatggaggaaaatgtgtgggaccaagcacttgctcttgtccttctggttggagtgggaaacgatgcaacacacctatctgcttgcagaaatgtaaaaacggtggtgaatgcattgcgcccagcatatgccattgtccttcctcctgggaaggagtgcggtgtcaaataccaatttgcaacccaaaatgtctttatggaggcagatgcatatttcccaatgtgtgttcctgccgcactgaatactctggagtcaaatgtgagaagaaaatacagataagacgccattgagtagcatcaagtatatgaattacaagcctgtatcttaagaatggaaatattttgttcagaaaaagttggagataacttggagtttatttgaacatcattcaaaaaatatcttaaagactgaagaaactaataaaatacataatgatctctgttgtaatcatagagaaaagcaaagaagaaatccaggtaatctaaatttgatgttgagatgggataggatatttacatattgagatgatgtatctgatattccacccattcacaa

SEQ ID NO: 51442 - DNA, 1463 bp, Artificial Sequence
  derived and/or modified sequence
acgcgaaggctctatcccacgaaaggactgggtgcaccccagaacgaggacgcggagcttccctgttccaagcagcgatgcctggcggagcctgcgtgctggtgatcgcgctgatgttcctggcctggggggaagctcaggagtgctctcctgggggacaccagtttcttcggagtccttatagaagtgtccgttttgactcatggcacctccagcagtcagctgttcaagacctaatatgtgaccattccctctcccctggatggtatagatttctcatccttgacagacctgccgagatgccaaccaaatgtgttgagatgaaccattgtggaactcaggcccccatctggctgtctctgagagattcagaaacactgccatctcctggggagatcaagcaattgacagcttgtgcaacatggcagtttttgttcagcactacaaaagactgctgtctctttcaaatcccagtgtctgtaagaaactgtgggaacttttctgtatacttactacaaccaactcagggatgtatgggctactgtgcggaagggttctttgccaagattgtaaagtccccccacacgtgaaagcatcaaaacagacatctcacatttttccactggacataatgattgagtgtgttaaaaattctttggtttcctcaagtccattcctgttttaattaaaggatgaagaaggctatttctgatgcacgattacacccatgtggttctgatgaaactgaaacaggaggtgattgtgttcgtcagctggctgcctcattgccacctccacctgcaggaaggccagaggttctggtggagttgattgagtccaggcttttctgtaggtgttcttttgatgttcccgctacaaaaaactcagtgggatttcacatagcttggtctaggctttcttctcaagaagtcaaagaggagctgacacaagagaccacagttcaggcattctctcttttagaacttgatggcataaatctcagacttggagacaggatattctgcagcgcttctgtctttttcttggagaatcctcatgtacaaagtgtagccatcgaaagccaagaattttttgcaggctttaagctacagcctgaattgagcactatatcagaggatgggaaagaatactacctgaggatagaaagcacagttcctattatttgttctgaatttagtgagcttgatcaagaatgcaaaatctcattaaaactgaaaactattggtcaaggtaatatactaactttattttatcttattattagattgcaaacaataatgcttttttttcctgtaggaaaagtcactggagtgtactcatataataaatcatgttgcatgttgacatcaaattttagcccaatcatattactaatactcggccaaactgacgattgccaaagcaattcacatttcttcttcttggctgaaagcatacatttt

SEQ ID NO: 51443 - RNA, 4773 nt, Artificial Sequence
  derived and/or modified sequence
augccagggggggcaugcguauuggucaucgcuuuaauguuccuugccuggggagaggcucaggagugcuccccuggaggacaccaauucuugagauccccuuacagaagugugagauucgauuccuggcaccuucagcagucugccgugcaagaucugauaugcgaucauucauugucacccggaugguauagguuucugauccuggauaggccggcugagaugcccacuaaguguguggagaugaaccacugugguacucaagcacccaucuggcucagucucagggauagugagacccuuccuucucccggagagauuaagcaacucacagcuugugccacauggcaauuuuuguuuagcacuacuaaggacuguugccuguuucagaucccagucucaguaaggaacuguggaaauuucaguguuuaccugcugcaaccuacucagggguguaugggcuacugugccgaagccaucagcgaugcaagacuccacccaugcggcagugacgagacggagacaggcggggacugcgugcggcaacuggcugcuucccuuccaccuccgccagcagggcgcccagaaguuuuaguugaacugauagaaagccgauuauuuugccgcuguaguuuugaugugccagcuacuaaaaauaguguuggauuucacaucgcuugguccagacugagcagccaggaggucaaagaggaguugacccaagaaacaacaguacaggccuuuaguuuauuggagcucgauggcaucaaccugagacugggcgaccguaucuucugcuccgcuagugucuucuuucucgagaacccacaugugcaaucaguagcuaucgaaucccaggaguuuuucgcgggcuucaaacuccagccugagcugagcacuauuucugaggauggcaaagaguacuacuugcgcaucgaaucaacaguuccaauaauuugcucugaguuuagugaacuggaccaggaguguaaaaucagucuuaagcugaagacaaucgggcaagggagagaacaucuuggacugaaccuugcucucuccagcugucacgucgaucucuuacagacgucaucaugcgccaacggaaccugcucacacaccuucguguauuauaccgcugucacugacuuuagccgagacggcgacaggguuagcaacaucguggugcaaccaauugugaaugaggacuuucuguggaauaacuacaucccagacucuauucagauaaaggucaaagacguaccgaccgcauacugcuauacuuucaccgacccgcacauuauuacauucgacggaagaguguaugacaacuuuaaaaccgggaccuucgugcuguacaaaagcaugagcagagacuucgaggugcauguucggcagugggauugccggagcuugcauuaucccgucagcuguaacugcgguuucguggcgcaggaggguggcgauaucgugacauucgauauguguaacggacagcuacgagagagccagccuuaucuuuuuauaaaaucgcaagaugucacaaggaauauaaaaaucucagaaucauaucuaggccguaaagugacaauuugguucaguagcggugccuucauucgagcugaccucggugaguggggaaugucccugaccauucgagcuccuucaguggacuauagaaacacacuuggccucugcgggaccuucgaugagaacccagaaaaugacuuucacgauaaaaacggcaugcagauugaucaaaacuuuaacaauuauguugccuucaucaaugaauggaggauauugccuggcaagucaaugagcgauacauugccugugaguaugacaucacccggaaagcccucauacugcucuuguaguuuggauacagccgcguacccgaguucagaagaccuggacucagucagucguuccgagauugcucugggcuguaaggaccuuaaucaugucagucugagcagccugauccccgagcucgacgugaccuccgaauacauuaauagcgacacucuugucagggagaucaauaaacauaccagucccgaagaauauaaccugaaucuguuccugcaagagaagaaacacauuaaccuuaccaagcugggcuugaacguacaaaagcacccuggcaacgagaaggaagacagcuuacaguaucucgccaauaaaaaguauacccagggacguggcucgcacagucaggagaugagauacaaccgucagaacagauggaagaggcagaacuuccacgaauuuccucccuuauuugcguuuccuagccugagccagacggaccuggaggaauuaacuuauuucuuccccgaggaucaugccgaggacgugcagcaagaauucuuucccagcuggccaaccccaagcggccugacugaguacuccacuuuaaccuugugccaggagacacuagcuaacucuagcaucggccgacucugucuugccuucuugggcaaaaggcuggacagcguaaucgagaugugugugaaagacguccugcugaaggaugaccugaguugggccgaagcuggcguggcucuucuagagaaugaaugugaaaaacgcaucguugaagaagggaaguauaacacagaggaauacggcacaucaaucgaggauaucuuguccgugcuuaagugcccaaaucugugcagcgggaaugggcagugcauggaguggggcugugcauguucuccuucuuucuccagcuaugacugcucugauuccuacgacaaggcgcccgagauuacagaacuggguaaugccggauuuugugauguacagaaguauaauuguaugauggugcgaguguucggcaagggcuuuaaggaguugcccucuaucaagugcgaggugacgaaacuacaguacaacucuagcgaguggaugccaggcgagcccaucuacacacagacagucuuucauaacagccgggcuguugacugucaacugccuacagaugugcagcaguuugacacaauggaccuagugggcgguaaaccuacggguaaguggcagcuaaagguguccaacgauggauacaaauuuaguaaucccaaaauaaccgugaucuaugauggcgcaugccaagugugcgggcuguauaaaaacgacuccuguacuauuaaagaaaacgucuguauaaucgacggacuuugcuacguagaaggugauaaaaauccaaccucuccgugccugaucuguagacccaaaaucagucgguucacuuggucuuuccuggagaauaaucagccucccgugauacaggcccugcaggauaagcuccaaaccuucuacggcgaaaacuucgaguaucaguucguggccuucgauccggaagguucagacauacacuuuaccuuggauucuggccccgagggggccagcguuagcagugcgggacuuuucauguggaaaacugaucugcucaccacucagcaaaucacaguucgccuaaaugaugacugcgacgccgaaacucgcgucacgauugaagucaccgugaagagcugugauugccuuaacggcggcuccugcgucucugaccgcaacuucuccccaggaaguggagucuaucuguguguaugcuuaccuggauuccauggaucccuuugcgagguugacauuagugggugucaguccaauccuugugguuugggauccuacauuucaggauuucauuccuauagcugugacugcccucccgaauugaagguggagacacaguuugugaaucaguucacuacacagaccgucguguugacaagaucugacaaaagcgugaacaaggaagaagaugacaagaaugcccaagggaggaaaagacacguuaaaccaaccagcggcaacgccuucaccauauguaaguauccaugcggcaaaucucgcgaguguguggcuccaaauauaugcaagugcaagcccggguacaucgggucuaauugccagacagcccugugcgaucccgacuguaaaaaccauggaaaauguaucaaacccaauauuugucaaugcuuaccaggucauggcggagcuacaugugacgaggagcacugcaacccuccaugccaacacgguggcacaugccuagcagguaaccucugcacuugccccuacggguucguggguccacgaugugaaacaauggucugcaacaggcacugugaaaauggcggccaaugucuaaccccagacauuugucaguguaaaccgggcugguauggcccaaccuguucgaccgcgcuuugugauccagucugucuaaaugggggauccugcaauaaaccaaacacuugccuguguccgaacggauuuuucggggaacauugucaaaaugcguucugccauccucccugcaaaaauggaggucauugcaugcgcaacaaugugugugugugucgcgaaggguauacuggaagacgguuucaaaagagcauuugugacccuacuuguaugaacggcgguaaaugcgucggaccaucuacuugcuccuguccaagcggguggagcgggaaacgaugcaauacuccuaucugucugcagaaauguaagaacggcggggaauguauugcacccucaaucugccauugcccgaguucuugggagggcguucgaugccaaaucccuauaugcaauccuaagugucuuuauggagggcgguguaucuuuccaaacgucuguucuuguaggacagaguauucuggugucaagugugagaagaaaauccagauccggaggcacuag

SEQ ID NO: 51444 - RNA, 4773 nt, Artificial Sequence
  derived and/or modified sequence
augccuggcggcgcuugcguccuggugaucgcccucauguuucuggccuggggcgaagcacaagaauguucacccggaggacaucaguuuuuacggagcccauaucgaagcguccgguucgacuccuggcauuugcaacaguccgcaguccaggaccugauuugugaucacucacuuucacccggaugguaccgguuucuaauccuugaccgccccgcugaaaugcccacaaaaugcguugagaugaaccauuguggcacccaagcucccauauggcugagccugagagacagcgaaacuuugccuucacccggggagaucaaacagcucacagccugugcaaccuggcaguuccuguuuuccaccaccaaggacuguugucuuuuucaaauucccgugagcgugcgaaauuguggcaauuuuuccguuuaucugcugcagccaacacaaggaugcauggguuacugugccgaagcuaucagcgaugcgagauuacauccgugugguagugaugaaaccgagacaggcggggauugugugagacagcucgcugcgagccugccgccgccuccagccggccggccagaagugcuugucgaacugauugaaagccgacuguucugucgcugcaguuuugacgugccugcaacaaagaauucagucggguuccauauugcguggucucgccugucaucccaagaagugaaggaagaguugacccaagaaacaaccgugcaagccuuuucacuacuggaguuggacgguaucaaccugcgccugggcgauagaauuuucuguagugcuaguguuuucuuuuuggaaaacccacacguccaguccguugcuaucgaaagccaagaauucuuugcuggauuuaaacuacagccugagcugagcaccauaagcgaggacgggaaagaauacuauuugcgaauugaaucaaccgucccuauuauuuguuccgaauuuuccgaguuagaccaggaaugcaaaauuagcuuaaagcuuaagaccauagggcaggggcgcgaacaucugggccugaaucucgcacucucaucuugucauguggaccugcugcaaacauccagcugcgcaaauggcaccugcucucauacauuugucuacuacacugcugugaccgauuucagucgagacggggauaggguaagcaauauagugguccagccaauugugaacgaagauuuccuguggaauaacuacauucccgacaguauucagauuaagguuaaggacgucccuaccgcauauuguuauacauuuacugacccccacauuauuacuuucgacggccgaguauaugauaacuuuaagaccgggacauucgugcuguauaagagcaugucacgcgacuucgagguacacguccggcaaugggacugccgcucuuuacauuacccagucagcugcaauuguggauucguagcccaggaagggggagauaucguuaccuucgacauguguaauggucaguuaagagaaucccaaccuuaccucuucaucaaaucccaagacguuacccguaacauaaagaucucggagaguuaccuuggccgcaaaguuacaauuugguuuagcucgggcgccuucauccgggccgauuugggggaguggggcaugucccuaacuaucagggcucccuccguagacuauaggaacacucuuggauugugcggcaccuuugaugagaauccagagaaugauuuucacgauaagaauggaaugcagauagaucagaacuuuaauaauuacguggccuucaucaacgaauggcguauccuacccggaaagagcaugucugauacacuuccagucuccaugaccagccccgguaagcccaguuauuguaguugcucccuggauaccgcagccuaccccucaagcgaggaucucgacuccgucaguaggucugaaauagcccuggguugcaaggaucugaaucacgugucuuugucuagccuuauuccagaacuugacguuacaucagaauacauuaacagcgacacuuuaguucgagagaucaacaagcacacaagccccgaagaauacaaccuuaaucucuuccugcaggagaagaagcauauuaaccuuacaaaauuaggccuuaacgugcagaaacauccuggaaacgagaaggaggacaguuuacaguaccuugcgaauaaaaaguacacucagggcagaggaucucacagucaggagaugcgguacaacaggcagaauagauggaaaagacagaacuuccacgaauucccaccccuauuugcuuuucccagucugucacaaacggaucucgaagagcucacuuauuucuuuccagaggaccaugccgaagauguucagcaggaguucuuuccaaguuggcccacucccuccggccuuaccgaguauucuacacuuacccuuugucaggagacccuugcaaauaguuccauugggagacucugccuggcuuuccuuggcaaaagguuggacagcgucaucgaaauguguguaaaggauguguugcuuaaagacgacuugucgugggccgaggcuggcgucgcccugcucgagaacgagugcgaaaagagaauugucgaagaaggcaaauacaacacagaggaguauggaacauccauugaagauauccugucgguccugaagugccccaaucuguguucuggaaacggucaauguauggaaugggggugugcuuguuccccaucguucucuuccuaugauuguucugauucauacgacaaagcuccugagaucaccgaacucggcaacgcuggcuucugcgacguccagaaguacaacugcaugaugguacgcgucuucggaaagggauucaaggaauuaccuaguauuaaaugugaagugacuaagcuccaauauaacucaagugaauggaugccgggcgagcccauuuacacccagacaguguuccauaacucuagagcaguggauugucagcucccuaccgauguccagcaguucgauacaauggaucuugucggggggaagccaaccgggaaauggcaguuaaaggugaguaaugacggcuacaaauuuucuaauccaaagauaacagugaucuaugacggagcuugucagguuugcggauuguacaagaaugauaguuguaccauaaaggagaaugugugcauaauugauggguuaugcuaugucgagggcgacaagaacccaacuuccccgugccugaucugccggccaaaaauaagucgcuucacauggagcuuucuugagaauaaccaaccaccugugauacaggcuuuacaggacaaacuccagaccuuuuacggcgagaacuucgaguaucaauuuguugccuucgacccggagggauccgauauucauuucacacuagacaguggucccgaaggggccucagugagcucugcaggacuguuuauguggaagaccgaucuccucacaacacaacagaucacaguucgacuuaacgacgauugcgaugccgaaaccagaguuacgauugaggucacagugaaaucgugcgacugcuugaaugggggcucuugcguaucugaccggaauuuuagccccggauccggugucuaucuguguguuuguuugccaggauuucacggaucauugugcgaaguagacauuuccgguugccaauccaacccuugcggccucggcagcuauauuucaggauuucauucuuacuccugcgauugcccaccugaguuaaagguggaaacccaauucgugaaccaauuuacgacacagaccgugguguuaacuagaagcgacaagagcgugaacaaagaagaggacgauaagaaugcucagggaagaaagagacacgugaagccgacaucagggaacgccuucaccauuugcaaguaccccugugggaaaaguagagagugcguggcccccaauaucugcaagugcaaacccgguuauaucggcagcaacugucagaccgcccugugugacccagacuguaaaaaucacggaaaguguaucaagcccaacauuugucaguguuuaccaggacaugggggugcaacuugugaugaggaacauuguaauccucccugucagcauggcggaacaugccuagccggaaaucuuugcacaugccccuacggcuuugucggccccagaugcgaaacuaugguuuguaaucggcacugcgaaaaugggggacaaugcuuaacaccagauauuugccaauguaaaccggguugguacggccccacauguucaaccgcccugugugauccugugugucucaacggugggagcugcaauaaacccaauaccugucucugucccaacggauucuuuggcgaacacugccagaaugcuuucugccaccccccuugcaaaaacggaggacauugcaugaggaacaaugucuguguuugccgagaaggguauacaggcaggcgguuccaaaagaguaucugcgaucccacuuguaugaauggaggcaaaugcgugggccccucaaccugcaguuguccaagcgguugguccgguaaaagguguaacacgccaaucugccuccagaaauguaagaacggaggagaauguaucgccccuucaauuugccauugucccaguucaugggagggcgugagaugucagauccccauauguaaucccaaaugucuuuauggcggaagguguauuuucccgaacguaugcucuugcagaaccgaguauagcggagugaaaugcgagaagaagauccaaauucggagacacuag

SEQ ID NO: 51445 - protein, 779 aa, Artificial Sequence
  derived and/or modified sequence
MIPFLPMFSLLLLLIVNPINANNHYDKILAHSRIRGRDQGPNVCALQQILGTKKKYFSTCKNWYKKSICGQKTTVLYECCPGYMRMEGMKGCPAVLPIDHVYGTLGIVGATTTQRYSDASKLREEIEGKGSFTYFAPSNEAWDNLDSDIRRGLESNVNVELLNALHSHMINKRMLTKDLKNGMIIPSMYNNLGLFINHYPNGVVTVNCARIIHGNQIATNGVVHVIDRVLTQIGTSIQDFIEAEDDLSSFRAAAITSDILEALGRDGHFTLFAPTNEAFEKLPRGVLERIMGDKVASEALMKYHILNTLQCSESIMGGAVFETLEGNTIEIGCDGDSITVNGIKMVNKKDIVTNNGVIHLIDQVLIPDSAKQVIELAGKQQTTFTDLVAQLGLASALRPDGEYTLLAPVNNAFSDDTLSMDQRLLKLILQNHILKVKVGLNELYNGQILETIGGKQLRVFVYRTAVCIENSCMEKGSKQGRNGAIHIFREIIKPAEKSLHEKLKQDKRFSTFLSLLEAADLKELLTQPGDWTLFVPTNDAFKGMTSEEKEILIRDKNALQNIILYHLTPGVFIGKGFEPGVTNILKTTQGSKIFLKEVNDTLLVNELKSKESDIMTTNGVIHVVDKLLYPADTPVGNDQLLEILNKLIKYIQIKFVRGSTFKEIPVTVYKPIIKKYTKIIDGVPVEITEKETREERIITGPEIKYTRISTGGGETEETLKKLLQEEVTKVTKFIEGGDGHLFEDEEIKRLLQGDTPVRKLQANKKVQGSRRRLREGRSQ

SEQ ID NO: 51446 - DNA, 3219 bp, Artificial Sequence
  derived and/or modified sequence
agactctcaggttgatgcagtgttccctcccacaactctgacatgtatataaattctgagctctccaaagcccactgccagttctcttcggggactaactgcaacggagagactcaagatgattccctttttacccatgttttctctactattgctgcttattgttaaccctataaacgccaacaatcattatgacaagatcttggctcatagtcgtatcaggggtcgggaccaaggcccaaatgtctgtgcccttcaacagattttgggcaccaaaaagaaatacttcagcacttgtaagaactggtataaaaagtccatctgtggacagaaaacgactgtgttatatgaatgttgccctggttatatgagaatggaaggaatgaaaggctgcccagcagttttgcccattgaccatgtttatggcactctgggcatcgtgggagccaccacaacgcagcgctattctgacgcctcaaaactgagggaggagatcgagggaaagggatccttcacttactttgcaccgagtaatgaggcttgggacaacttggattctgatatccgtagaggtttggagagcaacgtgaatgttgaattactgaatgctttacatagtcacatgattaataagagaatgttgaccaaggacttaaaaaatggcatgattattccttcaatgtataacaatttggggcttttcattaaccattatcctaatggggttgtcactgttaattgtgctcgaatcatccatgggaaccagattgcaacaaatggtgttgtccatgtcattgaccgtgtgcttacacaaattggtacctcaattcaagacttcattgaagcagaagatgacctttcatcttttagagcagctgccatcacatcggacatattggaggcccttggaagagacggtcacttcacactctttgctcccaccaatgaggcttttgagaaacttccacgaggtgtcctagaaaggatcatgggagacaaagtggcttccgaagctcttatgaagtaccacatcttaaatactctccagtgttctgagtctattatgggaggagcagtctttgagacgctggaaggaaatacaattgagataggatgtgacggtgacagtataacagtaaatggaatcaaaatggtgaacaaaaaggatattgtgacaaataatggtgtgatccatttgattgatcaggtcctaattcctgattctgccaaacaagttattgagctggctggaaaacagcaaaccaccttcacggatcttgtggcccaattaggcttggcatctgctctgaggccagatggagaatacactttgctggcacctgtgaataatgcattttctgatgatactctcagcatggatcagcgcctccttaaattaattctgcagaatcacatattgaaagtaaaagttggccttaatgagctttacaacgggcaaatactggaaaccatcggaggcaaacagctcagagtcttcgtatatcgtacagctgtctgcattgaaaattcatgcatggagaaagggagtaagcaagggagaaacggtgcgattcacatattccgcgagatcatcaagccagcagagaaatccctccatgaaaagttaaaacaagataagcgctttagcaccttcctcagcctacttgaagctgcagacttgaaagagctcctgacacaacctggagactggacattatttgtgccaaccaatgatgcttttaagggaatgactagtgaagaaaaagaaattctgatacgggacaaaaatgctcttcaaaacatcattctttatcacctgacaccaggagttttcattggaaaaggatttgaacctggtgttactaacattttaaagaccacacaaggaagcaaaatctttctgaaagaagtaaatgatacacttctggtgaatgaattgaaatcaaaagaatctgacatcatgacaacaaatggtgtaattcatgttgtagataaactcctctatccagcagacacacctgttggaaatgatcaactgctggaaatacttaataaattaatcaaatacatccaaattaagtttgttcgtggtagcaccttcaaagaaatccccgtgactgtctataagccaattattaaaaaatacaccaaaatcattgatggagtgcctgtggaaataactgaaaaagagacacgagaagaacgaatcattacaggtcctgaaataaaatacactaggatttctactggaggtggagaaacagaagaaactctgaagaaattgttacaagaagaggtcaccaaggtcaccaaattcattgaaggtggtgatggtcatttatttgaagatgaagaaattaaaagactgcttcagggagacacacccgtgaggaagttgcaagccaacaaaaaagttcaaggatctagaagacgattaagggaaggtcgttctcagtgaaaatccaaaaaccagaaaaaaatgtttatacaaccctaagtcaataacctgaccttagaaaattgtgagagccaagttgacttcaggaactgaaacatcagcacaaagaagcaatcatcaaataattctgaacacaaatttaatatttttttttctgaatgagaaacatgagggaaattgtggagttagcctcctgtggtaaaggaattgaagaaaatataacaccttacaccctttttcatcttgacattaaaagttctggctaactttggaatccattagagaaaaatccttgtcaccagattcattacaattcaaatcgaagagttgtgaactgttatcccattgaaaagaccgagccttgtatgtatgttatggatacataaaatgcacgcaagccattatctctccatgggaagctaagttataaaaataggtgcttggtgtacaaaactttttatatcaaaaggctttgcacatttctatatgagtgggtttactggtaaattatgttattttttacaactaattttgtactctcagaatgtttgtcatatgcttcttgcaatgcatattttttaatctcaaacgtttcaataaaaccatttttcagatataaagagaattacttcaaattgagtaattcagaaaaactcaagatttaagttaaaaagtggtttggacttgggaacaggactttatacctcttttactgtaacaagtactcattaaaggaaattgaatgaaattaaaaaaaaaaa

SEQ ID NO: 51447 - DNA, 2340 bp, Artificial Sequence
  derived and/or modified sequence
atgatccccttcttacccatgtttagccttctgctgctgttgattgtcaatcccattaacgccaacaaccactacgataagattctggcgcactccagaattcgtggcagggaccaggggccgaatgtgtgtgcattacaacagatcctaggcacgaagaagaaatactttagtacgtgtaaaaactggtacaagaagagcatctgcggccagaagacgactgtcctctacgagtgttgccccgggtacatgaggatggaaggaatgaagggatgtcctgccgtactgccaatcgatcacgtttacggaaccttgggaatagttggagcgactacaacccagcggtatagtgatgcaagtaagttacgcgaggagatcgaaggcaagggttcgttcacctatttcgcacccagtaacgaggcctgggataacttggacagcgatattaggaggggcctggaatcaaacgtgaacgtggaactgttgaacgctttgcactctcatatgataaacaaaaggatgctgacaaaagatctcaaaaatggcatgatcattccttctatgtacaacaaccttggcctgtttataaaccactacccaaacggagtggttacagtcaactgcgctaggattatccatggaaatcaaatagccacaaacggggtcgttcacgtcatcgaccgggtactcactcaaatcggaacatccatacaagactttattgaggccgaggatgatttatctagtttccgagctgccgccatcacctctgatatcctggaagctttagggcgcgacgggcattttactctgttcgcccctaccaacgaggccttcgagaagcttccccggggagttcttgaacggatcatgggagacaaggtggcttctgaggcgctaatgaaataccacatccttaacaccttgcagtgcagcgagtccattatgggtggtgccgtgttcgaaacattggagggtaataccatcgaaattgggtgtgatggggactcaatcactgttaacgggatcaaaatggtcaataagaaagatatcgtgacaaacaacggagtaatccacctgattgaccaggtgctgattcccgattccgcaaaacaggtgatcgagctggccgggaagcagcaaactacgttcacggacctcgtcgcacagctgggcctcgctagtgctctgcgtcctgacggggagtacactttgctagccccagtaaacaatgccttttccgacgacacactctcaatggaccagcgcttactaaaactgatactacagaaccatatactgaaggttaaagtaggcttaaacgaactgtacaacggacaaatactcgagaccattggcggcaagcagcttagggtttttgtctatcgcaccgccgtttgcatcgagaactcctgcatggagaaaggcagtaagcagggacgtaatggagctatccacatcttccgggaaatcattaagcctgcagaaaagtccctgcatgaaaaactgaaacaggacaagagatttagtacattcctgtcccttctcgaggctgctgacctcaaggaattactaacccagcctggagactggaccttattcgttcccaccaatgacgcatttaagggcatgactagcgaagagaaagaaattcttatcagagacaaaaatgcattgcagaatattatcctttaccatctgactccgggagtttttatagggaaaggattcgaaccaggagttacaaacattctgaaaactacgcaaggatcaaaaatctttctgaaggaggtcaatgatactctgttggtgaacgagctgaaaagcaaggagtctgatattatgacaacgaatggagtgattcacgtggtggataaactcctctatccagcagacacccctgtcggcaacgaccagcttctggaaatactaaacaagctcattaaatacattcagatcaagttcgttcgcggatctactttcaaggaaatacctgttacggtttacaagccaataatcaagaaatacaccaagataattgacggggtgcctgtggagattactgagaaagaaacaagagaagaacggattattacaggaccagaaatcaagtatactagaatcagcaccggggggggggagactgaagaaaccctgaagaagctactgcaggaagaagtgaccaaggtgaccaagttcattgagggaggagacggacacctgttcgaggatgaggagatcaagaggctgttacagggcgatacccctgttcgtaagctgcaggccaataagaaagttcaggggtctcgacggagactgagggaaggacgtagtcagtag

SEQ ID NO: 51448 - DNA, 2340 bp, Artificial Sequence
  derived and/or modified sequence
atgatccccttcctgcccatgttcagcctgctgctgctgctgattgtgaaccccatcaatgccaacaaccactatgacaagatcctggcccacagccgcatccggggccgggaccagggccccaacgtgtgtgccctgcagcagatcctgggcaccaagaagaagtacttcagcacctgcaagaactggtacaagaagagcatctgtggccagaagaccaccgtgctgtatgagtgctgccccggctacatgaggatggagggcatgaagggctgcccagctgtgctgcccatcgaccacgtgtatggcaccctgggcatcgtgggcgccaccaccacccagcgctacagtgatgccagcaagctgcgggaggagattgagggcaagggcagcttcacctactttgcccccagcaatgaggcctgggacaacctggacagcgacatccggcggggcctggagagcaatgtgaatgtggagctgctgaatgccctgcacagccacatgatcaacaagaggatgctgaccaaggacctgaagaatggcatgatcatccccagcatgtacaacaacctgggcctcttcatcaaccactacccaaatggagtggtgacagtgaactgtgcccgcatcatccacggcaaccagatcgccaccaacggggtggtgcacgtgattgacagagtgctgacccagatcggcaccagcatccaggacttcattgaagcagaagatgacctgagcagcttccgggctgctgccatcaccagtgacatcctggaggccctgggcagagatggccacttcaccctgtttgcccccaccaatgaggcctttgagaagctgccccggggcgtgctggagcgcatcatgggagacaaggtggccagcgaggccctgatgaagtaccacatcctgaacaccctgcagtgcagcgagagcatcatgggcggcgctgtgtttgagaccctggagggcaacaccattgaaattggctgtgatggagacagcatcaccgtgaatggcatcaagatggtgaacaagaaggacatcgtgaccaacaatggagtcatccacctgattgaccaggtgctgatcccagattctgccaagcaggtgattgagctggccggcaagcagcagaccaccttcacagacctggtggcccagctgggcctggccagcgccctgcggccagatggagagtacaccctgctggcccctgtgaacaatgccttcagtgatgacaccctgtccatggaccagaggctgctgaagctgatcctgcagaaccacatcctgaaggtgaaggtgggcctgaatgagctgtacaacggccagatcctggagaccatcggcggcaagcagctgcgggtgtttgtgtacagaacagctgtgtgcatcgagaacagctgcatggagaagggcagcaagcagggcagaaatggagccatccacatcttccgggagatcatcaagccagctgagaagagcctgcacgagaagctgaagcaggacaagcgcttcagcaccttcctgagcctgctggaggccgctgacctgaaggagctgctgacccagcccggggactggaccctgtttgtgcccaccaatgatgccttcaagggcatgaccagcgaggagaaggagatcctgatccgggacaagaatgccctgcagaacatcatcctgtaccacctgaccccaggagtcttcatcggcaaaggatttgagcccggggtgaccaacatcctgaagaccacccagggcagcaagatcttcctgaaggaggtgaatgacaccctgctggtgaatgagctgaagagcaaggagagtgacatcatgaccaccaacggggtcatccacgtggtggacaagctgctgtacccagctgacacccctgtgggcaatgaccagctgctggagatcctgaacaagctgatcaagtacatccagatcaagtttgtgcggggcagcaccttcaaggagatccctgtgacagtgtacaagcccatcatcaagaagtacaccaagatcattgatggagtgcctgtggagatcacagagaaggagacccgggaggagcgcatcatcactggacctgagatcaagtacacccgcatcagcactggaggaggagaaacagaggagaccctgaagaagctgctgcaggaggaggtgaccaaggtgaccaagttcatcgagggcggagatggccacctgtttgaagatgaggagatcaagaggctgctgcagggcgacacccctgtgaggaagctgcaggccaacaagaaggtgcagggcagcagaagaaggctgcgggagggccgcagccagtag

SEQ ID NO: 51449 - DNA, 2340 bp, Artificial Sequence
  derived and/or modified sequence
atgatccccttcctgcccatgttcagcctgctgctgctgctgatcgtgaatcctataaacgccaataaccattacgataaaattctagcgcacagtcgcatacgtggcagagaccagggacccaacgtttgcgcactccagcagattctgggaactaaaaagaagtatttcagtacgtgcaagaattggtataaaaaatctatttgcgggcagaaaacaacagtgctgtacgagtgctgtcccggatatatgagaatggagggcatgaaggggtgccccgccgtcctcccaattgaccacgtatacggcaccctcggcatcgtcggcgctactacaacgcagagatattcagacgcaagcaagctgcgagaagagattgaaggtaaaggctcctttacctatttcgcccctagcaacgaggcctgggacaatctcgattcagacattagaagagggctggaatccaacgtcaacgtcgagctgctgaacgcactacacagccacatgatcaataagcggatgttgaccaaggaccttaagaacgggatgattatacctagcatgtacaacaacctaggactctttatcaatcactaccccaatggagtcgtgaccgtgaattgcgccagaatcattcacggcaatcaaattgctacaaacggcgtagttcacgtgatagatcgagtgttgacacaaatcggtacttcgatacaagattttatcgaggccgaagatgacttgtcaagctttcgcgccgctgccataaccagcgatatacttgaggccctgggaagagacggccacttcacactttttgcccccactaacgaggcatttgaaaaactgccaaggggcgttctggaacgcattatgggcgacaaggtggcctctgaggccctcatgaagtaccatattcttaataccctgcaatgctctgaaagcataatgggcggggcggtcttcgagaccctggaagggaacactatcgagataggctgtgatggcgattctatcactgtgaatgggatcaagatggtaaataagaaggacattgtgaccaataatggggtcatccacctgatcgatcaggtccttatccccgattccgcaaagcaagtaatcgaattggcaggaaagcaacaaaccactttcacggatctggtagcgcagttaggtttggcgagtgccttaaggcctgacggtgaatacaccttgttggcgcccgtcaacaatgccttttccgacgatactctgtccatggatcagaggcttctgaagttgatattgcaaaatcacatcttgaaggtgaaggttggcctgaatgaactgtacaatgggcagattttggagacgattggagggaagcagttgcgagtcttcgtgtatcgaactgccgtgtgcatcgagaattcctgtatggagaagggatctaagcaggggagaaatggcgcgattcatattttcagggagatcattaagcctgcagaaaaaagtctgcacgagaagctgaagcaggataaacgtttttctacatttctctcactcctcgaagccgctgacctcaaagagcttttaactcaacccggggattggaccctcttcgtgcctactaatgatgcattcaaaggcatgacctctgaagaaaaggaaatactaatccgggacaagaatgctctgcagaacatcatcctgtaccacctgacccccggcgttttcataggaaaaggattcgagcccggagttaccaacattctgaagaccactcagggatctaagatattcctgaaggaggtgaacgatacactgctggtcaatgagctgaaaagcaaggagtcagacatcatgactaccaacggtgtgattcacgttgtcgacaaattgttatatcccgctgatacccccgtcgggaatgaccagctgcttgagatactgaataagcttattaaatacatccagatcaagtttgttcggggaagcacctttaaggagatccccgtaaccgtctacaagcctattattaagaagtacactaaaattatcgatggagttcctgtcgagattaccgaaaaagagacgcgcgaagaaagaatcataacaggccccgagattaaatatacacggatctccacaggagggggagagacggaggagaccttgaagaaactcctccaagaggaagtgaccaaagtgaccaaatttattgagggcggggacggacatctgtttgaagatgaggagataaagcgattattacagggtgatacccccgtgcgtaagctgcaggccaacaagaaggtgcagggctcacgtcggcggctgcgcgagggacgatctcagtag

SEQ ID NO: 51450 - DNA, 3071 bp, Artificial Sequence
  derived and/or modified sequence
ttcggggactaactgcaacggagagactcaagatgattccctttttacccatgttttctctactattgctgcttattgttaaccctataaacgccaacaatcattatgacaagatcttggctcatagtcgtatcaggggtcgggaccaaggcccaaatgtctgtgcccttcaacagattttgggcaccaaaaagaaatacttcagcacttgtaagaactggtataaaaagtccatctgtggacagaaaacgactgtgttatatgaatgttgccctggttatatgagaatggaaggaatgaaaggctgcccagcagttttgcccattgaccatgtttatggcactctgggcatcgtgggagccaccacaacgcagcgctattctgacgcctcaaaactgagggaggagatcgagggaaagggatccttcacttactttgcaccgagtaatgaggcttgggacaacttggattctgatatccgtagaggtttggagagcaacgtgaatgttgaattactgaatgctttacatagtcacatgattaataagagaatgttgaccaaggacttaaaaaatggcatgattattccttcaatgtataacaatttggggcttttcattaaccattatcctaatggggttgtcactgttaattgtgctcgaatcatccatgggaaccagattgcaacaaatggtgttgtccatgtcattgaccgtgtgcttacacaaattggtacctcaattcaagacttcattgaagcagaagatgacctttcatcttttagagcagctgccatcacatcggacatattggaggcccttggaagagacggtcacttcacactctttgctcccaccaatgaggcttttgagaaacttccacgaggtgtcctagaaaggatcatgggagacaaagtggcttccgaagctcttatgaagtaccacatcttaaatactctccagtgttctgagtctattatgggaggagcagtctttgagacgctggaaggaaatacaattgagataggatgtgacggtgacagtataacagtaaatggaatcaaaatggtgaacaaaaaggatattgtgacaaataatggtgtgatccatttgattgatcaggtcctaattcctgattctgccaaacaagttattgagctggctggaaaacagcaaaccaccttcacggatcttgtggcccaattaggcttggcatctgctctgaggccagatggagaatacactttgctggcacctgtgaataatgcattttctgatgatactctcagcatggatcagcgcctccttaaattaattctgcagaatcacatattgaaagtaaaagttggccttaatgagctttacaacgggcaaatactggaaaccatcggaggcaaacagctcagagtcttcgtatatcgtacagctgtctgcattgaaaattcatgcatggagaaagggagtaagcaagggagaaacggtgcgattcacatattccgcgagatcatcaagccagcagagaaatccctccatgaaaagttaaaacaagataagcgctttagcaccttcctcagcctacttgaagctgcagacttgaaagagctcctgacacaacctggagactggacattatttgtgccaaccaatgatgcttttaagggaatgactagtgaagaaaaagaaattctgatacgggacaaaaatgctcttcaaaacatcattctttatcacctgacaccaggagttttcattggaaaaggatttgaacctggtgttactaacattttaaagaccacacaaggaagcaaaatctttctgaaagaagtaaatgatacacttctggtgaatgaattgaaatcaaaagaatctgacatcatgacaacaaatggtgtaattcatgttgtagataaactcctctatccagcagacacacctgttggaaatgatcaactgctggaaatacttaataaattaatcaaatacatccaaattaagtttgttcgtggtagcaccttcaaagaaatccccgtgactgtctataagccaattattaaaaaatacaccaaaatcattgatggagtgcctgtggaaataactgaaaaagagacacgagaagaacgaatcattacaggtcctgaaataaaatacactaggatttctactggaggtggagaaacagaagaaactctgaagaaattgttacaagaagaggtcaccaaggtcaccaaattcattgaaggtggtgatggtcatttatttgaagatgaagaaattaaaagactgcttcagggagacacacccgtgaggaagttgcaagccaacaaaaaagttcaaggatctagaagacgattaagggaaggtcgttctcagtgaaaatccaaaaaccagaaaaaaatgtttatacaaccctaagtcaataacctgaccttagaaaattgtgagagccaagttgacttcaggaactgaaacatcagcacaaagaagcaatcatcaaataattctgaacacaaatttaatatttttttttctgaatgagaaacatgagggaaattgtggagttagcctcctgtggtaaaggaattgaagaaaatataacaccttacaccctttttcatcttgacattaaaagttctggctaactttggaatccattagagaaaaatccttgtcaccagattcattacaattcaaatcgaagagttgtgaactgttatcccattgaaaagaccgagccttgtatgtatgttatggatacataaaatgcacgcaagccattatctctccatgggaagctaagttataaaaataggtgcttggtgtacaaaactttttatatcaaaaggctttgcacatttctatatgagtgggtttactggtaaattatgttattttttacaactaattttgtactctcagaatgtttgtcatatgcttcttgcaatgcatattttttaatctcaaacgtttcaataaaaccatttttcagatataaagagaattacttcaaattgagtaattcagaaaaactcaagatttaagttaaaaagtggtttggacttgggaacaggactt

SEQ ID NO: 51451 - DNA, 2340 bp, Artificial Sequence
  derived and/or modified sequence
atgattcccttcttgcctatgttctccctcttacttctactcatcgtgaatccaattaatgccaacaaccattatgataagatcctggctcattcccgaatccgcggtcgcgatcagggccctaacgtatgcgcgctgcaacagattttgggcactaagaaaaagtatttctcaacatgtaagaactggtataagaagtctatttgcggtcagaaaaccaccgttctgtacgagtgctgtcccggttacatgagaatggaggggatgaagggatgtcccgctgttctgcccattgatcatgtttatggcactcttggaattgtgggggcaaccacaactcaacggtattctgatgcctccaagctcagagaggaaatcgagggtaaggggagcttcacttacttcgctcccagcaacgaggcttgggacaacctggactctgatatccgccgtgggttagaatccaacgtgaatgtcgaactcctgaacgcactccattctcacatgatcaacaagaggatgctgactaaggatcttaagaacgggatgattatccctagcatgtacaacaatctggggttgttcataaatcactatcctaacggagtggtcaccgtcaactgtgctcggataatccatggaaatcagatcgcgacgaatggcgttgttcacgtgatcgatagagtgttgacccaaattggcacctccattcaggattttatcgaagcggaggacgatctctcttccttccgggcagcagccatcacatccgatatacttgaagcccttgggagagatggccactttacacttttcgcacccacaaatgaagcctttgagaaacttccaaggggtgtcctggaaagaatcatgggtgataaagtggccagcgaggccctgatgaagtatcatattctaaacactttacagtgttcagagtccatcatgggtggcgctgtgtttgagacactagaaggtaacactatcgagattggctgcgacggcgactctattaccgtgaacggcatcaaaatggttaacaaaaaggatatcgtgacaaataacggagttatacatctcatagatcaggtactgatccccgacagcgccaagcaggtcatcgaattggccggaaagcagcaaaccacatttacagatcttgtggcccaactgggccttgccagcgccctgagacccgatggggaatatacccttcttgcccctgtaaataatgctttttcagatgacactctttccatggatcaaagactcctgaagttgatcctgcagaatcatatccttaaagtgaaggttggactcaatgagctatacaacggacaaatactggaaacgatcgggggaaaacagctgagggtatttgtttatagaaccgctgtgtgtatcgagaattcgtgcatggaaaaaggctcaaaacaaggaagaaatggcgctatccatatttttagggaaataattaaaccggctgaaaagtctctgcacgagaagctcaaacaagacaagcgcttcagtaccttcctgtcactgctggaggctgccgatctcaaagagctgctgacgcagcctggcgattggaccctgtttgtgcccacaaacgacgccttcaaagggatgacttcagaagagaaagagatccttatccgagataaaaacgctctccagaacatcatcttataccacttaaccccaggggtgttcattgggaaagggttcgagcctggagtgacaaacatactgaagaccactcagggttccaaaattttcctgaaggaagtgaatgatactctgttggtgaatgagctgaaaagtaaggagagtgacatcatgacgactaacggcgtaatccatgtggtggacaagctcctgtacccagcggacacgccagttggcaacgatcagctgctggaaattctgaacaaactcatcaaatatatccagatcaaatttgtacgcggaagcacattcaaagagatcccagtgaccgtttataaaccaatcattaagaaatacaccaaaattatcgacggggtcccggtggagatcacagagaaggagactagggaagagaggattatcacgggcccagaaataaagtacactcgtatatctacaggcggtggggaaacagaagagactctcaagaaattattacaggaggaggttactaaagtgactaagtttatcgagggaggagacggacacctattcgaagatgaagagataaagcggctgttacagggcgatactcccgtgcggaagctgcaggccaacaagaaggtgcagggttcacggcgacggctccgcgaaggccgtagccaatag

SEQ ID NO: 51452 - DNA, 2340 bp, Artificial Sequence
  derived and/or modified sequence
atgatccccttcctgcccatgttcagcctgctgctgctgctgatcgtgaaccccatcaacgccaacaaccactacgacaagatcctggcccacagcagaatcagaggcagagaccagggccccaacgtgtgcgccctgcagcagatcctgggcaccaagaagaagtacttcagcacctgcaagaactggtacaagaagagcatctgcggccagaagaccaccgtgctgtacgagtgctgccccggctacatgagaatggagggcatgaagggctgccccgccgtgctgcccatcgaccacgtgtacggcaccctgggcatcgtgggcgccaccaccacccagagatacagcgacgccagcaagctgagagaggagatcgagggcaagggcagcttcacctacttcgcccccagcaacgaggcctgggacaacctggacagcgacatcagaagaggcctggagagcaacgtgaacgtggagctgctgaacgccctgcacagccacatgatcaacaagagaatgctgaccaaggacctgaagaacggcatgatcatccccagcatgtacaacaacctgggcctgttcatcaaccactaccccaacggcgtggtgaccgtgaactgcgccagaatcatccacggcaaccagatcgccaccaacggcgtggtgcacgtgatcgacagagtgctgacccagatcggcaccagcatccaggacttcatcgaggccgaggacgacctgagcagcttcagagccgccgccatcaccagcgacatcctggaggccctgggcagagacggccacttcaccctgttcgcccccaccaacgaggccttcgagaagctgcccagaggcgtgctggagagaatcatgggcgacaaggtggccagcgaggccctgatgaagtaccacatcctgaacaccctgcagtgcagcgagagcatcatgggcggcgccgtgttcgagaccctggagggcaacaccatcgagatcggctgcgacggcgacagcatcaccgtgaacggcatcaagatggtgaacaagaaggacatcgtgaccaacaacggcgtgatccacctgatcgaccaggtgctgatccccgacagcgccaagcaggtgatcgagctggccggcaagcagcagaccaccttcaccgacctggtggcccagctgggcctggccagcgccctgagacccgacggcgagtacaccctgctggcccccgtgaacaacgccttcagcgacgacaccctgagcatggaccagagactgctgaagctgatcctgcagaaccacatcctgaaggtgaaggtgggcctgaacgagctgtacaacggccagatcctggagaccatcggcggcaagcagctgagagtgttcgtgtacagaaccgccgtgtgcatcgagaacagctgcatggagaagggcagcaagcagggcagaaacggcgccatccacatcttcagagagatcatcaagcccgccgagaagagcctgcacgagaagctgaagcaggacaagagattcagcaccttcctgagcctgctggaggccgccgacctgaaggagctgctgacccagcccggcgactggaccctgttcgtgcccaccaacgacgccttcaagggcatgaccagcgaggagaaggagatcctgatcagagacaagaacgccctgcagaacatcatcctgtaccacctgacccccggcgtgttcatcggcaagggcttcgagcccggcgtgaccaacatcctgaagaccacccagggcagcaagatcttcctgaaggaggtgaacgacaccctgctggtgaacgagctgaagagcaaggagagcgacatcatgaccaccaacggcgtgatccacgtggtggacaagctgctgtaccccgccgacacccccgtgggcaacgaccagctgctggagatcctgaacaagctgatcaagtacatccagatcaagttcgtgagaggcagcaccttcaaggagatccccgtgaccgtgtacaagcccatcatcaagaagtacaccaagatcatcgacggcgtgcccgtggagatcaccgagaaggagaccagagaggagagaatcatcaccggccccgagatcaagtacaccagaatcagcaccggcggcggcgagaccgaggagaccctgaagaagctgctgcaggaggaggtgaccaaggtgaccaagttcatcgagggcggcgacggccacctgttcgaggacgaggagatcaagagactgctgcagggcgacacccccgtgagaaagctgcaggccaacaagaaggtgcagggcagcagaagaagactgagagagggcagaagccagtag

SEQ ID NO: 51453 - protein, 781 aa, Artificial Sequence
  derived and/or modified sequence
MIPFLPMFSLLLLLIVNPINANNHYDKILAHSRIRGRDQGPNVCALQQILGTKKKYFSTCKNWYKKSICGQKTTVLYECCPGYMRMEGMKGCPAVLPIDHVYGTLGIVGATTTQRYSDASKLREEIEGKGSFTYFAPSNEAWDNLDSDIRRGLESNVNVELLNALHSHMINKRMLTKDLKNGMIIPSMYNNLGLFINHYPNGVVTVNCARIIHGNQIATNGVVHVIDRVLTQIGTSIQDFIEAEDDLSSFRAAAITSDILEALGRDGHFTLFAPTNEAFEKLPRGVLERIMGDKVASEALMKYHILNTLQCSESIMGGAVFETLEGNTIEIGCDGDSITVNGIKMVNKKDIVTNNGVIHLIDQVLIPDSAKQVIELAGKQQTTFTDLVAQLGLASALRPDGEYTLLAPVNNAFSDDTLSMDQRLLKLILQNHILKVKVGLNELYNGQILETIGGKQLRVFVYRTAVCIENSCMEKGSKQGRNGAIHIFREIIKPAEKSLHEKLKQDKRFSTFLSLLEAADLKELLTQPGDWTLFVPTNDAFKGMTSEEKEILIRDKNALQNIILYHLTPGVFIGKGFEPGVTNILKTTQGSKIFLKEVNDTLLVNELKSKESDIMTTNGVIHVVDKLLYPADTPVGNDQLLEILNKLIKYIQIKFVRGSTFKEIPVTVYRPTLTKVKIEGEPEFRLIKEGETITEVIHGEPIIKKYTKIIDGVPVEITEKETREERIITGPEIKYTRISTGGGETEETLKKLLQEDTPVRKLQANKKVQGSRRRLREGRSQ

SEQ ID NO: 51454 - DNA, 3225 bp, Artificial Sequence
  derived and/or modified sequence
agactctcaggttgatgcagtgttccctcccacaactctgacatgtatataaattctgagctctccaaagcccactgccagttctcttcggggactaactgcaacggagagactcaagatgattccctttttacccatgttttctctactattgctgcttattgttaaccctataaacgccaacaatcattatgacaagatcttggctcatagtcgtatcaggggtcgggaccaaggcccaaatgtctgtgcccttcaacagattttgggcaccaaaaagaaatacttcagcacttgtaagaactggtataaaaagtccatctgtggacagaaaacgactgtgttatatgaatgttgccctggttatatgagaatggaaggaatgaaaggctgcccagcagttttgcccattgaccatgtttatggcactctgggcatcgtgggagccaccacaacgcagcgctattctgacgcctcaaaactgagggaggagatcgagggaaagggatccttcacttactttgcaccgagtaatgaggcttgggacaacttggattctgatatccgtagaggtttggagagcaacgtgaatgttgaattactgaatgctttacatagtcacatgattaataagagaatgttgaccaaggacttaaaaaatggcatgattattccttcaatgtataacaatttggggcttttcattaaccattatcctaatggggttgtcactgttaattgtgctcgaatcatccatgggaaccagattgcaacaaatggtgttgtccatgtcattgaccgtgtgcttacacaaattggtacctcaattcaagacttcattgaagcagaagatgacctttcatcttttagagcagctgccatcacatcggacatattggaggcccttggaagagacggtcacttcacactctttgctcccaccaatgaggcttttgagaaacttccacgaggtgtcctagaaaggatcatgggagacaaagtggcttccgaagctcttatgaagtaccacatcttaaatactctccagtgttctgagtctattatgggaggagcagtctttgagacgctggaaggaaatacaattgagataggatgtgacggtgacagtataacagtaaatggaatcaaaatggtgaacaaaaaggatattgtgacaaataatggtgtgatccatttgattgatcaggtcctaattcctgattctgccaaacaagttattgagctggctggaaaacagcaaaccaccttcacggatcttgtggcccaattaggcttggcatctgctctgaggccagatggagaatacactttgctggcacctgtgaataatgcattttctgatgatactctcagcatggatcagcgcctccttaaattaattctgcagaatcacatattgaaagtaaaagttggccttaatgagctttacaacgggcaaatactggaaaccatcggaggcaaacagctcagagtcttcgtatatcgtacagctgtctgcattgaaaattcatgcatggagaaagggagtaagcaagggagaaacggtgcgattcacatattccgcgagatcatcaagccagcagagaaatccctccatgaaaagttaaaacaagataagcgctttagcaccttcctcagcctacttgaagctgcagacttgaaagagctcctgacacaacctggagactggacattatttgtgccaaccaatgatgcttttaagggaatgactagtgaagaaaaagaaattctgatacgggacaaaaatgctcttcaaaacatcattctttatcacctgacaccaggagttttcattggaaaaggatttgaacctggtgttactaacattttaaagaccacacaaggaagcaaaatctttctgaaagaagtaaatgatacacttctggtgaatgaattgaaatcaaaagaatctgacatcatgacaacaaatggtgtaattcatgttgtagataaactcctctatccagcagacacacctgttggaaatgatcaactgctggaaatacttaataaattaatcaaatacatccaaattaagtttgttcgtggtagcaccttcaaagaaatccccgtgactgtctatagacccacactaacaaaagtcaaaattgaaggtgaacctgaattcagactgattaaagaaggtgaaacaataactgaagtgatccatggagagccaattattaaaaaatacaccaaaatcattgatggagtgcctgtggaaataactgaaaaagagacacgagaagaacgaatcattacaggtcctgaaataaaatacactaggatttctactggaggtggagaaacagaagaaactctgaagaaattgttacaagaagacacacccgtgaggaagttgcaagccaacaaaaaagttcaaggatctagaagacgattaagggaaggtcgttctcagtgaaaatccaaaaaccagaaaaaaatgtttatacaaccctaagtcaataacctgaccttagaaaattgtgagagccaagttgacttcaggaactgaaacatcagcacaaagaagcaatcatcaaataattctgaacacaaatttaatatttttttttctgaatgagaaacatgagggaaattgtggagttagcctcctgtggtaaaggaattgaagaaaatataacaccttacaccctttttcatcttgacattaaaagttctggctaactttggaatccattagagaaaaatccttgtcaccagattcattacaattcaaatcgaagagttgtgaactgttatcccattgaaaagaccgagccttgtatgtatgttatggatacataaaatgcacgcaagccattatctctccatgggaagctaagttataaaaataggtgcttggtgtacaaaactttttatatcaaaaggctttgcacatttctatatgagtgggtttactggtaaattatgttattttttacaactaattttgtactctcagaatgtttgtcatatgcttcttgcaatgcatattttttaatctcaaacgtttcaataaaaccatttttcagatataaagagaattacttcaaattgagtaattcagaaaaactcaagatttaagttaaaaagtggtttggacttgggaacaggactttatacctcttttactgtaacaagtactcattaaaggaaattgaatgaaattaaaaaaaaaaa

SEQ ID NO: 51455 - DNA, 2346 bp, Artificial Sequence
  derived and/or modified sequence
atgatacccttcttgccaatgtttagcctcttgctactccttattgtaaatccgatcaatgctaataaccactacgacaagatcctggctcatagccggattaggggaagggaccagggtcccaacgtgtgtgctctacagcagatcttggggaccaaaaagaagtattttagcacatgcaagaactggtataagaaatccatttgtggacagaagactacagtactctatgagtgttgtccagggtacatgcggatggaggggatgaagggatgtcctgcagtactgcccatcgaccacgtgtacgggaccctaggtattgtcggcgctactactacacaacgctacagcgacgctagcaagctgagggaggaaattgagggaaagggttcttttacctactttgctccttcaaacgaggcctgggataacttggactccgatatcagaagggggctggaatcaaatgttaatgtggagctactaaatgccttacactcacacatgataaataagaggatgttgacgaaagacttgaagaacggaatgatcatccctagcatgtataataatttaggattgtttatcaatcattacccaaacggggtggtgacagtcaattgcgcacgtataattcacggtaaccaaattgcgaccaatggtgtggttcatgtgatcgaccgcgtcctcactcagattgggacctccattcaggatttcatagaggctgaagacgatttatcatcgtttagagctgccgctattaccagtgatattctggaagctctgggcagagatgggcattttaccttattcgccccaaccaacgaggctttcgagaaattgccaaggggggtgctcgaaagaatcatgggagataaggtggcttccgaggctctgatgaaataccacattctgaatactctacaatgctccgagagtatcatggggggcgctgtattcgagacactggaaggtaacactatagagattggatgtgatggcgactctattaccgtaaacggcataaaaatggtgaacaagaaggacatcgttaccaacaatggcgtaattcatttaattgaccaagtgttgatccccgattccgccaagcaggttattgagctagcaggcaagcaacagaccacattcacagatcttgtggcccagctcggcctggccagtgcgctgaggcctgatggagagtatactctcctggccccagtaaacaatgctttcagcgatgacacactgagcatggaccagagattactgaaactaattctgcaaaaccacattctgaaggtgaaggtgggcctcaatgagctgtataatggacaaatcctggaaaccattggggggaaacaacttagagtattcgtgtaccgaactgctgtgtgcattgaaaactcatgtatggaaaagggctcgaaacagggccgtaatggagccattcatatattcagggaaataatcaagcccgctgagaagagtttgcatgagaaacttaagcaggacaaaagatttagtacgtttcttagcctcctagaggcagctgacctgaaggagctactgacccagcctggggattggaccttatttgtccctaccaatgacgcattcaaggggatgacctccgaggaaaaagaaatactaataagagataaaaacgctctgcagaacattattctgtaccacttgactcctggcgtgttcattggtaaaggattcgaacctggagtgacaaacatccttaagactactcagggatccaaaattttcctcaaagaggtaaatgacacgctgctagtgaacgagttgaagagcaaggaaagcgatataatgaccacaaatggcgtgattcatgtcgtcgataagctcctgtacccggctgacactcctgtaggtaacgaccaattgttggagattctcaacaaactgatcaagtatatccagattaagtttgtgcgcggttcgaccttcaaggagattcctgttaccgtctatcggccaacccttaccaaagtgaagatcgagggagagccggagtttaggctcatcaaagaaggcgaaaccataaccgaagtgatccacggcgagccaataatcaaaaagtatacaaagataatcgatggggtgcccgtggaaattactgaaaaagagacacgcgaagagaggatcattacaggcccagaaatcaaatacacccgaatctccacaggcggcggagaaaccgaggagacattgaagaagctactccaggaagatactcctgtgcgtaagctgcaagccaataagaaggtgcaagggagcaggcgaagactacgtgaaggacgaagtcagtag

SEQ ID NO: 51456 - DNA, 2346 bp, Artificial Sequence
  derived and/or modified sequence
atgatccccttcctgcccatgttcagcctgctgctgctgctgattgtgaaccccatcaatgccaacaaccactatgacaagatcctggcccacagccgcatccggggccgggaccagggccccaacgtgtgtgccctgcagcagatcctgggcaccaagaagaagtacttcagcacctgcaagaactggtacaagaagagcatctgtggccagaagaccaccgtgctgtatgagtgctgccccggctacatgaggatggagggcatgaagggctgcccagctgtgctgcccatcgaccacgtgtatggcaccctgggcatcgtgggcgccaccaccacccagcgctacagtgatgccagcaagctgcgggaggagattgagggcaagggcagcttcacctactttgcccccagcaatgaggcctgggacaacctggacagcgacatccggcggggcctggagagcaatgtgaatgtggagctgctgaatgccctgcacagccacatgatcaacaagaggatgctgaccaaggacctgaagaatggcatgatcatccccagcatgtacaacaacctgggcctcttcatcaaccactacccaaatggagtggtgacagtgaactgtgcccgcatcatccacggcaaccagatcgccaccaacggggtggtgcacgtgattgacagagtgctgacccagatcggcaccagcatccaggacttcattgaagcagaagatgacctgagcagcttccgggctgctgccatcaccagtgacatcctggaggccctgggcagagatggccacttcaccctgtttgcccccaccaatgaggcctttgagaagctgccccggggcgtgctggagcgcatcatgggagacaaggtggccagcgaggccctgatgaagtaccacatcctgaacaccctgcagtgcagcgagagcatcatgggcggcgctgtgtttgagaccctggagggcaacaccattgaaattggctgtgatggagacagcatcaccgtgaatggcatcaagatggtgaacaagaaggacatcgtgaccaacaatggagtcatccacctgattgaccaggtgctgatcccagattctgccaagcaggtgattgagctggccggcaagcagcagaccaccttcacagacctggtggcccagctgggcctggccagcgccctgcggccagatggagagtacaccctgctggcccctgtgaacaatgccttcagtgatgacaccctgtccatggaccagaggctgctgaagctgatcctgcagaaccacatcctgaaggtgaaggtgggcctgaatgagctgtacaacggccagatcctggagaccatcggcggcaagcagctgcgggtgtttgtgtacagaacagctgtgtgcatcgagaacagctgcatggagaagggcagcaagcagggcagaaatggagccatccacatcttccgggagatcatcaagccagctgagaagagcctgcacgagaagctgaagcaggacaagcgcttcagcaccttcctgagcctgctggaggccgctgacctgaaggagctgctgacccagcccggggactggaccctgtttgtgcccaccaatgatgccttcaagggcatgaccagcgaggagaaggagatcctgatccgggacaagaatgccctgcagaacatcatcctgtaccacctgaccccaggagtcttcatcggcaaaggatttgagcccggggtgaccaacatcctgaagaccacccagggcagcaagatcttcctgaaggaggtgaatgacaccctgctggtgaatgagctgaagagcaaggagagtgacatcatgaccaccaacggggtcatccacgtggtggacaagctgctgtacccagctgacacccctgtgggcaatgaccagctgctggagatcctgaacaagctgatcaagtacatccagatcaagtttgtgcggggcagcaccttcaaggagatccctgtgacagtgtaccggcccaccctgaccaaggtgaagattgaaggagagcctgagttccgcctcatcaaggagggggagaccatcacagaggtgatccacggggagcccatcatcaagaagtacaccaagatcattgatggagtgcctgtggagatcacagagaaggagacccgggaggagcgcatcatcactggacctgagatcaagtacacccgcatcagcactggaggaggagaaacagaggagaccctgaagaagctgctgcaggaggacacccctgtgaggaagctgcaggccaacaagaaggtgcagggcagcagaagaaggctgcgggagggccgcagccagtag

SEQ ID NO: 51457 - DNA, 2346 bp, Artificial Sequence
  derived and/or modified sequence
atgatccccttcctgcccatgttcagcctgctgctgctgctgatcgtcaatcccattaatgctaataaccattacgataagatactggcacattcacgaattcggggtagggatcagggcccaaacgtttgcgccctgcagcagattctgggtacaaagaagaaatatttcagcacctgcaagaactggtacaagaaaagcatctgcggacagaagacaacagtgctttacgagtgctgtccaggctatatgagaatggagggcatgaagggctgtcccgccgtcttgcccatagatcacgtgtacggcaccctgggcattgtcggagcaacaaccactcaacggtactccgacgcatccaaactgagagaagagatcgaggggaaagggtcttttacctacttcgcacccagcaatgaagcctgggacaacctggatagcgacattaggcgcggacttgagagtaacgttaatgtcgagctgctaaacgctttgcattcacacatgattaacaaaaggatgctaactaaagatctgaagaacggcatgatcatcccaagcatgtataataacttgggactgtttataaaccattatccaaatggcgtggttaccgtcaattgtgcccggattattcacggtaatcaaatcgccaccaacggggtggtgcatgtgatcgatagagttctgacccagatcgggaccagcatccaagatttcattgaagcagaggatgacctgtcatcctttcgagcagcagctattacaagcgacatcctagaggcattgggacgcgacggccatttcaccttattcgccccaactaacgaagcgtttgagaaactacccagaggcgtcttagagcgcattatgggcgacaaggtcgcctcagaggccctgatgaagtaccacatcttgaacactctccagtgctctgagtctatcatggggggtgccgtgtttgaaacactggaagggaatacaattgaaatcgggtgtgatggggactctatcacagtgaatggaattaaaatggtcaataagaaagatattgttactaataatggagtgattcatttgatcgatcaagtgcttatccctgacagcgccaagcaggtgatcgagttagccggcaaacagcagacaacctttactgaccttgtggcgcagctgggtctggccagtgctctgaggcctgacggagagtatacattgctggcaccggtgaataacgccttttctgacgatactctgtctatggaccagcgcctgctcaaactcattctccagaatcacattctgaaggtgaaagtgggcctcaatgagctgtacaatggtcaaatccttgaaaccatcggtggtaaacaactgcgcgtgttcgtgtacaggacggctgtgtgcatcgagaatagctgcatggagaagggctcaaagcagggccggaacggggcaattcacatttttcgtgaaataattaaaccagccgagaagtctcttcatgagaagctcaaacaggataagcgcttctccacattcctgagtctgctcgaggccgccgacctgaaggagctactaacacagcccggagattggacattgtttgtacctaccaatgacgctttcaaaggtatgacgtccgaggagaaggagatcctcattcgggataaaaacgccttacagaatataattttataccacctcacccctggcgtgtttattgggaagggctttgagcccggagtcactaacattcttaagaccactcagggctccaaaatcttcctcaaggaggtgaatgatacactcctcgtaaacgaacttaagagtaaggaatcagacatcatgaccactaatggagttatccacgtggtggataagcttctttaccctgcagatacccccgtaggcaacgatcaactgcttgaaattttaaataaattaatcaagtatatccagatcaagttcgtccgggggtcgacatttaaggaaatcccagttacagtatataggcccaccctgacgaaagtgaaaatcgaaggagagccggagtttcgactgatcaaggaaggggagaccattactgaggtgattcatggagagccaattattaagaagtatactaagatcattgatggcgtccctgtggagattaccgagaaggagacacgtgaagaacgcattatcaccgggcctgagatcaagtacacacgaatctctacgggcggtggagagacggaggagaccctgaagaagctgctacaggaagacactcctgtaaggaagctccaggcaaataagaaggtccagggttcccgcaggcgcttgcgagaaggacgatcccagtag

SEQ ID NO: 51458 - DNA, 3214 bp, Artificial Sequence
  derived and/or modified sequence
agactctcaggttgatgcagtgttccctcccacaactctgacatgtatataaattctgagctctccaaagcccactgccagttctcttcggggactaactgcaacggagagactcaagatgattccctttttacccatgttttctctactattgctgcttattgttaaccctataaacgccaacaatcattatgacaagatcttggctcatagtcgtatcaggggtcgggaccaaggcccaaatgtctgtgcccttcaacagattttgggcaccaaaaagaaatacttcagcacttgtaagaactggtataaaaagtccatctgtggacagaaaacgactgtgttatatgaatgttgccctggttatatgagaatggaaggaatgaaaggctgcccagcagttttgcccattgaccatgtttatggcactctgggcatcgtgggagccaccacaacgcagcgctattctgacgcctcaaaactgagggaggagatcgagggaaagggatccttcacttactttgcaccgagtaatgaggcttgggacaacttggattctgatatccgtagaggtttggagagcaacgtgaatgttgaattactgaatgctttacatagtcacatgattaataagagaatgttgaccaaggacttaaaaaatggcatgattattccttcaatgtataacaatttggggcttttcattaaccattatcctaatggggttgtcactgttaattgtgctcgaatcatccatgggaaccagattgcaacaaatggtgttgtccatgtcattgaccgtgtgcttacacaaattggtacctcaattcaagacttcattgaagcagaagatgacctttcatcttttagagcagctgccatcacatcggacatattggaggcccttggaagagacggtcacttcacactctttgctcccaccaatgaggcttttgagaaacttccacgaggtgtcctagaaaggatcatgggagacaaagtggcttccgaagctcttatgaagtaccacatcttaaatactctccagtgttctgagtctattatgggaggagcagtctttgagacgctggaaggaaatacaattgagataggatgtgacggtgacagtataacagtaaatggaatcaaaatggtgaacaaaaaggatattgtgacaaataatggtgtgatccatttgattgatcaggtcctaattcctgattctgccaaacaagttattgagctggctggaaaacagcaaaccaccttcacggatcttgtggcccaattaggcttggcatctgctctgaggccagatggagaatacactttgctggcacctgtgaataatgcattttctgatgatactctcagcatggatcagcgcctccttaaattaattctgcagaatcacatattgaaagtaaaagttggccttaatgagctttacaacgggcaaatactggaaaccatcggaggcaaacagctcagagtcttcgtatatcgtacagctgtctgcattgaaaattcatgcatggagaaagggagtaagcaagggagaaacggtgcgattcacatattccgcgagatcatcaagccagcagagaaatccctccatgaaaagttaaaacaagataagcgctttagcaccttcctcagcctacttgaagctgcagacttgaaagagctcctgacacaacctggagactggacattatttgtgccaaccaatgatgcttttaagggaatgactagtgaagaaaaagaaattctgatacgggacaaaaatgctcttcaaaacatcattctttatcacctgacaccaggagttttcattggaaaaggatttgaacctggtgttactaacattttaaagaccacacaaggaagcaaaatctttctgaaagaagtaaatgatacacttctggtgaatgaattgaaatcaaaagaatctgacatcatgacaacaaatggtgtaattcatgttgtagataaactcctctatccagcagacacacctgttggaaatgatcaactgctggaaatacttaataaattaatcaaatacatccaaattaagtttgttcgtggtagcaccttcaaagaaatccccgtgactgtctatagacccacactaacaaaagtcaaaattgaaggtgaacctgaattcagactgattaaagaaggtgaaacaataactgaagtgatccatggagagccaattattaaaaaatacaccaaaatcattgatggagtgcctgtggaaataactgaaaaagagacacgagaagaacgaatcattacaggtcctgaaataaaatacactaggatttctactggaggtggagaaacagaagaaactctgaagaaattgttacaagaagacacacccgtgaggaagttgcaagccaacaaaaaagttcaaggatctagaagacgattaagggaaggtcgttctcagtgaaaatccaaaaaccagaaaaaaatgtttatacaaccctaagtcaataacctgaccttagaaaattgtgagagccaagttgacttcaggaactgaaacatcagcacaaagaagcaatcatcaaataattctgaacacaaatttaatatttttttttctgaatgagaaacatgagggaaattgtggagttagcctcctgtggtaaaggaattgaagaaaatataacaccttacaccctttttcatcttgacattaaaagttctggctaactttggaatccattagagaaaaatccttgtcaccagattcattacaattcaaatcgaagagttgtgaactgttatcccattgaaaagaccgagccttgtatgtatgttatggatacataaaatgcacgcaagccattatctctccatgggaagctaagttataaaaataggtgcttggtgtacaaaactttttatatcaaaaggctttgcacatttctatatgagtgggtttactggtaaattatgttattttttacaactaattttgtactctcagaatgtttgtcatatgcttcttgcaatgcatattttttaatctcaaacgtttcaataaaaccatttttcagatataaagagaattacttcaaattgagtaattcagaaaaactcaagatttaagttaaaaagtggtttggacttgggaacaggactttatacctcttttactgtaacaagtactcattaaaggaaattgaatgaaatt

SEQ ID NO: 51459 - DNA, 2346 bp, Artificial Sequence
  derived and/or modified sequence
atgatccccttcctaccgatgtttagtctgctgctccttttgatcgtgaacccaatcaacgccaacaaccattacgataaaatcctcgcccacagcaggatcagaggtagggaccagggacctaatgtttgcgccctccagcaaatcttaggcaccaagaaaaagtatttcagtacatgcaaaaattggtataagaaaagcatttgcggacaaaagaccacagttctctacgaatgctgtcccggatacatgcggatggaagggatgaaggggtgtcctgcggtgcttccaatagaccacgtgtacggaacactcgggattgtcggggctactacaacacagaggtattctgacgcctcgaaactacgggaggagatcgaagggaaaggcagttttacgtatttcgccccttctaacgaagcatgggataatctcgactcagacatcagacgcggtctggaatcaaatgtgaacgtcgagctgctgaacgccctacattctcacatgattaacaagaggatgcttaccaaagacttgaagaatggaatgataattccctctatgtacaataatctcgggctcttcatcaatcactaccctaacggtgtagtgaccgtaaattgtgcacgcataatacacggtaatcagattgctacaaatggggtggtgcatgtgattgaccgagtgttgacccaaatagggacctccattcaagatttcatcgaagccgaagacgacttatcctcatttagagccgctgccataaccagcgacatcctggaggcattgggccgagatgggcatttcactctgtttgcgcctaccaatgaagccttcgagaaactgccacgcggagtgttggagcgaatcatgggcgataaagtggccagcgaagcactgatgaaatatcatatccttaacacccttcagtgctccgaaagtatcatgggaggagcagtgtttgagaccctagaaggcaatacaattgagattgggtgtgacggggactctatcacggtgaatggtatcaaaatggtaaataaaaaggatattgtgaccaacaatggcgttattcacctgatcgaccaggtgcttataccagatagtgcaaaacaagttatagagcttgcgggaaaacagcagactacatttaccgatttggtggcccagctcggtttggcatctgcattgaggcctgacggggaatatactctgctggccccagtgaacaacgctttctctgatgatactctgtccatggaccagcgcctgcttaaattaattctgcagaatcatatcttaaaagtcaaagtgggcctaaacgagctttacaacggccagattctagagaccatcggaggcaagcaactccgggtcttcgtctatcgcaccgccgtctgtattgagaactcctgcatggaaaaagggagtaaacaagggcgtaatggggcaatccacatcttcagagagattatcaaaccggctgagaaatctttgcatgaaaagttgaaacaagacaagcggttttcaacctttctttccctcctggaagccgctgacctgaaggaacttttgacacagcctggggactggacactatttgtgcccacaaacgatgcgtttaaaggtatgacttccgaagaaaaagagatcttaatcagggacaaaaacgcccttcagaacattatcctttaccacctgacccccggtgtgttcataggaaaaggcttcgaacctggagtcaccaatattttaaagactactcaggggtctaagatcttcttgaaggaggtaaatgatacccttcttgtgaacgagttgaaatccaaagagagtgatatcatgacaactaacggtgtgatccacgtggttgacaagctgctctaccccgctgacactcctgtcggaaacgaccagctgcttgagatcctcaacaaacttattaaatacattcaaatcaagtttgtgcggggatcgacctttaaggagatcccagttacagtctaccgacccactctgacaaaggttaaaattgaaggagaacccgagttcagattaattaaagaaggagagacaataacggaggtcatccatggagaacctatcattaagaagtacaccaaaatcatcgatggagtaccggtggagataacagagaaggagaccagggaagaaagaatcatcactggtcctgagatcaaatatacgcgaatatcaaccgggggaggggagacggaagaaacattgaagaagctactgcaggaagacacgcctgtcaggaaattgcaggctaacaaaaaggttcaaggttctcgcagacggctgagagaagggcgaagccagtag

SEQ ID NO: 51460 - DNA, 2346 bp, Artificial Sequence
  derived and/or modified sequence
atgatccccttcctgcccatgttcagcctgctgctgctgctgatcgtgaaccccatcaacgccaacaaccactacgacaagatcctggcccacagcagaatcagaggcagagaccagggccccaacgtgtgcgccctgcagcagatcctgggcaccaagaagaagtacttcagcacctgcaagaactggtacaagaagagcatctgcggccagaagaccaccgtgctgtacgagtgctgccccggctacatgagaatggagggcatgaagggctgccccgccgtgctgcccatcgaccacgtgtacggcaccctgggcatcgtgggcgccaccaccacccagagatacagcgacgccagcaagctgagagaggagatcgagggcaagggcagcttcacctacttcgcccccagcaacgaggcctgggacaacctggacagcgacatcagaagaggcctggagagcaacgtgaacgtggagctgctgaacgccctgcacagccacatgatcaacaagagaatgctgaccaaggacctgaagaacggcatgatcatccccagcatgtacaacaacctgggcctgttcatcaaccactaccccaacggcgtggtgaccgtgaactgcgccagaatcatccacggcaaccagatcgccaccaacggcgtggtgcacgtgatcgacagagtgctgacccagatcggcaccagcatccaggacttcatcgaggccgaggacgacctgagcagcttcagagccgccgccatcaccagcgacatcctggaggccctgggcagagacggccacttcaccctgttcgcccccaccaacgaggccttcgagaagctgcccagaggcgtgctggagagaatcatgggcgacaaggtggccagcgaggccctgatgaagtaccacatcctgaacaccctgcagtgcagcgagagcatcatgggcggcgccgtgttcgagaccctggagggcaacaccatcgagatcggctgcgacggcgacagcatcaccgtgaacggcatcaagatggtgaacaagaaggacatcgtgaccaacaacggcgtgatccacctgatcgaccaggtgctgatccccgacagcgccaagcaggtgatcgagctggccggcaagcagcagaccaccttcaccgacctggtggcccagctgggcctggccagcgccctgagacccgacggcgagtacaccctgctggcccccgtgaacaacgccttcagcgacgacaccctgagcatggaccagagactgctgaagctgatcctgcagaaccacatcctgaaggtgaaggtgggcctgaacgagctgtacaacggccagatcctggagaccatcggcggcaagcagctgagagtgttcgtgtacagaaccgccgtgtgcatcgagaacagctgcatggagaagggcagcaagcagggcagaaacggcgccatccacatcttcagagagatcatcaagcccgccgagaagagcctgcacgagaagctgaagcaggacaagagattcagcaccttcctgagcctgctggaggccgccgacctgaaggagctgctgacccagcccggcgactggaccctgttcgtgcccaccaacgacgccttcaagggcatgaccagcgaggagaaggagatcctgatcagagacaagaacgccctgcagaacatcatcctgtaccacctgacccccggcgtgttcatcggcaagggcttcgagcccggcgtgaccaacatcctgaagaccacccagggcagcaagatcttcctgaaggaggtgaacgacaccctgctggtgaacgagctgaagagcaaggagagcgacatcatgaccaccaacggcgtgatccacgtggtggacaagctgctgtaccccgccgacacccccgtgggcaacgaccagctgctggagatcctgaacaagctgatcaagtacatccagatcaagttcgtgagaggcagcaccttcaaggagatccccgtgaccgtgtacagacccaccctgaccaaggtgaagatcgagggcgagcccgagttcagactgatcaaggagggcgagaccatcaccgaggtgatccacggcgagcccatcatcaagaagtacaccaagatcatcgacggcgtgcccgtggagatcaccgagaaggagaccagagaggagagaatcatcaccggccccgagatcaagtacaccagaatcagcaccggcggcggcgagaccgaggagaccctgaagaagctgctgcaggaggacacccccgtgagaaagctgcaggccaacaagaaggtgcagggcagcagaagaagactgagagagggcagaagccagtag

SEQ ID NO: 51461 - DNA, 3135 bp, Artificial Sequence
  derived and/or modified sequence
agactctcaggttgatgcagtgttccctcccacaactctgacatgtatataaattctgagctctccaaagcccactgccagttctcttcggggactaactgcaacggagagactcaagatgattccctttttacccatgttttctctactattgctgcttattgttaaccctataaacgccaacaatcattatgacaagatcttggctcatagtcgtatcaggggtcgggaccaaggcccaaatgtctgtgcccttcaacagattttgggcaccaaaaagaaatacttcagcacttgtaagaactggtataaaaagtccatctgtggacagaaaacgactgtgttatatgaatgttgccctggttatatgagaatggaaggaatgaaaggctgcccagcagttttgcccattgaccatgtttatggcactctgggcatcgtgggagccaccacaacgcagcgctattctgacgcctcaaaactgagggaggagatcgagggaaagggatccttcacttactttgcaccgagtaatgaggcttgggacaacttggattctgatatccgtagaggtttggagagcaacgtgaatgttgaattactgaatgctttacatagtcacatgattaataagagaatgttgaccaaggacttaaaaaatggcatgattattccttcaatgtataacaatttggggcttttcattaaccattatcctaatggggttgtcactgttaattgtgctcgaatcatccatgggaaccagattgcaacaaatggtgttgtccatgtcattgaccgtgtgcttacacaaattggtacctcaattcaagacttcattgaagcagaagatgacctttcatcttttagagcagctgccatcacatcggacatattggaggcccttggaagagacggtcacttcacactctttgctcccaccaatgaggcttttgagaaacttccacgaggtgtcctagaaaggatcatgggagacaaagtggcttccgaagctcttatgaagtaccacatcttaaatactctccagtgttctgagtctattatgggaggagcagtctttgagacgctggaaggaaatacaattgagataggatgtgacggtgacagtataacagtaaatggaatcaaaatggtgaacaaaaaggatattgtgacaaataatggtgtgatccatttgattgatcaggtcctaattcctgattctgccaaacaagttattgagctggctggaaaacagcaaaccaccttcacggatcttgtggcccaattaggcttggcatctgctctgaggccagatggagaatacactttgctggcacctgtgaataatgcattttctgatgatactctcagcatggatcagcgcctccttaaattaattctgcagaatcacatattgaaagtaaaagttggccttaatgagctttacaacgggcaaatactggaaaccatcggaggcaaacagctcagagtcttcgtatatcgtacagctgtctgcattgaaaattcatgcatggagaaagggagtaagcaagggagaaacggtgcgattcacatattccgcgagatcatcaagccagcagagaaatccctccatgaaaagttaaaacaagataagcgctttagcaccttcctcagcctacttgaagctgcagacttgaaagagctcctgacacaacctggagactggacattatttgtgccaaccaatgatgcttttaagggaatgactagtgaagaaaaagaaattctgatacgggacaaaaatgctcttcaaaacatcattctttatcacctgacaccaggagttttcattggaaaaggatttgaacctggtgttactaacattttaaagaccacacaaggaagcaaaatctttctgaaagaagtaaatgatacacttctggtgaatgaattgaaatcaaaagaatctgacatcatgacaacaaatggtgtaattcatgttgtagataaactcctctatccagcagacacacctgttggaaatgatcaactgctggaaatacttaataaattaatcaaatacatccaaattaagtttgttcgtggtagcaccttcaaagaaatccccgtgactgtctataagccaattattaaaaaatacaccaaaatcattgatggagtgcctgtggaaataactgaaaaagagacacgagaagaacgaatcattacaggtcctgaaataaaatacactaggatttctactggaggtggagaaacagaagaaactctgaagaaattgttacaagaagacacacccgtgaggaagttgcaagccaacaaaaaagttcaaggatctagaagacgattaagggaaggtcgttctcagtgaaaatccaaaaaccagaaaaaaatgtttatacaaccctaagtcaataacctgaccttagaaaattgtgagagccaagttgacttcaggaactgaaacatcagcacaaagaagcaatcatcaaataattctgaacacaaatttaatatttttttttctgaatgagaaacatgagggaaattgtggagttagcctcctgtggtaaaggaattgaagaaaatataacaccttacaccctttttcatcttgacattaaaagttctggctaactttggaatccattagagaaaaatccttgtcaccagattcattacaattcaaatcgaagagttgtgaactgttatcccattgaaaagaccgagccttgtatgtatgttatggatacataaaatgcacgcaagccattatctctccatgggaagctaagttataaaaataggtgcttggtgtacaaaactttttatatcaaaaggctttgcacatttctatatgagtgggtttactggtaaattatgttattttttacaactaattttgtactctcagaatgtttgtcatatgcttcttgcaatgcatattttttaatctcaaacgtttcaataaaaccatttttcagatataaagagaattacttcaaattgagtaattcagaaaaactcaagatttaagttaaaaagtggtttggacttgggaacaggactttatacctcttttactgtaacaagtactcattaaaggaaattgaatgaaattaaaaaaaaaaa

SEQ ID NO: 51462 - DNA, 945 bp, Artificial Sequence
  derived and/or modified sequence
atggctcggagactgttaggcccccagaatgccgccgccgtttttcaagcacaggacgactccggagctcaagactcacagcagcacaacagcgagcatgcccgcctgcaggtgcccacgtctcaggttcggtctcgatctacctcacgaggagacgtgaatgatcaggacgccatccaagaaaaattctaccccccgcggttcattcaggtccccgaaaacatgtcaatagatgaggggaggttttgccgtatggactttaaagtgtcggggttgcctgccccagatgtctcttggtacctgaatggaagaacggtccaatcagatgacctgcacaagatgatcgtctcagagaaaggcctgcacagcctaattttcgaagtagtgagagcaagcgatgcgggcgcatacgcttgcgtagccaagaaccgggccggagaagccacttttaccgtgcagctcgatgtgctggcgaaagaacataagagggcccccatgttcatttacaagccccagtctaagaaagttctagagggagacagtgtcaagctggagtgccagatctctgcaattcctccccccaagttgttctggaaacgaaataacgaaatggtgcagttcaataccgaccgaatctccctttaccaagataacacagggcgggttacactgctcattaaagatgtgaataaaaaagacgcaggatggtataccgttagcgccgttaacgaggccggggtcaccacatgcaacacccgtctcgacgttaccgcccggcccaaccagaccctgcccgcaccgaagcagttgagggttcggcccacattctctaaatacctggccctcaatggcaagggattgaatgtaaaacaggcatttaatcctgaaggcgagttccaacgcctggccgctcagagtggattgtatgagagtgaggagctctag

SEQ ID NO: 51463 - DNA, 945 bp, Artificial Sequence
  derived and/or modified sequence
atggcccggcggctgctgggcccccagaatgctgctgctgtgttccaggcccaggatgattctggggcccaggacagccagcagcacaacagcgagcacgcccggctgcaggtgcccaccagccaggtgcgcagccgcagcaccagcagaggagatgtgaatgaccaggatgccatccaggagaagttctacccaccccgcttcatccaggtgcctgagaacatgagcattgatgagggccgcttctgcaggatggacttcaaggtgtctggcctgcctgccccagatgtgtcctggtacctgaatggccgcacagtgcagagtgatgacctgcacaagatgattgtgtctgagaagggcctgcacagcctcatctttgaggtggtgcgggccagtgatgctggggcctatgcctgtgtggccaagaacagagctggggaggccaccttcaccgtgcagctggatgtgctggccaaggagcacaagagggcccccatgttcatctacaagccccagagcaagaaggtgctggagggggacagcgtgaagctggagtgccagatcagcgccatccccccacccaagctgttctggaagaggaacaatgagatggtgcagttcaacacagaccgcatcagcctgtaccaggacaacacaggccgggtgaccctgctgatcaaggatgtgaacaagaaggatgctggctggtacacagtgtctgctgtgaatgaagctggggtgaccacctgcaacacccggctggatgtgacagcccggcccaaccagaccctgcctgcccccaagcagctgcgggtgcggcccaccttcagcaagtacctggccctgaatggcaagggcctgaatgtgaagcaggccttcaaccctgagggggagttccagaggctggccgcccagagcggcctgtatgaaagtgaggagctgtag

SEQ ID NO: 51464 - DNA, 945 bp, Artificial Sequence
  derived and/or modified sequence
atggcccggcggctgctgggcccccagaacgccgccgccgtgttccaagcccaggacgacagcggggctcaggactcacagcagcacaattccgagcacgcccggctgcaagtgcctacatcacaggtaagaagccgctccacctcaagaggcgacgtcaatgaccaggacgcaatccaggagaagttctacccacctcgcttcatccaggtgcccgaaaacatgtcaattgatgagggccgattttgcaggatggactttaaagtatcgggcttaccagcccccgacgtgagttggtatttgaacggcagaacggtccaaagcgatgaccttcacaaaatgattgtctctgagaagggtctgcactctctaatttttgaagtggtgcgtgccagtgatgccggggcttatgcttgtgtggccaagaacagagctggagaagctaccttcacggtacagctggatgtgttggctaaagaacacaagcgggctccaatgttcatatacaaacctcagtcaaagaaagttcttgagggcgacagcgttaaactcgagtgtcagatttccgcaatccccccgcccaagctgttctggaagagaaacaacgaaatggtgcaattcaacaccgataggatttctctgtaccaggataataccggcagagttacattgctgatcaaggacgtcaataagaaagacgcaggatggtacaccgtgagtgccgtgaacgaggcaggcgtcacaacatgtaatacacggctcgacgtcacggccaggcccaatcaaaccttgccagcccccaagcaattgcgagttcgcccaaccttctctaagtaccttgccctcaacggtaagggcctgaacgttaagcaggctttcaacccagagggggagttccagaggctggccgcacagtcaggactgtacgagtcggaggaactctag

SEQ ID NO: 51465 - DNA, 945 bp, Artificial Sequence
  derived and/or modified sequence
atggcacgacgacttctgggaccacagaatgctgcggctgttttccaggcccaggatgacagcggcgcacaagactcccagcaacacaattcagaacacgcccgtctccaggtccctacaagccaagtccggagcaggagcacgtcccgtggtgatgtgaatgatcaggatgccattcaagagaaattctacccaccacgctttattcaagtacccgagaatatgtccatcgacgagggtcgtttctgtcggatggacttcaaggtatcagggctcccagcccctgatgttagttggtacctaaatgggagaactgtacagtccgatgatctgcacaagatgatcgtgagcgaaaaaggcctgcactccctgatttttgaggtcgtacgcgcatctgatgcaggggcttacgcttgtgttgcaaagaaccgggcaggggaggccacctttacagttcagctcgacgtgctcgccaaagaacacaaaagggctccaatgtttatctacaaaccccagagcaagaaggtcctggaaggagatagcgttaagctggagtgccagattagcgctatacctccgcctaaactcttttggaagcggaacaacgagatggtgcagttcaatactgaccgaatatccctgtatcaggataataccgggcgagtgaccctgctgattaaagatgtgaacaaaaaagatgcaggttggtataccgtttccgccgttaatgaggctggtgtcaccacctgtaatacgcgccttgatgtcacagcacgccctaaccaaacattgccagcgccaaaacagctgcgtgtaagacctacatttagcaagtacctcgccctcaacggaaagggcctgaatgtcaagcaggccttcaacccggagggggagtttcagagactggcagcccagtccggcctctatgaatcagaggaattgtag

SEQ ID NO: 51466 - DNA, 945 bp, Artificial Sequence
  derived and/or modified sequence
atggccagaagactgctgggcccccagaacgccgccgccgtgttccaggcccaggacgacagcggcgcccaggacagccagcagcacaacagcgagcacgccagactgcaggtgcccaccagccaggtgagaagcagaagcaccagcagaggcgacgtgaacgaccaggacgccatccaggagaagttctacccccccagattcatccaggtgcccgagaacatgagcatcgacgagggcagattctgcagaatggacttcaaggtgagcggcctgcccgcccccgacgtgagctggtacctgaacggcagaaccgtgcagagcgacgacctgcacaagatgatcgtgagcgagaagggcctgcacagcctgatcttcgaggtggtgagagccagcgacgccggcgcctacgcctgcgtggccaagaacagagccggcgaggccaccttcaccgtgcagctggacgtgctggccaaggagcacaagagagcccccatgttcatctacaagccccagagcaagaaggtgctggagggcgacagcgtgaagctggagtgccagatcagcgccatccccccccccaagctgttctggaagagaaacaacgagatggtgcagttcaacaccgacagaatcagcctgtaccaggacaacaccggcagagtgaccctgctgatcaaggacgtgaacaagaaggacgccggctggtacaccgtgagcgccgtgaacgaggccggcgtgaccacctgcaacaccagactggacgtgaccgccagacccaaccagaccctgcccgcccccaagcagctgagagtgagacccaccttcagcaagtacctggccctgaacggcaagggcctgaacgtgaagcaggccttcaaccccgagggcgagttccagagactggccgcccagagcggcctgtacgagagcgaggagctgtag

SEQ ID NO: 51467 - protein, 146 aa, Artificial Sequence
  derived and/or modified sequence
MAAPLSVEVEFGGGAELLFDGIKKHRVTLPGQEEPWDIRNLLIWIKKNLLKERPELFIQGDSVRPGILVLINDADWELLVSTLGDIPPPAPALAASVGKRWASPQAHIEWLGNPPPHSSPTLRLLESPTPGEEGMGSWGHGSTPPS

SEQ ID NO: 51468 - DNA, 441 bp, Artificial Sequence
  derived and/or modified sequence
atggccgcccccctgagcgtggaggtggagttcggcggcggcgccgagctgctgttcgacggcatcaagaagcacagagtgaccctgcccggccaggaggagccctgggacatcagaaacctgctgatctggatcaagaagaacctgctgaaggagagacccgagctgttcatccagggcgacagcgtgagacccggcatcctggtgctgatcaacgacgccgactgggagctgctggtgagcaccctgggcgacatccccccccccgcccccgccctggccgccagcgtgggcaagagatgggccagcccccaggcccacatcgagtggctgggcaacccccccccccacagcagccccaccctgagactgctggagagccccacccccggcgaggagggcatgggcagctggggccacggcagcaccccccccagctag

SEQ ID NO: 51469 - DNA, 441 bp, Artificial Sequence
  derived and/or modified sequence
atggccgccccgctgtctgtggaggtggaattcggtggaggcgcagagctgctgttcgacggaatcaaaaaacacagagtgacattacccggtcaggaggaaccttgggacatcaggaaccttttaatctggattaagaaaaacctgctcaaagaacggccggagctcttcatccagggcgactctgtccggccaggcattctcgttctcataaatgatgccgactgggagctgctcgtgtctactctgggggacatccccccccctgcccccgctctcgcggcctcagtcggaaagaggtgggcatccccccaggcacatatagagtggctgggaaacccacctcctcacagcagcccaaccctgagattgcttgaatctcctacacccggcgaggagggaatggggagctgggggcatggctccacacctcctagctag

SEQ ID NO: 51470 - DNA, 441 bp, Artificial Sequence
  derived and/or modified sequence
atggccgcccccctgtctgtggaggtggagtttggaggcggcgctgagctgctgtttgatggcatcaagaagcaccgggtgaccctgcccggccaggaggagccctgggacatccggaacctgctgatctggatcaagaagaacctgctgaaggagaggcctgagctgttcatccagggcgacagcgtgcggcccggcatcctggtgctgatcaatgatgctgactgggagctgctggtgtccaccctgggggacatccccccaccagccccagccctggccgcctctgtgggcaagcgctgggccagcccccaggcccacatcgagtggctgggcaaccccccaccccacagcagccccaccctgcggctgctggagagccccaccccaggagaggagggcatgggctcctggggccacggcagcaccccacccagctag

SEQ ID NO: 51471 - DNA, 441 bp, Artificial Sequence
  derived and/or modified sequence
atggccgcccccctgagcgtggaggtggagttcggcggcggcgccgaactgctgttcgacggcatcaagaagcatagagtgactcttcccggccaagaggaaccttgggacattcgaaatctcttaatctggataaagaaaaatctgctgaaggagagacccgaactgttcattcagggcgattccgtgcgcccgggcattctggtgctgatcaatgacgccgactgggagctgctcgtatcgaccttaggcgatattcccccaccagcccccgccctggcggcaagcgttggcaagagatgggcctccccacaggcacacatagagtggttaggcaaccctccgccacactcatctcccactctccgtcttttagagagccctacccctggggaggaagggatggggtcctggggtcatggctccaccccgccttcttag

SEQ ID NO: 51472 - DNA, 192 bp, Artificial Sequence
  derived and/or modified sequence
atggctgcacccttgagcgtagaggtggaatttggaagttcgcccggttgcctgtttctctggtcttccttcgcggaagtcgttagatcttcttgcttaacagtcctgaggaatattgaatcactgtgtttagaccggcgtaatcccggtacgtcaggaacatgctcatctggatcccggaggatctgttag

SEQ ID NO: 51473 - DNA, 441 bp, Artificial Sequence
  derived and/or modified sequence
atggcggctcctctgtctgtggaagtcgaatttggaggcggagcagaacttctttttgacggcatcaagaaacatcgggtcacactgcccggtcaagaagagccctgggatatcaggaatctcctgatctggatcaaaaagaatttgctgaaggagagacccgagctctttattcaaggagatagcgtgcggcctgggatcctcgtgcttatcaacgacgcagactgggaattacttgtgagtactctgggggacatccctcctcctgcccctgctctagccgcatccgttgggaaaaggtgggcctcccctcaggcccatattgaatggctcggtaatcctccacctcacagcagccccacactacgcctgttggagagtcccacacccggtgaagagggaatggggtcatgggggcacggcagcactccacccagctag

SEQ ID NO: 51474 - DNA, 3045 bp, Artificial Sequence
  derived and/or modified sequence
gcgagctcggcttcctcaacatggctgcgcccttgtcagtggaggtggagttcggaggtggtgcggagctcctgtttgacggtattaagaaacatcgagtcactttgcctggacaggaggaaccctgggacatccggaacctgctcatctggatcaagaagaatttgctaaaagagcggccagagttgttcatccagggagacagcgtgtgagtcccactcctcccttccctgaagcaggtggagggagggacggatatttgagcccccaccctcgggttcagtcctggccttctctgaatccggttctccccttcctcctccctaactcttccagctctgagatctgttttcagttttcttgttactaaaccgaactcttgaggattttttaaatcccagatgaaaggagcctggtgaatttctcagaaaacttggattctgccctctggttgccacagacttgctgtgggaccttaggcgacttacttcgcttctctgggcctcagttactctctacacagaaagtgctgaggaaaaaacgtagctagtacaactgaagagctaaatattctgttttatttcattgtaatttaaatagccacatgcagctagtagattaccatacagtgcagcacgggtctagaattccaaggagtcattgactctgtgcgtgcacacacccatgcacatgcacacacactcactggggacaccccatagaagcccagtgcagtctccttggaaaggaccaggttccagttgccacgaagttacttctaaaacaaggccagtcccccacgtgaaaggtggccggtgcagttgtgaggctcgcttatttgcctcgaagcataggtcactgtcaggtcctaagggatcaggcctaggggatcagccctccttcaggtcatggtccagtggtcctggaggccacctctaaggccagcagtgctccttgggccattaccagtgggagccaggctaagctgcctgaccaaatgttgacctaccctgccttatgccaggcaggactgcacgtgagcattgccatgtggcatggcaactgattcggaagaggcaaaacagccttctctccaggatgggcatgcagaggcctaaaaaaaagccgaagttcttttccagggctaacgagaataagattagacccctggaaaagtcctactaatggttaccatgacagtgtggcaagcactccacacatatcagctcatttcgttttcgtataggccttgtgggttagacagtatcacttatcccattttcagatgaggaacctgatactcagaaacaaaatgacctgcccatggtctgggtggtggtgctggctggcatttgcacccattttccatctggctacaaagaccatgcatgactgacctggtttccttcacactcagaccagcctccccttcctgggatatctttagccagaccccaggaggaaggctcctcagcacactctcctgcagcccaaagctctcagcctctcttcctctgtgctactgcctcctgcctctcactccttgctactcaccaccatctttcccacaggcggccaggaattctggtgctgattaacgatgccgactgggagctactggtcagtaccttgggggacatccctcccccagcccctgcccttgctgcttcagtgggaaagcgttgggcctctcctcaggcacatatagagtggctgggtaatcctccgccccactccagccccacactgaggctgctggagtctcccactccaggtgaggaagggatgggtagctggggacatgggagtactcctccatcctgaagatttgcaggttgaggtataggatacccatttttctggtagagtctgtctcttccagagcagccagtcctcagcccctgttctcccaactcctggggtggacctgggaaggtggccctgagggtctcccgctcccctctctcccgcaccagggtgagctggactaccagcttcaggaccaggacagcgtcctcttcatctccactctgcacggcggctgagggcccttctctgggcctgggcacccttagaggggagaacgaagcaatcagacatccccttgggccctgcttccaggtctccctgtcccccttgcctgccttcttccctgctctgtcccctaagctccctccaggcagggaaaagaggccaggtgctaaaaatgagcctttctcaagcacgtgagcagcggaaggcagacaggcgccagagcccagcactcccttttccagcagctgtggtgggggagggttcccctccagtttgtcaagagttgaaggaggctctgtggccaggtgacctggctgccttccactccttgtacctcagtctaaacatggagtggccgctgacaaggcgctccagccccagagccagcgtcttcatggggaagatgaatggacctgagtagctgaaggaaggcccctccctacccaaagactggaggcttctcagcctcaatttccctgtctgtacagctgagggctctgcctgtcccccactgctatcagtatggaaccccagctggggtcccctattgagtgccgactccccccaccgccagcagctgctcctccagccacacccctcctgctccccccacccctagcccttgaccctggctggcctgccccgctccacaggccaccagatgggctcctgagaccctccccaggctgcttacagctcattctgctgggggtagagatgaggggagggagtaagttaaaccttggactagcaagtagaagcctggggggatgcgtgtgcctcagtttcctcctccacaactgaatatagtggctgaaaactggggagatacttgatggcgcgaatgtccgttttctctcccttcccacctcctgcaggaagcaggacggggcaggcagcacctggtaggcacagtgctttgcccctcctccccttcccttctggaagtcttggggcctcagtgcttgcaacagccggccttgggcaaataaaagactaggttgtttacta

SEQ ID NO: 51475 - DNA, 1726 bp, Artificial Sequence
  derived and/or modified sequence
ccggaaatttgcgggcgcgccggaagttgaggggagtttcctgcgagctcggcttcctcaacatggctgcgcccttgtcagtggaggtggagttcggaggtggtgcggagctcctgtttgacggtattaagaaacatcgagtcactttgcctggacaggaggaaccctgggacatccggaacctgctcatctggatcaagaagaatttgctaaaagagcggccagagttgttcatccagggagacagcgtgcggccaggaattctggtgctgattaacgatgccgactgggagctactggtcagtaccttgggggacatccctcccccagcccctgcccttgctgcttcagtgggaaagcgttgggcctctcctcaggcacatatagagtggctgggtaatcctccgccccactccagccccacactgaggctgctggagtctcccactccaggtgaggaagggatgggtagctggggacatgggagtactcctccatcctgaagatttgcaggttgaggtataggatacccatttttctggtagagtctgtctcttccagagcagccagtcctcagcccctgttctcccaactcctggggtggacctgggaaggtggccctgagggtctcccgctcccctctctcccgcaccagggtgagctggactaccagcttcaggaccaggacagcgtcctcttcatctccactctgcacggcggctgagggcccttctctgggcctgggcacccttagaggggagaacgaagcaatcagacatccccttgggccctgcttccaggtctccctgtcccccttgcctgccttcttccctgctctgtcccctaagctccctccaggcagggaaaagaggccaggtgctaaaaatgagcctttctcaagcacgtgagcagcggaaggcagacaggcgccagagcccagcactcccttttccagcagctgtggtgggggagggttcccctccagtttgtcaagagttgaaggaggctctgtggccaggtgacctggctgccttccactccttgtacctcagtctaaacatggagtggccgctgacaaggcgctccagccccagagccagcgtcttcatggggaagatgaatggacctgagtagctgaaggaaggcccctccctacccaaagactggaggcttctcagcctcaatttccctgtctgtacagctgagggctctgcctgtcccccactgctatcagtatggaaccccagctggggtcccctattgagtgccgactccccccaccgccagcagctgctcctccagccacacccctcctgctccccccacccctagcccttgaccctggctggcctgccccgctccacaggccaccagatgggctcctgagaccctccccaggctgcttacagctcattctgctgggggtagagatgaggggagggagtaagttaaaccttggactagcaagtagaagcctggggggatgcgtgtgcctcagtttcctcctccacaactgaatatagtggctgaaaactggggagatacttgatggcgcgaatgtccgttttctctcccttcccacctcctgcaggaagcaggacggggcaggcagcacctggtaggcacagtgctttgcccctcctccccttcccttctggaagtcttggggcctcagtgcttgcaacagccggccttgggcaaataaaagactaggttgtttactagc

SEQ ID NO: 51476 - protein, 201 aa, Artificial Sequence
  derived and/or modified sequence
MASAGGEDCESPAPEADRPHQRPFLIGVSGGTASGKSTVCEKIMELLGQNEVEQRQRKVVILSQDRFYKVLTAEQKAKALKGQYNFDHPDAFDNDLMHRTLKNIVEGKTVEVPTYDFVTHSRLPETTVVYPADVVLFEGILVFYSQEIRDMFHLRLFVDTDSDVRLSRRDKEVCRCDHPARSGQYGCHQPDRAAHPGHSEW

SEQ ID NO: 51477 - DNA, 606 bp, Artificial Sequence
  derived and/or modified sequence
atggccagcgccggcggcgaggactgcgagagccccgcccccgaggccgacagaccccaccagagacccttcctgatcggcgtgagcggcggcaccgccagcggcaagagcaccgtgtgcgagaagatcatggagctgctgggccagaacgaggtggagcagagacagagaaaggtggtgatcctgagccaggacagattctacaaggtgctgaccgccgagcagaaggccaaggccctgaagggccagtacaacttcgaccaccccgacgccttcgacaacgacctgatgcacagaaccctgaagaacatcgtggagggcaagaccgtggaggtgcccacctacgacttcgtgacccacagcagactgcccgagaccaccgtggtgtaccccgccgacgtggtgctgttcgagggcatcctggtgttctacagccaggagatcagagacatgttccacctgagactgttcgtggacaccgacagcgacgtgagactgagcagaagagacaaggaggtgtgcagatgcgaccaccccgccagaagcggccagtacggctgccaccagcccgacagagccgcccaccccggccacagcgagtggtag

SEQ ID NO: 51478 - DNA, 606 bp, Artificial Sequence
  derived and/or modified sequence
atggctagcgcaggaggcgaggattgcgaaagccctgcgccagaggctgatagaccacatcagcgacctttccttatcggagtcagcggtggcacagctagtggtaagagcacggtatgtgagaaaatcatggaactgttgggtcagaatgaggtcgaacagagacagcggaaggtagtaatcctgagccaggaccgcttttataaggtgctgactgctgagcagaaggccaaggcactcaaagggcaatacaactttgaccaccccgacgcgttcgacaatgatctgatgcacagaactctaaagaatatagtggaggggaaaaccgttgaggtgcccacgtacgattttgtgacccactccaggcttcctgaaaccacggtggtctatcctgccgatgtagtgctgttcgagggcatcctggtgttctattcccaagagattcgggacatgttccatctcagactgtttgtggacactgattcagacgttcgtctgagccgccgtgataaagaagtgtgccgatgtgatcatcccgcccgctcaggacagtacgggtgccaccagcctgatagggcggcccacccaggacacagcgagtggtag

SEQ ID NO: 51479 - DNA, 606 bp, Artificial Sequence
  derived and/or modified sequence
atggccagcgctggaggagaggactgtgagagccctgcccctgaggccgaccggccccaccagaggcccttcctgattggagtgtctgggggcacagccagcggcaagagcacagtgtgtgagaagatcatggagctgctgggccagaatgaggtggagcagaggcagaggaaggtggtgatcctgagccaggaccgcttctacaaggtgctgacagctgagcagaaggccaaggccctgaagggccagtacaactttgaccacccagatgcctttgacaatgacctgatgcacaggaccctgaagaacatcgtggagggcaagacagtggaggtgcccacctatgactttgtgacccacagccggctgcctgagaccaccgtggtgtacccagcagatgtggtgctgtttgagggcatcctggtgttctacagccaggagatccgggacatgttccacctgcggctgtttgtggacacagacagtgatgtgcggctgagccggcgggacaaggaggtgtgccgctgtgaccacccagcccggagcggccagtatggctgccaccagcctgacagagctgcccaccctggccacagcgagtggtag

SEQ ID NO: 51480 - DNA, 606 bp, Artificial Sequence
  derived and/or modified sequence
atggccagcgccggcggcgaggactgcgagagccccgcccccgaggccgatcgcccccatcaacggccctttctcatcggcgtgtccggcggcactgcatcgggaaaaagcacggtgtgcgagaagatcatggagctcttgggtcagaacgaggttgaacagcgccaacggaaagtggtgatcttgtctcaggacagattctacaaagtactcacagcagagcagaaggccaaagcgttgaagggccaatacaactttgatcaccccgatgcatttgacaacgatctgatgcaccgaactttgaaaaatattgtcgaggggaaaaccgtggaagtgcctacttatgacttcgtgactcactcccgtctgcctgaaaccacagttgtttatcctgctgatgtggtgctcttcgagggaattctcgtgttctacagccaggagatcagagacatgttccacctgcgcctgttcgttgatactgactcagatgtgaggttgtctcgcagagataaagaggtgtgccgatgcgatcaccccgctaggagcgggcagtatggttgtcatcagcctgatagagctgcccatccaggccacagcgagtggtag

SEQ ID NO: 51481 - DNA, 606 bp, Artificial Sequence
  derived and/or modified sequence
atggcttctgccggaggcgaggactgtgaatctcccgctcccgaggcggaccgccctcaccagcgtccattccttatcggcgtgtcaggaggcaccgcgtctggcaagtctacggtgtgtgaaaaaattatggaactcctgggccagaatgaggttgaacagcgccagcgcaaggtggtaatactaagccaggaccggttctataaggtactgacagccgagcaaaaagctaaagcccttaaagggcagtacaacttcgatcaccctgatgcgtttgataatgatttgatgcacaggacactcaaaaatatcgtcgaagggaagaccgtcgaagtgcctacatatgacttcgtaacccattccaggcttcctgaaactacagtcgtgtacccagctgacgtggtgctcttcgaaggaattctagtgttctatagccaggagatcagagacatgtttcacctacggctctttgttgacactgactcggacgtacgcctttcacgacgcgacaaggaagtttgccgttgcgaccatccagccagatccggccagtatgggtgccatcagcctgatcgtgctgcccacccaggtcacagcgagtggtag

SEQ ID NO: 51482 - DNA, 2063 bp, Artificial Sequence
  derived and/or modified sequence
gcctccgacctcggcgctgggcgggcgcgccgggcctggggaaggggcgggcgcggggacccgatgcgcgggagcggaggccgagatggcttcggcgggaggcgaagactgcgagagccccgcgccggaggccgaccgtccgcaccagcggcccttcctgataggggtgagcggcggcactgccagcgggaagtcgaccgtgtgtgagaagatcatggagttgctgggacagaacgaggtggaacagcggcagcggaaggtggtcatcctgagccaggacaggttctacaaggtcctgacggcagagcagaaggccaaggccttgaaaggacagtacaattttgaccatccagatgcctttgataatgatttgatgcacaggactctgaagaacatcgtggagggcaaaacggtggaggtgccgacctatgattttgtgacacactcaaggttaccagagaccacggtggtctaccctgcggacgtggttctgtttgagggcatcttggtgttctacagccaggagatccgggacatgttccacctgcgcctcttcgtggacaccgactccgacgtcaggctgtctcgaagagacaaagaagtatgccgatgtgatcatcccgcgaggagtggacaatatggttgccatcaacctgatcgtgcagcacatccaggacattctgaatggtgacatctgcaaatggcaccgaggagggtccaatgggcggagctacaagcggaccttttctgagccaggggaccaccctgggatgctgacctctggcaaacggtcacatttggagtccagcagcagaccccactgaggggctgccgagcctcagggcaggtctcccgcccggcatgtgtgttcagggactgagcctggggacgcccacccacacccactgcttcctctcggcgcaccccaggggagtgttagcagcgaggccttcctcactcaggagtggaaactcagatgtgtcactcagactcaacttgctgggacactgacaggcgttcctgaggttttcagccacttaggctcgttgcggtttaaagatccctctaggtcactgagaaatgccacagaatgtgcaggaagcctgggaggcttctgtgaggaatgtgaggcacattattggggaaattgaggagacagcctagacactggctggcctgatgttttgttgacagtgaacccacagtgggagagagttttttccagtctgatctggttcttacacactcacacacataactcaaaagttttgtgaacaagtactttccttttttacatgttacatgtcctcatgttttctgttttctgtttcataacacaaggctggttgtggcctacaaacctaatttcatgacccagtggtttgcagtccagcgtggcctacacggatatggggagccactgagggatgttttccccccttgcttgtgccttaaaggcagagaagcgaggcggatgccctggaagcacccagcatcacacccaggcttgtgcggggccaggctgggagcccatgcagtagggcagaaggcagcggaggccaggtctgtcccggctggagaacagcgtccacgcagtcctgcctggggtcaggccctcactgaccctcaggggagcccccaaggtgctgtctgtctagacaggctgtcccaccccagggtggctagtggccatatgcagggaatggtgcttctggctgtggcacgcactggatcacccaggtcccagcagacatggccgcccaaagtcagcaagcctcctttgtgctatgtggagctcacagcctcacatgtgaacacccgtgtctgggttgcctggggtgatcctccctcctgcgtggtggctgtctctggaaagcatcccttgccgctgccatgggcagccccagcccccgtccgtccaggctcacccacagtagtgatgcagacgtgacgtgggggaagggggctgagccctgtggctgggttctgacaactgtaacggttttgtcgagcttaggcccctttggagggagaatcaataaataacaaacaccaactacaaa

SEQ ID NO: 51483 - protein, 893 aa, Artificial Sequence
  derived and/or modified sequence
MAQFYYKRNVNAPYRDRIPLRIVRAESELSPSEKAYLNAVEKGDYASVKKSLEEAEIYFKININCIDPLGRTALLIAIENENLELIELLLSFNVYVGDALLHAIRKEVVGAVELLLNHKKPSGEKQVPPILLDKQFSEFTPDITPIILAAHTNNYEIIKLLVQKGVSVPRPHEVRCNCVECVSSSDVDSLRHSRSRLNIYKALASPSLIALSSEDPFLTAFQLSWELQELSKVENEFKSEYEELSRQCKQFAKDLLDQTRSSRELEIILNYRDDNSLIEEQSGNDLARLKLAIKYRQKEFVAQPNCQQLLASRWYDEFPGWRRRHWAVKMVTCFIIGLLFPVFSVCYLIAPKSPLGLFIRKPFIKFICHTASYLTFLFLLLLASQHIDRSDLNRQGPPPTIVEWMILPWVLGFIWGEIKQMWDGGLQDYIHDWWNLMDFVMNSLYLATISLKIVAFVKYSALNPRESWDMWHPTLVAEALFAIANIFSSLRLISLFTANSHLGPLQISLGRMLLDILKFLFIYCLVLLAFANGLNQLYFYYEETKGLTCKGIRCEKQNNAFSTLFETLQSLFWSIFGLINLYVTNVKAQHEFTEFVGATMFGTYNVISLVVLLNMLIAMMNNSYQLIADHADIEWKFARTKLWMSYFEEGGTLPTPFNVIPSPKSLWYLIKWIWTHLCKKKMRRKPESFGTIGRRAADNLRRHHQYQEVMRNLVKRYVAAMIRDAKTEEGLTEENFKELKQDISSFRFEVLGLLRGSKLSTIQSANASKESSNSADSDEKSDSEEEVARQQAAGPLERNIQLESRGLASRGDLSIPGLSEQCVLVDHRERNTDTLGLQVGKRVCPFKSEKVVVEDTVPIIPKEKHAKEEDSSIDYDLNLPDTVTHEDYVTTRL

SEQ ID NO: 51484 - DNA, 2682 bp, Artificial Sequence
  derived and/or modified sequence
atggcccagttctactacaagagaaacgtgaacgccccctacagagacagaatccccctgagaatcgtgagagccgagagcgagctgagccccagcgagaaggcctacctgaacgccgtggagaagggcgactacgccagcgtgaagaagagcctggaggaggccgagatctacttcaagatcaacatcaactgcatcgaccccctgggcagaaccgccctgctgatcgccatcgagaacgagaacctggagctgatcgagctgctgctgagcttcaacgtgtacgtgggcgacgccctgctgcacgccatcagaaaggaggtggtgggcgccgtggagctgctgctgaaccacaagaagcccagcggcgagaagcaggtgccccccatcctgctggacaagcagttcagcgagttcacccccgacatcacccccatcatcctggccgcccacaccaacaactacgagatcatcaagctgctggtgcagaagggcgtgagcgtgcccagaccccacgaggtgagatgcaactgcgtggagtgcgtgagcagcagcgacgtggacagcctgagacacagcagaagcagactgaacatctacaaggccctggccagccccagcctgatcgccctgagcagcgaggaccccttcctgaccgccttccagctgagctgggagctgcaggagctgagcaaggtggagaacgagttcaagagcgagtacgaggagctgagcagacagtgcaagcagttcgccaaggacctgctggaccagaccagaagcagcagagagctggagatcatcctgaactacagagacgacaacagcctgatcgaggagcagagcggcaacgacctggccagactgaagctggccatcaagtacagacagaaggagttcgtggcccagcccaactgccagcagctgctggccagcagatggtacgacgagttccccggctggagaagaagacactgggccgtgaagatggtgacctgcttcatcatcggcctgctgttccccgtgttcagcgtgtgctacctgatcgcccccaagagccccctgggcctgttcatcagaaagcccttcatcaagttcatctgccacaccgccagctacctgaccttcctgttcctgctgctgctggccagccagcacatcgacagaagcgacctgaacagacagggccccccccccaccatcgtggagtggatgatcctgccctgggtgctgggcttcatctggggcgagatcaagcagatgtgggacggcggcctgcaggactacatccacgactggtggaacctgatggacttcgtgatgaacagcctgtacctggccaccatcagcctgaagatcgtggccttcgtgaagtacagcgccctgaaccccagagagagctgggacatgtggcaccccaccctggtggccgaggccctgttcgccatcgccaacatcttcagcagcctgagactgatcagcctgttcaccgccaacagccacctgggccccctgcagatcagcctgggcagaatgctgctggacatcctgaagttcctgttcatctactgcctggtgctgctggccttcgccaacggcctgaaccagctgtacttctactacgaggagaccaagggcctgacctgcaagggcatcagatgcgagaagcagaacaacgccttcagcaccctgttcgagaccctgcagagcctgttctggagcatcttcggcctgatcaacctgtacgtgaccaacgtgaaggcccagcacgagttcaccgagttcgtgggcgccaccatgttcggcacctacaacgtgatcagcctggtggtgctgctgaacatgctgatcgccatgatgaacaacagctaccagctgatcgccgaccacgccgacatcgagtggaagttcgccagaaccaagctgtggatgagctacttcgaggagggcggcaccctgcccacccccttcaacgtgatccccagccccaagagcctgtggtacctgatcaagtggatctggacccacctgtgcaagaagaagatgagaagaaagcccgagagcttcggcaccatcggcagaagagccgccgacaacctgagaagacaccaccagtaccaggaggtgatgagaaacctggtgaagagatacgtggccgccatgatcagagacgccaagaccgaggagggcctgaccgaggagaacttcaaggagctgaagcaggacatcagcagcttcagattcgaggtgctgggcctgctgagaggcagcaagctgagcaccatccagagcgccaacgccagcaaggagagcagcaacagcgccgacagcgacgagaagagcgacagcgaggaggaggtggccagacagcaggccgccggccccctggagagaaacatccagctggagagcagaggcctggccagcagaggcgacctgagcatccccggcctgagcgagcagtgcgtgctggtggaccacagagagagaaacaccgacaccctgggcctgcaggtgggcaagagagtgtgccccttcaagagcgagaaggtggtggtggaggacaccgtgcccatcatccccaaggagaagcacgccaaggaggaggacagcagcatcgactacgacctgaacctgcccgacaccgtgacccacgaggactacgtgaccaccagactgtag

SEQ ID NO: 51485 - DNA, 2682 bp, Artificial Sequence
  derived and/or modified sequence
atggctcaattttattataagaggaatgtcaacgcaccctacagagacagaatccctctacggatagtccgggccgaatccgaactgtctccatccgagaaagcctacttgaacgccgtcgagaagggagactatgcgagcgtgaagaaatcattagaggaggctgagatctactttaagatcaacataaactgcatcgatccgctaggccgtaccgctctgctcatagcaatcgagaacgagaacttggaactcatagagttgctgctctcatttaacgtgtacgtgggggacgcgctgcttcatgcaattaggaaggaggtggtgggcgcggtggagctgctgttaaatcataagaaacctagtggcgaaaaacaggttcctccaatcttgctggataagcaattttcggaatttacccctgacattacacccatcatcctagccgctcacacaaacaactatgaaattatcaaactcctggtccagaaaggagtgtccgttccgcgtccccacgaggtcagatgcaattgtgtggaatgtgtatccagcagcgatgtcgacagcctgagacacagcagatcaagactcaatatttataaggctttggctagcccaagcctcatcgccttgagctctgaggacccattcctgaccgcattccagctgagctgggaactgcaggaactttccaaggtggaaaacgagttcaagtccgaatatgaggaactgtctcggcagtgcaagcagttcgctaaggacctcctcgaccaaactagaagctctcgcgaactggaaatcattctaaattaccgagatgacaactctctgatcgaagagcagtcgggaaacgacctggctaggctcaagttggcaattaagtatcgccagaaagagttcgtggctcagccgaactgtcagcagcttctggcatcaaggtggtacgatgagtttcctggctggaggcggcggcattgggctgtgaaaatggtgacctgttttatcattggccttctatttcctgtgttttcagtttgttacctgatcgcccctaaatcgccactgggactgtttatccgaaagccctttatcaaatttatttgtcatacagccagttacctcacctttctttttttgctgctgctggcttctcagcatattgatcggtctgatctgaacaggcagggacctccccccaccatagtggaatggatgatcctaccctgggtgctcggcttcatctggggtgagatcaagcaaatgtgggacggggggcttcaggattacattcacgactggtggaatctgatggacttcgtgatgaacagcttataccttgctacaatttctctcaaaatagttgcattcgtgaagtactcagccctgaaccccagggagtcctgggatatgtggcaccctaccctcgtggccgaggccctgttcgccatcgcgaacattttctcttctcttcggctcatttccctcttcaccgcaaacagccaccttgggcctctgcagattagtctcggaaggatgctactggatatattgaagtttctgttcatctactgcttggttctgttggccttcgccaacggtttgaatcagctttatttctattatgaagaaactaaagggctgacctgcaaagggattcgctgcgagaagcagaacaacgctttctctactctttttgagacactccagagcttattttggtccatcttcggactcataaacctctacgtgactaatgttaaggcacagcacgaattcactgaatttgttggtgccaccatgttcggcacgtacaacgtgatctccctcgttgtgctgctcaatatgttgatcgctatgatgaataactcgtaccagctcatcgccgaccatgcagatatcgagtggaaattcgcccgaactaagctgtggatgtcatacttcgaggaaggtggaaccttacccacacccttcaatgtgatcccgtccccaaagagcctatggtatctaattaagtggatctggactcacctgtgtaaaaagaagatgaggcggaagccggagtctttcggaactatcggaagacgggcggctgacaacttgcggcggcatcatcagtaccaggaagttatgaggaacctggtgaagagatacgtcgcggccatgatccgtgacgccaagaccgaagaaggactgactgaggagaactttaaagagctgaagcaggatatttcatccttccggttcgaggtgctcggactgctgaggggtagcaaattgagtaccattcagtccgccaatgcaagtaaagagtcttccaactcagctgatagcgatgagaagtccgattcagaggaggaggtggctaggcaacaagccgccggcccactcgagcgcaacattcagttggagtcccgaggacttgcctcccgcggggacctcagcattcctggcctcagcgaacaatgcgttctggtggaccatagagagcggaatacagacactttgggcctccaagttggcaagcgcgtctgtcccttcaaatccgagaaggttgtggtggaggacacggtacctatcatccctaaggaaaagcatgcaaaggaagaggatagcagtattgactatgacttaaatctgcctgatacagtgacacatgaagattacgtgaccacaaggctgtag

SEQ ID NO: 51486 - DNA, 2682 bp, Artificial Sequence
  derived and/or modified sequence
atggcccagttctactacaagagaaatgtgaatgccccctacagagaccgcatccccctgcgcatcgtgcgggcagagagcgagctgagccccagcgagaaggcctacctgaatgctgtggagaagggggactatgcctctgtgaagaagagcctggaggaggccgagatctacttcaagatcaacatcaactgcatcgaccccctgggccgcacagccctgctgattgccattgaaaatgaaaacctggagctgattgagctgctgctgtccttcaacgtgtatgtgggagatgccctgctgcacgccatcaggaaggaggtggtgggcgctgtggagctgctgctgaaccacaagaagcccagcggggagaagcaggtgccccccatcctgctggacaagcagttcagcgagttcaccccagacatcacccccatcatcctggccgcccacaccaacaactatgagatcatcaagctgctggtgcagaagggcgtgtctgtgccccggccccatgaggtgcgctgcaactgtgtggagtgtgtgagcagcagtgatgtggacagcctgcggcacagccgcagccggctgaacatctacaaggccctggccagccccagcctgattgccctgagcagcgaggaccccttcctgacagccttccagctgtcctgggagctgcaggagctgagcaaggtggagaatgagttcaagtcagaatatgaggagctgagccggcagtgcaagcagtttgccaaggacctgctggaccagaccaggagcagccgggagctggagatcatcctgaactacagagatgacaacagcctcatcgaggagcagagcggaaatgacctggcccggctgaagctggccatcaagtaccggcagaaggagtttgtggcccagcccaactgccagcagctgctggccagccgctggtatgatgagttccctggctggaggagaagacactgggccgtgaagatggtgacctgcttcatcatcggcctgctcttccctgtgttttctgtgtgctacctgattgcccccaagagccccctgggcctcttcatcaggaagcccttcatcaagttcatctgccacacagccagctacctgaccttcctgttcctgctgctgctggccagccagcacatcgacagaagtgacctgaaccggcagggccccccacccaccatcgtggagtggatgatcctgccctgggtgctgggcttcatctggggcgagatcaagcagatgtgggatggcggcctgcaggactacatccatgactggtggaacctgatggactttgtgatgaacagcctgtacctggccaccatcagcctgaagatcgtggcctttgtgaagtacagcgccctgaacccccgggagagctgggacatgtggcaccccaccctggtggccgaggccctgtttgccatcgccaacatcttcagcagcctgcggctcatcagcctcttcaccgccaacagccacctgggccccctgcagatcagcctgggccgcatgctgctggacatcctgaagttcctgttcatctactgcctggtgctgctggcctttgccaacggcctgaaccagctgtacttctactatgaggagaccaagggcctgacctgcaagggcatccgctgtgagaagcagaacaatgccttcagcaccctgtttgagaccctgcagagcctcttctggagcatcttcggcctcatcaacctgtatgtgaccaacgtgaaggcccagcacgagttcacagaatttgtgggcgccaccatgtttggcacctacaacgtcatcagcctggtggtgctgctgaacatgctgattgccatgatgaacaacagctaccagctgattgctgaccatgctgacatcgagtggaagtttgcccggaccaagctgtggatgagctactttgaggagggcggcaccctgcccacccccttcaacgtcatccccagccccaagagcctgtggtacctgatcaagtggatctggacccacctgtgcaagaagaagatgaggaggaagccagagagctttggcaccatcggccggcgggctgctgacaacctgcggcggcaccaccagtaccaggaggtgatgaggaacctggtgaagagatatgtggccgccatgatcagagatgccaagacagaggagggcctgacagaggagaacttcaaggagctgaagcaggacatcagcagcttccgctttgaggtgctgggcctgctgcggggcagcaagctgagcaccatccagagcgccaatgccagcaaggagagcagcaacagcgctgacagtgatgagaagagtgacagcgaggaggaggtggcccggcagcaggccgccggccccctggagaggaacatccagctggagagccggggcctggccagcagaggagacctgagcatccctggcctgtctgagcagtgtgtgctggtggaccaccgggagaggaacacagacaccctgggcctgcaggtgggcaagagggtgtgccccttcaagtctgagaaggtggtggtggaggacacagtgcccatcatccccaaggagaagcacgccaaggaggaggacagcagcattgattatgacctgaacctgcctgacacagtgacccatgaggactatgtgaccacccggctgtag

SEQ ID NO: 51487 - DNA, 2682 bp, Artificial Sequence
  derived and/or modified sequence
atggcccagttctactacaagcggaacgtgaacgccccctaccgggaccgcattcctctccgcatcgtgcgtgccgagagtgagctgtctccgtccgagaaggcctatctaaacgccgtggagaagggagattatgctagtgtaaagaagtcactggaggaagccgaaatttatttcaagatcaatatcaattgcattgatcctttggggcgaactgccctgctcatcgctatcgaaaacgaaaacctagagttgatcgaactcctgttgtcctttaatgtgtatgtaggcgacgcactgcttcacgctatcaggaaggaggttgtaggagccgtggagttgctcttaaatcacaaaaaacccagcggcgaaaagcaagttccccctattttgctggacaagcagtttagtgagttcactcccgacattactcctattattctggccgcacacacaaataattatgagataataaaactactggtgcagaagggggtctctgttcctcggcctcacgaggtgaggtgtaattgtgtagaatgcgtcagctcctctgacgtcgatagcttgcgacacagtcggagccgtctgaacatctacaaggctctagcctctccctctctgatagcgctgtccagcgaggacccctttctaaccgctttccagctgagttgggagctgcaggagctgagcaaggtggagaatgagttcaaaagcgagtatgaggagctttccagacagtgcaaacagtttgccaaggacctgctagatcagacacgcagtagtagggagctcgagatcattttgaattatagggacgataactctttgattgaggagcagtcaggcaacgacttggccaggttaaagctggccatcaaataccgccagaaggagttcgtagctcagcctaattgtcagcagctgctggcaagccggtggtacgacgagtttcccggctggagaagacgccactgggccgtaaaaatggtgacatgctttattataggactcctcttccctgtgtttagcgtgtgttatttgattgcacctaaatcaccgctgggcctgtttatccggaagccattcatcaagtttatctgtcatacagcctcctacttaactttcctgtttttgctactgctagcttctcagcatatcgataggtccgatctgaacaggcaggggcctccccctactatcgtggaatggatgattttgccttgggtgttgggattcatctggggtgagatcaagcagatgtgggacggaggactgcaggactacatacatgactggtggaacctgatggactttgtgatgaattcactgtacctcgcaacaatttccctgaaaatagttgctttcgtcaaatatagtgcactcaacccgcgagagagttgggacatgtggcaccctaccctcgtggctgaagccctgtttgccatcgctaacatcttttcctccctgaggctgatcagtctgtttaccgccaattcacacttgggtcccttgcaaatttccctcggcaggatgttgctagacatactcaaattcctgtttatttattgtctagtactgctcgcatttgctaatggcttgaatcagctctacttctactatgaggagaccaagggcctcacgtgcaagggcattcggtgtgaaaaacagaacaacgcattcagtactctgtttgagactctccagtcgcttttttggagcatttttggcctgattaatctctacgtgacaaacgtaaaggctcagcacgaattcacggaattcgtgggtgccacaatgttcgggacgtataacgtaattagcttggtggttctgctgaatatgctcattgcaatgatgaacaactcctatcagctgattgccgaccatgcagacatcgagtggaagtttgcccggaccaagctctggatgagttacttcgaggaagggggcacgctcccaactcccttcaacgttataccatcacccaagagtctctggtacctcatcaaatggatttggacacacctgtgcaaaaaaaaaatgaggaggaagccagaatcattcggaacaatcgggaggcgagcagccgataacctgcgaaggcatcaccaataccaggaagtaatgcggaatctcgttaagcgttatgtggccgccatgatccgggatgccaagaccgaggaggggttgactgaagagaacttcaaggagctgaaacaggatatctcctctttccggttcgaggtgctgggattgctcagggggtccaaactgtcaaccatccagtctgcaaatgcatccaaagaatcctcgaatagcgctgacagtgatgagaaaagcgatagcgaagaggaagtggcccgccagcaggctgcgggccccctcgagcggaacatccagcttgaatcaaggggcctcgctagccgcggagacctctctattccaggactttctgaacaatgtgtgctggttgaccatcgcgagagaaatacggacacgctgggcctacaagtggggaaaagagtgtgtcccttcaaatcagagaaagttgttgtggaagataccgtgcccattatccctaaggagaagcacgctaaggaggaggatagttctatcgactacgatctcaatctgcccgataccgttacgcatgaggattacgtcacaacccggctctag

SEQ ID NO: 51488 - DNA, 2682 bp, Artificial Sequence
  derived and/or modified sequence
atggcgcagttttactataaaagaaacgtcaatgcaccataccgggatagaatcccactgagaatagttcgcgctgaatctgagctctccccgtcagagaaagcttatctgaatgcagtcgagaagggcgattacgcttctgtcaagaaatctttggaggaggccgaaatctattttaaaattaatattaattgcattgatcctttgggtaggacagctttgctgatcgcgatcgaaaacgagaacctggagctgatcgaattacttctcagctttaacgtgtacgtgggcgacgctctgcttcatgccatccgcaaggaggtcgtcggagccgtcgagctcctgctgaatcacaagaaaccttcaggtgagaaacaggtaccacctattcttctggacaaacagttttccgagtttacccctgatattacacctatcatactcgcagcacatacaaacaactacgagatcatcaaattgttagtacagaagggagtctcagttcccaggccccatgaggtgagatgcaactgtgttgagtgcgtgagtagctccgacgtcgactcgctgagacactcaaggagtcgcctcaacatttacaaagcattggcatcgccatcgcttattgcgttgtcaagtgaagacccgttcctcacagccttccagctgagctgggaactgcaggaactgtccaaggtggaaaacgagttcaaatccgagtacgaagagctgtcgagacagtgcaagcagtttgccaaagacctcttggatcagacgaggtccagccgggagctcgagatcatattgaattaccgcgacgataactctctgattgaagagcagagcggcaacgacctcgccaggctcaagctggctatcaagtaccgccagaaagaattcgtggcccaaccaaactgccagcagttattagcttctaggtggtatgacgaattcccgggatggcgacgcagacattgggcagtgaagatggttacatgtttcatcatcggtctgttgttccccgtttttagtgtctgttatttgatcgccccaaagtcgccactgggcctctttatcagaaagccttttataaagtttatctgtcacaccgcctcctacctgacattcctgtttcttctgctcctggcttcccaacatatcgacaggagcgatctcaaccgacagggtccaccgcctactattgtggagtggatgattctcccttgggtccttggcttcatatggggcgagatcaagcagatgtgggacggaggcctccaggactatatacacgactggtggaatttaatggattttgtaatgaactccctatacctggctaccatctctctgaaaatcgtcgcattcgttaagtacagcgccctgaatcccagagaaagctgggacatgtggcaccccacccttgtggccgaggcactgtttgcgatcgctaacatcttttctagcctgcggcttatctcccttttcaccgcgaattcccacctgggcccactccagatttcgctcggacgtatgttactggatatcctcaaatttctcttcatttattgtttggtgctgctcgcgtttgctaatggccttaatcagctctacttttactacgaggagacaaagggcctgacctgtaaaggaataaggtgtgagaaacagaataacgcatttagtaccctgttcgagacactgcagagcttgttttggtccattttcggcctgatcaacttatacgtcaccaacgtcaaagcacagcatgagttcaccgagttcgtaggtgccaccatgttcgggacatataacgtgatcagcctggttgttctgctcaacatgctaatcgccatgatgaacaactcgtatcagcttatagccgatcacgccgatatcgagtggaagtttgccagaaccaaactgtggatgtcctatttcgaggagggtgggaccttgccaacccctttcaatgtcattcccagtccaaaaagcctgtggtacttaatcaagtggatatggacccacttatgtaaaaagaaaatgcgcaggaaaccagagagttttggcactataggcaggagagccgctgataacctgagaaggcaccaccagtaccaagaagtgatgcgtaacctggtcaagcggtatgtagcagccatgatacgagatgccaagacagaagaggggctgaccgaggaaaactttaaggaactgaaacaggatatctctagttttaggttcgaagtcttgggccttctgagggggtctaagctgagcactattcagagcgctaatgcgagtaaagagtcaagcaatagcgctgacagtgacgaaaaatcagattctgaggaagaggtcgctcggcagcaggctgccggtccactggagcgcaacattcaactcgaatcgcgagggctcgcttcccgcggagacctcagtatcccgggacttagcgagcagtgcgtgctggtcgatcaccgcgagaggaatactgacactttgggccttcaagtgggcaaacgcgtgtgcccattcaaaagcgagaaagtggtggtagaggatacagtccccatcattcccaaagaaaaacacgctaaagaagaagattctagtatcgattacgacctcaatctgcctgatacagtgacccacgaggactacgtgaccacccgcctgtag

SEQ ID NO: 51489 - DNA, 2955 bp, Artificial Sequence
  derived and/or modified sequence
cttcgctttcagagcatcctcactccgcccagttcggtgccagctgcgtgggctccagcttcgatcgttttccttggaatgctccaaaactcagcagcgactaagggaattccattggaatttgccgggcgtgctctcaccccgcacggcacccgcgccgtcagtcctcggatcccatcacttcagcccgaagattgcaactttgcagagacgaagaaatagcatggcatgaaacatggctcagttctattacaaaagaaatgttaatgctccctatagagaccgcatccctctaaggatagtaagagcagaatcagaactctcgccatcagaaaaagcctacttgaatgctgtggaaaagggagattatgccagtgtcaagaaatccctagaggaagctgaaatttattttaaaatcaatattaattgcattgatcctctcggaagaactgctctcctcattgcaattgaaaatgagaacttggagctcatcgaactactcttaagctttaatgtctatgttggagatgctctattacatgctatcagaaaagaagtcgtcggagctgttgagctgttattgaaccacaaaaaacctagtggagaaaaacaggtgcctcctatactccttgataagcagttctctgaattcactccagacattacaccaatcattttggcagcccatacaaataattatgagataataaaactcttggttcagaaaggagtctcagtgcctcgaccccacgaggtccgctgtaactgtgtggaatgcgtgtccagttcagatgtggacagcctccgtcactcacgctccagactcaacatctacaaggccttggccagtccctctctcattgcactgtcaagcgaagatccttttctcacagcctttcagttaagttgggaacttcaggaactgagcaaggtggaaaatgaattcaagtcggagtatgaagagctgtcacggcagtgcaaacaatttgctaaggacctactggatcagacgagaagttccagagaactggaaatcattcttaattaccgagatgacaatagtctcatagaagaacaaagtggaaatgatcttgcaagactaaaattggccattaagtaccgtcaaaaagagtttgttgcccagcccaattgtcaacagctgctggcatctcgctggtacgatgagtttccaggctggaggagaagacactgggcagtgaagatggtgacatgtttcataataggacttctttttcctgtcttctctgtgtgctacctgatagctcccaaaagcccacttggactgttcatcaggaagccatttatcaagtttatctgccacacagcctcctatttgacttttttgttcctgctgctgcttgcctctcagcacatcgacaggtcagacttgaacaggcaaggtccaccaccaaccatcgtcgagtggatgatattaccgtgggtcctgggcttcatatggggagaaattaaacagatgtgggatggcggacttcaggactacatccatgattggtggaatctaatggactttgtaatgaactccttatatttagcaacaatctccttgaaaattgttgcatttgtaaagtacagtgcccttaatccacgagaatcatgggacatgtggcatcccactctggtggcagaggctttatttgctattgcaaacatcttcagttctctgcgtctgatctcactgtttactgcaaattctcacctgggacctctgcaaatatctctgggaagaatgctcctggacattttgaagtttctattcatatactgccttgtgttgctagcatttgcaaatggcctaaatcaattgtacttctattatgaagaaacgaaagggttaacctgcaaaggcataagatgtgaaaagcagaataatgcattttcaacgttatttgagacactgcagtccctgttttggtcaatatttgggctcatcaatttatatgtgaccaatgtcaaagcacagcatgaatttactgagtttgttggtgccaccatgtttgggacatacaatgtcatctctctggttgttctactcaacatgttaatagctatgatgaataattcttaccaactgattgctgaccatgcagatatagaatggaaatttgcacgaacaaagctttggatgagttattttgaagaaggaggtactctgcctactcccttcaatgtcatcccgagccccaagtctctctggtacctgatcaaatggatctggacacacttgtgcaagaaaaagatgagaagaaagccagaaagttttggaacaatagggaggcgagctgctgataacttgagaagacatcaccaataccaagaagttatgaggaacctggtgaagcgatacgttgctgcaatgattagagatgctaaaactgaagaaggcctgaccgaagagaactttaaggaactaaagcaagacatttctagtttccgctttgaagtcctgggattactaagaggaagcaaactttccacaatacaatctgcgaatgcctcgaaggagtcttcaaattcggcagactcagatgaaaagagtgatagcgaagaagaagttgctcgtcaacaggctgcaggaccacttgagagaaatattcaactggaatctcgaggattagcttcacggggtgacctgagcattcccggtctcagtgaacaatgtgtgttagtagaccatagagaaaggaatacggacacactggggttacaggtaggaaagagagtgtgtccattcaagtcagagaaggtggtggtggaggacacggttcctataataccaaaggagaaacatgcaaaagaagaggactctagtatagactatgatctaaacctcccagacacagtcacccacgaagattacgtgaccacaagattgtgatacttgaaggaggaagcgtttaccatacacatacgtat

SEQ ID NO: 51490 - protein, 828 aa, Artificial Sequence
  derived and/or modified sequence
MAQFYYKRNVNAPYRDRIPLRIVRAESELSPSEKAYLNAVEKGDYASVKKSLEEAEIYFKININCIDPLGRTALLIAIENENLELIELLLSFNVYVGDALLHAIRKEVVGAVELLLNHKKPSGEKQVPPILLDKQFSEFTPDITPIILAAHTNNYEIIKLLVQKGVSVPRPHEVRCNCVECVSSSDVDSLRHSRSRLNIYKALASPSLIALSSEDPFLTAFQLSWELQELSKVENEFKSEYEELSRQCKQFAKDLLDQTRSSRELEIILNYRDDNSLIEEQSGNDLARLKLAIKYRQKEFVAQPNCQQLLASRWYDEFPGWRRRHWAVKMVTCFIIGLLFPVFSVCYLIAPKSPLGLFIRKPFIKFICHTASYLTFLFLLLLASQHIDRSDLNRQGPPPTIVEWMILPWVLGFIWGEIKQMWDGGLQDYIHDWWNLMDFVMNSLYLATISLKIVAFVKYSALNPRESWDMWHPTLVAEALFAIANIFSSLRLISLFTANSHLGPLQISLGRMLLDILKFLFIYCLVLLAFANGLNQLYFYYEETKGLTCKGIRCEKQNNAFSTLFETLQSLFWSIFGLINLYVTNVKAQHEFTEFVGATMFGTYNVISLVVLLNMLIAMMNNSYQLIARRAADNLRRHHQYQEVMRNLVKRYVAAMIRDAKTEEGLTEENFKELKQDISSFRFEVLGLLRGSKLSTIQSANASKESSNSADSDEKSDSEEEVARQQAAGPLERNIQLESRGLASRGDLSIPGLSEQCVLVDHRERNTDTLGLQVGKRVCPFKSEKVVVEDTVPIIPKEKHAKEEDSSIDYDLNLPDTVTHEDYVTTRL

SEQ ID NO: 51491 - protein, 460 aa, Artificial Sequence
  derived and/or modified sequence
MAQFYYKRNVNAPYRDRIPLRIVRAESELSPSEKAYLNAVEKGDYASVKKSLEEAEIYFKININCIDPLGRTALLIAIENENLELIELLLSFNVYVGDALLHAIRKEVVGAVELLLNHKKPSGEKQVPPILLDKQFSEFTPDITPIILAAHTNNYEIIKLLVQKGVSVPRPHEVRCNCVECVSSSDVDSLRHSRSRLNIYKALASPSLIALSSEDPFLTAFQLSWELQELSKVENEFKSEYEELSRQCKQFAKDLLDQTRSSRELEIILNYRDDNSLIEEQSGNDLARLKLAIKYRQKEFVAQPNCQQLLASRWYDEFPGWRRRHWAVKMVTCFIIGLLFPVFSVCYLIAPKSPLGLFIRKPFIKFICHTASYLTFLFLLLLASQHIDRSDLNRQGPPPTIVEWMILPWVLGFIWGEIKQMWDGGLQDYIHDWWNLMDFVMNSLYLATISLKIVAFVKVI

SEQ ID NO: 51492 - DNA, 2487 bp, Artificial Sequence
  derived and/or modified sequence
atggcccagttctactacaagagaaacgtgaacgccccctacagagacagaatccccctgagaatcgtgagagccgagagcgagctgagccccagcgagaaggcctacctgaacgccgtggagaagggcgactacgccagcgtgaagaagagcctggaggaggccgagatctacttcaagatcaacatcaactgcatcgaccccctgggcagaaccgccctgctgatcgccatcgagaacgagaacctggagctgatcgagctgctgctgagcttcaacgtgtacgtgggcgacgccctgctgcacgccatcagaaaggaggtggtgggcgccgtggagctgctgctgaaccacaagaagcccagcggcgagaagcaggtgccccccatcctgctggacaagcagttcagcgagttcacccccgacatcacccccatcatcctggccgcccacaccaacaactacgagatcatcaagctgctggtgcagaagggcgtgagcgtgcccagaccccacgaggtgagatgcaactgcgtggagtgcgtgagcagcagcgacgtggacagcctgagacacagcagaagcagactgaacatctacaaggccctggccagccccagcctgatcgccctgagcagcgaggaccccttcctgaccgccttccagctgagctgggagctgcaggagctgagcaaggtggagaacgagttcaagagcgagtacgaggagctgagcagacagtgcaagcagttcgccaaggacctgctggaccagaccagaagcagcagagagctggagatcatcctgaactacagagacgacaacagcctgatcgaggagcagagcggcaacgacctggccagactgaagctggccatcaagtacagacagaaggagttcgtggcccagcccaactgccagcagctgctggccagcagatggtacgacgagttccccggctggagaagaagacactgggccgtgaagatggtgacctgcttcatcatcggcctgctgttccccgtgttcagcgtgtgctacctgatcgcccccaagagccccctgggcctgttcatcagaaagcccttcatcaagttcatctgccacaccgccagctacctgaccttcctgttcctgctgctgctggccagccagcacatcgacagaagcgacctgaacagacagggccccccccccaccatcgtggagtggatgatcctgccctgggtgctgggcttcatctggggcgagatcaagcagatgtgggacggcggcctgcaggactacatccacgactggtggaacctgatggacttcgtgatgaacagcctgtacctggccaccatcagcctgaagatcgtggccttcgtgaagtacagcgccctgaaccccagagagagctgggacatgtggcaccccaccctggtggccgaggccctgttcgccatcgccaacatcttcagcagcctgagactgatcagcctgttcaccgccaacagccacctgggccccctgcagatcagcctgggcagaatgctgctggacatcctgaagttcctgttcatctactgcctggtgctgctggccttcgccaacggcctgaaccagctgtacttctactacgaggagaccaagggcctgacctgcaagggcatcagatgcgagaagcagaacaacgccttcagcaccctgttcgagaccctgcagagcctgttctggagcatcttcggcctgatcaacctgtacgtgaccaacgtgaaggcccagcacgagttcaccgagttcgtgggcgccaccatgttcggcacctacaacgtgatcagcctggtggtgctgctgaacatgctgatcgccatgatgaacaacagctaccagctgatcgccagaagagccgccgacaacctgagaagacaccaccagtaccaggaggtgatgagaaacctggtgaagagatacgtggccgccatgatcagagacgccaagaccgaggagggcctgaccgaggagaacttcaaggagctgaagcaggacatcagcagcttcagattcgaggtgctgggcctgctgagaggcagcaagctgagcaccatccagagcgccaacgccagcaaggagagcagcaacagcgccgacagcgacgagaagagcgacagcgaggaggaggtggccagacagcaggccgccggccccctggagagaaacatccagctggagagcagaggcctggccagcagaggcgacctgagcatccccggcctgagcgagcagtgcgtgctggtggaccacagagagagaaacaccgacaccctgggcctgcaggtgggcaagagagtgtgccccttcaagagcgagaaggtggtggtggaggacaccgtgcccatcatccccaaggagaagcacgccaaggaggaggacagcagcatcgactacgacctgaacctgcccgacaccgtgacccacgaggactacgtgaccaccagactgtag

SEQ ID NO: 51493 - DNA, 1383 bp, Artificial Sequence
  derived and/or modified sequence
atggcccagttctactacaagagaaacgtgaacgccccctacagagacagaatccccctgagaatcgtgagagccgagagcgagctgagccccagcgagaaggcctacctgaacgccgtggagaagggcgactacgccagcgtgaagaagagcctggaggaggccgagatctacttcaagatcaacatcaactgcatcgaccccctgggcagaaccgccctgctgatcgccatcgagaacgagaacctggagctgatcgagctgctgctgagcttcaacgtgtacgtgggcgacgccctgctgcacgccatcagaaaggaggtggtgggcgccgtggagctgctgctgaaccacaagaagcccagcggcgagaagcaggtgccccccatcctgctggacaagcagttcagcgagttcacccccgacatcacccccatcatcctggccgcccacaccaacaactacgagatcatcaagctgctggtgcagaagggcgtgagcgtgcccagaccccacgaggtgagatgcaactgcgtggagtgcgtgagcagcagcgacgtggacagcctgagacacagcagaagcagactgaacatctacaaggccctggccagccccagcctgatcgccctgagcagcgaggaccccttcctgaccgccttccagctgagctgggagctgcaggagctgagcaaggtggagaacgagttcaagagcgagtacgaggagctgagcagacagtgcaagcagttcgccaaggacctgctggaccagaccagaagcagcagagagctggagatcatcctgaactacagagacgacaacagcctgatcgaggagcagagcggcaacgacctggccagactgaagctggccatcaagtacagacagaaggagttcgtggcccagcccaactgccagcagctgctggccagcagatggtacgacgagttccccggctggagaagaagacactgggccgtgaagatggtgacctgcttcatcatcggcctgctgttccccgtgttcagcgtgtgctacctgatcgcccccaagagccccctgggcctgttcatcagaaagcccttcatcaagttcatctgccacaccgccagctacctgaccttcctgttcctgctgctgctggccagccagcacatcgacagaagcgacctgaacagacagggccccccccccaccatcgtggagtggatgatcctgccctgggtgctgggcttcatctggggcgagatcaagcagatgtgggacggcggcctgcaggactacatccacgactggtggaacctgatggacttcgtgatgaacagcctgtacctggccaccatcagcctgaagatcgtggccttcgtgaaggtgatctag

SEQ ID NO: 51494 - DNA, 2487 bp, Artificial Sequence
  derived and/or modified sequence
atggctcagttttactacaaaagaaatgtcaacgctccttatcgggacagaatccctctacggatagtccgagctgaatccgagttgtctcctagcgaaaaagcctacttgaacgcagttgaaaagggcgactacgctagtgtgaagaaatccctggaagaagccgaaatttacttcaagattaacatcaactgtatcgatcccctcggacggactgcactgctgatcgccattgagaacgagaatcttgaactgatcgagttattgctgtccttcaacgtctatgttggcgatgcgcttcttcatgcgatcaggaaggaggttgttggggccgttgaactgcttctgaatcataaaaaaccctctggagagaagcaagttccccccatacttcttgacaagcaattttcagagtttacaccagacatcaccccaataatacttgctgctcatactaataattatgagatcatcaaattgctggtgcaaaaaggggtcagcgtgcccaggccccatgaggtaaggtgtaactgtgtcgaatgcgtgagctcctcagacgtcgattctctgagacatagtcgcagtcgcctcaacatctacaaggctctcgcctctccctccttaatcgccctgtcaagtgaagatccttttcttacagctttccaactttcctgggagctccaggagctctccaaggtcgagaacgagtttaagagtgaatacgaagagctgtcaaggcagtgcaaacaattcgcaaaggatttgctggatcagacaagaagttcacgggagctcgagattattttgaactatagagacgacaattccctgattgaggagcagtctgggaacgacttggcacggctcaagctcgccataaaatatcgccaaaaagaatttgttgcccagccaaactgtcagcagttgctcgctagccgctggtatgatgagttccccggctggcgtcgtcggcattgggcagtcaagatggtgacttgtttcattattggactactgttcccagtgttctcagtgtgttacctaatcgcccctaagtccccactcggactgttcattaggaaaccgttcattaagtttatttgccacactgcctcttatctgactttcctttttttattgctgctggcaagccaacacatcgacaggagtgacctgaacaggcaaggacccccaccaaccatagttgagtggatgatcctaccttgggttctgggatttatctggggagaaatcaaacagatgtgggacggcggactacaggattatatccatgactggtggaaccttatggatttcgttatgaattcactgtacctggcgaccatctccttgaaaatagtggcatttgtgaagtactccgccctgaaccctagggaaagctgggatatgtggcaccccaccctcgtggccgaagctctcttcgccattgccaatatttttagttctcttaggctcatttcactcttcacagccaacagtcacctgggacccctgcagatatcgttggggcgcatgctcctcgatattttgaagttcctcttcatatattgtctggtattgcttgctttcgccaatggtctcaaccaactgtatttttactacgaggaaactaagggtttgacctgcaaggggattcgctgcgaaaagcaaaataacgctttctcaaccctctttgagacactgcagagcctgttttggtcgatttttggtctgatcaatctatacgttaccaatgtgaaagcgcagcacgaattcacagaattcgttggcgcaacaatgttcggaacttacaacgttatcagtcttgtggtacttctcaatatgctcatcgctatgatgaataactcttatcagctcattgccagacgggccgccgacaatctgaggagacatcaccagtatcaggaggtaatgaggaacttagtcaaacggtacgtggctgcaatgatcagagacgctaagaccgaggaaggattaactgaggagaattttaaagaactgaagcaagacattagttctttccgctttgaagtactgggattgcttagaggttctaaactgtccaccatccagagcgccaacgcttctaaagagtcatcaaattctgctgatagcgacgagaagtcagatagcgaagaggaagttgcccgccagcaggctgcagggccgttggagcgaaatatccagctggagtctcgaggcctggcatcgcggggcgatctgtctatccccggcctcagcgagcaatgcgtactggtcgaccatagggagagaaacaccgacactcttggactgcaggtcgggaagcgcgtctgtccattcaagtcggagaaggttgtcgttgaggacaccgtgcctatcatccccaaagagaagcacgctaaagaggaagactcctctattgattacgaccttaacctgcccgacacagttacccacgaggattacgtcactacccgactatag

SEQ ID NO: 51495 - DNA, 1383 bp, Artificial Sequence
  derived and/or modified sequence
atggctcaattctactacaaaagaaacgtgaacgccccgtatagggacaggattcctttacgcatcgtgagggcagagtccgagttgagcccgtcagaaaaggcctatctgaatgccgtcgagaagggcgactacgcaagtgtcaaaaagtcgctggaggaagcggagatctatttcaaaatcaacatcaattgcattgacccactcggccggacagctctgttgattgccatagagaacgaaaacctggagctgatcgaactcttattgagctttaatgtttacgtgggtgacgcacttttgcacgctatcagaaaggaggtggtgggcgccgtggagctgctgctgaaccataaaaaacccagtggagaaaagcaggtccccccaatcttactggacaaacagttttccgagttcacaccagatataacgcctattattctggcggcacacacgaacaattacgagatcattaaactcctagtgcagaagggggtctccgtacctaggcctcacgaagtcaggtgtaactgcgtggaatgcgtctcctccagtgacgtagacagcctacggcattcccgcagtaggctcaatatctataaggcgttagcctccccctccctcatcgccttgtctagcgaagaccccttcctgactgccttccaactgagctgggaactgcaggagttatccaaggttgagaatgaatttaagagcgaatatgaggaactttctcgccagtgcaagcagtttgctaaggatctcctggaccagacaagatcctctcgggagctcgaaatcattttaaactacagggacgataatagtttgattgaggagcagtcagggaacgacttggccagactcaagctggccattaagtatagacaaaaggaatttgtagcacagcctaattgccaacagttgttagcatcaaggtggtacgacgagtttcctggctggagacgccgccactgggccgtgaagatggtcacttgtttcatcattggcctgttattccccgtattctctgtctgctatctgatagctcctaagagccccctagggctgttcataaggaaaccctttattaaattcatctgccacaccgcctcttatctgaccttcctgtttcttctactcctggcatctcagcacattgaccgatccgacctgaacagacagggaccaccgccaaccatcgtggagtggatgatccttccatgggtgctggggttcatttggggcgagatcaaacagatgtgggatggggggttgcaagattacatccatgactggtggaatcttatggactttgtaatgaatagcctgtatctcgcaaccattagtcttaagattgtggccttcgtgaaggtgatctag

SEQ ID NO: 51496 - DNA, 2487 bp, Artificial Sequence
  derived and/or modified sequence
atggcccagttctactacaagagaaatgtgaatgccccctacagagaccgcatccccctgcgcatcgtgcgggcagagagcgagctgagccccagcgagaaggcctacctgaatgctgtggagaagggggactatgcctctgtgaagaagagcctggaggaggccgagatctacttcaagatcaacatcaactgcatcgaccccctgggccgcacagccctgctgattgccattgaaaatgaaaacctggagctgattgagctgctgctgtccttcaacgtgtatgtgggagatgccctgctgcacgccatcaggaaggaggtggtgggcgctgtggagctgctgctgaaccacaagaagcccagcggggagaagcaggtgccccccatcctgctggacaagcagttcagcgagttcaccccagacatcacccccatcatcctggccgcccacaccaacaactatgagatcatcaagctgctggtgcagaagggcgtgtctgtgccccggccccatgaggtgcgctgcaactgtgtggagtgtgtgagcagcagtgatgtggacagcctgcggcacagccgcagccggctgaacatctacaaggccctggccagccccagcctgattgccctgagcagcgaggaccccttcctgacagccttccagctgtcctgggagctgcaggagctgagcaaggtggagaatgagttcaagtcagaatatgaggagctgagccggcagtgcaagcagtttgccaaggacctgctggaccagaccaggagcagccgggagctggagatcatcctgaactacagagatgacaacagcctcatcgaggagcagagcggaaatgacctggcccggctgaagctggccatcaagtaccggcagaaggagtttgtggcccagcccaactgccagcagctgctggccagccgctggtatgatgagttccctggctggaggagaagacactgggccgtgaagatggtgacctgcttcatcatcggcctgctcttccctgtgttttctgtgtgctacctgattgcccccaagagccccctgggcctcttcatcaggaagcccttcatcaagttcatctgccacacagccagctacctgaccttcctgttcctgctgctgctggccagccagcacatcgacagaagtgacctgaaccggcagggccccccacccaccatcgtggagtggatgatcctgccctgggtgctgggcttcatctggggcgagatcaagcagatgtgggatggcggcctgcaggactacatccatgactggtggaacctgatggactttgtgatgaacagcctgtacctggccaccatcagcctgaagatcgtggcctttgtgaagtacagcgccctgaacccccgggagagctgggacatgtggcaccccaccctggtggccgaggccctgtttgccatcgccaacatcttcagcagcctgcggctcatcagcctcttcaccgccaacagccacctgggccccctgcagatcagcctgggccgcatgctgctggacatcctgaagttcctgttcatctactgcctggtgctgctggcctttgccaacggcctgaaccagctgtacttctactatgaggagaccaagggcctgacctgcaagggcatccgctgtgagaagcagaacaatgccttcagcaccctgtttgagaccctgcagagcctcttctggagcatcttcggcctcatcaacctgtatgtgaccaacgtgaaggcccagcacgagttcacagaatttgtgggcgccaccatgtttggcacctacaacgtcatcagcctggtggtgctgctgaacatgctgattgccatgatgaacaacagctaccagctgattgccaggagagctgctgacaacctgcggcggcaccaccagtaccaggaggtgatgaggaacctggtgaagcgctacgtggccgccatgatcagagatgccaagacagaggagggcctgacagaggagaacttcaaggagctgaagcaggacatcagcagcttccgctttgaggtgctgggcctgctgcggggcagcaagctgagcaccatccagagcgccaatgccagcaaggagagcagcaacagcgctgacagtgatgagaagagtgacagcgaggaggaggtggcccggcagcaggccgccggccccctggagaggaacatccagctggagagccggggcctggccagcagaggagacctgagcatccctggcctgtctgagcagtgtgtgctggtggaccaccgggagaggaacacagacaccctgggcctgcaggtgggcaagagggtgtgccccttcaagtctgagaaggtggtggtggaggacacagtgcccatcatccccaaggagaagcacgccaaggaggaggacagcagcattgattatgacctgaacctgcctgacacagtgacccatgaagattatgtgaccacccggctgtag

SEQ ID NO: 51497 - DNA, 1383 bp, Artificial Sequence
  derived and/or modified sequence
atggcccagttctactacaagagaaatgtgaatgccccctacagagaccgcatccccctgcgcatcgtgcgggcagagagcgagctgagccccagcgagaaggcctacctgaatgctgtggagaagggggactatgcctctgtgaagaagagcctggaggaggccgagatctacttcaagatcaacatcaactgcatcgaccccctgggccgcacagccctgctgattgccattgaaaatgaaaacctggagctgattgagctgctgctgtccttcaacgtgtatgtgggagatgccctgctgcacgccatcaggaaggaggtggtgggcgctgtggagctgctgctgaaccacaagaagcccagcggggagaagcaggtgccccccatcctgctggacaagcagttcagcgagttcaccccagacatcacccccatcatcctggccgcccacaccaacaactatgagatcatcaagctgctggtgcagaagggcgtgtctgtgccccggccccatgaggtgcgctgcaactgtgtggagtgtgtgagcagcagtgatgtggacagcctgcggcacagccgcagccggctgaacatctacaaggccctggccagccccagcctgattgccctgagcagcgaggaccccttcctgacagccttccagctgtcctgggagctgcaggagctgagcaaggtggagaatgagttcaagtcagaatatgaggagctgagccggcagtgcaagcagtttgccaaggacctgctggaccagaccaggagcagccgggagctggagatcatcctgaactacagagatgacaacagcctcatcgaggagcagagcggaaatgacctggcccggctgaagctggccatcaagtaccggcagaaggagtttgtggcccagcccaactgccagcagctgctggccagccgctggtatgatgagttccctggctggaggagaagacactgggccgtgaagatggtgacctgcttcatcatcggcctgctcttccctgtgttttctgtgtgctacctgattgcccccaagagccccctgggcctcttcatcaggaagcccttcatcaagttcatctgccacacagccagctacctgaccttcctgttcctgctgctgctggccagccagcacatcgacagaagtgacctgaaccggcagggccccccacccaccatcgtggagtggatgatcctgccctgggtgctgggcttcatctggggcgagatcaagcagatgtgggatggcggcctgcaggactacatccatgactggtggaacctgatggactttgtgatgaacagcctgtacctggccaccatcagcctgaagatcgtggcctttgtgaaggtgatctag

SEQ ID NO: 51498 - DNA, 2487 bp, Artificial Sequence
  derived and/or modified sequence
atggcccagttctactacaagcggaacgtgaacgccccctaccgggaccgcattcccttgcgaatcgtaagagctgaaagcgagctgtctccttctgaaaaagcctatctgaacgctgtagagaagggagattacgctagcgtgaagaagagcttggaagaagcagagatctactttaaaattaacataaattgtatagacccccttggtagaactgcactgctgattgcaatcgagaatgaaaatctcgaactaatcgagcttctgcttagtttcaatgtgtatgtcggggatgctctgctgcacgcaatccgcaaagaggtggtaggcgcggtggaactgctgctcaaccataaaaaaccttccggggaaaaacaggtgccccctattttactggataaacagttttctgaattcaccccggatatcaccccgattattttagcagcacacaccaataactacgagatcataaagctgctggtgcaaaagggcgtctccgttcccagaccgcatgaagtgcggtgcaattgcgtagagtgtgtgagctcttccgatgttgacagcctgcgccatagtcgtagcaggctgaacatttataaggcgctggcatcgccttcgcttatcgctcttagcagcgaggacccattcctcacggctttccagctgtcttgggaactgcaggaactgtccaaagtggaaaatgaatttaaatcagagtatgaggagctgtcgagacaatgtaagcagttcgcaaaagacctgttggaccagacccgctcctcgcgggaactggaaattatcttgaactatcgtgacgacaactctctgatagaggagcaatctggaaatgatctggcccggcttaaactggctatcaagtataggcaaaaggagtttgttgcgcagcccaactgccagcaactgctggccagccgttggtatgacgaattccccgggtggagacggcggcattgggccgtcaaaatggtgacttgttttatcatcgggttactctttcctgtgttctcagtgtgttatctgatcgctcctaaatccccactgggactttttattcgaaagcctttcataaaattcatatgtcatacagcatcatacctgaccttcctctttctgcttctactggcatcccagcatattgatcgctctgatcttaaccgccagggaccccctcctacaatcgttgaatggatgatccttccatgggtcctcggatttatctggggggaaattaagcagatgtgggatggggggctccaagattacatccacgactggtggaatcttatggacttcgtaatgaatagcctttatctggcaacaatatccttaaagattgttgccttcgtcaaatattcggctctgaacccacgtgagagctgggacatgtggcaccctacactcgtagccgaagccctttttgcgatcgctaatattttttcttccttacggctgatatcattattcaccgctaactctcacctcgggcctcttcagatatcacttggacggatgctgttggatatcctgaagttcctttttatctactgtctcgtgctgctagcattcgctaacggactgaatcaactatatttttattatgaggagactaaaggcctgacctgcaaggggatccgctgcgagaaacagaataacgccttttcaactctgtttgagacactccagagtctgttctggtccatttttgggctgattaatttatacgttaccaacgtgaaggcacaacacgaattcacagagttcgttggagccactatgtttgggacatataacgtaatcagtttagtggtcttgctgaacatgttgattgcgatgatgaataatagctaccaacttattgctcggagagcagccgacaatttaagacgtcaccaccagtatcaagaagtgatgcggaatttggtcaaacggtatgtcgccgccatgatccgtgatgccaagactgaagaggggctgaccgaagaaaacttcaaggaattaaaacaggacatctcaagtttcaggttcgaggtgttgggcctgctcaggggcagcaagttgagcacaattcaatctgccaacgcctcaaaggagagctcaaatagtgcagatagtgacgagaaaagtgacagcgaggaggaagttgcaaggcagcaggcggctgggcccctagagaggaatattcaactcgagagccgggggttagcctctagaggcgatctcagtatccccggcctatccgagcagtgcgtcttagtggatcatcgcgagcggaatactgatacacttggcctacaggtaggaaagagggtctgcccatttaaaagcgaaaaagttgtggtggaggatacggtgccgatcataccaaaggagaagcatgccaaagaggaggactcctctattgattacgatctgaatctgccggacaccgtgacgcacgaagactatgtgaccacccgcctgtag

SEQ ID NO: 51499 - DNA, 1383 bp, Artificial Sequence
  derived and/or modified sequence
atggcccagttctactacaagcggaacgtgaacgccccctaccgggatcgcattcctctgcgcatagtcagggctgaatccgaactgtcaccttctgaaaaagcctacctcaacgcagttgagaagggggattatgcgtccgtcaaaaaatcactcgaggaagcggaaatctatttcaaaattaatataaattgcattgatcccttggggaggactgcacttctcatcgccattgagaacgagaacttagagctgatcgagcttttactttctttcaacgtatacgtaggcgatgcattactgcacgcaatacggaaagaggtcgtcggagcggtggaacttttgttgaatcataaaaaaccgtccggtgagaaacaggtgccccccattctgcttgataaacaattttcagagtttacccctgatatcaccccaatcatcctggccgcccataccaataactacgaaatcatcaagcttctcgtgcagaaaggggtgagcgttccacgcccccatgaagtgaggtgcaactgtgtagagtgtgtgagttcatccgatgtcgacagcctgcgacactctaggagtagactgaacatctacaaagccctggcgagcccctcattgattgccctgagctcagaagatccattcttaacggctttccaattaagttgggagttgcaagagctcagcaaagtggagaacgagttcaaatctgagtacgaagagctcagcaggcagtgcaaacagttcgccaaggaccttttggaccagactaggtctagccgcgagctggagattattctcaattatcgagatgacaacagcttgatcgaggagcagagcggcaacgatctggcaagactgaagctcgctatcaagtataggcagaaggagtttgtcgctcagcccaactgtcagcaactactggcatctcgctggtacgatgaattccccgggtggcgcaggcgccactgggccgtcaagatggtcacgtgtttcataatcgggctgcttttcccagtgttcagcgtctgttacttgatcgccccgaagtctcccctgggcctgttcataaggaagcctttcataaagttcatttgtcatactgcgtcttatctgacattcttgtttctgttgcttctagccagtcagcatatagacagatcggatctgaaccgccagggccccccacccactatcgtggagtggatgatcttaccatgggtgctcgggttcatttggggggagataaaacagatgtgggacggtggactgcaggattacattcacgattggtggaatctgatggacttcgtcatgaatagtttgtacctggcaacaatctctttgaaaattgtcgcctttgttaaggttatttag

SEQ ID NO: 51500 - DNA, 2487 bp, Artificial Sequence
  derived and/or modified sequence
atggcccagttctattacaagaggaatgtgaacgctccttatcgagatagaatccccctacgaatcgtgcgggctgaatctgagttaagtccctcagagaaggcctatctgaatgctgtggaaaagggggactacgcatcagtcaagaagtcattggaagaggccgagatttattttaaaattaatatcaattgcatagatccattaggaagaactgccctgctcattgccatcgagaacgagaatttagaactcatcgaattactgctgtcgttcaacgtctatgtgggtgatgccctgctccacgccattcgcaaggaggttgtgggagctgtcgaactgctactgaatcataagaaacccagcggtgaaaagcaagtccctcctatcctgctggataagcaattttcagaattcactcctgatattaccccaatcatcctcgcggcacatactaacaactacgaaattataaaactgctcgtgcagaaaggcgtcagcgtgcctcgaccccatgaagtgagatgtaattgcgtcgaatgtgtgtcctccagcgacgtcgatagcttgcgccattcccgcagtagattgaacatctacaaagcactggctagcccctccctgatagcattatcgagcgaggacccattcttaactgccttccagctctcctgggaacttcaggagctctcaaaagttgagaacgagtttaaatctgaatatgaggaactgagtcggcaatgcaaacagttcgccaaggacctgcttgatcagacccgctcttctagagaactagaaatcattctgaactatcgggatgataattctttgatcgaagaacagtctgggaacgacctagccagactgaagctagcaattaaatatagacaaaaggagtttgtggctcagcctaactgccagcaattgctcgcctcccgctggtatgacgaattccccggttggaggcgtagacactgggcagtgaaaatggtaacctgtttcatcatcggcctcctgttcccagtgtttagtgtgtgctatcttatcgccccaaaaagtcctctaggtttgttcattaggaaaccattcatcaagtttatttgtcacacagcctcctatctgacttttttattcctcttactgctggcttcccagcacatcgacaggagcgatcttaatcggcagggccctcctcctacaattgtggagtggatgattctaccatgggttctggggttcatatggggtgaaatcaaacagatgtgggatggcggactacaggactacattcatgattggtggaatttgatggactttgtcatgaacagcctgtatcttgcgacgatatccttgaagatcgtggctttcgtaaaatattcagctctgaaccccagagagtcctgggacatgtggcatcccacattagtggcagaagccctctttgcaatcgctaatattttctctagtctgcggcttatctccctgttcactgctaattcacatttggggcctctacagatttctcttggacgcatgctgttagatattctgaagtttctgtttatttattgtctggttttactggctttcgcaaacggccttaatcagctgtacttctattacgaggagacaaagggactcacctgcaaaggaatccgatgcgaaaaacagaataatgcctttagtacacttttcgagaccctgcagtctcttttctggagcatattcggcctaattaacttgtacgtaaccaatgtgaaagcccaacatgagtttacggagtttgtcggcgctactatgttcgggacttataacgtgatttccctggtggtactgctaaatatgctcattgccatgatgaataactcgtatcagttgatcgcgagaagggccgcagacaacctccgcagacatcaccaatatcaggaggtgatgcggaacctggttaagagatacgttgctgccatgatacgcgatgcgaaaaccgaggaggggctgaccgaagagaacttcaaagaactgaagcaagatatctcctcattccgattcgaagttttgggcctcttgcgaggatccaaactttccactatacaaagcgctaatgcctctaaagagagttccaactccgccgacagtgatgagaagtctgattccgaagaagaggtcgcgaggcaacaagctgccggaccattagagcggaatattcagttggagagcagaggacttgcttctaggggagatctttctatacccggattgagcgaacaatgtgtcttggtggatcatcgggaaagaaataccgatacgctcggattgcaggtgggaaaacgtgtgtgcccctttaagtctgagaaggttgtcgtggaggatacagtgccaatcatacctaaagagaaacatgctaaggaagaagacagctccattgattacgacctgaacctgccagacaccgttactcatgaggactatgtcactacccgcctctag

SEQ ID NO: 51501 - DNA, 1383 bp, Artificial Sequence
  derived and/or modified sequence
atggcccaattttactacaagaggaacgtgaatgctccttatagagacagaatcccactgagaattgtgcgagcagaatctgagctcagcccctcagaaaaggcatatctgaacgctgtcgaaaagggcgattacgccagcgtaaaaaagagccttgaagaagcggaaatatatttcaaaatcaacattaattgcatcgatccccttgggagaacagccctcctaattgcgatcgagaacgaaaatctggagttgatcgagctgcttctatcttttaacgtctacgttggggacgccctgctccacgctattcgtaaagaagtggtcggtgccgtggaactgctcctgaatcacaaaaagccgagtggcgagaagcaagtccctcctatcctgctcgataagcagttcagcgaattcaccccagacatcacccccataatccttgccgcacacacgaataactatgaaatcatcaaactactagttcaaaagggagttagcgtgcctaggcctcacgaggtcagatgcaactgtgttgagtgtgtctctagctcagatgtggatagcctcagacatagccgatccagactcaatatctataaggccttggcttccccaagccttattgctctcagctccgaagacccttttcttaccgctttccagctgagctgggagctgcaggagctgtccaaggtcgaaaatgaatttaagtccgaatatgaggaactgtcgagacagtgtaagcagtttgccaaggatctactggaccaaacaagaagttcaagagaactcgaaatcatcctgaattaccgtgacgataacagcctgattgaagaacagagcggcaatgatttggctagactgaagttggctatcaagtatcgccagaaggagtttgttgctcagccaaattgtcagcagttgttggctagcaggtggtatgacgagtttcccggatggcggagacgccattgggccgttaagatggtgacctgttttataattgggctgctgttccctgtgtttagcgtttgctacctgatagcccctaaaagtccgctgggtctgtttatccgtaagccttttatcaaatttatttgccacactgcctcctaccttaccttcctgtttcttctgctcctggcgagccaacacatcgaccgctcagatctcaaccggcaaggcccacccccaaccatcgtggagtggatgatcctcccctgggtcctaggttttatatggggtgagattaagcagatgtgggacggcggtcttcaggactacatacatgattggtggaatctgatggacttcgtcatgaactctttgtatctagctactatttcgcttaagatcgtagcatttgtgaaggtgatctag

SEQ ID NO: 51502 - DNA, 2760 bp, Artificial Sequence
  derived and/or modified sequence
cttcgctttcagagcatcctcactccgcccagttcggtgccagctgcgtgggctccagcttcgatcgttttccttggaatgctccaaaactcagcagcgactaagggaattccattggaatttgccgggcgtgctctcaccccgcacggcacccgcgccgtcagtcctcggatcccatcacttcagcccgaagattgcaactttgcagagacgaagaaatagcatggcatgaaacatggctcagttctattacaaaagaaatgttaatgctccctatagagaccgcatccctctaaggatagtaagagcagaatcagaactctcgccatcagaaaaagcctacttgaatgctgtggaaaagggagattatgccagtgtcaagaaatccctagaggaagctgaaatttattttaaaatcaatattaattgcattgatcctctcggaagaactgctctcctcattgcaattgaaaatgagaacttggagctcatcgaactactcttaagctttaatgtctatgttggagatgctctattacatgctatcagaaaagaagtcgtcggagctgttgagctgttattgaaccacaaaaaacctagtggagaaaaacaggtgcctcctatactccttgataagcagttctctgaattcactccagacattacaccaatcattttggcagcccatacaaataattatgagataataaaactcttggttcagaaaggagtctcagtgcctcgaccccacgaggtccgctgtaactgtgtggaatgcgtgtccagttcagatgtggacagcctccgtcactcacgctccagactcaacatctacaaggccttggccagtccctctctcattgcactgtcaagcgaagatccttttctcacagcctttcagttaagttgggaacttcaggaactgagcaaggtggaaaatgaattcaagtcggagtatgaagagctgtcacggcagtgcaaacaatttgctaaggacctactggatcagacgagaagttccagagaactggaaatcattcttaattaccgagatgacaatagtctcatagaagaacaaagtggaaatgatcttgcaagactaaaattggccattaagtaccgtcaaaaagagtttgttgcccagcccaattgtcaacagctgctggcatctcgctggtacgatgagtttccaggctggaggagaagacactgggcagtgaagatggtgacatgtttcataataggacttctttttcctgtcttctctgtgtgctacctgatagctcccaaaagcccacttggactgttcatcaggaagccatttatcaagtttatctgccacacagcctcctatttgacttttttgttcctgctgctgcttgcctctcagcacatcgacaggtcagacttgaacaggcaaggtccaccaccaaccatcgtcgagtggatgatattaccgtgggtcctgggcttcatatggggagaaattaaacagatgtgggatggcggacttcaggactacatccatgattggtggaatctaatggactttgtaatgaactccttatatttagcaacaatctccttgaaaattgttgcatttgtaaagtacagtgcccttaatccacgagaatcatgggacatgtggcatcccactctggtggcagaggctttatttgctattgcaaacatcttcagttctctgcgtctgatctcactgtttactgcaaattctcacctgggacctctgcaaatatctctgggaagaatgctcctggacattttgaagtttctattcatatactgccttgtgttgctagcatttgcaaatggcctaaatcaattgtacttctattatgaagaaacgaaagggttaacctgcaaaggcataagatgtgaaaagcagaataatgcattttcaacgttatttgagacactgcagtccctgttttggtcaatatttgggctcatcaatttatatgtgaccaatgtcaaagcacagcatgaatttactgagtttgttggtgccaccatgtttgggacatacaatgtcatctctctggttgttctactcaacatgttaatagctatgatgaataattcttaccaactgattgctaggcgagctgctgataacttgagaagacatcaccaataccaagaagttatgaggaacctggtgaagcgatacgttgctgcaatgattagagatgctaaaactgaagaaggcctgaccgaagagaactttaaggaactaaagcaagacatttctagtttccgctttgaagtcctgggattactaagaggaagcaaactttccacaatacaatctgcgaatgcctcgaaggagtcttcaaattcggcagactcagatgaaaagagtgatagcgaagaagaagttgctcgtcaacaggctgcaggaccacttgagagaaatattcaactggaatctcgaggattagcttcacggggtgacctgagcattcccggtctcagtgaacaatgtgtgttagtagaccatagagaaaggaatacggacacactggggttacaggtaggaaagagagtgtgtccattcaagtcagagaaggtggtggtggaggacacggttcctataataccaaaggagaaacatgcaaaagaagaggactctagtatagactatgatctaaacctcccagacacagtcacccacgaagattacgtgaccacaagattgtgatacttgaaggaggaagcgtttaccatacacatacgtat

SEQ ID NO: 51503 - DNA, 2709 bp, Artificial Sequence
  derived and/or modified sequence
tgctccaaaactcagcagcgactaagggaattccattggaatttgccgggcgtgctctcaccccgcacggcacccgcgccgtcagtcctcggatcccatcacttcagcccgaagattgcaactttgcagagacgaagaaatagcatggcatgaaacatggctcagttctattacaaaagaaatgttaatgctccctatagagaccgcatccctctaaggatagtaagagcagaatcagaactctcgccatcagaaaaagcctacttgaatgctgtggaaaagggagattatgccagtgtcaagaaatccctagaggaagctgaaatttattttaaaatcaatattaattgcattgatcctctcggaagaactgctctcctcattgcaattgaaaatgagaacttggagctcatcgaactactcttaagctttaatgtctatgttggagatgctctattacatgctatcagaaaagaagtcgtcggagctgttgagctgttattgaaccacaaaaaacctagtggagaaaaacaggtgcctcctatactccttgataagcagttctctgaattcactccagacattacaccaatcattttggcagcccatacaaataattatgagataataaaactcttggttcagaaaggagtctcagtgcctcgaccccacgaggtccgctgtaactgtgtggaatgcgtgtccagttcagatgtggacagcctccgtcactcacgctccagactcaacatctacaaggccttggccagtccctctctcattgcactgtcaagcgaagatccttttctcacagcctttcagttaagttgggaacttcaggaactgagcaaggtggaaaatgaattcaagtcggagtatgaagagctgtcacggcagtgcaaacaatttgctaaggacctactggatcagacgagaagttccagagaactggaaatcattcttaattaccgagatgacaatagtctcatagaagaacaaagtggaaatgatcttgcaagactaaaattggccattaagtaccgtcaaaaagagtttgttgcccagcccaattgtcaacagctgctggcatctcgctggtacgatgagtttccaggctggaggagaagacactgggcagtgaagatggtgacatgtttcataataggacttctttttcctgtcttctctgtgtgctacctgatagctcccaaaagcccacttggactgttcatcaggaagccatttatcaagtttatctgccacacagcctcctatttgacttttttgttcctgctgctgcttgcctctcagcacatcgacaggtcagacttgaacaggcaaggtccaccaccaaccatcgtcgagtggatgatattaccgtgggtcctgggcttcatatggggagaaattaaacagatgtgggatggcggacttcaggactacatccatgattggtggaatctaatggactttgtaatgaactccttatatttagcaacaatctccttgaaaattgttgcatttgtaaaggttatttgagacactgcagtccctgttttggtcaatatttgggctcatcaatttatatgtgaccaatgtcaaagcacagcatgaatttactgagtttgttggtgccaccatgtttgggacatacaatgtcatctctctggttgttctactcaacatgttaatagctatgatgaataattcttaccaactgattgctgaccatgcagatatagaatggaaatttgcacgaacaaagctttggatgagttattttgaagaaggaggtactctgcctactcccttcaatgtcatcccgagccccaagtctctctggtacctgatcaaatggatctggacacacttgtgcaagaaaaagatgagaagaaagccagaaagttttggaacaatagggaggcgagctgctgataacttgagaagacatcaccaataccaagtaagttgtccttgtactatgtcttgaaattttcactaaaataaaatgcagtccccccttcagaactgactcaggaggaaatttatttactcattgagtatcaatactcttgttctaaaatgcctcaggaagttatgaggaacctggtgaagcgatacgttgctgcaatgattagagatgctaaaactgaagaaggcctgaccgaagagaactttaaggaactaaagcaagacatttctagtttccgctttgaagtcctgggattactaagaggaagcaaactttccacaatacaatctgcgaatgcctcgaaggagtcttcaaattcggcagactcagatgaaaagagtgatagcgaagaagttgctcgtcaacaggctgcaggaccacttgagagaaatattcaactggaatctcgaggattagcttcacggggtgacctgagcattcccggtctcagtgaacaatgtgtgttagtagaccatagagaaaggaatacggacacactggggttacaggtaggaaagagagtgtgtccattcaagtcagagaaggtggtggtggaggacacggttcctataataccaaaggagaaacatgcaaaagaagaggactctagtatagactatgatctaaacctcccagacacagtcacccacgaagattacgtgaccacaagattgtgatacttgaaggaggaagcgtttaccatacacatacgtattttccgtagtgctctgggtggg

SEQ ID NO: 51504 - protein, 836 aa, Artificial Sequence
  derived and/or modified sequence
MAQFYYKRNVNAPYRDRIPLRIVRAESELSPSEKAYLNAVEKGDYASVKKSLEEAEIYFKININCIDPLGRTALLIAIENENLELIELLLSFNVYVGDALLHAIRKEVVGAVELLLNHKKPSGEKQVPPILLDKQFSEFTPDITPIILAAHTNNYEIIKLLVQKGVSVPRPHEVRCNCVECVSSSDVDSLRHSRSRLNIYKALASPSLIALSSEDPFLTAFQLSWELQELSKVENEFKSEYEELSRQCKQFAKDLLDQTRSSRELEIILNYRDDNSLIEEQSGNDLARLKLAIKYRQKEFVAQPNCQQLLASRWYDEFPGWRRRHWAVKMVTCFIIGLLFPVFSVCYLIAPKSPLGLFIRKPFIKFICHTASYLTFLFLLLLASQHIDRSDLNRQGPPPTIVEWMILPWVLGFIWGEIKQMWDGGLQDYIHDWWNLMDFVMNSLYLATISLKIVAFVKYSALNPRESWDMWHPTLVAEALFAIANIFSSLRLISLFTANSHLGPLQISLGRMLLDILKFLFIYCLVLLAFANGLNQLYFYYEETKGLTCKGIRCEKQNNAFSTLFETLQSLFWSIFGLINLYVTNVKAQHEFTEFVGATMFGTYNVISLVVLLNMLIAMMNNSYQLIADHADIEWKFARTKLWMSYFEEGGTLPTPFNVIPSPKSLWYLIKWIWTHLCKKKMRRKPESFGTIGRRAADNLRRHHQYQEVMRNLVKRYVAAMIRDAKTEEVARQQAAGPLERNIQLESRGLASRGDLSIPGLSEQCVLVDHRERNTDTLGLQVGKRVCPFKSEKVVVEDTVPIIPKEKHAKEEDSSIDYDLNLPDTVTHEDYVTTRL

SEQ ID NO: 51505 - DNA, 2511 bp, Artificial Sequence
  derived and/or modified sequence
atggcccagttctactacaagagaaacgtgaacgccccctacagagacagaatccccctgagaatcgtgagagccgagagcgagctgagccccagcgagaaggcctacctgaacgccgtggagaagggcgactacgccagcgtgaagaagagcctggaggaggccgagatctacttcaagatcaacatcaactgcatcgaccccctgggcagaaccgccctgctgatcgccatcgagaacgagaacctggagctgatcgagctgctgctgagcttcaacgtgtacgtgggcgacgccctgctgcacgccatcagaaaggaggtggtgggcgccgtggagctgctgctgaaccacaagaagcccagcggcgagaagcaggtgccccccatcctgctggacaagcagttcagcgagttcacccccgacatcacccccatcatcctggccgcccacaccaacaactacgagatcatcaagctgctggtgcagaagggcgtgagcgtgcccagaccccacgaggtgagatgcaactgcgtggagtgcgtgagcagcagcgacgtggacagcctgagacacagcagaagcagactgaacatctacaaggccctggccagccccagcctgatcgccctgagcagcgaggaccccttcctgaccgccttccagctgagctgggagctgcaggagctgagcaaggtggagaacgagttcaagagcgagtacgaggagctgagcagacagtgcaagcagttcgccaaggacctgctggaccagaccagaagcagcagagagctggagatcatcctgaactacagagacgacaacagcctgatcgaggagcagagcggcaacgacctggccagactgaagctggccatcaagtacagacagaaggagttcgtggcccagcccaactgccagcagctgctggccagcagatggtacgacgagttccccggctggagaagaagacactgggccgtgaagatggtgacctgcttcatcatcggcctgctgttccccgtgttcagcgtgtgctacctgatcgcccccaagagccccctgggcctgttcatcagaaagcccttcatcaagttcatctgccacaccgccagctacctgaccttcctgttcctgctgctgctggccagccagcacatcgacagaagcgacctgaacagacagggccccccccccaccatcgtggagtggatgatcctgccctgggtgctgggcttcatctggggcgagatcaagcagatgtgggacggcggcctgcaggactacatccacgactggtggaacctgatggacttcgtgatgaacagcctgtacctggccaccatcagcctgaagatcgtggccttcgtgaagtacagcgccctgaaccccagagagagctgggacatgtggcaccccaccctggtggccgaggccctgttcgccatcgccaacatcttcagcagcctgagactgatcagcctgttcaccgccaacagccacctgggccccctgcagatcagcctgggcagaatgctgctggacatcctgaagttcctgttcatctactgcctggtgctgctggccttcgccaacggcctgaaccagctgtacttctactacgaggagaccaagggcctgacctgcaagggcatcagatgcgagaagcagaacaacgccttcagcaccctgttcgagaccctgcagagcctgttctggagcatcttcggcctgatcaacctgtacgtgaccaacgtgaaggcccagcacgagttcaccgagttcgtgggcgccaccatgttcggcacctacaacgtgatcagcctggtggtgctgctgaacatgctgatcgccatgatgaacaacagctaccagctgatcgccgaccacgccgacatcgagtggaagttcgccagaaccaagctgtggatgagctacttcgaggagggcggcaccctgcccacccccttcaacgtgatccccagccccaagagcctgtggtacctgatcaagtggatctggacccacctgtgcaagaagaagatgagaagaaagcccgagagcttcggcaccatcggcagaagagccgccgacaacctgagaagacaccaccagtaccaggaggtgatgagaaacctggtgaagagatacgtggccgccatgatcagagacgccaagaccgaggaggtggccagacagcaggccgccggccccctggagagaaacatccagctggagagcagaggcctggccagcagaggcgacctgagcatccccggcctgagcgagcagtgcgtgctggtggaccacagagagagaaacaccgacaccctgggcctgcaggtgggcaagagagtgtgccccttcaagagcgagaaggtggtggtggaggacaccgtgcccatcatccccaaggagaagcacgccaaggaggaggacagcagcatcgactacgacctgaacctgcccgacaccgtgacccacgaggactacgtgaccaccagactgtag

SEQ ID NO: 51506 - DNA, 2511 bp, Artificial Sequence
  derived and/or modified sequence
atggcccagttctattacaaacgtaatgtcaacgccccatacagggacagaattccactgcgaatagtcagggctgagagcgagctatcgccatccgagaaagcttacttgaatgccgtggaaaagggggattatgcgagcgtcaagaagtctttggaggaggcagaaatctattttaaaataaacatcaactgcattgaccctctggggcgcaccgccctgctgatagccatcgagaacgagaaccttgagcttattgaactcctgcttagttttaatgtctatgtgggcgacgcattgttacacgccataaggaaggaagtggttggggccgtagagctgcttctgaaccacaaaaagccttctggtgagaagcaggtgcccccaatactgctagataaacaattcagcgagttcaccccggacataactcctatcattttagccgcccacaccaataactatgagatcataaaactccttgtgcaaaagggggtgtctgttcctagacctcatgaggtccgatgtaactgtgttgaatgcgtgagcagttctgatgtggattccctccgccattctcggagccgactcaacatctacaaagccctggcctctccttcgctaattgcgctgtcctcagaggacccttttttaactgcctttcagctcagctgggaactgcaggaactgtccaaggttgaaaatgagtttaagtctgagtacgaggagctgtcaaggcagtgcaaacagttcgccaaggatctgttggatcagactcggtctagccgcgagctggagatcattctgaattatcgcgatgacaacagcctgatagaggaacagtcaggaaatgacctcgctcgcttaaaactcgctatcaagtaccgtcagaaagagttcgtcgctcagcctaattgccagcagctgctcgcttccagatggtacgatgagttcccaggctggagaagaaggcactgggccgttaagatggtgacctgcttcatcataggccttctgttcccggtattcagtgtctgttaccttattgcccccaagtccccattgggacttttcatccggaagccgtttattaagttcatttgtcacacagcctcatatttgacttttctgttcctgctgcttctcgcctcacagcatatcgatcggagtgacctcaaccgtcagggcccgccacccaccatcgtggaatggatgatacttccctgggtgctgggatttatttggggcgagattaaacagatgtgggacggaggcctgcaggactatatccacgattggtggaatttgatggatttcgtgatgaactccttatatctggccactatttctttaaagatagttgcctttgtcaaatattcagcacttaacccccgtgaatcttgggacatgtggcatccaactctggtggcagaggcgctctttgcaatagcgaacatcttcagcagtcttaggttgattagcctgttcacagccaacagccatcttggtcctctgcaaatatcgttaggacggatgttattggatatccttaagttcctcttcatttactgtcttgtactgttagcctttgccaatggcctgaatcagttatacttttactacgaggagaccaagggcctgacctgcaagggtatccgttgcgaaaaacagaacaacgcgttttcgacacttttcgagacactccaatcgttgttctggtccattttcggcctgatcaacctgtacgttactaacgtgaaagcgcaacacgaattcacagagtttgtgggggctacaatgttcgggacatacaacgtcatttccttagtggtgctccttaatatgctgatagccatgatgaacaacagctaccagctgatcgccgaccacgcagatatagagtggaagttcgcccggacaaaattgtggatgtcctatttcgaagagggtggtacattgccaactccttttaacgtgataccaagcccaaagagcttgtggtatttgatcaagtggatatggacccatctctgcaaaaaaaagatgcgacgtaagcccgagtcttttggcaccatcggccgccgcgcagccgataacctccgcagacatcaccagtatcaagaagtgatgcgcaaccttgtcaagcgctatgtcgccgctatgatccgggatgctaaaacagaggaagtggccaggcagcaggctgccggccctcttgagaggaatatacaactcgagtccagggggctggcttccagaggcgatctgtccattcctggactctccgaacagtgtgtattggtggaccatcgggaacgcaacactgacacgctcggtctgcaggtgggaaagcgtgtttgtccattcaagtcagaaaaagtggtggtggaggatactgtgccaattatccccaaggaaaagcatgctaaagaggaggattcttccatcgattatgatctgaatctcccagacacggtgactcacgaggattacgttacgacaagactatag

SEQ ID NO: 51507 - DNA, 2511 bp, Artificial Sequence
  derived and/or modified sequence
atggcacagttttattataagcgcaatgtgaatgccccgtatagggatcgcatacccctccggatcgtccgggccgagtctgagctgagtccctctgagaaggcttacctgaacgccgtagaaaagggggactatgcaagcgtcaagaagagcctggaagaagcagagatttatttcaagatcaatatcaattgcattgatccattgggcagaactgcccttttgatcgctatcgagaatgaaaacctggagttaattgaactgcttcttagtttcaatgtctacgtgggagacgccctcttgcacgcaattaggaaagaggtggttggggcggtcgaactgctcctcaatcacaagaagcccagcggtgagaaacaggtgcctccgatcttactagataagcagttctccgagtttactccggacatcacacccatcattttagccgcccatactaataactatgaaataattaagttgctggtacagaaaggggtttctgtcccgcggccccatgaagtcagatgtaattgcgtcgagtgcgtgtcctcatctgatgttgattccctaaggcactcccgtagtaggttgaatatctataaagccctggcaagccccagcctcatcgccctgtccagtgaggacccctttctaactgcattccagctgtcctgggaactccaagaactgtcaaaggtggaaaatgagttcaaatctgaatatgaggagctctctcgccaatgtaagcagtttgccaaagatcttctggatcaaacgagatcatcacgagagctggaaattattttaaactacagggacgataattccctgatcgaggaacaatcaggcaatgacttggcacgcctcaaactggccatcaaatatcgacagaaagagtttgtcgctcagccaaattgccagcagcttttggcttctagatggtatgatgagttccctggatggcgtcgcagacactgggcggtcaagatggtcacatgcttcatcattggcctgttattccccgttttttcagtctgctatctgatcgctcccaaatcccctctcgggttgtttatccgcaagccattcatcaaattcatttgtcacactgccagctatcttacttttttattcctgctgttgcttgcttcacaacacattgacaggtccgacttgaacaggcagggtccccctcctacaattgttgaatggatgatccttccctgggttctggggttcatctggggtgagatcaagcagatgtgggacgggggcttacaggattatatccatgattggtggaacctcatggattttgtcatgaattctctctatctggccaccataagccttaagattgttgcctttgttaagtatagcgctctgaaccctagagaaagctgggacatgtggcatccaacactggttgcagaggccctcttcgcaatcgccaacatcttctccagcttaagactgatcagtctgtttactgcgaatagtcacctggggcccctccaaataagtctggggaggatgctcttggacattctgaagtttctcttcatctactgtcttgtcttgctggccttcgccaacggattgaatcagctatacttctattacgaagaaaccaaggggctgacttgcaagggtatcaggtgcgaaaaacaaaacaatgccttcagcaccctgtttgaaacattgcagagtctcttctggagcattttcggactgatcaacctttacgttaccaacgttaaggcccagcacgaatttaccgagttcgtcggggccaccatgttcggtacgtacaatgtaatctctctggttgtgttactgaacatgctgatcgcaatgatgaacaactcctaccaactgatcgcggaccacgccgacatcgagtggaaattcgctaggactaaattgtggatgtcttatttcgaagagggcggcacattgcctacccccttcaacgtgattccatcccccaaatctctgtggtatctcattaaatggatatggacgcacctgtgcaagaagaaaatgagaagaaagccagagtcatttggcacaataggccgcagggccgccgataatctgaggcggcatcaccaataccaggaggttatgaggaatctggtgaaacgctacgtagccgccatgatccgtgacgcgaaaacggaggaggtggctcgccagcaagcagctggtcccctagagaggaatatccagttagagagcagaggcttggcttcacgtggcgaccttagcataccgggccttagcgaacaatgtgtcctcgtcgatcaccgcgagaggaataccgacacactaggactgcaggttgggaaacgggtttgccccttcaaatctgagaaggtcgtggtggaggacaccgtgccaatcattcctaaggagaagcacgcaaaggaagaagattctagcatagactacgatctgaatcttcctgacaccgtgacccatgaagattacgtaaccaccaggctgtag

SEQ ID NO: 51508 - DNA, 2511 bp, Artificial Sequence
  derived and/or modified sequence
atggcccagttctactacaagagaaatgtgaatgccccctacagagaccgcatccccctgcgcatcgtgcgggcagagagcgagctgagccccagcgagaaggcctacctgaatgctgtggagaagggggactatgcctctgtgaagaagagcctggaggaggccgagatctacttcaagatcaacatcaactgcatcgaccccctgggccgcacagccctgctgattgccattgaaaatgaaaacctggagctgattgagctgctgctgtccttcaacgtgtatgtgggagatgccctgctgcacgccatcaggaaggaggtggtgggcgctgtggagctgctgctgaaccacaagaagcccagcggggagaagcaggtgccccccatcctgctggacaagcagttcagcgagttcaccccagacatcacccccatcatcctggccgcccacaccaacaactatgagatcatcaagctgctggtgcagaagggcgtgtctgtgccccggccccatgaggtgcgctgcaactgtgtggagtgtgtgagcagcagtgatgtggacagcctgcggcacagccgcagccggctgaacatctacaaggccctggccagccccagcctgattgccctgagcagcgaggaccccttcctgacagccttccagctgtcctgggagctgcaggagctgagcaaggtggagaatgagttcaagtcagaatatgaggagctgagccggcagtgcaagcagtttgccaaggacctgctggaccagaccaggagcagccgggagctggagatcatcctgaactacagagatgacaacagcctcatcgaggagcagagcggaaatgacctggcccggctgaagctggccatcaagtaccggcagaaggagtttgtggcccagcccaactgccagcagctgctggccagccgctggtatgatgagttccctggctggaggagaagacactgggccgtgaagatggtgacctgcttcatcatcggcctgctcttccctgtgttttctgtgtgctacctgattgcccccaagagccccctgggcctcttcatcaggaagcccttcatcaagttcatctgccacacagccagctacctgaccttcctgttcctgctgctgctggccagccagcacatcgacagaagtgacctgaaccggcagggccccccacccaccatcgtggagtggatgatcctgccctgggtgctgggcttcatctggggcgagatcaagcagatgtgggatggcggcctgcaggactacatccatgactggtggaacctgatggactttgtgatgaacagcctgtacctggccaccatcagcctgaagatcgtggcctttgtgaagtacagcgccctgaacccccgggagagctgggacatgtggcaccccaccctggtggccgaggccctgtttgccatcgccaacatcttcagcagcctgcggctcatcagcctcttcaccgccaacagccacctgggccccctgcagatcagcctgggccgcatgctgctggacatcctgaagttcctgttcatctactgcctggtgctgctggcctttgccaacggcctgaaccagctgtacttctactatgaggagaccaagggcctgacctgcaagggcatccgctgtgagaagcagaacaatgccttcagcaccctgtttgagaccctgcagagcctcttctggagcatcttcggcctcatcaacctgtatgtgaccaacgtgaaggcccagcacgagttcacagaatttgtgggcgccaccatgtttggcacctacaacgtcatcagcctggtggtgctgctgaacatgctgattgccatgatgaacaacagctaccagctgattgctgaccatgctgacatcgagtggaagtttgcccggaccaagctgtggatgagctactttgaggagggcggcaccctgcccacccccttcaacgtcatccccagccccaagagcctgtggtacctgatcaagtggatctggacccacctgtgcaagaagaagatgaggaggaagccagagagctttggcaccatcggccggcgggctgctgacaacctgcggcggcaccaccagtaccaggaggtgatgaggaacctggtgaagagatatgtggccgccatgatcagagatgccaagacagaggaggtggcccggcagcaggccgccggccccctggagaggaacatccagctggagagccggggcctggccagcagaggagacctgagcatccctggcctgtctgagcagtgtgtgctggtggaccaccgggagaggaacacagacaccctgggcctgcaggtgggcaagagggtgtgccccttcaagtctgagaaggtggtggtggaggacacagtgcccatcatccccaaggagaagcacgccaaggaggaggacagcagcattgattatgacctgaacctgcctgacacagtgacccatgaagattatgtgaccacccggctgtag

SEQ ID NO: 51509 - DNA, 2511 bp, Artificial Sequence
  derived and/or modified sequence
atggcccagttctactacaagcggaacgtgaacgccccctaccgggacaggattccactgcggattgtgagggcagaaagcgagcttagtccatctgaaaaagcttacctgaacgcagtggagaagggggattatgcgagcgtgaagaagtctctcgaggaggctgagatttacttcaagatcaacataaactgcatagatcccctcggtcgcactgccctgcttattgccatcgagaacgaaaacctggaattaatcgaattattactctcttttaacgtgtatgtgggagacgcccttctgcacgcgatacgaaaagaagtggttggcgccgtggaactgttactgaatcacaagaaaccaagcggggaaaaacaggttccaccaatcctgctcgacaaacaatttagtgaattcacacctgacataacgcccatcatattggccgcccacacaaacaattatgaaatcattaagttattggtgcagaagggggtctccgttcctaggcctcacgaggtacggtgcaattgcgtagaatgtgtctcctcttcagacgtggatagtcttcgccactcaaggagtcggctgaacatatataaagccctggcttcgccctctcttatcgctctgtccagcgaagaccctttcttgacagcctttcagttaagctgggagctccaggaactttcaaaggtggagaatgagtttaaatccgagtacgaggagctgtccagacagtgtaagcagtttgctaaagatcttcttgatcagacgcggagttcccgcgagctggagattattctgaactaccgcgatgacaatagcctcattgaagaacagagcggaaacgatctggcacgcctgaagttagccatcaaatatcgtcaaaaggaattcgtagcacagccaaattgccagcagctcctggccagcaggtggtacgacgaattccccggttggcgacggcgccactgggcagtgaaaatggtgacatgttttatcatagggcttctcttccctgtcttctccgtatgttaccttattgcccccaagagcccattggggctctttattagaaagccttttataaagtttatttgtcacaccgcatcttacctgacgtttttgttcctgctgttgctagcatcgcaacacatcgatagatcagacctgaacaggcagggcccaccacccacaatcgtcgaatggatgattctgccatgggtgttaggtttcatctggggagaaataaagcagatgtgggatggaggtctccaggattatattcacgactggtggaacctaatggacttcgtcatgaacagcctgtatctagccacaatcagcctaaaaatcgtggcattcgtgaagtatagtgctttgaaccctcgcgagagttgggatatgtggcaccccacactcgtggcggaagccctctttgctattgccaatatcttcagctctctccgcctgatctctttattcacagctaattcccacctagggcccctacagatttccctgggccgcatgctcctcgatattctcaagtttctttttatctactgcttggtgcttctcgccttcgcaaacggcctgaatcagctgtacttctattatgaagaaacaaagggccttacatgtaagggaattcgttgtgagaagcagaataacgccttctcaacactatttgaaactctccagtctttgttttggtccatttttggacttatcaatctctacgtgactaacgtaaaggcacagcacgagttcacagaatttgtaggcgcaactatgtttggaacatacaacgtgatttctttagttgtcctgcttaacatgctgatcgccatgatgaacaacagttatcagctaattgccgatcacgctgatatcgagtggaaattcgccaggaccaaactttggatgtcgtattttgaggagggcgggactttgcccacacccttcaacgttataccttctccgaaaagtctgtggtacctgatcaaatggatctggactcatctgtgcaagaaaaaaatgaggaggaaaccagagtcttttggcactatcggacggcgcgcagcggataacctgagaagacatcaccagtaccaggaggtgatgaggaaccttgttaagcgctacgtggcagctatgatacgggacgcaaagaccgaagaggtcgctaggcagcaagctgctggcccattagaaagaaacattcaactggagtcacgaggtcttgctagcagaggggacctctcaatcccaggcctctctgagcagtgcgttcttgtagaccatcgggaacgaaatactgacacactggggctccaggtgggaaaacgcgtgtgcccatttaagagtgaaaaagtagtggtggaggacaccgtaccaatcattccaaaagaaaaacacgctaaggaggaagatagttcaatcgactatgatttgaacctacctgatacagtgacccacgaagactatgtcacaacgaggctgtag

SEQ ID NO: 51510 - DNA, 2511 bp, Artificial Sequence
  derived and/or modified sequence
atggcccagttctactacaagcggaacgtgaacgccccctaccgggatcgcatccccctgcggatcgtgcgggccgagagtgaactgtctcccagcgaaaaagcatatctgaacgcagttgagaaaggagactatgcttccgtgaaaaaatctcttgaggaagctgagatttactttaaaatcaacattaactgcattgaccctttgggtcgcacagcactgctgattgctatagaaaacgagaatctggaattgatcgagctgctcttgtcctttaatgtatatgttggtgacgcactgctccatgccattcgaaaggaggtcgtgggcgccgtagaactactcctgaaccacaaaaagcctagcggtgagaaacaggttccgccaattctgttggataaacagttttcagaattcaccccagatattacccccatcatcctggctgctcataccaataattatgagatcattaagctgttagtgcagaaaggagtttctgtgcccagaccacatgaagtccgatgcaattgtgtggaatgcgtctcttcatcagatgtggattctcttaggcactcaagatctagactaaatatttataaagccctggctagtccatccttaattgcgttaagcagcgaagaccctttcctgactgccttccagctttcttgggagctccaggagctgtcaaaagtggaaaatgagttcaagagtgagtacgaagagctgagtagacagtgcaaacaatttgcgaaggacctcttagatcaaacgcgtagttcacgtgaactagagattatcctgaactaccgtgatgacaactcgctgattgaagaacagagcggaaacgacctggctcgcctgaagctggccatcaagtatcgccaaaaagaatttgtggcccaacctaattgccagcaactgctggccagccgttggtatgatgaattcccaggctggcgtcgccgccactgggccgtgaagatggtgacctgctttattataggactcctattccccgtgttttccgtatgctacctgattgcacctaagagccctctgggactgttcatccggaagccattcatcaaattcatctgccacactgccagctatctgacctttttgtttctattactgctggcgtcccagcatattgaccgatcggatttaaatcggcagggccctccacccaccatcgtcgagtggatgattctgccatgggttctgggtttcatatggggagagatcaagcaaatgtgggacgggggtctccaggactatatccatgattggtggaacctgatggatttcgtaatgaacagcctgtacttggcgactattagtcttaagatcgttgcgttcgtgaaatacagtgcactcaatccccgtgagagttgggatatgtggcaccccactctggttgctgaagctctgtttgcaattgctaatattttctcctcactccgcctcatcagcttgtttacagctaacagccatctaggccctctccagatttcactcgggcgtatgctgctcgatattctgaaatttttattcatctattgtctcgttttgttagcattcgcaaacggcctgaaccaactgtacttctactatgaagaaactaaaggtctaacttgcaagggaatcagatgtgagaagcaaaataatgctttttctaccctctttgagactcttcagtctttattttggagcattttcggtctcataaacctgtatgtgaccaacgtgaaagcgcagcacgagttcaccgagtttgtgggagccaccatgtttggcacatacaacgtaatttctcttgtcgtccttctgaacatgctgattgcaatgatgaataatagctaccagctaatcgcagatcatgccgatatcgagtggaaattcgcgagaactaagctctggatgtcatactttgaggagggtgggactctccccaccccttttaacgtcattccttctccgaaatccctctggtacctgatcaagtggatttggactcacctttgtaagaagaaaatgcgcaggaaacccgaaagctttgggacaatcggaagacgagccgccgataacctgcggcgtcatcatcaatatcaggaggttatgcgaaacctggtgaagaggtatgtcgccgccatgatccgcgacgcaaaaacagaagaggtcgctagacagcaagccgctggaccacttgagcggaacatccagctcgagagtagaggcctggcctccaggggcgatctgagcattcctggcttgagcgaacaatgcgtcctggtggaccatagagaacgaaataccgacactctgggtctacaggtgggcaaacgcgtgtgccctttcaaaagcgaaaaggtggtggtagaggacactgtacctataatcccgaaggagaagcacgccaaagaggaagacagctctatagactatgatctcaacttgccagatactgtgacccatgaggactacgtcacaacgcggttatag

SEQ ID NO: 51511 - DNA, 2511 bp, Artificial Sequence
  derived and/or modified sequence
atggcacagttctattacaagaggaacgtaaacgccccatacagggaccgcattcctctccgcatcgtcagagccgagtcagagctaagtccatctgaaaaagcataccttaacgctgtggaaaagggggactacgcgtccgtgaaaaagagtctcgaagaagcagagatctatttcaagatcaatattaactgtattgatcctctgggcagaaccgctttgctgatcgccatagaaaatgaaaacctggaattaattgaactactgttatcttttaacgtgtacgtgggcgacgccctcctgcatgcaatcaggaaagaagttgttggagcagtggagcttttgctcaatcacaagaagccttctggagaaaagcaggtgccgccaattctcttggataaacagttcagcgaattcacaccagatatcacaccgatcatccttgccgctcataccaataactatgagataataaaattattagtgcaaaagggagtcagtgttcccaggccccatgaggtacggtgcaactgtgttgagtgcgtgagttctagcgatgtggacagcctccggcattcacggtccagattgaatatatacaaggcactggctagtcctagcctgatcgcattgtcttctgaagatcctttcttaacggccttccagctctcatgggagctgcaggagctttcaaaggtggagaatgagttcaaatcggagtatgaagagttgagcagacagtgcaagcagttcgctaaggatctgctcgatcagaccagatcatcacgcgaactggagattattcttaactatcgagacgacaattcactcatcgaggagcagagcggcaatgatctagcacgtctgaaactggcgattaaatatagacagaaagaattcgtggcccagcccaattgtcagcagctgttggcctcacgatggtacgacgagttccccggttggcgcagaaggcactgggccgtgaaaatggttacctgcttcatcatcgggctgttattcccggtattcagtgtctgctacctcattgcacctaaaagtccactggggctgttcatccgtaaacctttcattaagtttatctgccatacagctagctatctcacctttttatttttgctgttgctcgcttctcagcatatcgaccgttcagacctgaatagacaggggccacctcccactatcgtcgaatggatgatcctcccatgggtgctaggattcatttggggtgaaatcaagcagatgtgggacggcggtctgcaggattacatccacgattggtggaatctcatggacttcgtcatgaacagtctttacctcgcaaccatctctcttaagatagtcgcctttgtgaagtactctgccctcaatccaagagagtcttgggatatgtggcatccaaccctggttgccgaggccctgtttgcgatcgccaacatattctcctctttgcgtctaatatccctgttcaccgccaactctcacttggggcctctccaaatttcattgggacgtatgctactggatatactgaagttcctctttatctattgccttgtcttgctcgcattcgcaaacgggctgaatcagctctacttctattatgaggagaccaagggattgacatgtaagggcataagatgcgagaaacaaaataatgcattttccactctcttcgaaaccctgcagtcgctgttctggtccattttcggactgatcaacctgtacgtcaccaacgtcaaggcccagcatgagtttaccgaatttgtcggcgctaccatgtttggcacttacaacgtaatctctctggtagtactcctcaatatgctaattgccatgatgaataacagttatcagttgattgcagaccacgctgatatcgaatggaagtttgctaggacaaaactgtggatgtcctactttgaggaaggcggaacattaccaacaccgttcaatgtaatccctagtccaaagtctctttggtatttgattaagtggatctggactcacctgtgcaaaaagaagatgcgcagaaagcccgagagttttggtacaattgggaggagagccgcagataacctacggagacatcaccagtatcaagaggtcatgcgtaacctggtgaagaggtatgtggctgccatgatacgcgacgcaaagacagaggaggtcgctcgacagcaggctgctgggccactcgaaagaaacattcaactggagagccggggacttgctagtcggggagatctctctataccaggacttagtgagcaatgcgtcttagtcgatcatagggaacgcaatacagacaccctgggcctacaggtgggcaagcgggtgtgcccatttaagtctgagaaagtggtggtggaggatactgtgcctataattcctaaggaaaagcatgcaaaggaggaggacagttcaattgactacgatctgaacctcccagacacagttacacacgaggactacgtgaccacccgcctttag

SEQ ID NO: 51512 - DNA, 2511 bp, Artificial Sequence
  derived and/or modified sequence
atggcccagttttactataagcgcaatgtaaacgcaccttatagagatcggatccccctcagaattgttagggccgagagcgagctatccccaagcgagaaagcttacctgaatgcagttgagaaaggtgattacgcatcagtgaaaaagagtctggaggaagccgaaatatactttaaaattaatatcaactgtattgacccactcggcaggaccgcgctcttaatcgctattgaaaacgagaacctggaactcattgaactgttactctccttcaacgtctatgtcggcgacgctctgctccatgccatccgaaaggaggttgtgggtgccgttgagctgttgctgaaccacaaaaaaccttccggagagaaacaggtgccccctattctgcttgataaacagttttcggagtttacccccgacatcacccccattattttagctgctcacaccaacaactacgagataatcaagctactggtgcagaagggcgtgagtgttccgaggccccacgaagttagatgtaactgcgtggaatgtgtaagttcatctgatgtagattccttgcgccattcacgatcaaggctcaacatatataaggcgttagctagtccatcattgatcgcactctctagtgaagatccattcctgacggcgttccagttgagctgggaacttcaagagttgagcaaagtagagaatgagttcaagagcgaatatgaggagctttcgaggcaatgtaaacaatttgcgaaggacctgcttgatcagactcggtcatcacgcgaactggaaattattctcaactatcgggatgacaattctctaatagaggagcagagtggcaacgatctagctcgacttaagctggcaattaaatatcgacagaaggagttcgtggctcagcctaattgtcagcagctgctggcttcaaggtggtacgatgaatttcccggatggcggaggcggcattgggctgtcaaaatggtaacctgtttcataattggccttctttttcctgtgttttcagtctgttacttgatcgcacccaagtctcccctcggcctgttcatcagaaaaccgtttatcaaattcatatgccataccgcgtcatatcttaccttcctgtttctgcttctgctggcaagtcagcatatcgacaggtccgatctcaatcgccaggggccacccccaactattgtggaatggatgatccttccctgggtgctgggtttcatctggggcgagattaagcagatgtgggacggaggtctgcaggattatatccacgactggtggaaccttatggatttcgtgatgaatagcctgtacctggccacaatcagccttaagattgtcgcctttgttaagtactctgcactgaaccctagggaaagctgggatatgtggcaccctaccctagttgcggaagccctcttcgccatcgcaaatattttctcatctctgcgcttaatcagcctgtttacggctaactcacatttggggccactccaaatatctcttggacgcatgctgctggacatattaaagtttctgtttatctactgcctggtgctcctcgcattcgcaaacggactgaaccaactgtacttctactatgaagagaccaaaggcctcacctgcaaagggatacggtgcgagaaacagaacaacgcttttagcaccctgtttgagacattacagagcctattttggagcatctttgggttgataaacctgtacgtgaccaatgtgaaagcccagcatgagtttaccgaatttgtgggagctacaatgttcgggacctataacgtaatcagtttagtggtactgttgaatatgctcattgccatgatgaataattcatatcagttaatcgccgatcatgcagacatcgagtggaaatttgctcggacaaaactgtggatgtcctatttcgaggagggtggaacacttcctacaccatttaatgtcatcccaagtcctaaatcattgtggtacctgattaagtggatctggacacatctgtgcaaaaaaaagatgcgcagaaagccagaatccttcggaaccattggaaggcgcgcagctgacaacctacgcagacatcaccagtaccaggaggtgatgcgtaatctggtaaagcgctacgtggcagccatgattcgggatgccaagaccgaggaggtcgccagacaacaggctgcaggccctctcgagcggaacatccagcttgagtcacggggactcgcctctcgaggcgatctgtctatccctggcctgtccgaacagtgcgtcttggtggaccaccgggaacgcaataccgacacactgggactccaggttgggaagcgcgtctgtccctttaaatccgaaaaggttgtggtggaggacacagtgcccataatccccaaggaaaagcacgccaaagaggaggattcatccatcgactacgacctaaatttacctgacaccgtgactcacgaagattatgtcaccacccgactttag

SEQ ID NO: 51513 - DNA, 2784 bp, Artificial Sequence
  derived and/or modified sequence
cttcgctttcagagcatcctcactccgcccagttcggtgccagctgcgtgggctccagcttcgatcgttttccttggaatgctccaaaactcagcagcgactaagggaattccattggaatttgccgggcgtgctctcaccccgcacggcacccgcgccgtcagtcctcggatcccatcacttcagcccgaagattgcaactttgcagagacgaagaaatagcatggcatgaaacatggctcagttctattacaaaagaaatgttaatgctccctatagagaccgcatccctctaaggatagtaagagcagaatcagaactctcgccatcagaaaaagcctacttgaatgctgtggaaaagggagattatgccagtgtcaagaaatccctagaggaagctgaaatttattttaaaatcaatattaattgcattgatcctctcggaagaactgctctcctcattgcaattgaaaatgagaacttggagctcatcgaactactcttaagctttaatgtctatgttggagatgctctattacatgctatcagaaaagaagtcgtcggagctgttgagctgttattgaaccacaaaaaacctagtggagaaaaacaggtgcctcctatactccttgataagcagttctctgaattcactccagacattacaccaatcattttggcagcccatacaaataattatgagataataaaactcttggttcagaaaggagtctcagtgcctcgaccccacgaggtccgctgtaactgtgtggaatgcgtgtccagttcagatgtggacagcctccgtcactcacgctccagactcaacatctacaaggccttggccagtccctctctcattgcactgtcaagcgaagatccttttctcacagcctttcagttaagttgggaacttcaggaactgagcaaggtggaaaatgaattcaagtcggagtatgaagagctgtcacggcagtgcaaacaatttgctaaggacctactggatcagacgagaagttccagagaactggaaatcattcttaattaccgagatgacaatagtctcatagaagaacaaagtggaaatgatcttgcaagactaaaattggccattaagtaccgtcaaaaagagtttgttgcccagcccaattgtcaacagctgctggcatctcgctggtacgatgagtttccaggctggaggagaagacactgggcagtgaagatggtgacatgtttcataataggacttctttttcctgtcttctctgtgtgctacctgatagctcccaaaagcccacttggactgttcatcaggaagccatttatcaagtttatctgccacacagcctcctatttgacttttttgttcctgctgctgcttgcctctcagcacatcgacaggtcagacttgaacaggcaaggtccaccaccaaccatcgtcgagtggatgatattaccgtgggtcctgggcttcatatggggagaaattaaacagatgtgggatggcggacttcaggactacatccatgattggtggaatctaatggactttgtaatgaactccttatatttagcaacaatctccttgaaaattgttgcatttgtaaagtacagtgcccttaatccacgagaatcatgggacatgtggcatcccactctggtggcagaggctttatttgctattgcaaacatcttcagttctctgcgtctgatctcactgtttactgcaaattctcacctgggacctctgcaaatatctctgggaagaatgctcctggacattttgaagtttctattcatatactgccttgtgttgctagcatttgcaaatggcctaaatcaattgtacttctattatgaagaaacgaaagggttaacctgcaaaggcataagatgtgaaaagcagaataatgcattttcaacgttatttgagacactgcagtccctgttttggtcaatatttgggctcatcaatttatatgtgaccaatgtcaaagcacagcatgaatttactgagtttgttggtgccaccatgtttgggacatacaatgtcatctctctggttgttctactcaacatgttaatagctatgatgaataattcttaccaactgattgctgaccatgcagatatagaatggaaatttgcacgaacaaagctttggatgagttattttgaagaaggaggtactctgcctactcccttcaatgtcatcccgagccccaagtctctctggtacctgatcaaatggatctggacacacttgtgcaagaaaaagatgagaagaaagccagaaagttttggaacaatagggaggcgagctgctgataacttgagaagacatcaccaataccaagaagttatgaggaacctggtgaagcgatacgttgctgcaatgattagagatgctaaaactgaagaagttgctcgtcaacaggctgcaggaccacttgagagaaatattcaactggaatctcgaggattagcttcacggggtgacctgagcattcccggtctcagtgaacaatgtgtgttagtagaccatagagaaaggaatacggacacactggggttacaggtaggaaagagagtgtgtccattcaagtcagagaaggtggtggtggaggacacggttcctataataccaaaggagaaacatgcaaaagaagaggactctagtatagactatgatctaaacctcccagacacagtcacccacgaagattacgtgaccacaagattgtgatacttgaaggaggaagcgtttaccatacacatacgtat

SEQ ID NO: 51514 - DNA, 3369 bp, Artificial Sequence
  derived and/or modified sequence
agtcgcccagagaagcgggagtgggagaagctttgagagttgcaggggactacttttttccggtcgggcggcgggcctcatgggtgcttgtttaccgggctgggagcagggcattcaaaagctgggtgtcggagcgcactgaagtccaacacgcctgcagagaccgccctaagcctggaggtgtgtctggcttgcatccagaaccacagggtggattctcgccaccgacttggctggatgacggctggctggtggtgagctcccctgcccactggctgacctcaagcagttggccccggtaggtggaggctattcgagggggacaagctggggacgcagcgtcagctcctgccagcgcgcgggtctcctccacctccaagcagtgtggtgcgtgggacgcgcatcttcccggactatccctttccagcgcggtctgtgcggaccccgagcccggcagccaccagggacggagggcggggtgcctttctctgggctcatccgctgtcagccgtgggaactcttaactttatccagagggatctgtgcaggcgggggtgggagaggttctcctcccctggcggttacctccccctcccgggccgcccctcccccgcctcccatggcttcgctttcagagcatcctcactccgcccagttcggtgccagctgcgtgggctccagcttcgatcgttttccttggaatgctccaaaactcagcagcgactaagggaattccattggaatttgccgggcgtgctctcaccccgcacggcacccgcgccgtcagtcctcggatcccatcacttcagcccgaagattgcaactttgcagagacgaagaaatagcatggcatgaaacatggctcagttctattacaaaagaaatgttaatgctccctatagagaccgcatccctctaaggatagtaagagcagaatcagaactctcgccatcagaaaaagcctacttgaatgctgtggaaaagggagattatgccagtgtcaagaaatccctagaggaagctgaaatttattttaaaatcaatattaattgcattgatcctctcggaagaactgctctcctcattgcaattgaaaatgagaacttggagctcatcgaactactcttaagctttaatgtctatgttggagatgctctattacatgctatcagaaaagaagtcgtcggagctgttgagctgttattgaaccacaaaaaacctagtggagaaaaacaggtgcctcctatactccttgataagcagttctctgaattcactccagacattacaccaatcattttggcagcccatacaaataattatgagataataaaactcttggttcagaaaggagtctcagtgcctcgaccccacgaggtccgctgtaactgtgtggaatgcgtgtccagttcagatgtggacagcctccgtcactcacgctccagactcaacatctacaaggccttggccagtccctctctcattgcactgtcaagcgaagatccttttctcacagcctttcagttaagttgggaacttcaggaactgagcaaggtggaaaatgaattcaagtcggagtatgaagagctgtcacggcagtgcaaacaatttgctaaggacctactggatcagacgagaagttccagagaactggaaatcattcttaattaccgagatgacaatagtctcatagaagaacaaagtggaaatgatcttgcaagactaaaattggccattaagtaccgtcaaaaagagtttgttgcccagcccaattgtcaacagctgctggcatctcgctggtacgatgagtttccaggctggaggagaagacactgggcagtgaagatggtgacatgtttcataataggacttctttttcctgtcttctctgtgtgctacctgatagctcccaaaagcccacttggactgttcatcaggaagccatttatcaagtttatctgccacacagcctcctatttgacttttttgttcctgctgctgcttgcctctcagcacatcgacaggtcagacttgaacaggcaaggtccaccaccaaccatcgtcgagtggatgatattaccgtgggtcctgggcttcatatggggagaaattaaacagatgtgggatggcggacttcaggactacatccatgattggtggaatctaatggactttgtaatgaactccttatatttagcaacaatctccttgaaaattgttgcatttgtaaagtacagtgcccttaatccacgagaatcatgggacatgtggcatcccactctggtggcagaggctttatttgctattgcaaacatcttcagttctctgcgtctgatctcactgtttactgcaaattctcacctgggacctctgcaaatatctctgggaagaatgctcctggacattttgaagtttctattcatatactgccttgtgttgctagcatttgcaaatggcctaaatcaattgtacttctattatgaagaaacgaaagggttaacctgcaaaggcataagatgtgaaaagcagaataatgcattttcaacgttatttgagacactgcagtccctgttttggtcaatatttgggctcatcaatttatatgtgaccaatgtcaaagcacagcatgaatttactgagtttgttggtgccaccatgtttgggacatacaatgtcatctctctggttgttctactcaacatgttaatagctatgatgaataattcttaccaactgattgctgaccatgcagatatagaatggaaatttgcacgaacaaagctttggatgagttattttgaagaaggaggtactctgcctactcccttcaatgtcatcccgagccccaagtctctctggtacctgatcaaatggatctggacacacttgtgcaagaaaaagatgagaagaaagccagaaagttttggaacaatagggaggcgagctgctgataacttgagaagacatcaccaataccaagaagttatgaggaacctggtgaagcgatacgttgctgcaatgattagagatgctaaaactgaagaagttgctcgtcaacaggctgcaggaccacttgagagaaatattcaactggaatctcgaggattagcttcacggggtgacctgagcattcccggtctcagtgaacaatgtgtgttagtagaccatagagaaaggaatacggacacactggggttacaggtaggaaagagagtgtgtccattcaagtcagagaaggtggtggtggaggacacggttcctataataccaaaggagaaacatgcaaaagaagaggactctagtatagactatgatctaaacctcccagacacagtcacccacgaagattacgtgaccacaagattgtga

SEQ ID NO: 51515 - protein, 804 aa, Artificial Sequence
  derived and/or modified sequence
MAQFYYKRNVNAPYRDRIPLRIVRAESELSPSEKAYLNAVEKGDYASVKKSLEEAEIYFKININCIDPLGRTALLIAIENENLELIELLLSFNVYVGDALLHAIRKEVVGAVELLLNHKKPSGEKQFVAQPNCQQLLASRWYDEFPGWRRRHWAVKMVTCFIIGLLFPVFSVCYLIAPKSPLGLFIRKPFIKFICHTASYLTFLFLLLLASQHIDRSDLNRQGPPPTIVEWMILPWVLGFIWGEIKQMWDGGLQDYIHDWWNLMDFVMNSLYLATISLKIVAFVKYSALNPRESWDMWHPTLVAEALFAIANIFSSLRLISLFTANSHLGPLQISLGRMLLDILKFLFIYCLVLLAFANGLNQLYFYYEETKGLTCKGIRCEKQNNAFSTLFETLQSLFWSIFGLINLYVTNVKAQHEFTEFVGATMFGTYNVISLVVLLNMLIAMMNNSYQLIADHADIEWKFARTKLWMSYFEEGGTLPTPFNVIPSPKSLWYLIKWIWTHLCKKKMRRKPESFGTIGRRAADNLRRHHQYQEVMRNLVKRYVAAMIRDAKTEEGLTEENFKELKQDISSFRFEVLGLLRGSKLSTIQSANASKESSNSADSDEKSDSEGNSKDKKKNFSLFDLTTLIHPRSAAIASERHNISNGSALVVQEPPREKQRKVNFVTDIKNFGLFHRRSKQNAAEQNANQIFSVSEEVARQQAAGPLERNIQLESRGLASRGDLSIPGLSEQCVLVDHRERNTDTLGLQVGKRVCPFKSEKVVVEDTVPIIPKEKHAKEEDSSIDYDLNLPDTVTHEDYVTTRL

SEQ ID NO: 51516 - DNA, 2415 bp, Artificial Sequence
  derived and/or modified sequence
atggcccagttctactacaagagaaacgtgaacgccccctacagagacagaatccccctgagaatcgtgagagccgagagcgagctgagccccagcgagaaggcctacctgaacgccgtggagaagggcgactacgccagcgtgaagaagagcctggaggaggccgagatctacttcaagatcaacatcaactgcatcgaccccctgggcagaaccgccctgctgatcgccatcgagaacgagaacctggagctgatcgagctgctgctgagcttcaacgtgtacgtgggcgacgccctgctgcacgccatcagaaaggaggtggtgggcgccgtggagctgctgctgaaccacaagaagcccagcggcgagaagcagttcgtggcccagcccaactgccagcagctgctggccagcagatggtacgacgagttccccggctggagaagaagacactgggccgtgaagatggtgacctgcttcatcatcggcctgctgttccccgtgttcagcgtgtgctacctgatcgcccccaagagccccctgggcctgttcatcagaaagcccttcatcaagttcatctgccacaccgccagctacctgaccttcctgttcctgctgctgctggccagccagcacatcgacagaagcgacctgaacagacagggccccccccccaccatcgtggagtggatgatcctgccctgggtgctgggcttcatctggggcgagatcaagcagatgtgggacggcggcctgcaggactacatccacgactggtggaacctgatggacttcgtgatgaacagcctgtacctggccaccatcagcctgaagatcgtggccttcgtgaagtacagcgccctgaaccccagagagagctgggacatgtggcaccccaccctggtggccgaggccctgttcgccatcgccaacatcttcagcagcctgagactgatcagcctgttcaccgccaacagccacctgggccccctgcagatcagcctgggcagaatgctgctggacatcctgaagttcctgttcatctactgcctggtgctgctggccttcgccaacggcctgaaccagctgtacttctactacgaggagaccaagggcctgacctgcaagggcatcagatgcgagaagcagaacaacgccttcagcaccctgttcgagaccctgcagagcctgttctggagcatcttcggcctgatcaacctgtacgtgaccaacgtgaaggcccagcacgagttcaccgagttcgtgggcgccaccatgttcggcacctacaacgtgatcagcctggtggtgctgctgaacatgctgatcgccatgatgaacaacagctaccagctgatcgccgaccacgccgacatcgagtggaagttcgccagaaccaagctgtggatgagctacttcgaggagggcggcaccctgcccacccccttcaacgtgatccccagccccaagagcctgtggtacctgatcaagtggatctggacccacctgtgcaagaagaagatgagaagaaagcccgagagcttcggcaccatcggcagaagagccgccgacaacctgagaagacaccaccagtaccaggaggtgatgagaaacctggtgaagagatacgtggccgccatgatcagagacgccaagaccgaggagggcctgaccgaggagaacttcaaggagctgaagcaggacatcagcagcttcagattcgaggtgctgggcctgctgagaggcagcaagctgagcaccatccagagcgccaacgccagcaaggagagcagcaacagcgccgacagcgacgagaagagcgacagcgagggcaacagcaaggacaagaagaagaacttcagcctgttcgacctgaccaccctgatccaccccagaagcgccgccatcgccagcgagagacacaacatcagcaacggcagcgccctggtggtgcaggagccccccagagagaagcagagaaaggtgaacttcgtgaccgacatcaagaacttcggcctgttccacagaagaagcaagcagaacgccgccgagcagaacgccaaccagatcttcagcgtgagcgaggaggtggccagacagcaggccgccggccccctggagagaaacatccagctggagagcagaggcctggccagcagaggcgacctgagcatccccggcctgagcgagcagtgcgtgctggtggaccacagagagagaaacaccgacaccctgggcctgcaggtgggcaagagagtgtgccccttcaagagcgagaaggtggtggtggaggacaccgtgcccatcatccccaaggagaagcacgccaaggaggaggacagcagcatcgactacgacctgaacctgcccgacaccgtgacccacgaggactacgtgaccaccagactgtag

SEQ ID NO: 51517 - DNA, 2415 bp, Artificial Sequence
  derived and/or modified sequence
atggcccagttttactataagaggaacgtcaatgccccctacagagacaggatccctcttagaattgtccgcgctgagtcagaactctcccccagcgagaaagcatatctgaatgccgtggagaaaggagattacgcctccgttaaaaagagcctcgaagaggctgaaatctactttaaaattaacattaactgtattgatcctctcgggcgcactgcactgttaatcgctatcgagaacgaaaatctcgaactgattgagcttctgctcagttttaacgtgtacgttggggacgccctgcttcatgccatacgaaaggaggtggtgggggctgtcgaactgctattgaatcataagaaaccttccggcgaaaagcagttcgtggcccagccaaactgccagcaactgctggccagccggtggtatgacgagtttccaggctggcgtaggaggcattgggcggtgaaaatggtaacatgcttcattattggactgctgttcccagtgtttagcgtgtgctatctcatagcccctaaatctccccttggattattcatccgtaagccatttattaaattcatctgtcatacagcctcttatctgacctttctcttccttcttctgcttgcctcacagcatatagacagaagcgatctgaaccgccagggccctcccccaactattgtggaatggatgatattaccctgggtgctgggcttcatatggggggagatcaaacagatgtgggacgggggattacaggactacattcacgattggtggaacctcatggactttgtgatgaatagcctgtacttggccacaattagcctgaagattgtggctttcgtgaagtattcagcacttaatccacgggagtcgtgggatatgtggcatcctactctggtggccgaagcgttgttcgctattgctaacattttcagcagtcttagactaatctctctatttactgcaaattcacacctgggtcctctccaaatcagtctgggacgaatgctgctggacattctaaagttcctctttatttactgccttgtgctgctcgcatttgctaatggattgaaccagttatatttttactatgaggaaaccaagggactgacctgtaagggaattaggtgtgagaagcaaaataatgcatttagtaccctgtttgagaccctccagtcactgttttggagcatcttcggcttgatcaatctttatgtcaccaacgtgaaagcccagcacgagtttactgagttcgtcggagcaacgatgttcggcacttacaacgtgatctcactggtggtgctcttgaatatgcttatcgctatgatgaataactcttaccagttaatcgccgatcacgcagacattgagtggaaattcgcacgtacaaagctgtggatgtcttactttgaggagggcggaaccctgcctactcctttcaatgtgattcccagccctaagagtttatggtatttgataaaatggatatggacacacctttgcaagaaaaagatgcgtcgaaaaccagagtcttttggaacaatcgggagacgggccgccgataacttgcgcagacaccatcagtatcaggaagtgatgcggaacttggtgaaaagatatgtggcagcgatgatccgtgacgctaagactgaggaggggctcaccgaagagaatttcaaagaactgaaacaagatatctcctcctttaggttcgaggtgctgggcctgctcaggggaagcaaactgagcaccatccagtccgcgaatgcttcaaaagagagctctaactcagccgacagcgatgaaaaatctgacagcgagggaaactctaaagataagaaaaagaacttttcgctgttcgacttgactaccctcatccaccccagaagcgctgccattgcaagtgaaagacacaacatttctaatgggtccgcacttgtggtccaagaaccccctcgagaaaagcagcggaaggttaacttcgtgacagatatcaagaactttggtcttttccatagaagaagcaaacagaacgctgctgaacagaatgcaaatcaaattttttccgtgagtgaagaggtggcccgtcagcaagctgccggtccattggaacggaatatccagcttgagtctagagggctcgctagccgtggtgatctgtccataccaggattgtccgagcagtgtgtcttagttgaccatcgagaacggaacaccgataccctgggcctgcaggtaggaaagagggtgtgcccgtttaaaagcgagaaagtggtagtggaagataccgtcccaattatcccaaaagaaaagcacgccaaagaggaagactcctcaattgattacgacctcaatctgcccgacacagtgactcacgaagactacgttaccacacggctctag

SEQ ID NO: 51518 - DNA, 2415 bp, Artificial Sequence
  derived and/or modified sequence
atggcccaattctattacaagcgcaatgtgaacgccccctatagggaccgaattccactgcgcatagtgcgagctgagagcgaactatccccaagcgaaaaagcctacctgaacgccgtggagaaaggtgactacgcttccgtgaagaagagtttggaagaggctgaaatttatttcaaaatcaacattaactgtatcgatcccctggggagaactgcgctgttaatagccatcgagaatgaaaatctcgagttaatcgaactccttctcagctttaacgtctatgtaggtgacgctctcctgcatgctattagaaaggaagtggtgggcgcagtggaactgctgttaaatcacaagaagccttccggtgagaaacagttcgttgcccagccaaattgtcaacagctccttgccagtagatggtacgacgaattcccgggctggcgacggaggcattgggcagtgaaaatggtgacatgcttcatcattggccttctcttccctgtgttctccgtttgctatctgatagccccaaaatctcccctcggcttatttatcaggaaaccattcattaagtttatctgccatacagcatcatatctcacattcttattcctgcttcttctggcctcacaacacatagatagaagcgacctaaatagacagggccctcccccgacgattgtagaatggatgatactgccttgggtccttgggttcatatggggcgagattaagcaaatgtgggacggcgggctgcaggactacattcatgactggtggaacctgatggacttcgtgatgaattctttatacctggccactatctcgttgaaaatcgtcgcattcgttaagtactccgcccttaatccgagggaatcgtgggacatgtggcatccgactctggttgctgaagccctctttgcaattgcgaacatttttagttctctgcgcctgatatctttgttcaccgccaattcccatctgggacctcttcaaatctcactcggccgcatgctcctggacatcttgaagtttctctttatatactgcttagtactccttgccttcgccaatggactgaatcaactatacttctactatgaagaaacgaaggggctgacttgtaagggtattaggtgtgagaaacagaacaacgcgttctcgacattatttgagacgctccaatctcttttctggtcaatttttggactgatcaacctttacgtcactaacgtcaaggcccagcatgaattcactgagtttgtcggagcgactatgtttggcacttataacgttataagtttggtggtgttactgaacatgctgattgccatgatgaacaactcctaccagctgatcgccgatcacgcagacattgagtggaagttcgcaagaactaagctgtggatgtcatacttcgaagagggcggaacgctcccaactccgtttaacgttataccatcaccaaagtcactgtggtaccttatcaagtggatttggacccacttatgcaagaaaaagatgaggcggaagcccgagtcttttggtacaatcgggaggagggctgctgacaaccttcggcgacatcaccagtatcaggaggttatgcgaaatctggtcaagagatacgtcgcagccatgatccgcgatgccaaaacagaggaaggtctgacggaggagaatttcaaggagttgaagcaggatataagctcatttcgcttcgaggtgctgggactgctccgaggatctaagctctccaccatacaatccgcgaacgcgagcaaggagagcagtaacagtgcggacagcgacgaaaagtcagacagtgaaggtaactccaaagacaagaagaaaaacttctccctgtttgatctcacgaccctcatccatccccggtctgcagcgattgcaagcgagaggcataatattagcaatggttcagctttggtggtgcaagagccaccaagagaaaagcagcgcaaggtcaactttgtaaccgacattaaaaatttcgggctgttccaccgccgcagcaagcaaaatgcagccgagcaaaacgctaaccaaatctttagtgtctctgaagaagttgccaggcagcaggcagccggtccattggagagaaacatccagttggaatcacgaggcctggctagccggggggacctaagcatccctggactcagtgagcagtgcgtcctagtggaccatagggagcggaatacagatacacttggcttgcaggtcggaaagagggtctgtcccttcaagtccgagaaggtggttgtggaagatactgttccaatcatccctaaagagaagcatgccaaggaagaggatagctccatcgattacgaccttaacttaccggacacggtgactcatgaagactacgtgactacacgactgtag

SEQ ID NO: 51519 - DNA, 2415 bp, Artificial Sequence
  derived and/or modified sequence
atggcccagttctactacaagagaaatgtgaatgccccctacagagaccgcatccccctgcgcatcgtgcgggcagagagcgagctgagccccagcgagaaggcctacctgaatgctgtggagaagggggactatgcctctgtgaagaagagcctggaggaggccgagatctacttcaagatcaacatcaactgcatcgaccccctgggccgcacagccctgctgattgccattgaaaatgaaaacctggagctgattgagctgctgctgtccttcaacgtgtatgtgggagatgccctgctgcacgccatcaggaaggaggtggtgggcgctgtggagctgctgctgaaccacaagaagcccagcggggagaagcagtttgtggcccagcccaactgccagcagctgctggccagccgctggtatgatgagttccctggctggaggcggcggcactgggccgtgaagatggtgacctgcttcatcatcggcctgctcttccctgtgttttctgtgtgctacctgattgcccccaagagccccctgggcctcttcatcaggaagcccttcatcaagttcatctgccacacagccagctacctgaccttcctgttcctgctgctgctggccagccagcacatcgacagaagtgacctgaaccggcagggccccccacccaccatcgtggagtggatgatcctgccctgggtgctgggcttcatctggggcgagatcaagcagatgtgggatggcggcctgcaggactacatccatgactggtggaacctgatggactttgtgatgaacagcctgtacctggccaccatcagcctgaagatcgtggcctttgtgaagtacagcgccctgaacccccgggagagctgggacatgtggcaccccaccctggtggccgaggccctgtttgccatcgccaacatcttcagcagcctgcggctcatcagcctcttcaccgccaacagccacctgggccccctgcagatcagcctgggccgcatgctgctggacatcctgaagttcctgttcatctactgcctggtgctgctggcctttgccaacggcctgaaccagctgtacttctactatgaggagaccaagggcctgacctgcaagggcatccgctgtgagaagcagaacaatgccttcagcaccctgtttgagaccctgcagagcctcttctggagcatcttcggcctcatcaacctgtatgtgaccaacgtgaaggcccagcacgagttcacagaatttgtgggcgccaccatgtttggcacctacaacgtcatcagcctggtggtgctgctgaacatgctgattgccatgatgaacaacagctaccagctgattgctgaccacgccgacatcgagtggaagtttgcccggaccaagctgtggatgagctactttgaggagggcggcaccctgcccacccccttcaacgtcatccccagccccaagagcctgtggtacctgatcaagtggatctggacccacctgtgcaagaagaagatgaggaggaagccagagagctttggcaccatcggcagaagagctgctgacaacctgcggcggcaccaccagtaccaggaggtgatgaggaacctggtgaagcgctacgtggccgccatgatcagagatgccaagacagaggagggcctgacagaggagaacttcaaggagctgaagcaggacatcagcagcttccgctttgaggtgctgggcctgctgcggggcagcaagctgagcaccatccagagcgccaatgccagcaaggagagcagcaacagcgctgacagtgatgagaagagtgacagcgagggcaacagcaaggacaagaagaagaacttcagcctgtttgacctgaccaccctcatccaccccaggtctgctgccatcgccagcgagcggcacaacatcagcaatggcagcgccctggtggtgcaggagcccccccgggagaagcagaggaaggtgaactttgtgacagacatcaagaactttggcctcttccacagaagaagcaagcagaatgctgctgagcagaatgccaaccagatcttctctgtgtctgaggaggtggcccggcagcaggccgccggccccctggagaggaacatccagctggagagccggggcctggccagcagaggagacctgagcatccctggcctgtctgagcagtgtgtgctggtggaccaccgggagaggaacacagacaccctgggcctgcaggtgggcaagagggtgtgccccttcaagtctgagaaggtggtggtggaggacacagtgcccatcatccccaaggagaagcacgccaaggaggaggacagcagcattgattatgacctgaacctgcctgacacagtgacccatgaagattatgtgaccacccggctgtag

SEQ ID NO: 51520 - DNA, 2415 bp, Artificial Sequence
  derived and/or modified sequence
atggcccagttctactacaagcggaacgtgaacgccccctaccgggaccgcatccccctgcggatagttagggcggagagcgaactgtcaccgtccgagaaagcttatctcaatgccgtagaaaagggcgactacgcttccgttaaaaagagcctagaggaagccgaaatctatttcaagattaacattaactgtattgacccgctggggaggacagcactgctcatcgccattgagaacgaaaacctggagctgattgagctgttactgtcattcaacgtgtatgtgggcgatgccctactgcacgccatcaggaaggaggtcgtgggcgctgtagaattgttgctgaaccacaaaaagccttcaggggagaagcaattcgtggcccagcctaattgtcagcagctcctggctagccggtggtatgatgagtttcctggctggcgccgtcgacactgggccgtgaagatggtgacttgtttcatcatcggcctcctgtttcccgtattctctgtctgctacctgatagctcccaaatccccgcttgggctcttcattagaaaaccgttcattaagttcatctgccacactgctagctatctgacattcctatttctgctccttcttgcttcgcagcatatagatcggtccgacctgaacagacaaggcccaccccctacaatcgtcgaatggatgatacttccttgggttctcgggttcatatggggcgagatcaaacaaatgtgggatggaggactccaagactacatccatgattggtggaacctgatggattttgtgatgaattctctgtacttggctacgatctcattaaaaatcgtggctttcgtgaagtacagcgccctgaacccccgtgagtcgtgggacatgtggcatccaaccctggtggccgaagcattgtttgcaattgccaacatcttcagcagcctgagactgattagtctgttcactgcaaatagccacttaggcccgctccagatcagcttaggcagaatgctcctggacatcctcaagttcctgttcatttactgtttagtgctgcttgccttcgccaacggcctgaatcagctatatttttactatgaggaaacaaagggccttacctgtaagggaattaggtgtgagaaacagaacaatgctttctcaacgctgtttgagaccctgcaatctttattctggtcaatctttggcctgattaatctgtacgtgacgaacgtgaaagcccagcatgaatttaccgaattcgtcggcgcaacaatgtttgggacttacaacgtcatcagcttagtggtgctcttaaatatgctgatcgctatgatgaataactcttaccagctgatagcagaccatgcagacatcgagtggaagtttgcccgcactaaactgtggatgtcctattttgaggagggaggcacactcccaacacccttcaacgtcatcccatccccaaagtccctgtggtacttaatcaagtggatatggacccatctgtgtaagaagaagatgcggcgcaagcccgagtccttcggcaccattggaagaagagcagcagacaatttgcgccgccaccaccagtatcaggaagtcatgcgaaatctagtcaaaaggtacgtcgcggctatgatcagagatgctaagacagaagagggccttacagaagagaacttcaaggagctaaagcaggacatcagctcattccggtttgaagtgctcggcctcctcagaggatccaaactgtcaacgatccagagcgccaacgcctcaaaggagagcagcaacagcgccgatagtgatgaaaagtcagacagtgaagggaatagcaaagacaagaagaaaaacttttcactgttcgatctgactacactaattcacccgcgtagtgccgcgatcgcctctgaaagacataatatcagcaacggctcagccttggtggtccaggagccccccagggagaagcaacggaaagtcaactttgtaacggatatcaaaaacttcggcctctttcatagaagatccaaacagaatgccgccgagcagaacgcgaaccagatattcagcgtgtctgaggaagtcgcacggcagcaggctgcaggcccacttgagagaaatattcagctagagtctcgtgggctggcctctaggggcgacttgtcgatccccggacttagcgagcagtgtgtcctggtcgaccatagagaacggaacaccgacaccctgggattacaggtggggaagagagtctgtcctttcaaaagtgagaaggtcgttgtagaggacacagtccctataatacccaaggaaaagcacgctaaggaagaagattcctccatagactacgatttaaatctcccagatactgttacacacgaggactacgtgacaaccaggttgtag

SEQ ID NO: 51521 - DNA, 2415 bp, Artificial Sequence
  derived and/or modified sequence
atggcccagttctactacaagcggaacgtgaacgccccctaccgggaccgtatcccactacgtatagtccgggccgagtccgagctctcacctagcgaaaaagcatacctcaacgctgttgagaagggcgattacgctagtgttaagaagagtcttgaggaggcagagatttactttaaaataaatataaattgtatagacccactggggcgtaccgcgctgctcattgcgatcgagaacgagaacctggaactgattgaacttctgctgtccttcaatgtttatgtgggagacgccctgctgcatgccattcgcaaggaagtcgtcggcgcagttgagttattgctcaaccacaagaaacccagtggcgagaagcagtttgtggcccagcctaactgccagcagttactcgcgtcaagatggtacgacgagttccctggatggcgccgacggcactgggcagtcaaaatggtcacctgcttcatcattgggttgctgttcccagtgtttagcgtgtgctacctgatcgctccaaagagccccctcggcttatttatacgcaaaccttttatcaaattcatctgccacactgccagttacctcacttttctgtttctgcttctgctagcgagccagcacatcgatagatcagacctcaaccgtcagggtcccccccccaccatcgtggaatggatgatcctcccatgggtcctcggattcatatggggggaaatcaaacagatgtgggacggcgggctgcaggactatatccatgattggtggaacctgatggacttcgtgatgaactcactgtatcttgccacaatatcactcaaaattgtggctttcgtgaaatattccgctctgaaccctcgggagagttgggacatgtggcaccctacactcgtggcagaggctctgtttgctattgccaacatcttcagctccctgcgcctgatttccctgttcactgccaactctcacctcggccctctacagatctccttaggcagaatgttgctggacatcctcaagttcctgtttatctactgcttagtactgctggcgtttgccaatggtctgaatcagttatacttctattacgaagaaaccaagggtctgacatgtaaaggaatccgttgtgagaaacagaacaatgcttttagcaccctgtttgaaacactgcagtcactgttctggtccatctttggtttgattaatttgtatgtgacaaatgtgaaggcacaacatgaatttaccgagttcgtgggcgcaaccatgtttggaacctacaatgtgattagcttggtcgtcctcttaaatatgctcattgctatgatgaataacagttatcagttgattgcggatcacgcagacatagaatggaagtttgcaagaacgaagctatggatgtcctactttgaagagggcggtaccttgcctacgccctttaacgtcattccaagtcccaagagtttgtggtacctgattaagtggatttggacccacttgtgcaaaaagaaaatgaggcgaaagcccgagagcttcggcacaattggccgacgcgccgccgacaatcttaggcggcaccaccagtatcaggaggtgatgcggaacctcgtgaagaggtacgttgccgccatgatacgcgacgcaaagacagaagagggattgacagaagaaaacttcaaagaactgaagcaggatatttcttcctttcggttcgaggtcctgggtctgttacgcgggtccaaactctctaccatccagtcagccaacgcaagtaaggagtcgtctaactctgctgattctgacgagaaatcagattccgagggcaattctaaggataaaaagaagaacttctcactctttgacctaacaaccctgattcatccgcgctcagcagctattgcctcggaaaggcacaacatctccaacgggagcgcacttgtggtccaggaacctccccgcgaaaaacaacggaaagtgaacttcgttaccgacattaaaaatttcggactatttcatcggcgctctaaacagaacgccgcagaacagaatgcgaatcagatctttagcgtctccgaggaggtagccaggcagcaggcggccgggcccctggaacgcaatatccagcttgaaagcagagggctggcgagccggggcgatctgagtattcccggcctgtcagaacaatgtgtcctggtagatcatagggagagaaacaccgacacccttgggctccaggttggtaagcgggtgtgtccgtttaaatccgagaaggtggtggttgaggatactgtgcccatcatccccaaagagaaacacgccaaagaggaggactcttccattgattacgacttgaacctgcctgacactgtgacgcatgaggattacgtcactaccagactgtag

SEQ ID NO: 51522 - DNA, 2415 bp, Artificial Sequence
  derived and/or modified sequence
atggcccagttctactataaaagaaatgttaatgcaccttacagagacaggatccccctacggatcgtaagggcagaaagcgagctcagcccttccgagaaggcctatctcaatgccgtggagaaaggcgattatgcctccgtgaagaaaagcctggaggaagccgaaatctattttaagatcaacatcaactgtattgacccgttgggtcgcaccgccctgttgatcgctatcgaaaacgagaacctcgagttgattgagttgcttctgtcctttaacgtttatgtgggagatgcgctgttgcatgctatcagaaaagaggtggtgggcgctgttgagctcttgctcaatcacaagaagccatcaggggagaagcagtttgtggcccagcccaattgtcagcagttgttggcaagtagatggtacgatgagtttcccggatggcgaaggagacattgggccgtgaagatggtgacctgctttataatcggactgctgttcccagtgttctccgtgtgttacctgattgcccctaagagcccccttgggctgttcattcggaagcccttcatcaagttcatctgccatactgcgtcatatcttacctttttgtttcttctgctacttgcatctcagcacattgatcgcagtgacctaaacaggcaaggaccaccaccgacaattgtcgaatggatgatcctgccctgggtgcttggcttcatctggggagagatcaagcaaatgtgggatgggggtctgcaggattatatccacgactggtggaacctcatggattttgttatgaattcactgtatctagcaacaatttccttgaaaatcgtcgcttttgtcaaatacagcgcgctgaaccccagggaaagctgggatatgtggcaccctaccctcgtcgcagaggctttgtttgccattgccaatatcttcagtagcttacgcctcataagcttattcaccgccaattcacacttggggccactccagatctccctgggcaggatgctcctggatatcctgaagtttctgtttatttattgcctggtgctgctggcttttgccaacggcctcaaccaactctacttttattatgaagaaacgaaggggcttacatgcaaaggaatccgttgtgaaaaacaaaacaacgcgtttagtaccctgtttgagacgctgcaatccttattctggtctattttcgggctcatcaatctatatgtgaccaatgtcaaggcacaacacgagttcaccgaattcgttggcgctacaatgtttgggacctacaacgtgatctccctggttgtcctccttaatatgctcattgcgatgatgaacaactcctaccagttgattgcagaccatgccgatatcgagtggaagtttgctaggactaaactgtggatgtcctacttcgaggaaggaggaactctgcctaccccgtttaatgtcatcccctctccaaagtcactgtggtacctgattaaatggatatggacacatctttgcaagaagaagatgcgcaggaagcccgagtcgtttggtaccatcggcagacgtgccgcagataacctgaggagacatcaccaatatcaggaggttatgcgcaacttagtgaaacggtacgtcgcagccatgattagggatgcaaagaccgaagaaggtctgaccgaggagaacttcaaggaacttaagcaggatatctcgtctttccgtttcgaggttcttggactactccgaggaagtaagctgtcaaccattcagtctgccaacgccagcaaggaaagcagtaattccgccgattcagacgaaaagagtgattcagaagggaactcaaaggacaagaagaagaacttttccctttttgacctgactacactgatccaccctcgcagcgcagccattgcttcagagcgccataatataagtaatggttccgcattagtggttcaggaacctccgagagagaagcaacggaaggtgaacttcgtaaccgacatcaaaaatttcggactgttccacagaagaagcaagcagaatgccgctgaacagaatgcaaatcagatattttcagtgtcagaggaagtggccagacagcaagctgccggacctttggagcggaatatacagctggagtcaagggggctggcttctcgtggagaccttagcatccccggactctcggaacagtgcgtgcttgtggaccaccgggagcgcaatactgatacattgggactgcaagtgggcaagcgtgtgtgtcctttcaaatccgaaaaagtggtcgtggaagacaccgtacctataattcccaaggagaagcatgcaaaggaggaggattcatctatcgattacgatctcaatctgccggacacagtgacccatgaggattatgtcacaactcgcctttag

SEQ ID NO: 51523 - DNA, 2415 bp, Artificial Sequence
  derived and/or modified sequence
atggctcagttttactataagcggaatgtcaacgcgccttatagggatcgtatacctttacgaatcgtacgtgctgaaagcgagctatcaccaagtgagaaagcctatttaaacgccgtagagaaaggagattatgcatccgtgaagaagagcctggaggaagcagagatttattttaaaatcaacataaactgtatcgacccattaggcagaactgctctattaatcgcaattgagaacgagaacctcgagctaatagagctgctgctgtcctttaacgtgtacgtgggggatgccttgctgcacgcgattagaaaagaagttgttggggctgtggagttattgttgaatcataaaaagccatccggtgagaagcagttcgtggctcaacccaattgccagcagctgttagccagtaggtggtacgatgaatttcctggttggagaaggagacattgggccgtgaaaatggtcacctgctttatcatcggactcctgttcccggtgttctccgtgtgttatctgattgcacccaagtcaccactgggcttattcatccgcaagccctttatcaagttcatctgccatactgcctcttatctcacattcctcttcctccttctcctggcgagccagcatattgaccggagcgacctgaaccgccaggggccaccccctacaatcgtagagtggatgatcctcccttgggttctaggtttcatttggggcgaaatcaaacagatgtgggatggtggtctccaggattatatccacgactggtggaatctgatggactttgtcatgaattccttatatctggctacaataagtctgaaaattgttgctttcgtgaagtacagcgccctaaaccccagagaaagctgggatatgtggcatcctactctggtggccgaagcgctttttgcaatcgccaacatcttttcttcattgagactaatctctctgtttaccgcaaatagtcatctcgggcctcttcagattagcctggggaggatgcttcttgatattttgaaattcctatttatttactgtttggtgttgttagctttcgcgaatgggttgaaccagctctatttttattatgaagagaccaaggggctgacctgcaagggtattcggtgcgagaagcaaaacaacgccttcagcacacttttcgagactctccaatcattattttggtcaatctttgggctaattaacttatacgtgaccaacgttaaggcacaacacgagtttaccgaattcgttggggctacaatgtttggaacttacaacgttatcagccttgtggttcttctaaatatgttgattgctatgatgaacaatagctaccagttgatcgcggaccatgccgacatcgagtggaaattcgccaggacaaaactgtggatgtcctacttcgaagaaggaggaacattgccgacgcccttcaacgtgatccccagtcctaaatccctctggtacctgatcaagtggatttggactcatttgtgcaagaagaagatgagacgcaagcccgagagtttcgggaccattgggcgtagggctgccgacaatctgagacggcaccaccagtaccaggaagtcatgaggaacctggtgaaacgctacgttgccgctatgatccgtgacgcaaaaacagaagagggtttgaccgaggagaactttaaggagctcaaacaggatatctctagcttccgattcgaagtgctcgggctgttgcgcggatccaaacttagtaccatccagtccgctaatgcctctaaggaatcctcaaatagcgccgattcagacgagaagtccgacagtgaggggaacagtaaggataaaaagaagaacttcagcctgttcgacttgactaccttgatacatcccagaagtgcagctatcgcctccgaaagacacaacatttctaatggcagtgctctggtcgttcaggagccccctcgggagaaacaacgcaaagtgaacttcgtaaccgacatcaaaaattttgggttgttccacaggcggtcaaagcagaacgccgctgaacagaatgccaatcagatttttagtgtctcagaggaggtggccaggcagcaggccgcaggcccactcgaacgaaacattcagctggaaagccggggtcttgcctcccgaggggatctcagcattccgggtctgagcgaacaatgcgttctggtcgatcaccgagagcgtaatactgatacgctcggtctgcaggtcgggaaaagggtatgccccttcaagagtgagaaggtggtcgttgaggacacagtgccaataatccccaaggaaaaacacgcaaaggaagaagattcctctatagattatgatttgaacctaccagatacagttacacacgaagactacgtgacgacacggctgtag

SEQ ID NO: 51524 - DNA, 2912 bp, Artificial Sequence
  derived and/or modified sequence
cttcgctttcagagcatcctcactccgcccagttcggtgccagctgcgtgggctccagcttcgatcgttttccttggaatgctccaaaactcagcagcgactaagggaattccattggaatttgccgggcgtgctctcaccccgcacggcacccgcgccgtcagtcctcggatcccatcacttcagcccgaagattgcaactttgcagagacgaagaaatagcatggcatgaaacatggctcagttctattacaaaagaaatgttaatgctccctatagagaccgcatccctctaaggatagtaagagcagaatcagaactctcgccatcagaaaaagcctacttgaatgctgtggaaaagggagattatgccagtgtcaagaaatccctagaggaagctgaaatttattttaaaatcaatattaattgcattgatcctctcggaagaactgctctcctcattgcaattgaaaatgagaacttggagctcatcgaactactcttaagctttaatgtctatgttggagatgctctattacatgctatcagaaaagaagtcgtcggagctgttgagctgttattgaaccacaaaaaacctagtggagaaaaacagtttgttgcccagcccaattgtcaacagctgctggcatctcgctggtacgatgagtttccaggctggaggagaagacactgggcagtgaagatggtgacatgtttcataataggacttctttttcctgtcttctctgtgtgctacctgatagctcccaaaagcccacttggactgttcatcaggaagccatttatcaagtttatctgccacacagcctcctatttgacttttttgttcctgctgctgcttgcctctcagcacatcgacaggtcagacttgaacaggcaaggtccaccaccaaccatcgtcgagtggatgatattaccgtgggtcctgggcttcatatggggagaaattaaacagatgtgggatggcggacttcaggactacatccatgattggtggaatctaatggactttgtaatgaactccttatatttagcaacaatctccttgaaaattgttgcatttgtaaagtacagtgcccttaatccacgagaatcatgggacatgtggcatcccactctggtggcagaggctttatttgctattgcaaacatcttcagttctctgcgtctgatctcactgtttactgcaaattctcacctgggacctctgcaaatatctctgggaagaatgctcctggacattttgaagtttctattcatatactgccttgtgttgctagcatttgcaaatggcctaaatcaattgtacttctattatgaagaaacgaaagggttaacctgcaaaggcataagatgtgaaaagcagaataatgcattttcaacgttatttgagacactgcagtccctgttttggtcaatatttgggctcatcaatttatatgtgaccaatgtcaaagcacagcatgaatttactgagtttgttggtgccaccatgtttgggacatacaatgtcatctctctggttgttctactcaacatgttaatagctatgatgaataattcttaccaactgattgctgaccatgcagatatagaatggaaatttgcacgaacaaagctttggatgagttattttgaagaaggaggtactctgcctactcccttcaatgtcatcccgagccccaagtctctctggtacctgatcaaatggatctggacacacttgtgcaagaaaaagatgagaagaaagccagaaagttttggaacaatagggaggcgagctgctgataacttgagaagacatcaccaataccaagaagttatgaggaacctggtgaagcgatacgttgctgcaatgattagagatgctaaaactgaagaaggcctgaccgaagagaactttaaggaactaaagcaagacatttctagtttccgctttgaagtcctgggattactaagaggaagcaaactttccacaatacaatctgcgaatgcctcgaaggagtcttcaaattcggcagactcagatgaaaagagtgatagcgaaggtaatagcaaggacaagaaaaagaatttcagcctttttgatttaaccaccctgattcatccgagatcagcagcaattgcctctgaaagacataacataagcaatggctctgccctggtggttcaggagccgcccagggagaagcagagaaaagtgaattttgtgaccgatatcaaaaactttgggttatttcatagacgatcaaaacaaaatgctgctgagcaaaatgcaaaccaaatcttctctgtttcagaagaagttgctcgtcaacaggctgcaggaccacttgagagaaatattcaactggaatctcgaggattagcttcacggggtgacctgagcattcccggtctcagtgaacaatgtgtgttagtagaccatagagaaaggaatacggacacactggggttacaggtaggaaagagagtgtgtccattcaagtcagagaaggtggtggtggaggacacggttcctataataccaaaggagaaacatgcaaaagaagaggactctagtatagactatgatctaaacctcccagacacagtcacccacgaagattacgtgaccacaagattgtgatacttgaaggaggaagcgtttaccatacacatacgtattttccgtagtgctctgggtgggggaaaatgtttaaattgtattagcaaatgctaacttacactttatagcgtttatcagctgtggcatattacctgtaacatgtttaaataaggcaaaggcaatcaaaaacctttttgttttgtagcctgcttttgctttcacaatttgtcttacaattgtttttgttaataaataaatgcaccttgtattcttgtactgttgc

SEQ ID NO: 51525 - DNA, 2475 bp, Artificial Sequence
  derived and/or modified sequence
atggctcagttctattacaaaagaaatgttaatgctccctatagagaccgcatccctctaaggatagtaagagcagaatcagaactctcgccatcagaaaaagcctacttgaatgctgtggaaaagggagattatgccagtgtcaagaaatccctagaggaagctgaaatttattttaaaatcaatattaattgcattgatcctctcggaagaactgctctcctcattgcaattgaaaatgagaacttggagctcatcgaactactcttaagctttaatgtctatgttggagatgctctattacatgctatcagaaaagaagtcgtcggagctgttgagctgttattgaaccacaaaaaacctagtggagaaaaacagtttgttgcccagcccaattgtcaacagctgctggcatctcgctggtacgatgagtttccaggctggaggagaagacactgggcagtgaagatggtgacatgtttcataataggacttctttttcctgtcttctctgtgtgctacctgatagctcccaaaagcccacttggactgttcatcaggaagccatttatcaagtttatctgccacacagcctcctatttgacttttttgttcctgctgctgcttgcctctcagcacatcgacaggtcagacttgaacaggcaaggtccaccaccaaccatcgtcgagtggatgatattaccgtgggtcctgggcttcatatggggagaaattaaacagatgtgggatggcggacttcaggactacatccatgattggtggaatctaatggactttgtaatgaactccttatatttagcaacaatctccttgaaaattgttgcatttgtaaagtacagtgcccttaatccacgagaatcatgggacatgtggcatcccactctggtggcagaggctttatttgctattgcaaacatcttcagttctctgcgtctgatctcactgtttactgcaaattctcacctgggacctctgcaaatatctctgggaagaatgctcctggacattttgaagtttctattcatatactgccttgtgttgctagcatttgcaaatggcctaaatcaattgtacttctattatgaagaaacgaaagggttaacctgcaaaggcataagatgtgaaaagcagaataatgcattttcaacgttatttgagacactgcagtccctgttttggtcaatatttgggctcatcaatttatatgtgaccaatgtcaaagcacagcatgaatttactgagtttgttggtgccaccatgtttgggacatacaatgtcatctctctggttgttctactcaacatgttaatagctatgatgaataattcttaccaactgattgctgaccatgcagatatagaatggaaatttgcacgaacaaagctttggatgagttattttgaagaaggaggtactctgcctactcccttcaatgtcatcccgagccccaagtctctctggtacctgatcaaatggatctggacacacttgtgcaagaaaaagatgagaagaaagccagaaagttttggaacaatagggaggcgagctgctgataacttgagaagacatcaccaataccaagaagttatgaggaacctggtgaagcgatacgttgctgcaatgattagagatgctaaaactgaagaaggcctgaccgaagagaactttaaggaactaaagcaagacatttctagtttccgctttgaagtcctgggattactaagaggaagcaaactttccacaatacaatctgcgaatgcctcgaaggagtcttcaaattcggcagactcagatgaaaagagtgatagcgaaggtaatagcaaggacaagaaaaagaatttcagcctttttgatttaaccaccctgattcatccgagatcagcagcaattgcctctgaaagacataacataagcaatggctctgccctggtggttcaggagccgcccagggagaagcagagaaaagtgaattttgtgaccgatatcaaaaactttgggttatttcatagacgatcaaaacaaaatgctgctgagcaaaatgcaaaccaaatcttctctgtttcagaagaagttgctcgtcaacaggctgcaggaccacttgagagaaatattcaactggaatctcgaggattagcttcacggggtgacctgagcattcccggtctcagtgaacaatgtgtgttagtagaccatagagaaaggaatacggacacactggggttacaggtaggaaagagagtgtgtccattcaagtcagagaaggtggtggtggaggacacggttcctataataccaaaggagaaacatgcaaaagaagaggactctagtatagactatgatctaaacctcccagacacagtcacccacgaagattacgtgaccacaagattgtgatacttgaaggaggaagcgtttaccatacacatacgtattttccgtagtgctctgggtggg

SEQ ID NO: 51526 - protein, 153 aa, Artificial Sequence
  derived and/or modified sequence
MAAGLFGLSARRLLAAAATRGLPAARVRWESSFSRTVVAPSAVAGKRPPEPTTPWQEDPEPEDENLYEKNPDSHGYDKDPVLDVWNMRLVFFFGVSIILVLGSTFVAYLPDYRMKEWSRREAERLVKYREANGLPIMESNCFDPSKIQLPEDE

SEQ ID NO: 51527 - protein, 157 aa, Artificial Sequence
  derived and/or modified sequence
AAPSVMAAGLFGLSARRLLAARRRGLPAARVRWESSFSRTVVAPSAVAGKRPPEPTTPWQEDPEPEDENLYEKNPDSHGYDKDPVLDVWNMRLVFFFGVSIILVLGSTFVAYLPDYRMKEWSRREAERLVKYREANGLPIMESNCFDPSKIQLPEDE

SEQ ID NO: 51528 - DNA, 462 bp, Artificial Sequence
  derived and/or modified sequence
atggctgcaggtctttttggcctgtcagctaggcgcttgctggcagcggccgccaccagaggtctgccggccgctcgagtgagatgggagagttctttcagtcgcactgtggtagccccttccgcagttgcggggaagaggccgccggaacccaccactccttggcaggaggatccggaaccggaagatgagaatctgtacgagaagaatccggattcccatggctacgacaaggatcctgtgcttgacgtttggaacatgcggctcgtcttcttttttggtgtgtctataatcttggtcctaggctccacatttgtagcttacttacccgactaccgcatgaaggagtggtcccgccgggaggccgaacgccttgtgaagtatcgagaagcaaatgggctgcctattatggaatcaaactgctttgacccaagcaaaattcagctccccgaggatgaatag

SEQ ID NO: 51529 - DNA, 474 bp, Artificial Sequence
  derived and/or modified sequence
gcagcccccagcgtcatggctgcaggcctgtttggcttatccgccagaaggttgctggccgcacggaggcgcggactgcccgccgcccgcgtgcggtgggaatcctcctttagcaggacagtagttgctccctcagctgttgccggaaaaagaccacccgagcccaccaccccctggcaggaggaccctgaacccgaagatgagaacctttacgagaagaacccggactcccacggatatgacaaggatcctgtgctcgacgtctggaacatgcgcctagtgttctttttcggcgtttccatcattcttgtcttggggagcacatttgtcgcgtacctacccgattataggatgaaggaatggagccgtagagaggcggaacggctagtaaagtatagagaggctaatggcctaccaatcatggaatccaattgttttgatcccagcaagatccaactaccagaggacgaatag

SEQ ID NO: 51530 - DNA, 462 bp, Artificial Sequence
  derived and/or modified sequence
atggctgctggcctgtttggcctgagcgcccggcggctgctggccgctgctgccacccggggcctgcctgctgcccgggtgcgctgggagagcagcttcagcaggacagtggtggcccccagcgctgtggccggcaagaggcctcctgagcccaccaccccctggcaggaggaccctgagccagaagatgagaacctgtatgagaagaacccagacagccacggctatgacaaggaccctgtgctggatgtgtggaacatgaggctggtgttcttctttggagtgtccatcatcctggtgctgggcagcacctttgtggcctacctgcctgactacaggatgaaggagtggagcagaagagaggccgagcggctggtgaagtaccgggaggccaacggcctgcccatcatggagagcaactgctttgaccccagcaagatccagctgcctgaagatgaatag

SEQ ID NO: 51531 - DNA, 474 bp, Artificial Sequence
  derived and/or modified sequence
gctgcccccagcgtgatggccgccggcctgtttggcctgagcgcccggcggctgctggccgccaggagaagaggcctgcctgctgcccgggtgcgctgggagagcagcttcagcaggacagtggtggcccccagcgctgtggccggcaagaggcctcctgagcccaccaccccctggcaggaggaccctgagccagaagatgagaacctgtatgagaagaacccagacagccacggctatgacaaggaccctgtgctggatgtgtggaacatgaggctggtgttcttctttggagtgtccatcatcctggtgctgggcagcacctttgtggcctacctgcctgactacaggatgaaggagtggagcagaagagaggccgagcggctggtgaagtaccgggaggccaacggcctgcccatcatggagagcaactgctttgaccccagcaagatccagctgcctgaagatgaatag

SEQ ID NO: 51532 - DNA, 1388 bp, Artificial Sequence
  derived and/or modified sequence
gaccagcgtcgacgctcaccttctcggcccgggctgtcaaggaagggctcccagacatcacctctgcccgccgccacctcctccaactctcccagctcagccggagccggagcgcgcaacaaccaagtccgagactggaggcagatcggggggaggggagaagcgccaagcgcgctgccctcccagggaaactcactgccgcctactcccagccggccacagtcaccagctcaaaatggcgacgacgagaagggagtcggcgctccgaccaccatccacctactaaggaagcgcgctctggccggccccggcgattggtcaccgcccgctaggggacagccctggcctcctctgattggcaagcgctggccacctccccacaccccttgcgaacgctcccctagtggagaaaaggagtagctattagccaattcggcagggcccgctttttagaagcttgatttcctttgaagatgaaagactagcggaagctctgcctctttccccagtgggcgagggaactcggggcgattggctgggaactgtatccacccaaatgtcaccgatttcttcctatgcaggaaatgagcagacccatcaataagaaatttctcagcctggccgaaaatggttggccccacgaagccacgacaactggaggcaaagagggttgctcaacgccccgcctcattggaaaaccaaatcagatctgggacctatatagcgtggcggaggcggggcgatgattgtcgcgctcgcacccactgcagctgcgcacagtcgcatttctttccccgcccctgagaccctgcagcaccatctgtcatggcggctgggctgtttggtttgagcgctcgccgtcttttggcggcagcggcgacgcgagggctcccggccgcccgcgtccgctgggaatctagcttctccaggactgtggtcgccccgtccgctgtggcgggaaagcggcccccagaaccgaccacaccgtggcaagaggacccagaacccgaggacgaaaacttgtatgagaagaacccagactcccatggttatgacaaggaccccgttttggacgtctggaacatgcgacttgtcttcttctttggcgtctccatcatcctggtccttggcagcacctttgtggcctatctgcctgactacaggatgaaagagtggtcccgccgcgaagctgagaggcttgtgaaataccgagaggccaatggccttcccatcatggaatccaactgcttcgaccccagcaagatccagctgccagaggatgagtgaccagttgctaagtggggctcaagaagcaccgccttccccaccccctgcctgccattctgacctcttctcagagcacctaattaaaggggctgaaagtctga

SEQ ID NO: 51533 - DNA, 574 bp, Artificial Sequence
  derived and/or modified sequence
gcagcaccatctgtcatggcggctgggctgtttggtttgagcgctcgccgtcttttggcggcacggcgacgagggctcccggccgcccgcgtccgctgggaatctagcttctccaggactgtggtcgccccgtccgctgtggcgggaaagcggcccccagaaccgaccacaccgtggcaagaggacccagaacccgaggacgaaaacttgtatgagaagaacccagactcccatggttatgacaaggaccccgttttggacgtctggaacatgcgacttgtcttcttctttggcgtctccatcatcctggtccttggcagcacctttgtggcctatctgcctgactacaggatgaaagagtggtcccgccgcgaagctgagaggcttgtgaaataccgagaggccaatggccttcccatcatggaatccaactgcttcgaccccagcaagatccagctgccagaggatgagtgaccagttgctaagtggggctcaagaagcaccgccttccccaccccctgcctgccattctgacctcttctcagagcacctaattaaaggggctgaaagtctg

SEQ ID NO: 51534 - DNA, 462 bp, Artificial Sequence
  derived and/or modified sequence
atggccgccggcctgttcggcctgagcgcccggcggctgctggccgccgcagccaccaggggcctgccggcagcccgggtaaggtgggaatccagtttctcaagaaccgtggttgcccctagtgccgtcgctggtaaacgccctccagagcccactaccccctggcaagaagatcctgaaccagaggacgagaacctgtatgagaagaaccccgattctcacggctatgataaggaccctgttttagacgtatggaacatgcgtctggtgttcttttttggggtgtccatcattctggtgctgggttcaactttcgtggcctacctaccggattacagaatgaaggagtggagcaggagggaggccgaaaggcttgttaagtatcgggaggcaaatgggttgccaatcatggagtcaaactgtttcgatccttcaaaaatacagctgcctgaggacgagtag

SEQ ID NO: 51535 - DNA, 474 bp, Artificial Sequence
  derived and/or modified sequence
gccgcccccagcgtgatggccgccggcctgttcggcctgagcgccagacggctgcttgccgcacgtcgtcgcggcctacctgctgctagggtccgctgggagtcctctttctcacgaacagttgtggcaccgagtgcggtggcaggcaagcgtccaccagagcccactactccatggcaggaggatcctgagccggaggacgagaacctgtacgagaagaacccagactcccatgggtatgacaaagaccctgtgcttgatgtctggaacatgcgactggttttcttctttggagtctccataatccttgtactggggtctacattcgtggcctacctgcccgactaccggatgaaagagtggagccgccgcgaagcagaaaggcttgtcaagtacagggaagcaaacgggctccccattatggagtccaactgcttcgatccgagcaaaatacagctgccagaagatgagtag

SEQ ID NO: 51536 - DNA, 462 bp, Artificial Sequence
  derived and/or modified sequence
atggccgctggcttattcggactgagtgcgaggcgtctgcttgccgctgctgccacccgcggactgccggcagctcgtgtgagatgggagtctagtttctcacggaccgtggtggcaccaagcgcagtcgccggaaagcggccacccgagcctactacaccgtggcaggaggatcctgaaccagaggacgagaacctctacgaaaagaatccagacagccatggctacgacaaggacccagtgttagacgtttggaatatgcgactggtgtttttcttcggggtcagtatcatcctggttctggggtcaacatttgtcgcgtacttgcccgattatagaatgaaggagtggtcacgcagagaagcagaaaggctggtgaaatacagggaagcaaatgggttgcccatcatggaatcaaattgctttgaccccagcaagatccaactacccgaagacgaatag

SEQ ID NO: 51537 - DNA, 474 bp, Artificial Sequence
  derived and/or modified sequence
gctgccccaagcgtgatggctgcaggactctttggcctatcagcccgacgcttactggccgcacgtcgcaggggccttccggcagcccgtgtgcggtgggaatcctccttcagtcggacggtggttgctccctctgccgttgccggtaagaggccaccggagccaactactccgtggcaagaggacccagagcctgaagacgaaaacctctacgagaagaacccagacagccatgggtacgacaaagaccctgtgttggacgtgtggaacatgcggttagtgtttttctttggggtctccattattctagtgctgggaagcacgttcgtcgcttatctgcctgactacagaatgaaggaatggtcacggagggaggcagagagactggtgaagtaccgggaagcaaatggtctgcccatcatggaatccaactgttttgacccctccaaaatccagctccccgaagacgaatag

SEQ ID NO: 51538 - DNA, 462 bp, Artificial Sequence
  derived and/or modified sequence
atggccgccggcctgttcggcctgagcgccagaagactgctggccgccgccgccaccagaggcctgcccgccgccagagtgagatgggagagcagcttcagcagaaccgtggtggcccccagcgccgtggccggcaagagaccccccgagcccaccaccccctggcaggaggaccccgagcccgaggacgagaacctgtacgagaagaaccccgacagccacggctacgacaaggaccccgtgctggacgtgtggaacatgagactggtgttcttcttcggcgtgagcatcatcctggtgctgggcagcaccttcgtggcctacctgcccgactacagaatgaaggagtggagcagaagagaggccgagagactggtgaagtacagagaggccaacggcctgcccatcatggagagcaactgcttcgaccccagcaagatccagctgcccgaggacgagtag

SEQ ID NO: 51539 - DNA, 474 bp, Artificial Sequence
  derived and/or modified sequence
gccgcccccagcgtgatggccgccggcctgttcggcctgagcgccagaagactgctggccgccagaagaagaggcctgcccgccgccagagtgagatgggagagcagcttcagcagaaccgtggtggcccccagcgccgtggccggcaagagaccccccgagcccaccaccccctggcaggaggaccccgagcccgaggacgagaacctgtacgagaagaaccccgacagccacggctacgacaaggaccccgtgctggacgtgtggaacatgagactggtgttcttcttcggcgtgagcatcatcctggtgctgggcagcaccttcgtggcctacctgcccgactacagaatgaaggagtggagcagaagagaggccgagagactggtgaagtacagagaggccaacggcctgcccatcatggagagcaactgcttcgaccccagcaagatccagctgcccgaggacgagtag

SEQ ID NO: 51540 - protein, 1064 aa, Artificial Sequence
  derived and/or modified sequence
MVLGTVLLPPNSYGRDQDTSLCCLCTEASESALPDLTDHFASCVEDGFEGDKTGGSSPEALHRPYGCDVEPQALNEAIRWSSKENLLGATESDPNLFVALYDFVASGDNTLSITKGEKLRVLGYNQNGEWSEVRSKNGQGWVPSNYITPVNSLEKHSWYHGPVSRSAAEYLLSSLINGSFLVRESESSPGQLSISLRYEGRVYHYRINTTADGKVYVTAESRFSTLAELVHHHSTVADGLVTTLHYPAPKCNKPTVYGVSPIHDKWEMERTDITMKHKLGGGQYGEVYVGVWKKYSLTVAVKTLKEDTMEVEEFLKEAAVMKEIKHPNLVQLLGVCTLEPPFYIVTEYMPYGNLLDYLRECNREEVTAVVLLYMATQISSAMEYLEKKNFIHRDLAARNCLVGENHVVKVADFGLSRLMTGDTYTAHAGAKFPIKWTAPESLAYNTFSIKSDVWAFGVLLWEIATYGMSPYPGIDLSQVYDLLEKGYRMEQPEGCPPKVYELMRACWKWSPADRPSFAETHQAFETMFHDSSISEEVAEELGRAASSSSVVPYLPRLPILPSKTRTLKKQVENKENIEGAQDATENSASSLAPGFIRGAQASSGSPALPRKQRDKSPSSLLEDAKETCFTRDRKGGFFSSFMKKRNAPTPPKRSSSFREMENQPHKKYELTGLPEQDRMAMTLPRNCQRSKLQLERTVSTSSQPEENVDRANDMLPKKSEESAAPSRERPKAKLLPRGATALPLRTPSGDLAITEKDPPGVGVAGVAAAPKGKEKNGGARLGMAGVPEDGEQPGWPSPAKAAPVLPTTHNHKVPVLISPTLKHTPADVQLIGTDSQGNKFKLLSEHQVTSSGDKDRPRRVKPKCAPPPPPVMRLLQHPSICSDPTEEPTALTAGQSTSETQEGGKKAALGAVPISGKAGRPVMPPPQVPLPTSSISPAKMANGTAGTKVALRKTKQAAEKISADKISKEALLECADLLSSALTEPVPNSQLVDTGHQLLDYCSGYVDCIPQTRNKFAFREAVSKLELSLQELQVSSAAAGVPGTNPVLNNLLSCVQEISDVVQR

SEQ ID NO: 51541 - DNA, 3195 bp, Artificial Sequence
  derived and/or modified sequence
atggtgctgggcaccgtgctgctgccccccaacagctacggcagagaccaggacaccagcctgtgctgcctgtgcaccgaggccagcgagagcgccctgcccgacctgaccgaccacttcgccagctgcgtggaggacggcttcgagggcgacaagaccggcggcagcagccccgaggccctgcacagaccctacggctgcgacgtggagccccaggccctgaacgaggccatcagatggagcagcaaggagaacctgctgggcgccaccgagagcgaccccaacctgttcgtggccctgtacgacttcgtggccagcggcgacaacaccctgagcatcaccaagggcgagaagctgagagtgctgggctacaaccagaacggcgagtggagcgaggtgagaagcaagaacggccagggctgggtgcccagcaactacatcacccccgtgaacagcctggagaagcacagctggtaccacggccccgtgagcagaagcgccgccgagtacctgctgagcagcctgatcaacggcagcttcctggtgagagagagcgagagcagccccggccagctgagcatcagcctgagatacgagggcagagtgtaccactacagaatcaacaccaccgccgacggcaaggtgtacgtgaccgccgagagcagattcagcaccctggccgagctggtgcaccaccacagcaccgtggccgacggcctggtgaccaccctgcactaccccgcccccaagtgcaacaagcccaccgtgtacggcgtgagccccatccacgacaagtgggagatggagagaaccgacatcaccatgaagcacaagctgggcggcggccagtacggcgaggtgtacgtgggcgtgtggaagaagtacagcctgaccgtggccgtgaagaccctgaaggaggacaccatggaggtggaggagttcctgaaggaggccgccgtgatgaaggagatcaagcaccccaacctggtgcagctgctgggcgtgtgcaccctggagccccccttctacatcgtgaccgagtacatgccctacggcaacctgctggactacctgagagagtgcaacagagaggaggtgaccgccgtggtgctgctgtacatggccacccagatcagcagcgccatggagtacctggagaagaagaacttcatccacagagacctggccgccagaaactgcctggtgggcgagaaccacgtggtgaaggtggccgacttcggcctgagcagactgatgaccggcgacacctacaccgcccacgccggcgccaagttccccatcaagtggaccgcccccgagagcctggcctacaacaccttcagcatcaagagcgacgtgtgggccttcggcgtgctgctgtgggagatcgccacctacggcatgagcccctaccccggcatcgacctgagccaggtgtacgacctgctggagaagggctacagaatggagcagcccgagggctgcccccccaaggtgtacgagctgatgagagcctgctggaagtggagccccgccgacagacccagcttcgccgagacccaccaggccttcgagaccatgttccacgacagcagcatcagcgaggaggtggccgaggagctgggcagagccgccagcagcagcagcgtggtgccctacctgcccagactgcccatcctgcccagcaagaccagaaccctgaagaagcaggtggagaacaaggagaacatcgagggcgcccaggacgccaccgagaacagcgccagcagcctggcccccggcttcatcagaggcgcccaggccagcagcggcagccccgccctgcccagaaagcagagagacaagagccccagcagcctgctggaggacgccaaggagacctgcttcaccagagacagaaagggcggcttcttcagcagcttcatgaagaagagaaacgcccccaccccccccaagagaagcagcagcttcagagagatggagaaccagccccacaagaagtacgagctgaccggcctgcccgagcaggacagaatggccatgaccctgcccagaaactgccagagaagcaagctgcagctggagagaaccgtgagcaccagcagccagcccgaggagaacgtggacagagccaacgacatgctgcccaagaagagcgaggagagcgccgcccccagcagagagagacccaaggccaagctgctgcccagaggcgccaccgccctgcccctgagaacccccagcggcgacctggccatcaccgagaaggacccccccggcgtgggcgtggccggcgtggccgccgcccccaagggcaaggagaagaacggcggcgccagactgggcatggccggcgtgcccgaggacggcgagcagcccggctggcccagccccgccaaggccgcccccgtgctgcccaccacccacaaccacaaggtgcccgtgctgatcagccccaccctgaagcacacccccgccgacgtgcagctgatcggcaccgacagccagggcaacaagttcaagctgctgagcgagcaccaggtgaccagcagcggcgacaaggacagacccagaagagtgaagcccaagtgcgcccccccccccccccccgtgatgagactgctgcagcaccccagcatctgcagcgaccccaccgaggagcccaccgccctgaccgccggccagagcaccagcgagacccaggagggcggcaagaaggccgccctgggcgccgtgcccatcagcggcaaggccggcagacccgtgatgccccccccccaggtgcccctgcccaccagcagcatcagccccgccaagatggccaacggcaccgccggcaccaaggtggccctgagaaagaccaagcaggccgccgagaagatcagcgccgacaagatcagcaaggaggccctgctggagtgcgccgacctgctgagcagcgccctgaccgagcccgtgcccaacagccagctggtggacaccggccaccagctgctggactactgcagcggctacgtggactgcatcccccagaccagaaacaagttcgccttcagagaggccgtgagcaagctggagctgagcctgcaggagctgcaggtgagcagcgccgccgccggcgtgcccggcaccaaccccgtgctgaacaacctgctgagctgcgtgcaggagatcagcgacgtggtgcagagatag

SEQ ID NO: 51542 - DNA, 3195 bp, Artificial Sequence
  derived and/or modified sequence
atggtgctgggcacagtgctgctaccaccaaatagctacgggagagaccaggacacgagtctgtgctgtctgtgtactgaagcctccgaatcagccctcccagacttgactgatcacttcgcatcttgtgtcgaggatgggtttgagggggataagaccggaggcagtagccctgaggcactgcacagaccctatggctgcgacgtggaacctcaggccctgaacgaagcaataagatggagctctaaggaaaatctgctgggagcaaccgaaagcgacccaaatctgtttgtggcactgtatgactttgtcgcttctggagacaatactctttccatcacaaagggtgagaaactgcgagttcttggatacaaccagaatggagaatggtccgaagtacggagcaaaaacggacagggttgggttcctagtaattatataactcccgtgaactcccttgagaagcattcctggtaccacggcccagtctcaaggtccgctgccgaatacctgctgagctccttaatcaatgggtcctttctggtgagggaatctgaatctagtccaggtcaacttagcatttcactacgatatgagggtcgggtgtatcattatagaattaacacgaccgccgatggcaaggtctacgtcacggcggagtccagattctctacgttagcagaactagtgcaccaccacagcactgtggctgatggcctggtgacaaccctgcattacccggctcctaagtgcaataagcctaccgtatatggagtgtcccccatccacgacaagtgggaaatggagcgtacagacatcacgatgaaacataagctggggggcggtcagtacggggaagtgtacgtgggagtgtggaagaaatacagcctcactgtcgcagtgaagaccctgaaagaggatacaatggaggtagaagaatttctcaaggaggcagctgtgatgaaggaaataaagcaccccaacttggttcaactgttaggtgtgtgcacgctcgagccccctttctatatcgtaacggaatacatgccgtacggtaacctcctggactacctccgagagtgtaacagggaggaagttacagccgtggtgttattgtacatggcgacgcagatcagttccgcgatggagtacttagaaaaaaaaaattttatccacagggatcttgccgcccgaaattgtctggtgggtgaaaatcatgtcgtgaaggtggccgacttcggcctgtctcgcctcatgacaggcgacacttacaccgcccatgctggtgccaagttcccaatcaagtggaccgccccggagagtcttgcatataacactttttctattaagtccgacgtttgggccttcggagtactcctctgggagatagccacttatggaatgtctccctaccccggaatcgatttaagtcaggtttacgacctgttagagaaggggtatcgcatggaacaacctgaaggctgcccccctaaggtgtatgagctgatgcgggcatgttggaagtggtctccagctgatcggccttcattcgccgagacccaccaggcgtttgaaaccatgtttcacgattcatcaatctctgaagaggtcgcagaggaattggggcgcgctgcctcctcatctagcgtagtcccctatctgccccgcctgccgatcctcccttcaaaaactcgtacccttaaaaaacaggtggagaacaaggagaacattgaaggtgcgcaggacgcaacagaaaattcagcctcctcactggctcctggttttatcagaggtgctcaggcctcctctggatcccctgcactcccacgaaaacagcgagacaaaagccctagttcactcctcgaggacgctaaagagacctgctttacaagggacaggaagggggggttcttttcatcatttatgaagaagcgtaatgctccaactcctccgaagcggtcttccagctttcgggaaatggagaatcagccacataagaagtatgaactgaccggcctgcccgagcaggatcgcatggccatgaccttgcccagaaactgtcagaggtcaaagctccagctggagagaactgtgtcaacctctagccaacccgaagagaatgttgatcgggccaatgacatgctccccaaaaagtctgaagagagtgctgctccgtctcgcgagaggcccaaagctaagctgctcccccgtggagcaacagccctcccactacggaccccgtccggcgacctggccattactgagaaagatccaccaggagttggggttgcgggcgtggcagccgcacccaaaggcaaagagaaaaatggaggagcacgcttgggtatggctggagtgcctgaggatggggaacagcctggctggccatcccctgccaaagccgctcccgtcctgcccacaacacacaaccacaaggtgcccgtgcttatctcacccactctcaaacacacaccagctgatgtgcagctcatcggcacggattctcagggtaacaaattcaagttactctcggagcatcaggtcacttcgtctggcgacaaggaccgcccaaggagggtgaagcctaaatgtgcccctccccctccaccagtgatgagactcttgcagcatccctctatctgctccgacccgaccgaggaacccactgcactgaccgcaggccagtccacaagcgagactcaggaggggggaaaaaaggctgccctgggcgccgtgcctatatctggcaaagcaggtaggccagtcatgcctccccctcaggtgcccctgcccacctcctcaataagtcctgccaagatggccaatgggaccgctggtactaaggtcgcgctcagaaagacaaagcaggcagccgaaaaaatatcggctgataaaatctccaaggaggccctgctcgaatgcgctgatcttctttcttctgcacttacagagccagtccctaacagccaactagtggacacagggcaccagcttctggactattgttccggctacgtggactgcatcccccagacacgtaataagtttgcattccgcgaggctgtcagtaaattagagctttctttgcaggaacttcaagttagttcagcggccgcaggggtgccgggaaccaatccagtgttaaacaatctgctgtcttgtgtgcaggagatcagcgatgtggtccaaaggtag

SEQ ID NO: 51543 - DNA, 3195 bp, Artificial Sequence
  derived and/or modified sequence
atggtgctgggcaccgtgctgctgccccccaacagctatggccgggaccaggacaccagcctgtgctgcctgtgcacagaggccagcgagagcgccctgcctgacctgacagaccactttgccagctgtgtggaggatggctttgaaggagacaagacaggaggcagcagccctgaggccctgcaccggccctacggctgtgatgtggagccccaggccctgaatgaggccatccgctggagcagcaaggagaacctgctgggcgccacagaaagtgaccccaacctgtttgtggccctgtatgactttgtggccagcggggacaacaccctgagcatcaccaagggggagaagctgcgggtgctgggctacaaccagaatggagagtggagcgaggtgcgcagcaagaatggccagggctgggtgcccagcaactacatcacccctgtgaacagcctggagaagcacagctggtaccacggccctgtgagccgctctgctgctgagtacctgctgagcagcctcatcaatggcagcttcctggtgcgggagagcgagagcagccctggccagctgagcatcagcctgcgctatgagggccgggtgtaccactaccgcatcaacaccacagcagatggcaaggtgtatgtgacagctgagagccgcttcagcaccctggccgagctggtgcaccaccacagcacagtggctgatggcctggtgaccaccctgcactacccagcccccaagtgcaacaagcccaccgtgtatggagtgagccccatccatgacaagtgggagatggagaggacagacatcaccatgaagcacaagctgggcggcggccagtacggggaggtgtatgtgggcgtgtggaagaagtacagcctgactgtggccgtgaagaccctgaaggaggacaccatggaggtggaggagttcctgaaggaggccgctgtgatgaaggagatcaagcaccccaacctggtgcagctgctgggcgtgtgcaccctggagccccccttctacatcgtgacagagtacatgccctacggcaacctgctggactacctgcgggagtgcaaccgggaggaggtgacagctgtggtgctgctgtacatggccacccagatcagcagcgccatggagtacctggagaagaagaacttcatccaccgggacctggccgccaggaactgcctggtgggggagaaccacgtggtgaaggtggccgactttggcctgagccggctgatgaccggggacacctacacagcccacgccggggccaagttccccatcaagtggacagcccctgagagcctggcctacaacaccttcagcatcaagagtgatgtgtgggccttcggcgtgctgctgtgggagatcgccacctacggcatgagcccctacccaggcatcgacctgagccaggtgtatgacctgctggagaagggctacaggatggagcagcctgagggctgcccccccaaggtgtatgagctgatgagggcctgctggaagtggagccctgctgaccggcccagctttgctgagacccaccaggcctttgagaccatgtttcatgacagcagcatcagcgaggaggtggccgaggagctgggccgggccgccagcagcagctctgtggtgccctacctgccccggctgcccatcctgcccagcaagaccaggaccctgaagaagcaggtggagaacaaggaaaatattgaaggagcccaggatgccacagaaaattctgccagcagcctggcccctggcttcatccggggggcccaggccagcagcggcagccctgccctgcccaggaagcagagggacaagagccccagcagcctgctggaggatgccaaggagacctgcttcacccgggacaggaagggcggcttcttcagcagcttcatgaagaagagaaatgcccccaccccacccaagaggagcagcagcttccgggagatggagaaccagccccacaagaagtatgagctgaccggcctgcctgagcaggacaggatggccatgaccctgcccaggaactgccagaggagcaagctgcagctggagaggacagtgtccaccagcagccagcctgaggagaatgtggaccgggccaatgacatgctgcccaagaagtctgaggagagcgctgcccccagccgggagcggcccaaggccaagctgctgcccaggggggccacagccctgcccctgcggacccccagcggggacctggccatcacagagaaggaccccccaggagtgggcgtggccggcgtggccgccgcccccaagggcaaggagaagaatggaggagcccggctgggcatggccggcgtgcctgaagatggagagcagcccggctggcccagccctgccaaggccgcccctgtgctgcccaccacccacaaccacaaggtgcctgtgctgatcagccccaccctgaagcacaccccagcagatgtgcagctgattggaacagacagccagggcaacaagttcaagctgctgtctgagcaccaggtgaccagcagcggggacaaggaccggccccggcgggtgaagcccaagtgtgcccctcctcctcctcctgtgatgaggctgctgcagcaccccagcatctgcagcgaccccacagaggagcccacagccctgacagctggccagagcaccagcgagacccaggagggcggcaagaaggccgccctgggcgctgtgcccatcagcggcaaggccggccggcctgtgatgcccccaccccaggtgcccctgcccaccagcagcatcagccctgccaagatggccaacggcacagctggcaccaaggtggccctgaggaagaccaagcaggccgctgagaagatctctgctgacaagatcagcaaggaggccctgctggagtgtgccgacctgctgagcagcgccctgacagagcctgtgcccaacagccagctggtggacaccggccaccagctgctggactactgcagcggctacgtggactgcatcccccagaccaggaacaagtttgccttccgggaggccgtgtccaagctggagctgagcctgcaggagctgcaggtgagcagcgctgctgctggggtgcccggcaccaaccctgtgctgaacaacctgctgagctgtgtgcaggagatcagtgatgtggtgcagaggtag

SEQ ID NO: 51544 - DNA, 3195 bp, Artificial Sequence
  derived and/or modified sequence
atggtgctgggcaccgtgctgctgccccccaacagctacggccgggaccaagatactagtctgtgttgcctgtgcactgaagcctccgagtctgcactccctgatctcaccgatcacttcgcctcctgtgtggaagatggctttgaaggagacaaaacaggggggagctcccccgaagccttgcataggccatacggatgtgatgtggaaccacaggcccttaacgaagccatcagatggtcctccaaagagaatctcctgggcgccaccgaatcagatccgaacctgttcgtggctttatatgattttgtagcaagcggcgataacacattaagtataacaaaaggagagaagctgcgggtgctaggttacaaccagaatggggagtggagcgaggtccggagcaagaacgggcaggggtgggtacccagtaactacatcacaccagtaaactccttggaaaaacattcctggtatcatggtcccgtctccagaagtgccgcagaatatttgttgagctctcttattaatgggagtttcctggtcagagagtcagagagctcaccaggacaattgtcgatctcactgcggtacgaggggcgcgtgtaccattacagaatcaacaccacagccgacgggaaggtgtatgtaacagctgagagtaggttttccacacttgcagagttagtgcaccaccattcaactgtcgctgacgggcttgttactactctgcattatccagcccccaaatgtaacaaaccaaccgtctatggtgtgagccctatacacgataagtgggaaatggaacggacagacatcacaatgaagcataagctgggcggagggcagtacggggaggtatacgtgggtgtctggaagaagtactccctgactgtggccgtgaagacactcaaggaagataccatggaggtcgaggagttcctgaaggaagctgccgttatgaaagagattaagcaccccaacctggtgcagctcctgggtgtgtgcacgctagaaccaccattttacatcgttacagagtatatgccttacggcaatctcttggattatctccgcgagtgcaaccgcgaagaggtaaccgcagtagtgttattatatatggccacccagatctctagcgcaatggagtatttagaaaaaaaaaattttattcatcgagacctggccgctcggaactgtctggtgggtgaaaatcatgtggtgaaagtggcagattttggacttagtagactgatgaccggtgacacttataccgcccatgcaggagccaaattcccaattaagtggaccgctccagaatccctggcctacaacactttctccatcaagtccgacgtgtgggccttcggggtgcttctgtgggaaattgcaacttatggaatgtcaccgtatccaggaatcgacctaagccaggtttacgatctgttagaaaagggatatcgtatggaacagccagaaggttgcccacccaaggtttacgagttgatgcgcgcctgctggaaatggagccccgccgatagaccttccttcgctgagacgcatcaggcctttgagacaatgtttcacgacagcagcataagtgaggaagttgcggaggagctggggagagcggcttctagctcttccgtggtcccctaccttcctcgcttacccatcctgccatctaagacaaggacgctcaaaaaacaggtggaaaacaaggagaacatagagggcgctcaggacgcaactgagaattccgccagttccctggctcctggtttcattcgtggcgcgcaggcaagctctgggagtcccgcattacctcgaaagcagcgcgacaaatcacctagttcccttctggaagacgctaaggaaacttgttttacccgcgatcgtaaggggggttttttttcctcttttatgaagaagcgcaacgcgccaactcccccgaaacggtcgagtagtttccgggagatggaaaaccagccccataagaaatacgaactgaccggcctcccggagcaggaccgaatggctatgacactgcctcgcaattgtcagagaagcaagcttcagttggaaagaacagtgtcgacatcatcccaacccgaagagaatgtggacagggctaatgacatgctgcccaagaaaagtgaagagtcagccgccccatcaagagagcggcctaaggccaaactgttacctcggggcgcaacggccttgcccctccggacccctagcggggacctcgccatcacggaaaaagatccccccggcgttggcgtggcaggggtggccgcagcccccaaaggtaaggaaaagaacggcggagccagacttggtatggcgggcgtgcccgaggacggagagcagccaggttggcccagccccgctaaagcggcacctgtgctccccactactcacaatcataaggtccctgtgctcatctccccgacactgaagcacaccccagccgacgttcagctgattggcaccgacagtcagggaaataaattcaagctcctctctgaacaccaggttacttcctctggtgacaaagatcggccaaggagggtgaagccgaagtgcgctcccccaccaccacccgtcatgcggcttttgcagcatccatctatttgctccgaccctaccgaagagcccactgccctcaccgcaggacagagtacaagcgagacccaagaaggtggaaagaaagctgccctgggtgccgtgcccattagcgggaaagcaggtcgaccagtgatgccacctccccaggtcccacttccgacatcttctattagtcccgcaaagatggcgaacgggaccgcaggaacaaaggtcgctctgaggaagactaagcaggctgcagagaagattagcgcagacaagatttcaaaagaagctctgctggaatgcgccgatctgctgtctagcgcgttaacagaacctgtacccaattctcaactggtagacaccggtcaccagcttctagattactgttccggctatgtcgattgcatccctcaaacgcggaataagttcgcatttagagaagccgtttctaaactcgagctgtctctacaagaactgcaagtctcctctgccgcagctggagtccccgggactaatcccgtgctgaacaacctgctttcttgcgtccaggaaatctctgacgtagtgcaacggtag

SEQ ID NO: 51545 - DNA, 3195 bp, Artificial Sequence
  derived and/or modified sequence
atggtgcttggtacagttttactgccgcctaattcctacggcagggaccaggacacatcactttgctgcctctgcacagaggctagtgaaagcgctctgcctgaccttacagaccactttgcatcctgtgtcgaggacggatttgagggggacaaaaccggaggcagctcccccgaggctctccacaggccatatgggtgcgacgtcgaaccacaagctctgaatgaggctatccggtggagctccaaggaaaatctgctgggcgcaaccgaatccgatcctaacctgttcgtcgccctttacgatttcgttgcttccggcgacaacacattgtccatcacaaaaggcgagaaactacgcgtcctgggatataatcaaaatggggagtggtcagaggtaaggtcaaagaatgggcagggatgggttccaagcaactacatcactccggtgaattctctggaaaagcattcatggtaccacggccctgtgtcccgaagcgccgcagaatacctcctctccagtctcatcaatggatctttcctggtacgggagtccgagagctctccaggacagctgtcaatttctctccgatatgagggacgagtctaccactacagaatcaacaccacagctgatggaaaggtctacgtgacggctgaaagtagatttagcactctggccgagctggtgcaccaccacagcactgtagccgatggactggtgactacgttacactaccctgccccaaaatgtaataagcccacagtgtacggagtcagtcctatccatgataaatgggagatggagagaactgacattactatgaagcacaaactgggcggaggtcagtatggtgaggtttacgttggcgtttggaaaaagtattccttgaccgtggccgtgaaaactttgaaggaagacaccatggaagtggaggaattcctgaaagaagccgcagtgatgaaggagatcaagcaccccaacctggtgcaattgctcggagtctgcacactcgagccccctttttatatagtgacagagtatatgccatatgggaatctcctcgattatctgagggagtgcaacagagaagaggtcacagccgtggtgcttttgtacatggccacgcaaatatccagtgccatggaatatctggagaaaaagaacttcatccacagggatctcgctgctagaaattgtttggtcggcgaaaatcatgtggtgaaagttgcagatttcggattgtcaaggttgatgactggggatacttataccgctcacgcgggtgcaaagtttcctatcaagtggacagcacccgagtcacttgcgtataacactttttctattaaatctgatgtctgggcgtttggtgtcttgctgtgggagattgccacatatggcatgagcccataccctggcattgacttgtctcaagtctacgatctcctggaaaaaggataccgaatggaacagcctgagggatgccccccaaaagtgtatgaacttatgcgggcatgctggaaatggtcgcctgcagaccggccatccttcgcggagacacatcaggcctttgaaactatgtttcacgattcctctattagtgaggaagtggctgaggaactgggcagggccgcatcatccagttccgtggtcccttacctgcctcgcctacccatacttcccagcaaaacaaggactttgaagaagcaagtggagaacaaggagaacatagagggagctcaggatgcaacggagaacagtgcctcttcgctagcccctggtttcattagaggcgcacaggcttcttctgggtcgccggctctgccgaggaagcagcgcgataagtcccctagcagcctcctggaggacgcgaaagagacctgtttcacccgcgatcggaagggcggtttcttttcatcctttatgaaaaaacgcaacgcccctactccccctaagcgatccagcagctttcgggagatggagaatcaaccgcataaaaagtacgaactgaccggactccccgagcaagaccggatggcaatgaccctccctagaaattgccagaggtccaaacttcagctggagcgtacagtgtcaacctcctcgcagcctgaggaaaacgtagaccgggcaaacgatatgctcccaaaaaagagcgaggagtccgctgccccaagtagggaaaggcccaaagccaaactcctgccccgtggagctacagcactaccgcttcggaccccgtccggggacctggctataactgagaaagacccgccaggggtaggtgtcgcaggggtggcagccgctcctaaaggaaaggaaaaaaatggcggagcacgactgggcatggcaggagttcctgaggatggagaacagccgggatggccctctccagctaaggcggctccggtcctgccaacaacacacaaccacaaagtgcccgtcctgatttctcctaccctcaagcacactccggcagacgtgcagcttattggcacagattctcaaggcaacaagttcaaattgctgtctgaacaccaggtaacttcgtcaggcgacaaggacaggcctagacgcgtgaaacccaagtgcgcgccacccccaccaccggtgatgcggttgctgcaacaccccagtatctgcagcgacccgactgaagagcctaccgctttgacagcaggtcagtcaacttccgagactcaagaaggagggaaaaaagccgcactgggcgctgtgccaattagtggcaaggccggacgccctgtgatgccccctccgcaggtgcctctccccactagcagcatttctcctgccaaaatggctaacggcactgcaggaaccaaagtggccctacgtaagaccaaacaggctgccgagaaaatatcagccgataaaatctcaaaggaagccctcctcgaatgtgccgacctgctgtccagcgccttgaccgagcccgtgccaaattcacagcttgtggacaccgggcaccaattgctcgattattgctcaggctacgttgactgtataccgcagaccagaaacaagtttgccttccgagaagcagtgtctaaactggaattatctcttcaggagctgcaagtgtcgagcgctgccgcaggagtacccggaaccaaccctgtcctaaataatctgctcagttgtgtacaggagatttctgacgtcgtgcagagatag

SEQ ID NO: 51546 - DNA, 6910 bp, Artificial Sequence
  derived and/or modified sequence
ctctttacacagaacagtttaacttttgtgcttctgggcagaggtatggtccttgggacagttctccttccacctaatagttatggcagagatcaggacacttcactttgctgcctgtgcactgaggcctcagaatctgctctacccgacttaacagatcactttgccagctgtgtggaggatggatttgagggagacaagactggaggcagtagtccagaagctttgcatcgtccctatggttgtgatgttgaaccccaggcactaaatgaggctatcaggtggagctccaaggagaacttgctcggagccactgagagtgaccctaatctcttcgttgcactttatgattttgtagcaagtggtgataacacactcagcatcactaaaggtgaaaagctacgagtccttggttacaaccagaatggtgagtggagtgaagttcgctctaagaatgggcagggctgggtgccaagcaactacatcaccccagtgaacagcctggaaaaacactcctggtaccatggacctgtgtcacgcagtgcagctgagtatctgctcagcagtctaatcaatggcagcttcctggtgcgagaaagtgagagtagccctgggcagctgtccatctcgctcaggtacgagggacgtgtgtatcactacaggatcaataccactgcagatggcaaggtgtatgtgactgctgagagccgcttcagcaccttggcagagcttgtacaccatcactccacagtggctgatgggctggtgacaacattacactacccagcacccaagtgtaataagcctacagtctatggtgtgtcccccatccacgacaaatgggaaatggagcgaacagatattaccatgaagcacaaacttgggggcggtcagtatggagaggtttacgttggcgtctggaagaaatacagccttacagttgctgtgaaaacattgaaggaagataccatggaggtagaagaattcctgaaagaagctgcagtaatgaaggaaatcaagcatcctaatctggtacaacttttaggtgtgtgtactttggagccaccattttacattgtgactgaatacatgccatacgggaatttgctggattacctccgagaatgcaaccgagaagaggtgactgcagttgtgctgctctacatggccactcagatttcttctgcaatggagtacttagagaagaagaatttcatccatagagatcttgcagctcgtaactgcctagtgggagaaaaccatgtggtaaaagtggctgactttggcttaagtagattgatgactggagacacttatactgctcatgctggagccaaatttcctattaagtggacagcaccagagagtcttgcctacaataccttctcaattaaatctgacgtctgggcttttggggtattgttgtgggaaattgctacctatggaatgtcaccatatccaggtattgacctgtctcaggtctatgacctactagaaaaaggatatcgaatggaacagcctgagggatgcccccctaaggtttatgaacttatgagagcatgctggaagtggagccctgccgataggccctcttttgctgaaacacaccaagcttttgaaaccatgttccatgactccagcatttctgaagaggtagctgaggagcttgggagagccgcctcctcgtcatctgttgttccatacctgccccggctacctatacttccttccaagactcggacactgaagaaacaggtggagaacaaggagaacattgaaggggcacaagatgccacagaaaattctgcttccagtttagcaccagggttcatcagaggtgcacaggcctctagtggatccccagcactgcctcgaaagcaaagagacaagtcacccagcagcctcttggaagatgccaaagagacatgcttcaccagggataggaaggggggcttcttcagctccttcatgaagaagagaaatgctcctacaccccccaaacgcagcagctccttccgagaaatggagaatcagccccataagaaatacgaactcacggggcttccagagcaggataggatggcaatgacccttcccaggaactgccagaggtccaaactccagctggaaaggacagtgtccacctcttctcagccagaagagaatgtggacagggccaatgacatgcttccaaaaaaatcagaggaaagtgctgctccaagcagggagagaccaaaagccaagttattgcccagaggagccacagctcttcctctcagaacaccctctggggatctagccattacagagaaggaccctccaggggtgggagtggctggagtggcagctgcccccaagggtaaagagaagaatggtggggcacgacttgggatggctggagttccagaggatggagagcagccgggctggccttctccagccaaggctgcccccgtcctcccaaccactcacaaccacaaagtgccagtccttatctcacccactctgaaacacactccagctgacgtgcagctcattggcacagactctcaggggaataaattcaagctcttatctgagcatcaggtcacatcctctggagacaaggaccgaccccgacgggtaaaaccaaagtgtgccccacccccaccaccagtgatgagactactgcagcatccgtccatctgctcagaccctacagaagagccaactgccctaactgcaggacagtccacatcagaaacacaggaaggaggaaagaaggcagctctgggcgcagtgcccatcagtgggaaagctgggaggccagtgatgcctccacctcaagtgcctctgcccacatcttccatctcgccagccaaaatggccaatggcacagcaggtactaaagtggctctgagaaaaaccaaacaggccgctgagaaaatctcagcagacaaaatcagcaaagaggccctgctggaatgtgctgacctactgtccagtgcactcacggaacctgtgcccaacagccagctggtagacactggacaccagctgcttgactactgctcaggctatgtggactgcatccctcaaactcgcaacaaatttgccttccgagaggctgtgagcaaactggaactcagcctgcaggagctacaggtttcttcagcagctgctggtgtgcccgggacaaaccctgtccttaataacttattgtcatgtgtacaggaaatcagtgatgtggtgcagaggtagccactgttagcctggtgggaaaatgcacacatttctgaggggagagggaaaaggacttgttttcctgtgttcttgttttcagaaaatgaaagactcatacttgagtgtgtttatgtgaagtacctcagatccctgagttctcacgtttacagtttcatctcaaaaataagaagcaaaccacataagtataggagaggtaaattaagtgggggcaaggcagtagtggacagggttggaaactgcactggaaaatagggaacatgtgtatgtcataaggaaggcaatgcagcccatccctacctggaatgctgggaagtgctaggcagggctgctctcagcaagactgcagcagctgcacccagacctggggctctggtaggtactaatggtgattatgctccaatttacctaatgaatttggtgggacagcagaaaagaaagctgggaatgtaccaagagaaatttttgttcagggctgttggaagtagctgttagccttgcttccacaaggccattgctgctgtaataagaactgcaaatcagagtgctacaacataaaactgggaaatatggccctatctgaatgcctctgtcctattttccgctggtgtatcagttagtgcaggaagtaaagaatgctggaaagttgaatcagaaattgaaaaccttctaaaatcttacacagattagcagaagtcacttctcccagtctggtatattatttcataatggaccaggatcggcttcctgcctgttggtggctatctgtaaaccataagtacaggggtctccctagtggttcttctctgtcttttgctgggcaggctgtcttcctttattcctggtagcattcagagcattaaccagtgttgattttgaaaatagtagtccctacaggttctcacaaaggaatgaatcctgttctgatacagttcccctgcatactgacatactggccaaggacttgagcagctgtgtatttttctttatcaactaaaataccagggagatggtcttttcttgaaacccagtggcctgtatgtgactgagaggaaaagctggcttggtcctaatggctgtttctctgtacctttcccttcccttaccaccttaagcccaatccaggtagagaatagggagaggcattctcctctctatggatttgaagtgaatcacccccacattattctcacatgcttttcttctctcacatattcctccctactcccccacccaatcattgtgcttatttgtacagatcttattgggaatattctttatttattttgtcatttcacttctattttaagaatgcataattgaaggagtagtcattttcagggagcaccaggtagaccctgggaacctaatgacttaatccttaaatatgttttgcccttgaaaaataggccttttccttccttccttagttataattgtggaagctaattaggatggcatggaagtgaatctaatgagttaggtattattaatgttcttggtatcgggtctaattccagttactgcttcattctctttttaaagctttatgaatacttcccccatcctccccaaggagagctcaatacacacatatttttattttattctctcaaaggaatattagcttaggaagataggaattcaacattgagcactgagttttcttctggctctgtcattgatacactgtcaaaccacagcctcatctcttaatctatttaattaaggtaacagtacatgttctcaagggtgttgcaagtaagtgtgcagctatcccttggagagcctctctggaaagctcttttagtgcagtgttgttatgctgaattgttttccattatcttatttgctgagtagaaaatattaatgaaattaagaattgttgagattatatgaattgggctagaatactaaggggaaaactatgttttgaatagagtttggcatttttgaccaagaacaaaattgagttttcattggaaagaaaggaaaccttgattcttaccattgctgctccaaaggaggcccaggttaagaggattagaggagacacgcggtgctgggcattcctggcaggtgttgggtgatccccgcagtatgtcacctgcagttgcagcacaggcagctagtgattgggttcatctcctcctagtggttggaagagaactcagatgtaaaaaccagcggtccttctcccaccttctttcctgccattcttgctcatcatacatgtccgtaaacttgaagaactcgttttagcagctagccttttaaggtcgaggatgggaaagctaaaactgtagaatattattatgctgctttttaggtttatccctgttgttgtgggatgcaagttaagggattgtaattgtttttcagggtttttttgttttttgttttttaagcaagggctctattttcccttgagagttctggaactaagccttggagaaacactactgagtgtatttaggctccctggttttcttgcccaacaacaatctgaagggtagggggtgggggctgtgtcttactcaggggcagcacctagctgtcttgcctacagtgggtgcacgatatataaatggaattgatttttgtcaacactgtcaagagtggcattgactattggagcataccccgtccacatgatgcttgaactatgtaacttcaggggttgagggctcaaggttcaggttaaagaggcactgtcaacttactatacaagcataatttaggtttttcctttttctacttgaaaaggaccagcttaaacacaaacccttatgtaaattaaaaggtttgaatccaaagcagagagaactgcttctggaaaagtgtagtttaattttaactattctaaaagcaatgagcaaaggcccttgtccaaggcgttgacagttttctaaagtggttatgctgtatatctggatgcatgcctttgggctgccactgcttgattcctttcatgtacagataatattacttcagtttagatttcccactttaaaatgcagtgatttgtgttgaatacatcttgattgtgctttacctaaagtattttcttaaaaggctttgtgtaaaatttaaatgtatatattttcctgtagacttccatcatgattttcagagattagccttaaaaaatttggccctaagaaattcattcagtgtttttctagatgacctctgtacatagaggtcattatagtggagaccctttaccagcagcattttaagatttaaattagatagaaagtttcttaggattcaactgaaaattggctagtaaaatatgtcccaggtaataaagcatgctgactttgctaaggcactgcccatttttatttaactaaagtcatggagattttgagtttaaaggatgcagtatagatagtggtttagtgtttaggctctaatgccagtctaaaaggcaagtcatttaaccttgggagcctcagtttcctcactgtaaaacagggataataatagtaactacctcagggttgttgtaaggattaaatgagatgatatttgtaagatacttagctcaagtgcctggcacacaatgagcacactctataaatgttctactactactattattaacacctagtctagggatgcacagcagaatcccctagggttaaaaaacaaaacaaaacaa

SEQ ID NO: 51547 - protein, 542 aa, Artificial Sequence
  derived and/or modified sequence
MGQQVGRVGEAPGLQQPQPRGIRGSSAARPSGRRRDPAGRTTETGFNIFTQHEALHRPYGCDVEPQALNEAIRWSSKENLLGATESDPNLFVALYDFVASGDNTLSITKGEKLRVLGYNQNGEWSEVRSKNGQGWVPSNYITPVNSLEKHSWYHGPVSRSAAEYLLSSLINGSFLVRESESSPGQLSISLRYEGRVYHYRINTTADGKVYVTAESRFSTLAELVHHHSTVADGLVTTLHYPAPKCNKPTVYGVSPIHDKWEMERTDITMKHKLGGGQYGEVYVGVWKKYSLTVAVKTLKEDTMEVEEFLKEAAVMKEIKHPNLVQLLGVCTLEPPFYIVTEYMPYGNLLDYLRECNREEVTAVVLLYMATQISSAMEYLEKKNFIHRDLAARNCLVGENHVVKVADFGLSRLMTGDTYTAHAGAKFPIKWTAPESLAYNTFSIKSDVWAFGVLLWEIATYGMSPYPGIDLSQVYDLLEKGYRMEQPEGCPPKVYELMRACWKWSPADRPSFAETHQAFETMFHDSSISEVLLHCANQTCITL

SEQ ID NO: 51548 - DNA, 1629 bp, Artificial Sequence
  derived and/or modified sequence
atgggccagcaggtgggcagagtgggcgaggcccccggcctgcagcagccccagcccagaggcatcagaggcagcagcgccgccagacccagcggcagaagaagagaccccgccggcagaaccaccgagaccggcttcaacatcttcacccagcacgaggccctgcacagaccctacggctgcgacgtggagccccaggccctgaacgaggccatcagatggagcagcaaggagaacctgctgggcgccaccgagagcgaccccaacctgttcgtggccctgtacgacttcgtggccagcggcgacaacaccctgagcatcaccaagggcgagaagctgagagtgctgggctacaaccagaacggcgagtggagcgaggtgagaagcaagaacggccagggctgggtgcccagcaactacatcacccccgtgaacagcctggagaagcacagctggtaccacggccccgtgagcagaagcgccgccgagtacctgctgagcagcctgatcaacggcagcttcctggtgagagagagcgagagcagccccggccagctgagcatcagcctgagatacgagggcagagtgtaccactacagaatcaacaccaccgccgacggcaaggtgtacgtgaccgccgagagcagattcagcaccctggccgagctggtgcaccaccacagcaccgtggccgacggcctggtgaccaccctgcactaccccgcccccaagtgcaacaagcccaccgtgtacggcgtgagccccatccacgacaagtgggagatggagagaaccgacatcaccatgaagcacaagctgggcggcggccagtacggcgaggtgtacgtgggcgtgtggaagaagtacagcctgaccgtggccgtgaagaccctgaaggaggacaccatggaggtggaggagttcctgaaggaggccgccgtgatgaaggagatcaagcaccccaacctggtgcagctgctgggcgtgtgcaccctggagccccccttctacatcgtgaccgagtacatgccctacggcaacctgctggactacctgagagagtgcaacagagaggaggtgaccgccgtggtgctgctgtacatggccacccagatcagcagcgccatggagtacctggagaagaagaacttcatccacagagacctggccgccagaaactgcctggtgggcgagaaccacgtggtgaaggtggccgacttcggcctgagcagactgatgaccggcgacacctacaccgcccacgccggcgccaagttccccatcaagtggaccgcccccgagagcctggcctacaacaccttcagcatcaagagcgacgtgtgggccttcggcgtgctgctgtgggagatcgccacctacggcatgagcccctaccccggcatcgacctgagccaggtgtacgacctgctggagaagggctacagaatggagcagcccgagggctgcccccccaaggtgtacgagctgatgagagcctgctggaagtggagccccgccgacagacccagcttcgccgagacccaccaggccttcgagaccatgttccacgacagcagcatcagcgaggtgctgctgcactgcgccaaccagacctgcatcaccctgtag

SEQ ID NO: 51549 - DNA, 1629 bp, Artificial Sequence
  derived and/or modified sequence
atggggcagcaggtcggccgggtaggggaggcacccggccttcagcagccccagcctagaggcattcgcgggagcagcgcggcccgtccgagcggccgaagaagggatcccgcgggcagaactacagaaacaggctttaatatcttcacccaacacgaggcactccatcggccttatggctgcgacgtcgaaccccaagccttgaatgaggccattcgttggagtagcaaagaaaacctgttgggcgcgactgagagcgatccgaacctgttcgtcgctctctacgacttcgtggcctccggagacaacaccctgtccatcacaaagggtgagaaacttcgagtgctgggttacaatcagaatggggagtggtccgaagtccgaagcaagaacggtcagggttgggtgcctagtaattatatcacacctgtgaacagccttgagaagcactcttggtaccatgggcccgttagtcgatctgccgctgaatacctgcttagttccctgataaacggctcctttctagtgagagagtccgaatcttctcccggtcagctgagtatcagcttgcgctacgagggtagggtctaccattaccgcatcaatacaaccgcagatggtaaggtgtacgtgaccgccgaatcgagatttagtacactggcagagctcgttcaccatcacagcaccgtcgccgacggcctcgtgacgactctgcattaccctgcacccaaatgcaataaaccaactgtgtatggcgtcagtccaatacacgataaatgggaaatggagagaactgacatcacaatgaagcacaagctggggggggggcagtacggagaagtatacgtgggagtctggaagaaatactccctgacagtggccgttaagactttgaaagaagataccatggaggtcgaggagtttctcaaggaagcggcagtcatgaaggaaatcaagcaccctaacctggtgcaactgttgggtgtgtgcactctggaaccccctttctatattgttaccgagtacatgccatacggcaacttactggattacctgagggaatgcaacagggaagaggtaacggctgttgttctgctctatatggctacccagatatcaagtgctatggagtatctcgagaaaaagaactttatccacagagacctggcagctcgtaattgcctcgtaggcgagaaccatgtcgtgaaggtcgctgactttggcctgagccggctcatgaccggtgatacctataccgcccatgccggggccaagtttccaataaagtggactgcacccgagagtctcgcctataacaccttctctatcaagagcgacgtgtgggccttcggtgtgctactgtgggaaatagccacatacgggatgtccccctaccctggcatcgatctgtcccaggtgtacgatctgttggaaaagggctaccggatggagcagccggagggatgtccccctaaggtctacgagttaatgagggcctgttggaaatggtcccccgccgacaggccaagctttgccgagacccatcaggccttcgaaactatgtttcatgacagttctattagtgaagtgttgctgcactgtgcaaaccagacctgtattaccctttag

SEQ ID NO: 51550 - DNA, 1629 bp, Artificial Sequence
  derived and/or modified sequence
atgggccagcaggtgggccgggtgggggaggcccctggcctgcagcagccccagccccggggcatccggggcagcagcgctgcccggcccagcggcagaagaagagatcctgctggccgcaccacagagaccggcttcaacatcttcacccagcacgaggccctgcaccggccctacggctgtgatgtggagccccaggccctgaatgaggccatccgctggagcagcaaggagaacctgctgggcgccacagaaagtgaccccaacctgtttgtggccctgtatgactttgtggccagcggggacaacaccctgagcatcaccaagggggagaagctgcgggtgctgggctacaaccagaatggagagtggagcgaggtgcgcagcaagaatggccagggctgggtgcccagcaactacatcacccctgtgaacagcctggagaagcacagctggtaccacggccctgtgagccgctctgctgctgagtacctgctgagcagcctcatcaatggcagcttcctggtgcgggagagcgagagcagccctggccagctgagcatcagcctgcgctatgagggccgggtgtaccactaccgcatcaacaccacagcagatggcaaggtgtatgtgacagctgagagccgcttcagcaccctggccgagctggtgcaccaccacagcacagtggctgatggcctggtgaccaccctgcactacccagcccccaagtgcaacaagcccaccgtgtatggagtgagccccatccatgacaagtgggagatggagaggacagacatcaccatgaagcacaagctgggcggcggccagtacggggaggtgtatgtgggcgtgtggaagaagtacagcctgactgtggccgtgaagaccctgaaggaggacaccatggaggtggaggagttcctgaaggaggccgctgtgatgaaggagatcaagcaccccaacctggtgcagctgctgggcgtgtgcaccctggagccccccttctacatcgtgacagagtacatgccctacggcaacctgctggactacctgcgggagtgcaaccgggaggaggtgacagctgtggtgctgctgtacatggccacccagatcagcagcgccatggagtacctggagaagaagaacttcatccaccgggacctggccgccaggaactgcctggtgggggagaaccacgtggtgaaggtggccgactttggcctgagccggctgatgaccggggacacctacacagcccacgccggggccaagttccccatcaagtggacagcccctgagagcctggcctacaacaccttcagcatcaagagtgatgtgtgggccttcggcgtgctgctgtgggagatcgccacctacggcatgagcccctacccaggcatcgacctgagccaggtgtatgacctgctggagaagggctacaggatggagcagcctgagggctgcccccccaaggtgtatgagctgatgagggcctgctggaagtggagccctgctgaccggcccagctttgctgagacccaccaggcctttgagaccatgtttcatgacagcagcatcagcgaggtgctgctgcactgtgccaaccagacctgcatcaccctgtag

SEQ ID NO: 51551 - DNA, 1629 bp, Artificial Sequence
  derived and/or modified sequence
atgggccagcaggtgggccgggtgggcgaggcccccggcctgcagcaaccacagccgcggggtattaggggatcctccgcagcacgtcccagcggcaggaggagggatcctgccgggaggacaactgagaccggattcaacatcttcacacagcacgaagctctgcaccgaccctatggatgcgatgttgagccacaggcgctgaacgaggccatcaggtggtccagtaaggaaaatctcctgggggccaccgagagtgatccgaacctgtttgttgcattatatgattttgtcgcctcgggcgataatactttatccatcactaagggggagaagctgagggtgcttgggtataaccaaaacggcgaatggtcagaggtccgatctaaaaatggccagggatgggtgccctctaattacattaccccagtaaatagcctcgaaaaacactcttggtatcacggtccagtgtcacgatcggctgccgagtacctgttatcctccttgattaacggatcttttctcgtgcgggagtcggagtctagccccggccagctgagcatttctcttcggtacgaagggagagtgtatcactaccgaatcaacaccaccgccgacggtaaagtgtacgtgaccgccgaaagtagatttagcaccttagctgaacttgttcaccaccacagtactgtggctgatggactggttaccacactacattatccagcacccaaatgcaataagcccaccgtgtatggagtgagccccattcatgataagtgggaaatggaaaggaccgacatcaccatgaaacataaactgggcggggggcagtacggtgaagtgtacgtaggcgtctggaaaaagtactctttgacagtggctgtgaaaacccttaaggaggacactatggaggttgaggagtttcttaaagaagccgctgttatgaaagagatcaagcatcctaatctagtgcagcttctgggcgtctgtacactggaacccccattctatattgtaactgagtacatgccctacggcaatctactggattaccttcgtgagtgtaatcgcgaagaggtgacagcagtagtactactctacatggctacgcagatttccagcgcgatggaatatctggaaaaaaaaaactttatccatcgggacctggctgcccgtaactgtttggtgggtgagaaccatgtcgttaaagtggctgacttcggcttgagcaggctgatgactggtgatacctacactgcccatgcaggcgcaaagtttcctataaagtggaccgccccggaatccctggcatataatacattttccattaagtccgacgtgtgggcctttggagtgcttttatgggaaattgccacatacggaatgagcccgtaccccggtatagatcttagccaggtttacgacttgctggagaagggatataggatggaacagcccgaagggtgccctcctaaggtgtacgagctgatgcgagcctgctggaaatggtcccccgctgaccgcccctctttcgccgaaactcatcaagcctttgagaccatgttccacgattcctccatttccgaagtgctcctccactgcgccaaccagacctgtatcactctgtag

SEQ ID NO: 51552 - DNA, 1629 bp, Artificial Sequence
  derived and/or modified sequence
atgggccagcaagtgggacgggtgggggaggcacctgggctgcagcaaccacagcccaggggcatccgtggatcttccgctgcacggcctagtggcaggcgccgagatcctgccggaaggaccaccgaaaccggttttaatatctttacacagcacgaagcactgcacaggccctacggctgtgacgtcgagccacaagccctaaacgaggccattaggtggtcttcgaaggaaaatctgctgggcgcaactgagagcgacccgaatctgttcgtcgcgctgtatgacttcgtggcttcaggggacaacaccttatctatcactaaaggtgaaaagctcagagtcttgggatacaaccagaatggcgagtggtcagaggtgcgctccaaaaacggccaggggtgggtcccctcgaactacattactcccgtcaattctttagagaaacactcatggtatcatgggcctgtgagccggtctgccgcagagtaccttctttcatccctcattaatggcagctttctggtgagagaaagtgagtcgagccctgggcaactcagcatcagcttgcggtacgaagggagggtgtaccactatcggatcaacacgactgccgacggtaaagtctacgtgacagcggagagccgttttagtacccttgccgagctggtgcatcaccattctaccgtggcagacgggctggttaccaccctgcactatccagctcccaaatgtaataagcccacagtgtacggagtctccccaatccacgacaaatgggagatggaaaggacagacataaccatgaaacataaactaggcggaggccagtatggagaggtctacgtgggggtgtggaaaaaatactcattgaccgttgctgtgaagaccctcaaggaggatacaatggaggtggaggagtttctgaaggaagcggcagtgatgaaagaaatcaagcatcccaacttagtgcagctcctgggtgtatgcacgttggagccccctttctatatagtgactgaatacatgccatacggtaacctgctcgactatttaagggaatgtaatcgggaagaggttacagctgttgttttgctgtacatggctacccagatatcttctgccatggagtacctcgaaaagaagaacttcattcacagggatctggctgccagaaattgcttggtgggggaaaatcacgttgttaaggtggcagactttggcctgtcaagacttatgaccggggacacctataccgctcatgctggagcgaagttcccgatcaaatggactgcgcctgaaagtctagcatacaatacgttttccattaagtcagatgtgtgggcgttcggagtgctactatgggagattgcaacttatggaatgagcccttacccagggattgatctgtcccaggtttatgaccttctggaaaagggatacagaatggaacaaccagaggggtgccctcctaaggtctacgaacttatgcgggcttgttggaaatggtcgcctgccgacagacccagcttcgctgagacccaccaagcctttgagacgatgttccatgactcttcaatttctgaagtcctcttgcattgcgcaaatcagacctgcatcacactgtag

SEQ ID NO: 51553 - DNA, 2140 bp, Artificial Sequence
  derived and/or modified sequence
gctcggtggtttaaagatggcggcggcggtggcggcggcggcggcggcggcgttgggggcgcggagccgcgacaggaggagggaaaagcagaatctgtgagtcgcctggaggcagcgcggcggctgccgtgaggaggccgggtgcggagccgccggtggcccagccactcagggccagggcctgggctgggagggagagaccggagcagcgccaggagcccgaggccggagccgaggaggaatgtgaccaggggtcggcgggggcgcgggagtacgcgagagcagggatggggcagcaggtgggccgcgtcggggaagctccggggctccagcagcctcagccccgcgggatccggggcagcagtgcagccaggccctccggccgcaggcgggacccggcggggcgcaccacagagaccggcttcaatatcttcacccagcatgaagctttgcatcgtccctatggttgtgatgttgaaccccaggcactaaatgaggctatcaggtggagctccaaggagaacttgctcggagccactgagagtgaccctaatctcttcgttgcactttatgattttgtagcaagtggtgataacacactcagcatcactaaaggtgaaaagctacgagtccttggttacaaccagaatggtgagtggagtgaagttcgctctaagaatgggcagggctgggtgccaagcaactacatcaccccagtgaacagcctggaaaaacactcctggtaccatggacctgtgtcacgcagtgcagctgagtatctgctcagcagtctaatcaatggcagcttcctggtgcgagaaagtgagagtagccctgggcagctgtccatctcgctcaggtacgagggacgtgtgtatcactacaggatcaataccactgcagatggcaaggtgtatgtgactgctgagagccgcttcagcaccttggcagagcttgtacaccatcactccacagtggctgatgggctggtgacaacattacactacccagcacccaagtgtaataagcctacagtctatggtgtgtcccccatccacgacaaatgggaaatggagcgaacagatattaccatgaagcacaaacttgggggcggtcagtatggagaggtttacgttggcgtctggaagaaatacagccttacagttgctgtgaaaacattgaaggaagataccatggaggtagaagaattcctgaaagaagctgcagtaatgaaggaaatcaagcatcctaatctggtacaacttttaggtgtgtgtactttggagccaccattttacattgtgactgaatacatgccatacgggaatttgctggattacctccgagaatgcaaccgagaagaggtgactgcagttgtgctgctctacatggccactcagatttcttctgcaatggagtacttagagaagaagaatttcatccatagagatcttgcagctcgtaactgcctagtgggagaaaaccatgtggtaaaagtggctgactttggcttaagtagattgatgactggagacacttatactgctcatgctggagccaaatttcctattaagtggacagcaccagagagtcttgcctacaataccttctcaattaaatctgacgtctgggcttttggggtattgttgtgggaaattgctacctatggaatgtcaccatatccaggtattgacctgtctcaggtctatgacctactagaaaaaggatatcgaatggaacagcctgagggatgcccccctaaggtttatgaacttatgagagcatgctggaagtggagccctgccgataggccctcttttgctgaaacacaccaagcttttgaaaccatgttccatgactccagcatttctgaagttctcctacattgtgccaatcagacgtgcataacattgtgaaccaaaagacacagagcaggatgatgctagcaacgtattcatagtaactccaaactggaaacaacctaaacatccatcaagaggagaacaggtggattgtggtatattcacacgttggcatgctacacagcaatgagaacccctgccacatgcagcagcgtggacgaatctacacacatgatactgggcgaaagaagccagacaaaagagtacatactttatga

SEQ ID NO: 51554 - protein, 380 aa, Artificial Sequence
  derived and/or modified sequence
MAGSDVDSEGPARRGGAARRPGAPGGPGSEAAAGCPEPLSTAEAPAESATLPAWMRLYFYGMHGITLDVLVSSARRFARSPDLRMLGFSSPYRCLLHSLTHFALEKVYLQQRRCPNAFVFNFLLYPSAHVGLQTLAGQALLLSLGGGAGVAVAPGALDLALQYVLALYHCQVFLKRFLRLRYGRQRRRQQQQQQQQQQQQRRGALPVPPGARVPTAAGARRRRPRGPRGAGGAPSQGLPDLPRFLFFGMHGFLDEIFFTFFFNVLGQGDGTTSGHTSLWSFFMYGSCSFVVEKLYFHLHYSRGWGTWKRVPIYVIFIYVWELSWGLGLRTCGACSWDYSHYPLNFMGLITLMYLPGWIFLSVYQDLISNVLWRVQYVPAN

SEQ ID NO: 51555 - DNA, 1143 bp, Artificial Sequence
  derived and/or modified sequence
atggccggcagcgacgtggacagcgagggccccgccagaagaggcggcgccgccagaagacccggcgcccccggcggccccggcagcgaggccgccgccggctgccccgagcccctgagcaccgccgaggcccccgccgagagcgccaccctgcccgcctggatgagactgtacttctacggcatgcacggcatcaccctggacgtgctggtgagcagcgccagaagattcgccagaagccccgacctgagaatgctgggcttcagcagcccctacagatgcctgctgcacagcctgacccacttcgccctggagaaggtgtacctgcagcagagaagatgccccaacgccttcgtgttcaacttcctgctgtaccccagcgcccacgtgggcctgcagaccctggccggccaggccctgctgctgagcctgggcggcggcgccggcgtggccgtggcccccggcgccctggacctggccctgcagtacgtgctggccctgtaccactgccaggtgttcctgaagagattcctgagactgagatacggcagacagagaagaagacagcagcagcagcagcagcagcagcagcagcagcagagaagaggcgccctgcccgtgccccccggcgccagagtgcccaccgccgccggcgccagaagaagaagacccagaggccccagaggcgccggcggcgcccccagccagggcctgcccgacctgcccagattcctgttcttcggcatgcacggcttcctggacgagatcttcttcaccttcttcttcaacgtgctgggccagggcgacggcaccaccagcggccacaccagcctgtggagcttcttcatgtacggcagctgcagcttcgtggtggagaagctgtacttccacctgcactacagcagaggctggggcacctggaagagagtgcccatctacgtgatcttcatctacgtgtgggagctgagctggggcctgggcctgagaacctgcggcgcctgcagctgggactacagccactaccccctgaacttcatgggcctgatcaccctgatgtacctgcccggctggatcttcctgagcgtgtaccaggacctgatcagcaacgtgctgtggagagtgcagtacgtgcccgccaactag

SEQ ID NO: 51556 - DNA, 1143 bp, Artificial Sequence
  derived and/or modified sequence
atggctggttcggatgtggactctgaggggccggcccgacgcggcggagccgcacgaagaccgggagctcctggggggccagggagcgaggctgccgctggctgtccagaacctctctcgaccgctgaagcccctgctgaaagcgcaacgcttccagcttggatgcgactgtacttttatggcatgcacggtataactttagacgtgctcgtgtcctccgctcgcagattcgccaggagtcctgatcttagaatgttgggcttcagctccccctaccgctgcctgctccattccctgactcacttcgccttggagaaggtctatttgcagcagcgcagatgtcctaacgcattcgttttcaacttccttctatatccatccgcgcacgtgggccttcagactctagctgggcaggccctcttgctctccctggggggaggggccggggtcgctgtcgctccaggggcactcgacctggccctgcagtatgtgctagcactgtaccactgtcaggtatttctgaagagattcctgaggctgcggtacgggcgccaacggaggcgtcagcagcagcagcaacagcaacaacagcagcagcagagaaggggagccttgcccgtgccgcccggtgctcgggtgccgacagctgccggcgctagacgacgccgaccaaggggccctaggggggcaggaggagccccctctcagggcctgccagacctcccaaggtttctgttcttcggtatgcatgggtttctggacgagatctttttcaccttcttctttaatgttctgggccagggggacggtactacgagcggacacacgtcactgtggtcttttttcatgtacgggtcttgttcattcgtcgtggagaaactctactttcaccttcattactcccgcggctggggcacctggaagcgagtacctatctatgtaattttcatatacgtgtgggagttgtcttggggcctcggattacggacttgtggcgcctgctcttgggactactcacattaccccctaaacttcatgggactaatcaccttgatgtacttgcccgggtggatctttctctctgtctatcaggaccttatcagcaatgtactgtggcgggttcagtatgtccccgcaaattag

SEQ ID NO: 51557 - DNA, 1143 bp, Artificial Sequence
  derived and/or modified sequence
atggccggcagtgatgtggacagcgagggccctgccaggagaggaggagctgcccggcggcctggggcccctgggggccctggcagcgaggccgctgctggctgcccagagcccctgagcacagctgaggccccagctgagagcgccaccctgcctgcctggatgaggctgtacttctacggcatgcacggcatcaccctggatgtgctggtgtcctctgccaggagatttgcccggagcccagacctgaggatgctgggcttcagcagcccctaccgctgcctgctgcacagcctgacccactttgccctggagaaggtgtacctgcagcagaggcgctgccccaatgcctttgtgttcaacttcctgctgtaccccagcgcccacgtgggcctgcagaccctggccggccaggccctgctgctgagcctgggcggcggggccggcgtggccgtggcccctggggccctggacctggccctgcagtatgtgctggccctgtaccactgccaggtgttcctgaagcgcttcctgcggctgcgctatggccggcagaggcggcggcagcagcagcagcagcagcagcagcagcagcagcagaggagaggagccctgcctgtgcccccaggggcccgggtgcccacagctgctggggccaggagaagaagaccccggggccccaggggggccggcggggcccccagccagggcctgcctgacctgccccgcttcctgttcttcggcatgcacggcttcctggatgagatcttcttcaccttcttcttcaacgtgctgggccagggagatggcaccaccagcggccacaccagcctgtggagcttcttcatgtatggcagctgcagctttgtggtggagaagctgtacttccacctgcactacagccggggctggggcacctggaagagggtgcccatctacgtgatcttcatctacgtgtgggagctgtcctggggcctgggcctgcggacctgtggggcctgctcctgggactacagccactaccccctgaacttcatgggcctcatcaccctgatgtacctgcccggctggatcttcctgtctgtgtaccaggacctgatcagcaatgtgctgtggagggtgcagtatgtgcctgccaactag

SEQ ID NO: 51558 - DNA, 1143 bp, Artificial Sequence
  derived and/or modified sequence
atggccggcagcgacgtggacagcgagggccccgcccggcggggcggcgccgccaggcggcccggtgcacccggaggtccaggtagtgaagccgccgctgggtgcccagagccgctttctacggcagaggccccggcggagtctgcaactctgcccgcgtggatgagactctatttctacggcatgcatggaatcactctcgatgtcctggttagctccgcaaggcggttcgccagaagccccgatctgcgcatgttaggattctctagcccgtaccggtgtttattacacagccttacacatttcgctctggagaaggtgtatctgcaacagcgacgttgtcccaacgctttcgtctttaacttcctcctctatccatcagcacatgtgggactccagacgcttgctggtcaagccctgctcctgtccttgggagggggtgccggagtggctgtggccccaggggcactggatctggccctccagtacgtgttggcgctgtaccactgtcaggtgtttctcaagcgattcctgcggctaagatatggccggcagcgcaggaggcaacagcaacagcagcaacaacaacaacaacagcagcggagaggtgctcttcccgtccccccaggtgccagggtcccaaccgcggccggagccaggcggcgtcggcccaggggccctcggggagctggcggggctccttctcaaggtttgcctgacctgcctaggtttctattctttggaatgcacggtttcctcgacgagatattctttacattctttttcaacgtactggggcagggcgatggcaccaccagcggtcatacttcactgtggtcattctttatgtatgggagctgctcctttgtggtggaaaagttgtatttccatcttcactattctcggggttggggcacctggaagcgagtacccatatatgtgattttcatctacgtgtgggaactctcctggggtctaggcttaagaacctgcggcgcttgctcttgggattattcacactatccacttaacttcatgggtttgatcacgctgatgtacttgcccggctggatcttcctctccgtttatcaggatctgattagcaatgtcctttggcgggtgcagtacgttcccgccaactag

SEQ ID NO: 51559 - DNA, 1143 bp, Artificial Sequence
  derived and/or modified sequence
atggccggttccgatgtggatagcgagggtcctgccagacgagggggagcagccagacggccaggggctccgggtggccctgggagcgaagcagcagccggttgccctgaacccctgtccacggccgaggccccagcagaatctgccactttacctgcgtggatgcgcctgtatttctacgggatgcacgggattacactggatgtgctggtctctagtgccagacggttcgctagatcccccgaccttcgtatgttagggttcagctcaccttatcggtgccttctgcattctctcacccactttgctctggaaaaggtatacctacagcagcgacgatgtcctaacgcgttcgtgttcaactttctgctgtacccttctgctcacgtcggtttgcaaaccctcgcgggacaggcgttgttgctgtcgctgggtggcggtgcaggcgttgcagtggcgcctggagccttagatctcgctctgcagtacgtccttgccctttaccattgccaggtttttctgaagcggtttctgcgactccggtacggacgccaacgccgaagacagcagcagcagcaacaacagcagcaacaacagcagagacggggagcgcttccagtcccacctggagcacgcgtgcccacagccgcaggcgctcgccgaagaaggccacggggtcccaggggagcaggaggcgcaccttctcagggacttcctgacttgccgagattcctatttttcgggatgcatggttttctcgacgaaatattctttacttttttcttcaatgtcctagggcagggcgacggcaccactagcggccacacttctctatggtccttctttatgtacgggagttgttcatttgtagtcgaaaagctgtacttccacttgcattactccagaggctggggcacatggaaacgggtccctatttatgtcattttcatctacgtgtgggaattgtcatgggggctgggactgcgcacctgtggcgcatgttcttgggactattcccattacccacttaacttcatgggattgattaccctgatgtatctccctgggtggatcttcctgagcgtatatcaagatctgatcagcaacgtgctgtggagggtgcagtatgtccccgctaactag

SEQ ID NO: 51560 - DNA, 2551 bp, Artificial Sequence
  derived and/or modified sequence
ggcattggcagggcgggggcagggccgccgctgctcgcgttacgttcccagagcctgcagcggaggcgcggggctaagcagcggaggggatggggcttccacaagcttctgcatttcccctcacagccccggcgccgcctcccctggctgggccgcggtgcccgttaggccgcgcagggtgagagctagagcgggcgcgggcgggcggcacctcgcccgggactggaagggagggcgcagcggggccacggcggggggattccgctagccgggcggcccgcgagtcccctgagtgcatcagcccccgctgccgcgggaccgcggccgggacggagctccctgcgcgccccccgggggccggcagcggccaggaggcggcgcggggctcggccgctcggccctgcagctccgcgcacccggcagcggcggcggtgcagcctcgggcgttcggacagcctccgagcccatggcggggagcgacgtggacagcgagggccccgcacggaggggcggcgcggcgcggcgtccgggggcccctggcgggccaggaagcgaggcggcagccggctgcccggagccgctgtccactgctgaagcgccggctgagagcgccacgctgcccgcctggatgcgcctctacttctacgggatgcacgggatcaccctggacgtgctggtgtcctcggcccggcgcttcgcccgcagcccggacctgcggatgctaggcttctcctcgccctaccgctgcctgctgcactcgctcacccatttcgccctggagaaggtgtacctgcagcagcggcgctgtcccaacgccttcgtcttcaatttcctcctctacccctcggcccacgtggggctgcagaccctagcgggccaggcgctactactcagcctgggcggcggggcgggggtcgcggtggcgccaggggcgctggacctggcgctgcagtacgtgctggcgctctaccactgccaagtgttcctgaagcgcttcctgcgcttgcggtacgggcgacagaggcggcggcagcagcaacagcagcagcagcagcagcagcagcagcggaggggcgcgctccccgtccctcccggcgcccgggtccctactgcggccggagcccggcggcgacgaccccgtggccccaggggcgccgggggagcccccagccaggggctgcccgacctaccccgctttcttttcttcggaatgcacggctttctggatgagatcttcttcaccttcttcttcaacgtactggggcagggggacgggacaaccagcggccacacgtcgctctggtccttctttatgtacggcagctgcagtttcgtggtggaaaagctctacttccacctccactacagccgcggttggggcacttggaagcgggtgcccatctacgtgatcttcatctacgtgtgggagctgtcctggggtctgggactccgcacgtgcggggcttgttcctgggactattctcactacccgctcaattttatgggcctcatcaccctgatgtatttacctggctggatattccttagtgtgtaccaggacctaatttccaacgtgttgtggagggtgcagtacgtaccagctaactaaaaccaaaaaagaaagaaagaaaaggaaaaagtcactggattcccacgaatggatgcgatttatttttacacatttaaaatgaagtgggttttttagtcctttaatttttatacgctttactaaactcttccaaattgttttattccaccttttagtttttctatttgaaacccgtgtataatatactttgaaacactactcgaaacataattcaaagtactttatttgccaatgttttaaaacatttacaagcccaaacgtttacacgcccaaacagcaaaaccgttataccttaacatcagaatgatgtagtagtgtttacccatctggcaacagatgagtgacagctactaatttttttttttttggcggggggggatctttaaatcagagaccagtgatttttacaagatttggctaaattttctgattcagtgatttgttttactttctttttaatctaatttcattttaattccttgccatatttaccaatgactgaagaaactcaatgtcttgtactcttgagactacagttaatagctcttaaagtgcctccgtctagcacacaagtgaaaagaggctgaaaaatgtgaaagcacgttctatgaacagatttttaaatgagaggtcttttctagcaactcacacaggtgacactgtgttaagatatttgatctccatcctggaaatgattgctttccaatgtgggtaagccttaaacagcaggtgtgttaacgttgatcagatcctgtgttatctatggctgtaaatttttgttactgtgcaataatgtaaaatgtttaccttacatagccgagggccaagtgaaattatatcaccttccacagtgttctaactccaaggacccttttctacatggaacttcaagggcagaaacattacctttgaataaaatgaacctgaatgttcactctaatt

SEQ ID NO: 51561 - protein, 87 aa, Artificial Sequence
  derived and/or modified sequence
MQKVTLGLLVFLAGFPVLDANDLEDKNSPFYYDWHSLQVGGLICAGVLCAMGIIIVMSAKCKCKFGQKSGHHPGETPPLITPGSAQS

SEQ ID NO: 51562 - protein, 144 aa, Artificial Sequence
  derived and/or modified sequence
MGRGYSGALQARGGLEEPLERGLRGPSFTQSPLHGAAAAYLSAQRDASLPVPGQRSDMQKVTLGLLVFLAGFPVLDANDLEDKNSPFYYDWHSLQVGGLICAGVLCAMGIIIVMSAKCKCKFGQKSGHHPGETPPLITPGSAQS

SEQ ID NO: 51563 - DNA, 1326 bp, Artificial Sequence
  derived and/or modified sequence
aggtttgcttagggcgtggcagcttcggataaacgcaggactccgcctggcagcccgatttctcccggaacctctgctcagcctggtgaaccacacaggcccgagtttcacccagtccccactccacggtgcagctgcggcttatctctcagcccagcgagatgccagccttcctgtcccgggccagcgctctgacatgcagaaggtgaccctgggcctgcttgtgttcctggcaggctttcctgtcctggacgccaatgacctagaagataaaaacagtcctttctactatgactggcacagcctccaggttggcgggctcatctgcgctggggttctgtgcgccatgggcatcatcatcgtcatgagtgcaaaatgcaaatgcaagtttggccagaagtccggtcaccatccaggggagactccacctctcatcaccccaggctcagcccaaagctgatgaggacagaccagctgaaattgggtggaggaccgttctctgtccccaggtcctgtctctgcacagaaacttgaactccaggatggaattcttcctcctctgctgggactcctttgcatggcagggcctcatctcacctctcgcaagagggtctctttgttcaattttttttaatctaaaatgattgtgcctctgcccaagcagcctggagacttcctatgtgtgcattggggtggggcttggggcaccatgagaaggttggcgtgccctggaggctgacacagaggctggcactgagcctgcttgttgggaaaagcccacaggcctgttcccttgtggcttgggacatggcacaggcccgccctctgcctcctcagccatgggaacctcatatgcaatttgggatttactagtagccaaaaggaatgaaagagagctctaaccagatggaacactggaacattccagtggaccctggaccattccaggaaaactgggacataggatcgtcccgctatgatggaagtgttcagacagtttataatagtaagcccctgtgaccctctcacttaccccgagacctcactttattacaagatctttccaaatacccaaatgtccctgcaagcccgttaaataattccctatgctacccttaataacatacaatgaccacatagtgtgagaacttccaacaagcctcaaagtcccttgagactccccaatacctaataaggcatgcgaaatgttctcatgaactaccccacaacacgcctaaaactcaaaacacccaaaaatatctcctccaatgtcctgaaacatgaacccaaaaagagacccacaataaactcgtgacttgtcccctc

SEQ ID NO: 51564 - DNA, 516 bp, Artificial Sequence
  derived and/or modified sequence
gatttctcccggaacctctgctcagcctggtgaaccacacaggccagcgctctgacatgcagaaggtgaccctgggcctgcttgtgttcctggcaggctttcctgtcctggacgccaatgacctagaagataaaaacagtcctttctactatgactggcacagcctccaggttggcgggctcatctgcgctggggttctgtgcgccatgggcatcatcatcgtcatgagtgcaaaatgcaaatgcaagtttggccagaagtccggtcaccatccaggggagactccacctctcatcaccccaggctcagcccaaagctgatgaggacagaccagctgaaattgggtggaggaccgttctctgtccccaggtcctgtctctgcacagaaacttgaactccaggatggaattcttcctcctctgctgggactcctttgcatggcagggcctcatctcacctctcgcaagagggtctctttgttcaattttttttaatctaaaatgattgtgcctctgc

SEQ ID NO: 51565 - DNA, 1448 bp, Artificial Sequence
  derived and/or modified sequence
aggtttgcttagggcgtggcagcttcggataaacgcaggactccgcctggcagcccgatttctcccggaacctctgctcagcctggtgaaccacacagaggctggggcgaggaggataccatctgtcagtcttggctggatgacatcatgggaagggggtatagtggggccttgcaggccagaggtggcttggaggagcccctggaaagaggcttaagaggcccgagtttcacccagtccccactccacggtgcagctgcggcttatctctcagcccagcgagatgccagccttcctgtcccgggccagcgctctgacatgcagaaggtgaccctgggcctgcttgtgttcctggcaggctttcctgtcctggacgccaatgacctagaagataaaaacagtcctttctactatgactggcacagcctccaggttggcgggctcatctgcgctggggttctgtgcgccatgggcatcatcatcgtcatgagtgcaaaatgcaaatgcaagtttggccagaagtccggtcaccatccaggggagactccacctctcatcaccccaggctcagcccaaagctgatgaggacagaccagctgaaattgggtggaggaccgttctctgtccccaggtcctgtctctgcacagaaacttgaactccaggatggaattcttcctcctctgctgggactcctttgcatggcagggcctcatctcacctctcgcaagagggtctctttgttcaattttttttaatctaaaatgattgtgcctctgcccaagcagcctggagacttcctatgtgtgcattggggtggggcttggggcaccatgagaaggttggcgtgccctggaggctgacacagaggctggcactgagcctgcttgttgggaaaagcccacaggcctgttcccttgtggcttgggacatggcacaggcccgccctctgcctcctcagccatgggaacctcatatgcaatttgggatttactagtagccaaaaggaatgaaagagagctctaaccagatggaacactggaacattccagtggaccctggaccattccaggaaaactgggacataggatcgtcccgctatgatggaagtgttcagacagtttataatagtaagcccctgtgaccctctcacttaccccgagacctcactttattacaagatctttccaaatacccaaatgtccctgcaagcccgttaaataattccctatgctacccttaataacatacaatgaccacatagtgtgagaacttccaacaagcctcaaagtcccttgagactccccaatacctaataaggcatgcgaaatgttctcatgaactaccccacaacacgcctaaaactcaaaacacccaaaaatatctcctccaatgtcctgaaacatgaacccaaaaagagacccacaataaactcgtgacttgtcccctc

SEQ ID NO: 51566 - DNA, 631 bp, Artificial Sequence
  derived and/or modified sequence
atgggaagggggtatagtggggccttgcaggccagaggtggcttggaggagcccctggaaagaggcttaagaggcccgagtttcacccagtccccactccacggtgcagctgcggcttatctctcagcccagcgagatgccagccttcctgtcccgggccagcgctctgacatgcagaaggtgaccctgggcctgcttgtgttcctggcaggctttcctgtcctggacgccaatgacctagaagataaaaacagtcctttctactatgactggcacagcctccaggttggcgggctcatctgcgctggggttctgtgcgccatgggcatcatcatcgtcatgagtgcaaaatgcaaatgcaagtttggccagaagtccggtcaccatccaggggagactccacctctcatcaccccaggctcagcccaaagctgatgaggacagaccagctgaaattgggtggaggaccgttctctgtccccaggtcctgtctctgcacagaaacttgaactccaggatggaattcttcctcctctgctgggactcctttgcatggcagggcctcatctcacctctcgcaagagggtctctttgttcaattttttttaatctaaaatgattgtgcctctgc

SEQ ID NO: 51567 - DNA, 435 bp, Artificial Sequence
  derived and/or modified sequence
atgggccgcggatacagtggagcacttcaggctaggggtggcttggaggagccactcgagcgaggcctgaggggaccaagcttcactcaaagccctttgcacggggcagctgcggcatacctctcagctcagagggacgcttctctccccgtaccaggccagaggtctgacatgcagaaggtgacccttggactgctggtcttcctcgctggcttccccgtgctggatgccaatgacctagaggacaaaaacagcccattctactacgattggcattccctccaagtgggagggctcatctgcgctggcgttttatgcgctatggggatcatcatcgttatgtctgctaagtgcaagtgtaaatttggtcagaagagtgggcatcacccgggcgaaaccccacctttaataacacccggctccgctcagtcttag

SEQ ID NO: 51568 - DNA, 435 bp, Artificial Sequence
  derived and/or modified sequence
atggggcggggatatagtggcgccctccaagccagaggcggcctagaggaaccgttggagcggggactgcgcgggcctagcttcacccagagtccactgcatggggcagctgctgcctatcttagcgctcagagagacgcttcgctgcctgtgcctggacagagaagtgatatgcaaaaagtgacccttggccttctggtatttctggccggcttcccagttttagacgccaacgatctcgaagataaaaatagtcccttttattacgattggcactcgctgcaggtgggaggcttgatttgcgctggcgtactttgtgccatgggcataatcattgtgatgagtgcaaagtgtaagtgtaaatttggacaaaaaagtggacatcacccgggagagacacccccacttatcacccctggtagtgcccagagctag

SEQ ID NO: 51569 - DNA, 435 bp, Artificial Sequence
  derived and/or modified sequence
atgggccggggctacagcggggccctgcaggcccggggcggcctggaggagcccctggagcggggcctgcggggccccagcttcacccagagccccctgcacggggctgctgctgcctacctgagcgcccagagagatgccagcctgcctgtgcccggccagaggagtgacatgcagaaggtgaccctgggcctgctggtgttcctggccggcttccctgtgctggatgccaatgacctggaggacaagaacagccccttctactatgactggcacagcctgcaggtgggcggcctcatctgtgccggcgtgctgtgtgccatgggcatcatcatcgtgatgtctgccaagtgcaagtgcaagtttggccagaagagcggccaccaccctggagagaccccacccctcatcaccccaggcagcgcccagagctag

SEQ ID NO: 51570 - DNA, 435 bp, Artificial Sequence
  derived and/or modified sequence
atgggccggggctacagcggcgccctgcaggcccggggcggcctggaggagcctctcgagaggggcttgcgtggtccatccttcacccaaagcccactccatggggcggccgcagcatacctgtctgcgcagcgggatgccagcctgcctgtacccggccaacgaagcgatatgcagaaggtgaccttgggccttttggtgtttctcgccgggtttccggtgctggacgccaatgacctggaagacaagaatagtccattctactacgattggcactccctgcaggttgggggccttatttgtgcgggcgtgctctgcgcaatgggcatcattattgtgatgagcgccaaatgcaaatgcaagttcgggcagaaatcagggcaccatcccggagagaccccacctctcattacgcctgggtcagcccaatcttag

SEQ ID NO: 51571 - DNA, 435 bp, Artificial Sequence
  derived and/or modified sequence
atgggccggggctacagcggcgccctgcaggcccggggcggcctggaagaaccactggagaggggcctgcgtggcccctcgtttacacagtcaccactgcatggcgctgcagccgcctatctaagcgctcagcgggatgcatcgctgcctgtgcctggacaaagatcagatatgcagaaagtgacgttgggcttactggtgttcttagccggattccccgtcctagacgcgaatgatcttgaggacaagaactcgcccttctattatgattggcactctcttcaggtgggcggtctgatttgcgccggcgtactctgtgctatgggaatcattatcgtaatgtccgctaaatgcaaatgtaagtttgggcagaagtctggccaccacccaggtgaaacaccaccactcattacaccaggaagcgcccaatcctag

SEQ ID NO: 51572 - DNA, 435 bp, Artificial Sequence
  derived and/or modified sequence
atgggtagggggtattctggtgctctccaggctaggggaggcctcgaggagcccctggagcggggactgagaggtccatcattcacacagtcccctctgcatggcgcagccgctgcatatctgtccgcacagcgcgacgcatcattgccagtgcccggtcagagatctgacatgcagaaagtcacactgggactcctcgtgtttctggccggattcccagttctcgacgctaacgacttggaggataagaattcccctttctactacgattggcactccctgcaggtgggaggtctgatctgtgctggcgttttatgcgcgatgggtataataatagtgatgtctgctaaatgcaaatgtaaattcggccagaagtccggccaccatccgggtgagacacctcccctcatcacacctggctctgctcaatcctag

SEQ ID NO: 51573 - DNA, 435 bp, Artificial Sequence
  derived and/or modified sequence
atgggccgaggctattctggcgcactgcaggctcggggaggcctggaggaacccctcgaacggggattaagaggcccatcttttacccagtctcccctgcacggggctgcggctgcatacctctcagcgcaacgtgatgcatccctccctgtgcccggtcagcggtccgacatgcagaaggtaaccttgggactgctcgttttccttgccggtttcccagtgctggacgcaaacgacctggaagataaaaactcacccttctactacgattggcacagcctgcaggtgggcggtctgatctgcgcaggtgtgctctgcgccatgggtatcatcatagtaatgtcggccaagtgcaagtgcaagttcggccaaaaatccgggcaccatccaggagagactccgcctctgatcacaccaggttccgcccagagctag

SEQ ID NO: 51574 - DNA, 435 bp, Artificial Sequence
  derived and/or modified sequence
atgggcagaggctacagcggcgccctgcaggccagaggcggcctggaggagcccctggagagaggcctgagaggccccagcttcacccagagccccctgcacggcgccgccgccgcctacctgagcgcccagagagacgccagcctgcccgtgcccggccagagaagcgacatgcagaaggtgaccctgggcctgctggtgttcctggccggcttccccgtgctggacgccaacgacctggaggacaagaacagccccttctactacgactggcacagcctgcaggtgggcggcctgatctgcgccggcgtgctgtgcgccatgggcatcatcatcgtgatgagcgccaagtgcaagtgcaagttcggccagaagagcggccaccaccccggcgagaccccccccctgatcacccccggcagcgcccagagctag

SEQ ID NO: 51575 - DNA, 291 bp, Artificial Sequence
  derived and/or modified sequence
atgcaaaaagtgactctcgggctgttggtcttcctggccgggtttccggtgctggacgcaaacgatctggaagacaaaaacagccccttttactatgattggcactctctgcaggtgggcggcttaatctgcgcaggagtcctgtgcgccatgggtataattattgtgatgtctgaatggagaagctcaggcgagcaggcggggcgtggatgggggtcccctcccctcactactcagctgtctcccaccggcgccaagtgcaaatgtaagttcggacaaaaaagtgggtag

SEQ ID NO: 51576 - DNA, 291 bp, Artificial Sequence
  derived and/or modified sequence
atgcagaaggtgaccctgggcctgctggtgttcctggccggcttccctgtgctggatgccaatgacctggaggacaagaacagccccttctactatgactggcacagcctgcaggtgggcggcctcatctgtgccggcgtgctgtgtgccatgggcatcatcatcgtgatgtctgagtggaggagcagtggagagcaggccggccggggctggggcagcccccccctgaccacccagctgagccccactggagccaagtgcaagtgcaagtttggccagaagtctggatag

SEQ ID NO: 51577 - DNA, 291 bp, Artificial Sequence
  derived and/or modified sequence
atgcagaaggtgaccctgggcctgctggtgttcctggccggcttccctgtattagatgccaatgacctggaggataaaaacagtccgttctactatgattggcattccctgcaagttggcggactgatatgtgcgggcgtattgtgtgctatgggcataattattgtgatgagcgagtggaggtcatctggagagcaggccgggagaggctgggggagcccccctctgacaactcagttgtctcctacgggcgccaaatgcaagtgcaagttcggtcagaagtccggctag

SEQ ID NO: 51578 - DNA, 291 bp, Artificial Sequence
  derived and/or modified sequence
atgcagaaagtgacattgggtctattagtgtttctggccggatttcccgtcctagatgcaaatgacctggaggacaaaaacagcccattttattatgactggcacagtctccaggtagggggacttatttgtgcgggtgtactgtgtgctatggggattattatcgtcatgtccgagtggcgaagtagcggagaacaggcagggcgtggttggggatcacctccccttaccacacagctatccccgactggagcaaaatgcaaatgtaagtttggccaaaagtctggatag

SEQ ID NO: 51579 - DNA, 291 bp, Artificial Sequence
  derived and/or modified sequence
atgcagaaggtgaccctgggcctgctggtgttcctggccggcttccccgtgctggacgccaacgacctggaggacaagaacagccccttctactacgactggcacagcctgcaggtgggcggcctgatctgcgccggcgtgctgtgcgccatgggcatcatcatcgtgatgagcgagtggagaagcagcggcgagcaggccggcagaggctggggcagcccccccctgaccacccagctgagccccaccggcgccaagtgcaagtgcaagttcggccagaagagcggctag

SEQ ID NO: 51580 - protein, 61 aa, Artificial Sequence
  derived and/or modified sequence
MQKVTLGLLVFLAGFPVLDANDLEDKNSPFYYGESPCPLSPPHNPTYCLVPRVPIQGWGLT

SEQ ID NO: 51581 - DNA, 759 bp, Artificial Sequence
  derived and/or modified sequence
cgctagcatcttctgctgatcctgaaattgtaccagcggcaagatgtggcctggaaggggactttaagttctccacaactgccagcaatccttccaccaggcaaaacacatcatctaaggaaaagaagtgaggtttgcttagggcgtggcagcttcggataaacgcaggactccgcctggcagcccgatttctcccggaacctctgctcagcctggtgaaccacacaggccagcgctctgacatgcagaaggtgaccctgggcctgcttgtgttcctggcaggctttcctgtcctggacgccaatgacctagaagataaaaacagtcctttctactatggtgagagcccgtgccccctttcccctccccacaaccccacatactgcttggtgccaagggttcccatacagggttggggcctgacgtgagcatcacaggacaaagatacgaagggactaggatggggttactgaatatgccacacagtggattaaaggaactagaggcagcaacctggcctttgggaaggttctattccagcaagatagacacacgcaggaggtgaggacagtttgcaagaagccattggttggttcagatcaactgctgggagaagtgttgacttgagaaaacttcctggaggtggtgagctattggatcaaaaccctcatctggcctccaggttccaatgacctgctccctactccccgctctgccctcacctctccacgctcctcattccttctgctccaagcctct

SEQ ID NO: 51582 - DNA, 186 bp, Artificial Sequence
  derived and/or modified sequence
atgcaaaaggtgacactgggtcttctagttttcctggcaggtttcccagtcctcgacgctaatgatctggaggacaagaacagtcccttttactacggtgaatccccatgcccccttagcccgccacacaatcctacatattgcctggtaccccgcgtgcccattcaggggtggggattgacatag

SEQ ID NO: 51583 - DNA, 186 bp, Artificial Sequence
  derived and/or modified sequence
atgcagaaggtgaccctgggcctgctggtgttcctggccggcttccctgtgctggatgccaatgacctggaggacaagaacagccccttctactacggggagagcccctgccccctgagccccccccacaaccccacctactgcctggtgccccgggtgcccatccagggctggggcctgacctag

SEQ ID NO: 51584 - DNA, 186 bp, Artificial Sequence
  derived and/or modified sequence
atgcagaaggtgaccctgggcctgctggtgttcctggccggcttccccgtgctggacgccaacgacctggaggataagaattcaccattttattacggcgaaagtccctgccccctgtcacccccacacaaccccacatattgtctagtccctcgagtgcctatccagggatggggcctgacttag

SEQ ID NO: 51585 - DNA, 186 bp, Artificial Sequence
  derived and/or modified sequence
atgcagaaggtcaccttggggctgttggtttttctggccggatttccagtgcttgacgctaacgacttggaggacaaaaacagcccgttctactacggtgaaagcccctgtcctctgagtcccccacataaccccacctattgtctggtgcctcgtgtgcctatacagggctggggcctgacatag

SEQ ID NO: 51586 - DNA, 186 bp, Artificial Sequence
  derived and/or modified sequence
atgcagaaggtgaccctgggcctgctggtgttcctggccggcttccccgtgctggacgccaacgacctggaggacaagaacagccccttctactacggcgagagcccctgccccctgagccccccccacaaccccacctactgcctggtgcccagagtgcccatccagggctggggcctgacctag

SEQ ID NO: 51587 - DNA, 264 bp, Artificial Sequence
  derived and/or modified sequence
atgcaaaaagtcaccctgggattgttggtatttctggcgggatttccggtgttagatgccaatgacttggaagataaaaacagccctttttattacgattggcacagtctccaggtgggcggcctgatctgcgcgggggtcttgtgtgccatgggcataatcatcgtgatgtctgcgaagtgtaagtgcaaattcggtcagaagtcaggacaccacccgggtgaaacaccgccattaatcacccccggatcagcacagtcctag

SEQ ID NO: 51588 - DNA, 264 bp, Artificial Sequence
  derived and/or modified sequence
atgcaaaaggtgactcttggtctcctggtgtttctagcgggttttccggtcctggacgctaacgatctcgaagataagaatagccctttttattatgactggcacagcttgcaagtgggtggactgatttgcgccggggttctgtgtgcaatgggaataatcattgtgatgagtgccaagtgcaagtgcaagttcggacagaagtctgggcaccacccaggagaaacgccaccccttatcactcccggctccgctcagtcctag

SEQ ID NO: 51589 - DNA, 264 bp, Artificial Sequence
  derived and/or modified sequence
atgcagaaggtgaccctgggcctgctggtgttcctggccggcttccctgtgctggatgccaatgacctggaggacaagaacagccccttctactatgactggcacagcctgcaggtgggcggcctcatctgtgccggcgtgctgtgtgccatgggcatcatcatcgtgatgtctgccaagtgcaagtgcaagtttggccagaagagcggccaccaccctggagagaccccacccctcatcaccccaggcagcgcccagagctag

SEQ ID NO: 51590 - DNA, 264 bp, Artificial Sequence
  derived and/or modified sequence
atgcagaaggtgaccctgggcctgctggtgttcctggccggcttccctgtcctcgatgctaatgacctcgaggataaaaactcgcctttctactatgattggcacagcctgcaagtgggaggcttgatttgcgcgggggttctgtgtgctatgggcattatcatagtcatgagcgccaagtgcaagtgtaagttcggtcagaagagcggacatcaccccggagagacgcctccattgattactcctggatccgctcagtcctag

SEQ ID NO: 51591 - DNA, 264 bp, Artificial Sequence
  derived and/or modified sequence
atgcagaaggtgaccctgggcctgctggtgttcctggccggcttccctgtgctggatgctaatgacctggaagacaaaaacagtccattttactatgactggcattctctccaggttggcggtctgatctgtgcaggcgtcctttgtgctatgggaataattattgtaatgtcagctaaatgcaaatgcaagtttggacagaaatcaggccaccacccaggtgagactcctccactaattaccccaggatcagcccagtcttag

SEQ ID NO: 51592 - DNA, 264 bp, Artificial Sequence
  derived and/or modified sequence
atgcagaaggtgaccctgggcttgctggtgttcctggcagggttccctgtcttagatgcaaacgacttggaggacaagaactcccctttctactacgactggcactcgctccaagtgggaggacttatatgcgccggagttctctgcgctatgggaatcatcattgtaatgagcgcgaagtgtaagtgtaaatttggtcagaaatctggacatcatcctggcgagacacctccgctcatcacccctgggtcggctcagtcatag

SEQ ID NO: 51593 - DNA, 264 bp, Artificial Sequence
  derived and/or modified sequence
atgcagaaagtcaccctgggactgctggtttttctggcagggtttcctgtcctcgacgctaacgacctcgaggataaaaacagtccgttctactatgactggcactccctgcaggtaggcggtcttatctgtgccggtgtcttatgcgccatggggatcatcattgtaatgagcgcaaagtgcaagtgcaagttcggccaaaaatcagggcatcaccccggagagacccctcccttgattacacccggttcagcgcagtcctag

SEQ ID NO: 51594 - DNA, 264 bp, Artificial Sequence
  derived and/or modified sequence
atgcagaaggtgaccctgggcctgctggtgttcctggccggcttccccgtgctggacgccaacgacctggaggacaagaacagccccttctactacgactggcacagcctgcaggtgggcggcctgatctgcgccggcgtgctgtgcgccatgggcatcatcatcgtgatgagcgccaagtgcaagtgcaagttcggccagaagagcggccaccaccccggcgagaccccccccctgatcacccccggcagcgcccagagctag

SEQ ID NO: 51595 - protein, 746 aa, Artificial Sequence
  derived and/or modified sequence
MDQLEDLLVLFINYVPTDGNAGLLAEPQIAMFCGRLNMHMNVQNGKWDSDPSGTKTCIDTKEGILQYCQEVYPELQITNVVEANQPVTIQNWCKRGRKQCKTHPHFVIPYRCLVGEFVSDALLVPDKCKFLHQERMDVCETHLHWHTVAKETCSEKSTNLHDYGMLLPCGIDKFRGVEFVCCPLAEESDNVDSADAEEDDSDVWWGGADTDYADGSEDKVVEVAEEEEVAEVEEEEADDDEDDEDGDEVEEEAEEPYEEATERTTSIATTTTTTTESVEEVVREVCSEQAETGPCRAMISRWYFDVTEGKCAPFFYGGCGGNRNNFDTEEYCMAVCGSAIPTTAASTPDAVDKYLETPGDENEHAHFQKAKERLEAKHRERMSQVMREWEEAERQAKNLPKADKKAVIQHFQEKVESLEQEAANERQQLVETHMARVEAMLNDRRRLALENYITALQAVPPRPRHVFNMLKKYVRAEQKDRQHTLKHFEHVRMVDPKKAAQIRSQVMTHLRVIYERMNQSLSLLYNVPAVAEEIQDEVDELLQKEQNYSDDVLANMISEPRISYGNDALMPSLTETKTTVELLPVNGEFSLDDLQPWHSFGADSVPANTENEVEPVDARPAADRGLTTRPGSGLTNIKTEEISEVKMDAEFRHDSGYEVHHQKLVFFAEDVGSNKGAIIGLMVGGVVIATVIVITLVMLKKKQYTSIHHGVVEVDAAVTPEERHLSKMQQNGYENPTYKFFEQMQN

SEQ ID NO: 51596 - DNA, 2256 bp, Artificial Sequence
  derived and/or modified sequence
atgctgcccggactggcccttctgttacttgctgcttggacggcacgggcacttgaggtgcctactgacgggaatgccggactgctggcagagccccaaatcgcaatgttctgtggaaggctcaatatgcatatgaatgtgcagaacggaaaatgggattcggacccctccgggacaaagacttgcattgacaccaaggagggtatactgcagtattgccaagaggtttaccctgagctgcagatcaccaacgttgtggaagcaaatcagccagtaacaatccagaattggtgcaagcgtggtaggaagcaatgcaagacccatccacattttgtgattccttaccggtgtctcgtgggcgaatttgtttctgacgctctgttggtacccgacaaatgtaaatttcttcaccaggaaagaatggatgtgtgcgagacgcatctgcattggcacacggtggcaaaggaaacatgttccgaaaaatcaacgaacttgcacgattacgggatgttattaccctgtggtattgataaattcagaggggtggagttcgtgtgctgtcccttggccgaggagtccgacaatgttgactccgctgatgctgaggaggatgattctgacgtgtggtggggcggggcggacacggattacgcggacggctctgaagataaagtcgttgaggtcgccgaagaggaggaggtggctgaggtggaggaggaggaagcagatgatgacgaggatgatgaggacggcgacgaggtagaggaagaagcagaggaaccatacgaagaggccaccgaacgtaccacatcaattgctacaacaacaactacaactaccgaatcagtggaggaagtggtgcgggaagtatgcagcgaacaggctgagaccgggccttgtcgggcaatgatttcgcggtggtacttcgacgtcacggaaggcaagtgcgctccctttttttatggcggttgcggcgggaaccgcaataacttcgacaccgaggagtattgcatggccgtatgcgggtccgccatacccaccacggccgcttctactcccgacgcagtcgacaagtatttagagactcccggcgatgagaacgagcacgctcactttcagaaagcgaaggaacggctggaggcaaagcacagagaacgcatgtctcaggtgatgagggaatgggaggaggcagagaggcaggctaaaaatctcccaaaagctgataagaaggccgtcatccagcattttcaagagaaggtggagtccctggagcaggaggctgccaacgagagacaacagctggtcgagacacacatggctagagtggaggccatgctgaacgatcggcgtcgcctagcccttgagaattacatcacggccttgcaggcagtgccgccacgtcctaggcacgtgttcaacatgctgaagaaatatgtgagagcagaacagaaagataggcagcacaccctcaagcattttgagcacgtgaggatggtcgaccccaaaaaagccgctcagattagatcacaggtcatgacccatttgagggtcatatatgaacggatgaaccagtcactgagcctcctgtacaacgtccccgctgtggccgaagaaatacaggacgaggtggatgagctgctgcagaaggaacagaactattccgatgacgttctggctaatatgatttcggagcctcgaataagctacggtaacgatgcactgatgccttccttaaccgaaacaaaaaccactgttgagctcctgcccgttaatggagagttttccctcgacgacctacaaccatggcattcatttggtgctgactctgtccccgcaaacaccgagaacgaggtggagcctgtcgacgcacgccctgcagcagaccgcgggctgactaccagacctggttctgggcttacaaacataaagaccgaagagatttctgaggtaaagatggatgcagagttccggcatgacagcggctatgaggtccaccaccaaaagctggtattcttcgccgaggatgtaggaagcaataagggagctatcatagggttgatggtcggtggtgtcgttatcgcaactgtaatcgtgatcacactggtgatgctgaagaaaaagcagtacaccagcatccaccatggagtggtggaggtagatgccgcggttactccagaggagaggcacctgtcaaaaatgcaacaaaacggatatgaaaacccgacgtataaattttttgagcagatgcagaattag

SEQ ID NO: 51597 - DNA, 2241 bp, Artificial Sequence
  derived and/or modified sequence
atggatcaactggaggacctgctcgtccttttcattaactacgtgcccaccgacgggaatgcaggcctgctcgctgagccacagattgccatgttttgcggacggctgaacatgcatatgaacgtccagaacggaaaatgggatagtgatccttcaggaactaagacctgtattgatacaaaggagggcattttacagtattgtcaggaagtatatccggaactgcaaatcactaatgtagtggaggccaatcagcctgtgactatacagaattggtgtaagagaggccggaaacaatgcaaaacacacccacattttgtgatcccctatcggtgcctcgtgggtgagttcgttagcgatgctcttctggtcccggataagtgtaaatttctgcaccaagaacgaatggacgtatgtgagacccaccttcactggcatactgttgcaaaggaaacatgcagtgagaaaagtaccaacctgcacgattacggaatgttgctgccatgtggcattgacaaattccgaggcgtggaatttgtatgctgtcctctggcagaggagtccgacaatgtggactctgcagacgcagaggaggacgacagtgatgtgtggtggggaggcgctgacacggactatgccgatggttctgaagacaaagtggtggaagtggccgaagaagaagaggtggcagaggtggaagaagaggaggctgacgacgatgaggacgacgaggacggcgacgaggttgaagaggaggcagaggagccatacgaagaggccactgagagaactacttctattgccacaacaacaaccactaccaccgaaagcgtggaagaagtggtccgggaagtgtgttctgagcaggctgagaccggtccttgcagggccatgatatcccgatggtattttgacgtgacagagggaaaatgcgctccatttttttacggcgggtgcggcggtaaccgcaataatttcgataccgaggaatattgcatggcggtttgtggttctgcaatccccaccaccgctgcatctacccctgacgccgttgataaatacctcgagacccctggagacgaaaacgaacatgcacacttccaaaaggccaaggaacggcttgaagccaagcatcgagaacggatgagccaagtgatgcgagagtgggaagaggcagagcgccaggccaagaatctgccaaaagccgataaaaaggccgtcatccagcactttcaagagaaagtggagagccttgaacaggaggccgccaatgagcgtcaacaactcgttgaaacgcatatggctcgtgtggaagcaatgcttaatgaccgcagaaggctagcccttgagaattatatcacggcgctccaggccgtgcctccaagaccacgtcacgtgttcaacatgttaaaaaagtacgtgcgtgccgaacagaaggacaggcagcacaccttaaagcatttcgagcatgtgcgaatggtggatccaaagaaggccgcccagatccgctctcaggtgatgacccatctgcgagtgatttacgagaggatgaatcagagcctctccctgctgtataatgtccccgccgtggctgaggaaatccaagatgaagttgatgaactgcttcaaaaagagcagaactactcagacgatgtactggctaacatgatatccgagcctagaatcagttacggaaatgacgccctgatgccgtctctcacagaaactaagaccaccgtggaattgctacctgtaaatggagaattctcgctggatgacctgcagccttggcactcattcggcgcggatagcgtgcccgcaaatactgaaaatgaagtagagccagtcgatgccagaccggctgctgaccggggactgacaaccaggcctggatctgggctgaccaacatcaagacagaagaaatctctgaggtcaagatggatgcggagttccgccacgacagtggctacgaggtgcaccaccagaaactcgtcttctttgctgaggatgtgggcagtaataaaggagctattattgggctcatggtcgggggcgtcgttatcgcaacagtgattgtcattactctggtaatgctgaagaagaaacaatatacgtccatccatcatggagtggtggaagtagatgccgctgtcactcctgaagagaggcacctatccaaaatgcagcagaatggttatgaaaatcctacttacaagttcttcgagcagatgcagaactag

SEQ ID NO: 51598 - DNA, 2256 bp, Artificial Sequence
  derived and/or modified sequence
atgctgcccggcctggccctgctgctgctggccgcctggacagcccgggccctggaggtgcccacagatggaaatgccggcctgctggccgagccccagatcgccatgttctgtggccgcctgaacatgcacatgaatgtgcagaatggcaagtgggacagcgaccccagcggcaccaagacctgcatcgacaccaaggagggcatcctgcagtactgccaggaggtgtacccagagctgcagatcaccaacgtggtggaggccaaccagcctgtgaccatccagaactggtgcaagaggggcaggaagcagtgcaagacccacccccactttgtgatcccctaccgctgcctggtgggggagtttgtgtctgatgccctgctggtgcctgacaagtgcaagttcctgcaccaggagaggatggatgtgtgtgagacccacctgcactggcacacagtggccaaggagacctgcagcgagaagagcaccaacctgcatgactatggcatgctgctgccctgtggcatcgacaagttccggggcgtggagtttgtgtgctgccccctggccgaggagagtgacaacgtggacagcgcagatgctgaagaagatgacagtgatgtgtggtggggcggcgctgacacagattatgcagatggcagcgaggacaaggtggtggaggtggccgaggaggaggaggtggccgaggtggaggaggaggaggctgatgatgatgaagatgatgaagatggagatgaggtggaggaggaggccgaggagccctatgaggaggccacagagaggaccaccagcatcgccaccaccaccaccaccaccacagagagcgtggaggaggtggtgcgggaggtgtgcagcgagcaggccgagaccggcccctgccgggccatgatcagccgctggtactttgatgtgacagagggcaaatgtgcccccttcttctatggaggctgcggcggcaacagaaacaactttgacacagaggagtactgcatggctgtgtgtggcagcgccatccccaccacagctgccagcaccccagatgctgtggacaagtacctggagaccccaggagatgaaaatgaacatgcccacttccagaaggccaaggagcggctggaggccaagcaccgggagaggatgagccaggtgatgagggagtgggaggaggccgagcggcaggccaagaacctgcccaaggctgacaagaaggctgtgatccagcacttccaggagaaggtggagagcctggagcaggaggccgccaatgaaaggcagcagctggtggagacccacatggcccgggtggaggccatgctgaatgacagaagaaggctggccctggagaactacatcacagccctgcaggccgtgcccccccggcccaggcatgtgttcaacatgctgaagaagtatgtgcgggcagagcagaaggaccggcagcacaccctgaagcactttgaacatgtgaggatggtggaccccaagaaggccgcccagatccgcagccaggtgatgacccacctgcgggtcatctatgaaagaatgaaccagagcctgagcctgctgtacaacgtgcctgctgtggccgaggagatccaggatgaggtggatgagctgctgcagaaggagcagaactacagtgatgatgtgctggccaacatgatcagcgagccccgcatctcctatggaaatgatgccctgatgcccagcctgacagagaccaagaccaccgtggagctgctgcctgtgaatggagagttcagcctggatgacctgcagccctggcacagctttggagctgacagcgtgcctgccaacacagaaaatgaggtggagcctgtggatgcccggcctgctgctgaccggggcctgaccaccaggcctggcagcggcctgaccaacatcaagacagaggagatcagcgaggtgaagatggatgctgagttcagacatgacagcggctatgaggtgcaccaccagaagctggtgttctttgctgaagatgtgggcagcaacaagggggccatcatcggcctgatggtgggcggcgtggtgattgccaccgtgattgtcatcaccctggtgatgctgaagaagaagcagtacaccagcatccaccacggcgtggtggaggtggatgctgctgtgaccccagaggagcggcacctgagcaagatgcagcagaatggctatgagaaccccacctacaagttctttgagcagatgcagaactag

SEQ ID NO: 51599 - DNA, 2241 bp, Artificial Sequence
  derived and/or modified sequence
atggaccagctggaggacctgctggtgctcttcatcaactacgtgcccacagatggaaatgccggcctgctggccgagccccagatcgccatgttctgtggccgcctgaacatgcacatgaatgtgcagaatggcaagtgggacagcgaccccagcggcaccaagacctgcatcgacaccaaggagggcatcctgcagtactgccaggaggtgtacccagagctgcagatcaccaacgtggtggaggccaaccagcctgtgaccatccagaactggtgcaagaggggcaggaagcagtgcaagacccacccccacttcgtcatcccctaccgctgcctggtgggggagtttgtgtctgatgccctgctggtgcctgacaagtgcaagttcctgcaccaggagaggatggatgtgtgtgagacccacctgcactggcacacagtggccaaggagacctgcagcgagaagagcaccaacctgcatgactatggcatgctgctgccctgtggcatcgacaagttccggggcgtggagtttgtgtgctgccccctggccgaggagagtgacaacgtggacagcgcagatgctgaggaggatgacagtgatgtgtggtggggcggcgctgacacagattatgcagatggcagcgaggacaaggtggtggaggtggccgaggaggaggaggtggccgaggtggaggaggaggaggctgatgatgatgaagatgatgaagatggagatgaggtggaggaggaggccgaggagccctatgaggaggccacagagaggaccaccagcatcgccaccaccaccaccaccaccacagaatctgtggaggaggtggtgcgggaggtgtgcagcgagcaggccgagaccggcccctgccgggccatgatcagccgctggtactttgatgtgacagagggcaaatgtgcccccttcttctacggcggctgcggcggcaacagaaacaactttgacacagaggagtactgcatggctgtgtgtggcagcgccatccccaccacagctgccagcaccccagatgctgtggacaagtacctggagaccccaggagatgaaaatgagcacgcccacttccagaaggccaaggagcggctggaggccaagcaccgggagaggatgagccaggtgatgagggagtgggaggaggccgagcggcaggccaagaacctgcccaaggctgacaagaaggccgtcatccagcacttccaggagaaggtggagagcctggagcaggaggccgccaatgaaaggcagcagctggtggagacccacatggcccgggtggaggccatgctgaatgacagaagaaggctggccctggagaactacatcacagccctgcaggccgtgcccccccggcccaggcatgtgttcaacatgctgaagaagtatgtgcgggcagagcagaaggaccggcagcacaccctgaagcactttgagcacgtgaggatggtggaccccaagaaggccgcccagatccgcagccaggtgatgacccacctgcgggtcatctatgaaagaatgaaccagagcctgagcctgctgtacaacgtgcctgctgtggccgaggagatccaggatgaggtggatgagctgctgcagaaggagcagaactacagtgatgatgtgctggccaacatgatcagcgagccccgcatctcctatggaaatgatgccctgatgcccagcctgacagagaccaagaccaccgtggagctgctgcctgtgaatggagagttcagcctggatgacctgcagccctggcacagctttggagctgacagcgtgcctgccaacacagaaaatgaggtggagcctgtggatgcccggcctgctgctgaccggggcctgaccacccggcccggcagcggcctgaccaacatcaagacagaggagatcagcgaggtgaagatggatgctgagttcagacatgattctggctatgaggtgcaccaccagaagctggtgttctttgctgaagatgtgggcagcaacaagggggccatcatcggcctgatggtgggcggcgtggtgattgccaccgtcatcgtcatcaccctggtgatgctgaagaagaagcagtacaccagcatccaccacggcgtggtggaggtggatgctgctgtgaccccagaggagcggcacctgagcaagatgcagcagaatggctatgagaaccccacctacaagttctttgagcagatgcagaactag

SEQ ID NO: 51600 - DNA, 2256 bp, Artificial Sequence
  derived and/or modified sequence
atgctgcccggcctggccctgctgctgctggccgcctggaccgcccgggctctggaagtgccaaccgatggcaacgccgggctgctagcagaaccacagattgcgatgttctgtggcaggctgaacatgcacatgaacgtgcagaacggcaaatgggattctgatcccagcgggactaaaacgtgcattgatacaaaagaaggaatcttacagtattgtcaggaggtatacccagaactccagatcacgaatgtggtcgaagccaatcagccagtaactattcagaattggtgtaagagaggaagaaaacaatgtaaaacccacccccactttgttatcccttaccggtgcctcgtgggggagttcgtatctgacgcgttgctcgtcccggacaaatgcaaattcctccatcaggagagaatggacgtatgtgaaacgcaccttcattggcatacagtagcaaaggagacttgttccgagaaatcgacgaatttgcacgactatggaatgctgttgccctgcggtatcgacaagtttcgtggtgttgagtttgtgtgctgccctcttgctgaagagtccgacaatgtggattcggccgatgccgaggaggacgatagcgacgtgtggtggggcggggccgacacagattacgccgatgggagtgaggataaggtcgtggaagtggcggaagaggaagaggtggcagaagtggaagaagaagaagctgacgatgacgaagatgatgaagacggagatgaggttgaagaagaggctgaggaaccatatgaagaagctacagaacgcacgacatctatagccaccaccaccaccactaccactgagtccgttgaggaggtggtgcgcgaagtttgttcggagcaggctgagactgggccctgcagggcgatgatttcacggtggtacttcgacgttactgaggggaagtgcgccccctttttttacggtggatgcgggggaaaccgaaataattttgatacagaggagtactgtatggccgtgtgtgggtctgcgatcccaacaaccgcggcaagcactccagacgcggtagataagtacttagaaacacccggcgacgaaaatgagcatgcgcactttcagaaagccaaagagaggctcgaggctaagcaccgtgagcgaatgtcccaggtgatgcgagaatgggaggaagcagaacgacaggccaaaaatttaccaaaggccgataagaaggcggtgatacagcatttccaggagaaggtggaatccttagagcaagaggctgcaaatgagcgccagcagttggtggaaacccacatggcacgggttgaagccatgctgaacgaccgaaggagactggccctggagaattatattaccgcgctgcaggcagtgccaccccgaccccgccatgtcttcaacatgctgaagaaatacgtccgggccgagcagaaagatagacagcacaccctcaagcattttgagcacgtccgcatggttgatcctaagaaagccgcacagatccgctctcaggtgatgacacacctgcgtgtcatctacgagcggatgaaccagtccctaagtctattatacaacgtccctgccgtagcagaggagatccaggacgaggtggacgaactcctccagaaggagcagaactattcggatgatgtcctcgccaatatgataagtgagccaagaatcagctatggcaacgatgcactgatgccttctttgactgagaccaaaacgaccgtcgaactcctgcccgtgaacggtgaattttctctcgatgatctccaaccatggcattccttcggcgccgattccgtgccagccaacaccgagaatgaagtggagccagtggacgcacggccagccgccgatcggggactgacaactagacctgggtctggactgacaaatattaagacggaagaaatctctgaggtaaagatggatgcagaattccgtcatgattctgggtacgaagtgcaccaccaaaagctggttttttttgcagaagacgtcggttctaacaaaggagcaattatcggattaatggtgggtggtgtcgttatcgccacagtgattgtcatcactttagttatgttgaaaaaaaagcagtatacaagcattcaccatggggtggtagaagtggatgccgcagtgacgccggaggaacgacacctgtctaagatgcaacagaatggttacgagaatccaacttataagttctttgagcagatgcaaaattag

SEQ ID NO: 51601 - DNA, 2241 bp, Artificial Sequence
  derived and/or modified sequence
atggaccagctggaggacctgctggtgctgttcatcaactacgtgcccaccgatggcaacgcggggctgcttgctgagcctcagatagcgatgttctgtggtaggctgaacatgcacatgaatgttcagaatggaaagtgggatagtgacccatccggtacaaaaacctgtattgacacaaaggaaggcattcttcagtactgccaggaggtttatccagagttgcaaattacaaatgtggtggaggctaatcagccagtgactattcagaactggtgcaagcggggccggaaacagtgcaagactcacccccatttcgtcattccttatcggtgcctagtaggtgaattcgtatcagatgctcttctggtcccggataaatgcaagttcttacatcaggagagaatggacgtgtgtgagactcacctacattggcacacagttgcgaaggagacatgcagcgagaagtctaccaatcttcatgattacggcatgctgttaccctgcggcatcgacaagttcaggggagttgaatttgtctgctgtcccctggctgaggagtctgataacgtggacagtgctgatgcagaagaggatgactcagatgtgtggtggggcggagccgatactgactatgccgacggatccgaagacaaggtcgtggaagtggctgaagaagaagaggttgccgaggtagaagaggaggaggccgatgatgatgaggatgacgaggacggggacgaggttgaagaagaggccgaggaaccgtatgaagaagccactgaacgcacaacatcaatcgctactaccaccaccacaaccactgaatccgttgaggaggttgtgagagaggtgtgcagtgagcaggccgagaccggaccgtgtcgcgctatgattagtaggtggtacttcgatgtgacggagggcaaatgtgcaccattcttctacggcgggtgcggcggcaaccggaacaattttgacacagaagagtactgtatggctgtctgtggtagtgctatacctactactgccgccagcacacctgatgcagtcgataaatacctggagacccctggggatgagaatgaacacgctcactttcagaaagccaaggaacgcttagaggctaaacatagggaacgcatgtctcaagtgatgagagaatgggaggaggctgagcgacaggccaagaacctccccaaggcagataagaaagccgtgattcaacacttccaggagaaggtggagagtctggagcaggaggcagctaatgaacgccagcagttggtggaaacacatatggcaagggttgaggccatgcttaacgataggcgacggctagctctggaaaattacatcactgctctccaggctgtcccaccccgcccacgacacgtttttaatatgttaaagaaatacgtgagggctgagcagaaagacagacagcacaccctgaaacatttcgaacatgtgcgcatggtggatccaaagaaggctgctcagattaggagccaggtaatgacacatcttagggtcatctatgagcgaatgaaccagtcactgagtctgctgtacaacgtcccagctgtggcagaggaaattcaggatgaggtcgatgagctcctgcagaaggagcagaactatagtgatgatgtgctcgccaacatgatcagtgagccaagaatcagctatgggaacgacgcgctcatgccatccctgactgaaacaaagaccaccgtggaactgctacctgttaacggcgagtttagtctggacgatctccagccctggcactctttcggcgctgatagcgtcccagcaaatactgagaacgaggtagagcccgtcgatgcccgcccagccgcggaccgcggcctcacaactagacctggatcaggacttactaacattaagactgaggaaatttccgaagtcaagatggacgcggaattccgacatgacagtggctatgaagttcatcaccaaaaactagtcttttttgctgaagacgtgggcagcaacaaaggtgcaataattggcctgatggtggggggtgtcgtgattgctaccgtgattgtgatcactctggtcatgctgaagaagaaacagtacaccagcatccatcatggcgtagtggaggttgatgcagctgttactcccgaagagcgacatctgtcaaagatgcaacagaacggatatgaaaacccaacgtataagttctttgagcagatgcaaaattag

SEQ ID NO: 51602 - DNA, 3543 bp, Artificial Sequence
  derived and/or modified sequence
cgccgcgctcgggctccgtcagtttcctcggcagcggtaggcgagagcacgcggaggagcgtgcgcgggggccccgggagacggcggcggtggcggcgcgggcagagcaaggacgcggcggatcccactcgcacagcagcgcactcggtgccccgcgcagggtcgcgatgctgcccggtttggcactgctcctgctggccgcctggacggctcgggcgctggaggtacccactgatggtaatgctggcctgctggctgaaccccagattgccatgttctgtggcagactgaacatgcacatgaatgtccagaatgggaagtgggattcagatccatcagggaccaaaacctgcattgataccaaggaaggcatcctgcagtattgccaagaagtctaccctgaactgcagatcaccaatgtggtagaagccaaccaaccagtgaccatccagaactggtgcaagcggggccgcaagcagtgcaagacccatccccactttgtgattccctaccgctgcttagttggtgagtttgtaagtgatgcccttctcgttcctgacaagtgcaaattcttacaccaggagaggatggatgtttgcgaaactcatcttcactggcacaccgtcgccaaagagacatgcagtgagaagagtaccaacttgcatgactacggcatgttgctgccctgcggaattgacaagttccgaggggtagagtttgtgtgttgcccactggctgaagaaagtgacaatgtggattctgctgatgcggaggaggatgactcggatgtctggtggggcggagcagacacagactatgcagatgggagtgaagacaaagtagtagaagtagcagaggaggaagaagtggctgaggtggaagaagaagaagccgatgatgacgaggacgatgaggatggtgatgaggtagaggaagaggctgaggaaccctacgaagaagccacagagagaaccaccagcattgccaccaccaccaccaccaccacagagtctgtggaagaggtggttcgagaggtgtgctctgaacaagccgagacggggccgtgccgagcaatgatctcccgctggtactttgatgtgactgaagggaagtgtgccccattcttttacggcggatgtggcggcaaccggaacaactttgacacagaagagtactgcatggccgtgtgtggcagcgccattcctacaacagcagccagtacccctgatgccgttgacaagtatctcgagacacctggggatgagaatgaacatgcccatttccagaaagccaaagagaggcttgaggccaagcaccgagagagaatgtcccaggtcatgagagaatgggaagaggcagaacgtcaagcaaagaacttgcctaaagctgataagaaggcagttatccagcatttccaggagaaagtggaatctttggaacaggaagcagccaacgagagacagcagctggtggagacacacatggccagagtggaagccatgctcaatgaccgccgccgcctggccctggagaactacatcaccgctctgcaggctgttcctcctcggcctcgtcacgtgttcaatatgctaaagaagtatgtccgcgcagaacagaaggacagacagcacaccctaaagcatttcgagcatgtgcgcatggtggatcccaagaaagccgctcagatccggtcccaggttatgacacacctccgtgtgatttatgagcgcatgaatcagtctctctccctgctctacaacgtgcctgcagtggccgaggagattcaggatgaagttgatgagctgcttcagaaagagcaaaactattcagatgacgtcttggccaacatgattagtgaaccaaggatcagttacggaaacgatgctctcatgccatctttgaccgaaacgaaaaccaccgtggagctccttcccgtgaatggagagttcagcctggacgatctccagccgtggcattcttttggggctgactctgtgccagccaacacagaaaacgaagttgagcctgttgatgcccgccctgctgccgaccgaggactgaccactcgaccaggttctgggttgacaaatatcaagacggaggagatctctgaagtgaagatggatgcagaattccgacatgactcaggatatgaagttcatcatcaaaaattggtgttctttgcagaagatgtgggttcaaacaaaggtgcaatcattggactcatggtgggcggtgttgtcatagcgacagtgatcgtcatcaccttggtgatgctgaagaagaaacagtacacatccattcatcatggtgtggtggaggttgacgccgctgtcaccccagaggagcgccacctgtccaagatgcagcagaacggctacgaaaatccaacctacaagttctttgagcagatgcagaactagacccccgccacagcagcctctgaagttggacagcaaaaccattgcttcactacccatcggtgtccatttatagaataatgtgggaagaaacaaacccgttttatgatttactcattatcgccttttgacagctgtgctgtaacacaagtagatgcctgaacttgaattaatccacacatcagtaatgtattctatctctctttacattttggtctctatactacattattaatgggttttgtgtactgtaaagaatttagctgtatcaaactagtgcatgaatagattctctcctgattatttatcacatagccccttagccagttgtatattattcttgtggtttgtgacccaattaagtcctactttacatatgctttaagaatcgatgggggatgcttcatgtgaacgtgggagttcagctgcttctcttgcctaagtattcctttcctgatcactatgcattttaaagttaaacatttttaagtatttcagatgctttagagagattttttttccatgactgcattttactgtacagattgctgcttctgctatatttgtgatataggaattaagaggatacacacgtttgtttcttcgtgcctgttttatgtgcacacattaggcattgagacttcaagcttttctttttttgtccacgtatctttgggtctttgataaagaaaagaatccctgttcattgtaagcacttttacggggcgggtggggaggggtgctctgctggtcttcaattaccaagaattctccaaaacaattttctgcaggatgattgtacagaatcattgcttatgacatgatcgctttctacactgtattacataaataaattaaataaaataaccccgggcaagacttttctttgaaggatgactacagacattaaataatcgaagtaattttgggtggggagaagaggcagattcaattttctttaaccagtctgaagtttcatttatgatacaaaagaagatgaaaatggaagtggcaatataaggggatgaggaaggcatgcctggacaaacccttcttttaagatgtgtcttcaatttgtataaaatggtgttttcatgtaaataaatacattcttggaggagca

SEQ ID NO: 51603 - DNA, 2737 bp, Artificial Sequence
  derived and/or modified sequence
agtgttgacatgctgttgactcaccctcccgaggatggaagctctggcctgggtcaagttgtggtcactgcagttaacagtttgttgatctcagggagtattccacagttgctgatgtaattgacaatgattggagccagctcttccccagattcaaatggaccaattagaggacttgttggttctgtttatcaactatgtacccactgatggtaatgctggcctgctggctgaaccccagattgccatgttctgtggcagactgaacatgcacatgaatgtccagaatgggaagtgggattcagatccatcagggaccaaaacctgcattgataccaaggaaggcatcctgcagtattgccaagaagtctaccctgaactgcagatcaccaatgtggtagaagccaaccaaccagtgaccatccagaactggtgcaagcggggccgcaagcagtgcaagacccatccccactttgtgattccctaccgctgcttagttggtgagtttgtaagtgatgcccttctcgttcctgacaagtgcaaattcttacaccaggagaggatggatgtttgcgaaactcatcttcactggcacaccgtcgccaaagagacatgcagtgagaagagtaccaacttgcatgactacggcatgttgctgccctgcggaattgacaagttccgaggggtagagtttgtgtgttgcccactggctgaagaaagtgacaatgtggattctgctgatgcggaggaggatgactcggatgtctggtggggcggagcagacacagactatgcagatgggagtgaagacaaagtagtagaagtagcagaggaggaagaagtggctgaggtggaagaagaagaagccgatgatgacgaggacgatgaggatggtgatgaggtagaggaagaggctgaggaaccctacgaagaagccacagagagaaccaccagcattgccaccaccaccaccaccaccacagagtctgtggaagaggtggttcgagaggtgtgctctgaacaagccgagacggggccgtgccgagcaatgatctcccgctggtactttgatgtgactgaagggaagtgtgccccattcttttacggcggatgtggcggcaaccggaacaactttgacacagaagagtactgcatggccgtgtgtggcagcgccattcctacaacagcagccagtacccctgatgccgttgacaagtatctcgagacacctggggatgagaatgaacatgcccatttccagaaagccaaagagaggcttgaggccaagcaccgagagagaatgtcccaggtcatgagagaatgggaagaggcagaacgtcaagcaaagaacttgcctaaagctgataagaaggcagttatccagcatttccaggagaaagtggaatctttggaacaggaagcagccaacgagagacagcagctggtggagacacacatggccagagtggaagccatgctcaatgaccgccgccgcctggccctggagaactacatcaccgctctgcaggctgttcctcctcggcctcgtcacgtgttcaatatgctaaagaagtatgtccgcgcagaacagaaggacagacagcacaccctaaagcatttcgagcatgtgcgcatggtggatcccaagaaagccgctcagatccggtcccaggttatgacacacctccgtgtgatttatgagcgcatgaatcagtctctctccctgctctacaacgtgcctgcagtggccgaggagattcaggatgaagttgatgagctgcttcagaaagagcaaaactattcagatgacgtcttggccaacatgattagtgaaccaaggatcagttacggaaacgatgctctcatgccatctttgaccgaaacgaaaaccaccgtggagctccttcccgtgaatggagagttcagcctggacgatctccagccgtggcattcttttggggctgactctgtgccagccaacacagaaaacgaagttgagcctgttgatgcccgccctgctgccgaccgaggactgaccactcgaccaggttctgggttgacaaatatcaagacggaggagatctctgaagtgaagatggatgcagaattccgacatgactcaggatatgaagttcatcatcaaaaattggtgttctttgcagaagatgtgggttcaaacaaaggtgcaatcattggactcatggtgggcggtgttgtcatagcgacagtgatcgtcatcaccttggtgatgctgaagaagaaacagtacacatccattcatcatggtgtggtggaggttgacgccgctgtcaccccagaggagcgccacctgtccaagatgcagcagaacggctacgaaaatccaacctacaagttctttgagcagatgcagaactagacccccgccacagcagcctctgaagttggacagcaaaaccattgcttcactacccatcggtgtccatttatagaataatgtgggaagaaacaaacccgttttatgatttactcattatcgccttttgacagctgtgctgtaacacaagtagatgcctgaacttgaattaatccacacatcagtaatgtattctatctctctttacattttggtctctatactacattattaatgggttttgtgtactgtaaagaatttagctgtatcaaactagtgcatgaatagattctctcctgattatttatcacatagccccttagccagttgtatattattctt

SEQ ID NO: 51604 - DNA, 2256 bp, Artificial Sequence
  derived and/or modified sequence
atgctccctggtctcgccttgctattgctggcagcctggacggcgagggccctggaggtgcccaccgacgggaatgcaggcttactggccgaaccccaaatagcgatgttctgtggccgattgaatatgcacatgaacgtgcagaacggaaaatgggactccgaccctagcgggactaagacctgcatcgacactaaggagggcatattgcagtattgccaggaggtctaccctgagctacagatcactaatgtggtggaggccaaccagcctgttacaatccagaactggtgcaagcgcggacgcaagcagtgcaagacacatccacattttgtgatcccttataggtgtctggttggcgagttcgtctcagatgcgctccttgtgcccgataaatgcaagttcctgcatcaggaacgcatggacgtctgcgagacccatcttcattggcacaccgttgccaaggaaacctgttcagagaagagcaccaatcttcacgattatggcatgctgttgccatgtgggatcgataagtttcgaggagtggaatttgtgtgttgcccgctggcagaggagagcgacaatgtggactcggctgatgccgaggaagacgatagcgacgtctggtggggcggagcggatactgattatgcagacgggtcagaagataaggtcgtggaggtggccgaggaggaggaagtagccgaagtcgaggaagaggaggcagatgatgacgaggacgatgaggatggggacgaagtcgaagaagaagcagaggagccctatgaagaggccactgagcgtactaccagtatcgcaaccaccacaactacaacaaccgaatccgtagaggaggtcgtgcgtgaggtgtgctccgaacaggccgaaacagggccatgccgagcaatgatttcaagatggtactttgatgtgaccgagggaaagtgcgcgccatttttctatggcggttgcggcggaaacaggaacaactttgacaccgaggaatactgtatggctgtgtgcgggtctgctatccctaccactgcagcctccacaccagacgctgtcgataagtacctggagacacccggagatgagaacgaacatgcccacttccagaaagcgaaggagagactggaagcaaaacaccgggaaagaatgtcacaggtgatgcgggagtgggaggaggctgaaagacaagccaagaatctgcctaaggcagacaagaaagcagtcatccagcacttccaggaaaaagtggagtctttagaacaggaggccgcaaatgaacggcagcagctcgtagaaacacatatggcacgggtggaagccatgctgaatgaccgccgaaggctggcgctcgagaattacattactgcccttcaggctgtccctccacgcccaagacacgtgtttaatatgttgaagaaatatgtccgcgcagagcaaaaggatagacagcatacattgaagcacttcgagcatgttagaatggtggaccctaaaaaggcggctcagataaggtcccaggtgatgacacatctgagagttatctatgagcggatgaaccaatctctttccctgctgtacaatgtaccagccgttgcggaggaaattcaagacgaggtcgacgagctattacagaaagaacaaaactattccgacgacgtccttgcaaacatgatcagtgaacccagaatctcttacggtaacgacgctctcatgccgtcgctgactgagaccaagactacagtagaactcctgcctgtcaacggtgagttttctctggatgacttgcagccctggcacagcttcggggcagacagcgttcccgctaataccgagaacgaagtggagcccgtggacgctcgcccagccgctgaccggggactaaccacaagaccgggttccggccttaccaatatcaaaaccgaagaaatttcagaggtcaagatggacgctgaatttcggcatgattcgggctacgaggttcaccatcagaagcttgttttttttgctgaggacgtcggtagcaataaaggggctattattggtctgatggttgggggagtcgtaattgcaacagtcatcgtcatcaccctagtgatgctcaagaaaaagcagtatacctccatccaccacggagttgtcgaggtggacgccgctgtaactccagaggagagacacttatccaaaatgcagcaaaatggctatgaaaatcctacttataaattttttgaacagatgcagaattag

SEQ ID NO: 51605 - DNA, 2241 bp, Artificial Sequence
  derived and/or modified sequence
atggaccaactggaggacctgctagtgctttttatcaactatgtacctactgacggcaacgctggacttctggcagaaccacagattgctatgttttgtggcaggttgaacatgcatatgaacgtgcagaacggaaagtgggacagtgaccctagtgggactaaaacttgtattgataccaaggagggcattctgcaatactgtcaggaggtgtacccggagctgcagatcacaaatgtggttgaagcaaaccagccagtgacaattcagaattggtgtaaacgcggaagaaagcagtgtaagacacacccccatttcgttattccttacagatgcctggttggcgagttcgtctctgacgccctgctggtccccgacaaatgtaagtttttacaccaggaaagaatggacgtctgtgagacccatctccactggcacactgtggcaaaagagacctgttccgaaaagtcaaccaacttgcacgactacggcatgttgctcccatgcggcatcgacaagttccgtggtgttgaatttgtctgctgccctctcgccgaggaaagcgataatgtcgatagcgcagacgccgaagaggatgatagtgacgtttggtggggaggcgctgatactgactacgctgacgggagcgaagacaaggttgtggaagtggcggaggaggaggaggtcgccgaggttgaggaggaagaggcggatgatgatgaggatgacgaagatggagatgaggtggaagaagaagctgaggagccttatgaagaagcaacggaacgaaccacgtctattgcaacaaccacgactaccactaccgaatccgtcgaagaagttgtccgagaagtctgttcagaacaggccgagactggcccttgtcgtgcgatgatcagtcggtggtacttcgacgtaacagagggcaagtgtgctccattcttctatggcggatgtgggggaaacagaaataacttcgacactgaggaatattgtatggcagtgtgtggctcagccattccaaccacagctgcgagtacacctgatgcagtggataaatatctcgagacccccggagacgagaatgaacacgcacactttcagaaagccaaagagagactcgaagccaaacatagggagcggatgtcccaggtcatgcgtgagtgggaggaggctgagaggcaagccaaaaatttacccaaagctgacaagaaagccgtaatccagcacttccaagaaaaggtggagtcgttggaacaggaagccgcaaacgagaggcagcaacttgtggaaacccatatggctcgtgttgaggccatgctgaatgacaggaggagactagccctggagaactacatcactgctttgcaggcagtgcctccgagacccagacacgtgttcaacatgctcaaaaagtatgtgagagccgaacagaaggatcgacagcacacgctcaagcactttgagcacgttagaatggtggatcccaaaaaggctgcccagattagaagccaagtgatgacacacctgagagtgatatacgagcgtatgaaccaatctttgtcacttctgtacaacgtcccggctgtagcagaggagattcaggacgaggtagatgagctgctccagaaagagcagaattatagcgatgatgtactcgcgaacatgatctctgagccacgaatatcatacgggaatgacgcccttatgcctagtttgaccgagactaagacaaccgtggagctgctgcccgtgaatggggaatttagtctggacgacttgcaaccgtggcactccttcggagcagactccgtaccagccaatacagaaaacgaggtcgagcctgtggatgcgaggccagcggcagacaggggactgacaacccggcctggttcaggtcttaccaatataaagaccgaggaaatcagcgaggttaagatggatgccgaatttcgtcacgactctggctatgaagtgcaccaccaaaagctggtgttctttgcagaggacgttggttctaataaaggcgctatcattgggctcatggtgggcggagtggtgatagccactgttattgtgatcaccctggtcatgctaaagaagaaacagtacacctctatccaccacggcgtggtcgaagtcgatgctgcggtgacccctgaggagaggcacttgtcaaagatgcagcagaacggctatgagaaccctacctacaagttcttcgagcagatgcagaattag

SEQ ID NO: 51606 - DNA, 2256 bp, Artificial Sequence
  derived and/or modified sequence
atgctgcccggcctggccctgctgctgctggccgcctggaccgccagagccctggaggtgcccaccgacggcaacgccggcctgctggccgagccccagatcgccatgttctgcggcagactgaacatgcacatgaacgtgcagaacggcaagtgggacagcgaccccagcggcaccaagacctgcatcgacaccaaggagggcatcctgcagtactgccaggaggtgtaccccgagctgcagatcaccaacgtggtggaggccaaccagcccgtgaccatccagaactggtgcaagagaggcagaaagcagtgcaagacccacccccacttcgtgatcccctacagatgcctggtgggcgagttcgtgagcgacgccctgctggtgcccgacaagtgcaagttcctgcaccaggagagaatggacgtgtgcgagacccacctgcactggcacaccgtggccaaggagacctgcagcgagaagagcaccaacctgcacgactacggcatgctgctgccctgcggcatcgacaagttcagaggcgtggagttcgtgtgctgccccctggccgaggagagcgacaacgtggacagcgccgacgccgaggaggacgacagcgacgtgtggtggggcggcgccgacaccgactacgccgacggcagcgaggacaaggtggtggaggtggccgaggaggaggaggtggccgaggtggaggaggaggaggccgacgacgacgaggacgacgaggacggcgacgaggtggaggaggaggccgaggagccctacgaggaggccaccgagagaaccaccagcatcgccaccaccaccaccaccaccaccgagagcgtggaggaggtggtgagagaggtgtgcagcgagcaggccgagaccggcccctgcagagccatgatcagcagatggtacttcgacgtgaccgagggcaagtgcgcccccttcttctacggcggctgcggcggcaacagaaacaacttcgacaccgaggagtactgcatggccgtgtgcggcagcgccatccccaccaccgccgccagcacccccgacgccgtggacaagtacctggagacccccggcgacgagaacgagcacgcccacttccagaaggccaaggagagactggaggccaagcacagagagagaatgagccaggtgatgagagagtgggaggaggccgagagacaggccaagaacctgcccaaggccgacaagaaggccgtgatccagcacttccaggagaaggtggagagcctggagcaggaggccgccaacgagagacagcagctggtggagacccacatggccagagtggaggccatgctgaacgacagaagaagactggccctggagaactacatcaccgccctgcaggccgtgccccccagacccagacacgtgttcaacatgctgaagaagtacgtgagagccgagcagaaggacagacagcacaccctgaagcacttcgagcacgtgagaatggtggaccccaagaaggccgcccagatcagaagccaggtgatgacccacctgagagtgatctacgagagaatgaaccagagcctgagcctgctgtacaacgtgcccgccgtggccgaggagatccaggacgaggtggacgagctgctgcagaaggagcagaactacagcgacgacgtgctggccaacatgatcagcgagcccagaatcagctacggcaacgacgccctgatgcccagcctgaccgagaccaagaccaccgtggagctgctgcccgtgaacggcgagttcagcctggacgacctgcagccctggcacagcttcggcgccgacagcgtgcccgccaacaccgagaacgaggtggagcccgtggacgccagacccgccgccgacagaggcctgaccaccagacccggcagcggcctgaccaacatcaagaccgaggagatcagcgaggtgaagatggacgccgagttcagacacgacagcggctacgaggtgcaccaccagaagctggtgttcttcgccgaggacgtgggcagcaacaagggcgccatcatcggcctgatggtgggcggcgtggtgatcgccaccgtgatcgtgatcaccctggtgatgctgaagaagaagcagtacaccagcatccaccacggcgtggtggaggtggacgccgccgtgacccccgaggagagacacctgagcaagatgcagcagaacggctacgagaaccccacctacaagttcttcgagcagatgcagaactag

SEQ ID NO: 51607 - DNA, 2241 bp, Artificial Sequence
  derived and/or modified sequence
atggaccagctggaggacctgctggtgctgttcatcaactacgtgcccaccgacggcaacgccggcctgctggccgagccccagatcgccatgttctgcggcagactgaacatgcacatgaacgtgcagaacggcaagtgggacagcgaccccagcggcaccaagacctgcatcgacaccaaggagggcatcctgcagtactgccaggaggtgtaccccgagctgcagatcaccaacgtggtggaggccaaccagcccgtgaccatccagaactggtgcaagagaggcagaaagcagtgcaagacccacccccacttcgtgatcccctacagatgcctggtgggcgagttcgtgagcgacgccctgctggtgcccgacaagtgcaagttcctgcaccaggagagaatggacgtgtgcgagacccacctgcactggcacaccgtggccaaggagacctgcagcgagaagagcaccaacctgcacgactacggcatgctgctgccctgcggcatcgacaagttcagaggcgtggagttcgtgtgctgccccctggccgaggagagcgacaacgtggacagcgccgacgccgaggaggacgacagcgacgtgtggtggggcggcgccgacaccgactacgccgacggcagcgaggacaaggtggtggaggtggccgaggaggaggaggtggccgaggtggaggaggaggaggccgacgacgacgaggacgacgaggacggcgacgaggtggaggaggaggccgaggagccctacgaggaggccaccgagagaaccaccagcatcgccaccaccaccaccaccaccaccgagagcgtggaggaggtggtgagagaggtgtgcagcgagcaggccgagaccggcccctgcagagccatgatcagcagatggtacttcgacgtgaccgagggcaagtgcgcccccttcttctacggcggctgcggcggcaacagaaacaacttcgacaccgaggagtactgcatggccgtgtgcggcagcgccatccccaccaccgccgccagcacccccgacgccgtggacaagtacctggagacccccggcgacgagaacgagcacgcccacttccagaaggccaaggagagactggaggccaagcacagagagagaatgagccaggtgatgagagagtgggaggaggccgagagacaggccaagaacctgcccaaggccgacaagaaggccgtgatccagcacttccaggagaaggtggagagcctggagcaggaggccgccaacgagagacagcagctggtggagacccacatggccagagtggaggccatgctgaacgacagaagaagactggccctggagaactacatcaccgccctgcaggccgtgccccccagacccagacacgtgttcaacatgctgaagaagtacgtgagagccgagcagaaggacagacagcacaccctgaagcacttcgagcacgtgagaatggtggaccccaagaaggccgcccagatcagaagccaggtgatgacccacctgagagtgatctacgagagaatgaaccagagcctgagcctgctgtacaacgtgcccgccgtggccgaggagatccaggacgaggtggacgagctgctgcagaaggagcagaactacagcgacgacgtgctggccaacatgatcagcgagcccagaatcagctacggcaacgacgccctgatgcccagcctgaccgagaccaagaccaccgtggagctgctgcccgtgaacggcgagttcagcctggacgacctgcagccctggcacagcttcggcgccgacagcgtgcccgccaacaccgagaacgaggtggagcccgtggacgccagacccgccgccgacagaggcctgaccaccagacccggcagcggcctgaccaacatcaagaccgaggagatcagcgaggtgaagatggacgccgagttcagacacgacagcggctacgaggtgcaccaccagaagctggtgttcttcgccgaggacgtgggcagcaacaagggcgccatcatcggcctgatggtgggcggcgtggtgatcgccaccgtgatcgtgatcaccctggtgatgctgaagaagaagcagtacaccagcatccaccacggcgtggtggaggtggacgccgccgtgacccccgaggagagacacctgagcaagatgcagcagaacggctacgagaaccccacctacaagttcttcgagcagatgcagaactag

SEQ ID NO: 51608 - protein, 211 aa, Artificial Sequence
  derived and/or modified sequence
MNYLDRYLSCVPTRKAQLQLLGAVCMLLASKLRETTPLTIEKLCIYTDHAVSPRQLRDWEVLVLGKLKWDLAAVIAHDFLAFILHRLSLPRDRQALVKKHAQTFLALCATDYTFAMYPPSMIATGSIGAAVQGLGACSMSGDELTELLAGITGTEVDCLRACQEQIEAALRESLREASQTSSSPAPKAPRGSSSQGPSQTSTPTDVTAIHL

SEQ ID NO: 51609 - protein, 96 aa, Artificial Sequence
  derived and/or modified sequence
MYPPSMIATGSIGAAVQGLGACSMSGDELTELLAGITGTEVDCLRACQEQIEAALRESLREASQTSSSPAPKAPRGSSSQGPSQTSTPTDVTAIHL

SEQ ID NO: 51610 - protein, 43 aa, Artificial Sequence
  derived and/or modified sequence
MNYLDRYLSCVPTRKAQLQLLGAVCMLLASKLRETTPLTIEKL

SEQ ID NO: 51611 - DNA, 636 bp, Artificial Sequence
  derived and/or modified sequence
atgaactacctggacagatacctgagctgcgtgcccaccagaaaggcccagctgcagctgctgggcgccgtgtgcatgctgctggccagcaagctgagagagaccacccccctgaccatcgagaagctgtgcatctacaccgaccacgccgtgagccccagacagctgagagactgggaggtgctggtgctgggcaagctgaagtgggacctggccgccgtgatcgcccacgacttcctggccttcatcctgcacagactgagcctgcccagagacagacaggccctggtgaagaagcacgcccagaccttcctggccctgtgcgccaccgactacaccttcgccatgtacccccccagcatgatcgccaccggcagcatcggcgccgccgtgcagggcctgggcgcctgcagcatgagcggcgacgagctgaccgagctgctggccggcatcaccggcaccgaggtggactgcctgagagcctgccaggagcagatcgaggccgccctgagagagagcctgagagaggccagccagaccagcagcagccccgcccccaaggcccccagaggcagcagcagccagggccccagccagaccagcacccccaccgacgtgaccgccatccacctgtag

SEQ ID NO: 51612 - DNA, 357 bp, Artificial Sequence
  derived and/or modified sequence
atgaactacctggacagatacctgagctgcgtgcccaccagaaaggcccagctgcagctgctgggcgccgtgtgcatgctgctggccagcaagctgagagagaccacccccctgaccatcgagaagctgtgcatctacaccgaccacgccgtgagccccagacagctgagagactgggaggtgctggtgctgggcaagctgaagtgggacctggccgccgtgatcgcccacgacttcctggccttcatcctgcacagactgagcctgcccagagacagacaggccctggtgaagaagcacgcccagaccttcctggccctgtgcgccaccgactacaccttcgccatgtacccctag

SEQ ID NO: 51613 - DNA, 574 bp, Artificial Sequence
  derived and/or modified sequence
aaacacttcgccactgcaggggtggagactggctctgttcggatgccggccgggggggagaggtgcaatcctctcctcgcggctggtggttgcgaccacccccactccccaaaggcaggctccggaggcggcgggacagagcgcctgcgaccccagtcggtgctccggggaggtcacctgacgaggagctccaacctgagcggcaagacccagatggacatgggcacctaggggctttggggcagcactggtttaccacgtgtccctccatatcctgaagatgtaggcctccgtggacacacctgtattcctgagctgtgcatggcctctgtcctggttgcacagaggattggacccacagggcagatgggactgggaggtgctggtcctagggaagctcaagtgggacctggctgctgtgattgcacatgatttcctggccttcattctgcaccggctctctctgccccgtgaccgacaggccttggtcaaaaagcatgcccagacctttttggccctctgtgctacagattatacctttgccatgtacccgccatccatgatcgccacgggc

SEQ ID NO: 51614 - DNA, 636 bp, Artificial Sequence
  derived and/or modified sequence
atgaattatttggatcggtacctttcttgtgtgcctacacggaaggctcagctgcagctgttaggcgcggtgtgcatgctccttgcctcgaaactacgagaaaccaccccattgaccatagaaaagttgtgcatttacacggaccatgcagtcagtcccaggcaacttcgggactgggaggtgttagtacttggcaagctgaaatgggacctcgccgccgtaattgcgcatgacttcctggcgttcattctccaccggttatcactgccacgcgatcgtcaggccctggtcaagaaacatgcccagacctttttggcattgtgtgccaccgattacacttttgccatgtatcccccatcaatgatcgccacggggtccatcggcgccgctgttcagggattgggcgcctgttccatgagcggggatgaactcactgaactgctcgccggcatcactggaaccgaggttgactgcctccgcgcctgccaagaacagattgaggccgcactgagagagagccttcgagaggctagccaaacatccagttctcctgcaccaaaggctccccgcggaagcagtagtcagggtccttcacaaacctccacccccacagatgtgactgctattcacctctag

SEQ ID NO: 51615 - DNA, 357 bp, Artificial Sequence
  derived and/or modified sequence
atgaattacctggataggtacctgagctgtgtacctaccaggaaggctcaactgcagcttctaggagccgtctgtatgctcctggcttcaaaattgagggaaacaacaccactgacgattgagaaactttgtatatacacagatcacgccgtgtcgccccggcagctgagggactgggaagtgctcgttctcggcaagctcaaatgggacttagccgcagtgatcgcccacgactttcttgctttcattctgcaccgcctcagcctcccccgcgatagacaagctcttgtgaaaaagcacgcccagacttttctggcactgtgtgcgacggattacacattcgccatgtatccgtag

SEQ ID NO: 51616 - DNA, 636 bp, Artificial Sequence
  derived and/or modified sequence
atgaactacttagaccgatatctctcatgcgtacccactaggaaagcccagctacaactgctgggagccgtatgtatgcttcttgcctccaagctgcgggaaaccaccccacttaccatagaaaagctgtgcatctacaccgaccatgctgtgtctccgcgtcaacttagggattgggaagtgctcgtgcttggtaaattaaaatgggacctcgccgcggtgatcgcccatgattttctggctttcatactccaccggctgtcactcccaagggataggcaggcactggtgaagaagcatgcccagacatttttggccctgtgtgcaaccgattacacattcgcaatgtacccacctagcatgatagctactggatctatcggcgccgcggttcagggtctaggggcctgttctatgtctggcgacgaactgactgaacttctggctggcattacaggaaccgaggtcgactgcctccgggcgtgtcaagagcaaattgaagcagcacttcgagagtcccttcgcgaggccagccagacgtcttcctccccggcaccaaaggctcctagagggtctagcagtcaggggccctcacagacctctacccccaccgatgttaccgccattcacctgtag

SEQ ID NO: 51617 - DNA, 636 bp, Artificial Sequence
  derived and/or modified sequence
atgaactacctggaccgctacctgagctgtgtgcccaccaggaaggcccagctgcagctgctgggcgctgtgtgcatgctgctggccagcaagctgcgggagaccacccccctgaccatcgagaagctgtgcatctacacagaccatgctgtgagcccccggcagctgcgggactgggaggtgctggtgctgggcaagctgaagtgggacctggccgctgtgattgcccatgacttcctggccttcatcctgcaccggctgagcctgccccgggaccggcaggccctggtgaagaagcacgcccagaccttcctggccctgtgtgccacagactacacctttgccatgtacccacccagcatgattgccaccggcagcattggagctgctgtgcagggcctgggcgcctgcagcatgtctggagatgagctgacagagctgctggccggcatcaccggcacagaggtggactgcctgcgggcctgccaggagcagatcgaggccgccctgcgggagagcctgcgggaggccagccagaccagcagcagccctgcccccaaggccccccggggcagcagcagccagggccccagccagaccagcacccccacagatgtgacagccatccacctgtag

SEQ ID NO: 51618 - DNA, 357 bp, Artificial Sequence
  derived and/or modified sequence
atgaactacctggaccgctacctgagctgtgtgcccaccaggaaggcccagctgcagctgctgggcgctgtgtgcatgctgctggccagcaagctgcgggagaccacccccctgaccatcgagaagctgtgcatctacacagaccatgctgtgagcccccggcagctgcgggactgggaggtgctggtgctgggcaagctgaagtgggacctggccgctgtgattgcccatgacttcctggccttcatcctgcaccggctgagcctgccccgggaccggcaggccctggtgaagaagcacgcccagaccttcctggccctgtgtgccacagactacacctttgccatgtacccctag

SEQ ID NO: 51619 - DNA, 636 bp, Artificial Sequence
  derived and/or modified sequence
atgaactacctggaccggtacctgagctgcgtgcccacccggaaggctcaactgcagctcctgggcgccgtctgcatgcttttagctagcaaactcagggagactacaccgctgaccatcgagaagctgtgcatatacaccgatcacgccgtcagccctagacagctgcgagactgggaggtactggtgttgggtaagttgaagtgggatctagccgccgtgattgcacatgactttttagctttcattctgcatagactgtctttgcccagagaccgacaggccctcgtcaagaagcacgctcaaacctttcttgcgttgtgcgcaaccgactatacattcgcaatgtaccccccgtcaatgatcgcaaccgggagcatcggcgccgccgtccaaggactcggtgcctgtagcatgtctggagacgagctgactgagcttctcgccggaatcactggaacggaggttgactgccttcgggcgtgtcaggaacagattgaggccgcgctgcgcgagtccctacgagaggcgtcacaaacaagtagctcacctgctcctaaagcaccacgcgggtcctcttctcaagggccatcgcagacttctactccaacagatgtgacagccattcacctgtag

SEQ ID NO: 51620 - DNA, 357 bp, Artificial Sequence
  derived and/or modified sequence
atgaactacctggaccggtacctgagctgcgtgcccacccggaaggcccagctgcagttactgggtgccgtgtgtatgcttctcgcttcaaagctgcgtgagacaacccctctgaccatcgagaagctgtgtatttataccgaccacgctgtttccccccgccagctgagagactgggaggtactggtgctcggcaaactgaaatgggacctcgctgcagtgatcgcgcacgattttctggcatttatactgcacagactaagtttgcctagagataggcaggctctggtgaaaaaacacgctcagactttcctggcactgtgcgcaaccgattacacgttcgcaatgtacccctag

SEQ ID NO: 51621 - DNA, 636 bp, Artificial Sequence
  derived and/or modified sequence
atgaactacctggaccggtacctgagctgcgtgcccacccggaaggcccagctccagttgcttggagcagtgtgtatgctcctggcttctaagctgagggagacaacccccctcaccatcgagaaactgtgtatctataccgaccatgcagttagtcctcggcaacttagggactgggaggtgttagtgctcggaaaactcaaatgggatttggctgcagtcatcgcgcacgatttcctggcctttatcctgcataggttgagtctgccacgagacagacaggccctcgtgaaaaagcacgcccagactttccttgctctttgtgccaccgactacacatttgccatgtacccgccatccatgatagcaactggatcaatcggagccgctgtgcaggggctgggggcctgttcgatgtctggcgacgagcttaccgagctactggccggtatcaccggtaccgaggtcgactgcctgcgtgcctgccaggaacaaattgaagccgcccttagggagtccctgagagaggcgtctcagaccagctcatctcccgcacctaaagcccctaggggctccagttcccagggccctagtcaaaccagcaccccgaccgacgtgactgcaatccacctgtag

SEQ ID NO: 51622 - DNA, 636 bp, Artificial Sequence
  derived and/or modified sequence
atgaactatctggataggtacctgtcatgtgtaccgacacgcaaggctcagcttcagcttctaggggctgtctgtatgcttttagcctctaagctgcgcgaaacaacccccttaactattgaaaaactgtgtatttataccgaccacgcagtgtcacctaggcagctccgagactgggaagttctcgtcttagggaaactcaagtgggacctcgccgcagtcatcgcccacgattttctggctttcattctgcaccgcctatcgctgcccagggataggcaggctctggtgaagaagcacgcacagacctttctggccctttgtgctaccgactacacgtttgccatgtaccctccttctatgattgccacaggatcaatcggggctgccgtacagggcctgggcgcttgcagcatgtcaggtgacgagctgacggagctgttggccggtataactgggacagaagtggactgcctgcgcgcttgtcaggaacagattgaggccgctttgagggagtccctgcgggaggcaagccaaacctcgtcctctcccgctcctaaagcccctagaggaagttctagccaaggaccatctcaaacgagcaccccaacggatgtgaccgccatccatctctag

SEQ ID NO: 51623 - DNA, 357 bp, Artificial Sequence
  derived and/or modified sequence
atgaactaccttgacagatacctctcatgcgttccaaccagaaaggcacagttgcagctgttgggggctgtctgtatgctcctcgcctccaaactgagggaaacaacccctctgaccattgagaagctgtgtatctacactgaccatgctgtatcccccagacagcttagagactgggaggtgctcgtgcttggtaagctcaagtgggatctcgctgctgtcatcgctcatgatttcttagcttttatcctgcacagactgtccctccctcgggaccgccaggcgctggtaaagaagcacgcacagaccttcctggcgctgtgtgctactgattatacttttgccatgtacccatag

SEQ ID NO: 51624 - DNA, 636 bp, Artificial Sequence
  derived and/or modified sequence
atgaactatctggataggtacttgagctgtgtgcctacacgcaaggcgcaactgcagctacttggagccgtgtgtatgctgctggcaagcaagctcagggaaaccacgcctcttacaatcgaaaagctctgcatatatactgatcatgcggtttcccccaggcagctgagagattgggaagttctggttctgggaaagcttaaatgggacttggccgctgtcatagcccatgacttcctggcattcatactgcaccgcctttctctaccgagggacaggcaggcattagtaaagaagcacgcacaaacctttctcgctttatgcgctactgactacacatttgctatgtatccacctagtatgatcgccacagggtctataggggctgctgtgcagggtctcggtgcgtgctctatgtctggagatgagttgaccgagctgctggctggcatcacggggaccgaggtagattgtctccgtgcttgccaggagcagatcgaggcggctctgcgggaatcactacgcgaggcctcccagacatcctccagcccagcaccaaaggctccgaggggctcgtccagccagggacccagtcaaactagcacacctaccgatgtgaccgctattcacttgtag

SEQ ID NO: 51625 - protein, 365 aa, Artificial Sequence
  derived and/or modified sequence
MGVPRPQPWALGLLLFLLPGSLGAESHLSLLYHLTAVSSPAPGTPAFWVSGWLGPQQYLSYNSLRGEAEPCGAWVWENQVSWYWEKETTDLRIKEKLFLEAFKALGGKGPYTLQGLLGCELGPDNTSVPTAKFALNGEEFMNFDLKQGTWGGDWPEALAISQRWQQQDKAANKELTFLLFSCPHRLREHLERGRGNLEWKEPPSMRLKARPSSPGFSVLTCSAFSFYPPELQLRFLRNGLAAGTGQGDFGPNSDGSFHASSSLTVKSGDEHHYCCIVQHAGLAQPLRVELESPAKSSVLVVGIVIGVLLLTAAAVGGALLWRRMRSGLPAPWISLRGDDTGVLLPTPGEAQDADLKDVNVIPATA

SEQ ID NO: 51626 - protein, 152 aa, Artificial Sequence
  derived and/or modified sequence
MGVPRPQPWALGLLLFLLPGSLGAESHLSLLYHLTAVSSPAPGTPAFWVSGWLGPQQYLSYNSLRGEAEPCGAWVWENQVSWYWEKETTDLRIKEKLFLEAFKALGGKGPYTLQGLLGCELGPDNTSVPTACGSTWRGAAETWSGRSPPPCA

SEQ ID NO: 51627 - protein, 235 aa, Artificial Sequence
  derived and/or modified sequence
MGVPRPQPWALGLLLFLLPGSLGAESHLSLLYHLTAVSSPAPGTPAFWVSGWLGPQQYLSYNSLRGEAEPCGAWVWENQVSWYWEKETTDLRIKEKLFLEAFKALGGKGPYTLQGLLGCELGPDNTSVPTAKFALNGEEFMNFDLKQGTWGGDWPEALAISQRWQQQDKAANKELTFLLFSCPHRLREHLERGRGNLEWKGCWTKIDTSWGCAQIFIPSATKEKLRLNQSPPPCA

SEQ ID NO: 51628 - DNA, 1893 bp, Artificial Sequence
  derived and/or modified sequence
gaaggatattaaagagcacctgcaggaattttttaaggggatgccgggggaagggcttgaaggaggaactaaggaggcttccagaagattttgattaacagcgagcgctagggaaggccacggggatacagaggggtaggaggaggatccagagacctccaagttgtggactccggaggcatcgagttcctttcccagttttgtcaagaattccctgagcggcagacaccctcaaagtaaaaaacgggaaccacagagaaggaaaaagaagaaccacaagcgttttgagaaacaaacaggctgggcctagggcctggggtgtgccctgcaactggggggtggggctggatgttcttggagtcagggagcagcagcctcccacaggatgtgagagaggaactggggtctccagtcacgggagccaggagccggccagggccgcaggcaggaagggagcgaggctgaagggaacgtcgtcctctcagcatgggggtcccgcggcctcagccctgggcgctggggctcctgctctttctccttcctgggagcctgggcgcagaaagccacctctccctcctgtaccaccttaccgcggtgtcctcgcctgccccggggactcctgccttctgggtgtccggctggctgggcccgcagcagtacctgagctacaatagcctgcggggcgaggcggagccctgtggagcttgggtctgggaaaaccaggtgtcctggtattgggagaaagagaccacagatctgaggatcaaggagaagctctttctggaagctttcaaagctttggggggaaaaggtccctacactctgcagggcctgctgggctgtgaactgggccctgacaacacctcggtgcccaccgccaagttcgccctgaacggcgaggagttcatgaatttcgacctcaagcagggcacctggggtggggactggcccgaggccctggctatcagtcagcggtggcagcagcaggacaaggcggccaacaaggagctcaccttcctgctattctcctgcccgcaccgcctgcgggagcacctggagaggggccgcggaaacctggagtggaaggagcccccctccatgcgcctgaaggcccgacccagcagccctggcttttccgtgcttacctgcagcgccttctccttctaccctccggagctgcaacttcggttcctgcggaatgggctggccgctggcaccggccagggtgacttcggccccaacagtgacggatccttccacgcctcgtcgtcactaacagtcaaaagtggcgatgagcaccactactgctgcattgtgcagcacgcggggctggcgcagcccctcagggtggagctggaatctccagccaagtcctccgtgctcgtggtgggaatcgtcatcggtgtcttgctactcacggcagcggctgtaggaggagctctgttgtggagaaggatgaggagtgggctgccagccccttggatctcccttcgtggagacgacaccggggtcctcctgcccaccccaggggaggcccaggatgctgatttgaaggatgtaaatgtgattccagccaccgcctgaccatccgccattccgactgctaaaagcgaatgtagtcaggcccctttcatgctgtgagacctcctggaacactggcatctctgagcctccagaaggggttctgggcctagttgtcctccctctggagccccgtcctgtggtctgcctcagtttcccctcctaatacatatggctgttttccacctcgataatataacacgagtttgggcccgaatcagtgtgttctcatcatttttcaggcaggggaggtaagggaataagtcgggggactgaatggcggctgggcctcggatctctcctacaggtaac

SEQ ID NO: 51629 - DNA, 1629 bp, Artificial Sequence
  derived and/or modified sequence
agcctatcaagtgtctgtaattaattaaccaactgagatccagttcaggggtgaaagttcttcaggtacgaggagggcattgttgtcagtctggaccgagcccgcagagcccctcctcggcgtcctggtcccggccgtgcccgcggtgtcccgggaggaaggggcgggccgggggtcgggaggagtcacgtgccccctcccgccccaggtcgtcctctcagcatgggggtcccgcggcctcagccctgggcgctggggctcctgctctttctccttcctgggagcctgggcgcagaaagccacctctccctcctgtaccaccttaccgcggtgtcctcgcctgccccggggactcctgccttctgggtgtccggctggctgggcccgcagcagtacctgagctacaatagcctgcggggcgaggcggagccctgtggagcttgggtctgggaaaaccaggtgtcctggtattgggagaaagagaccacagatctgaggatcaaggagaagctctttctggaagctttcaaagctttggggggaaaaggtccctacactctgcagggcctgctgggctgtgaactgggccctgacaacacctcggtgcccaccgccaagttcgccctgaacggcgaggagttcatgaatttcgacctcaagcagggcacctggggtggggactggcccgaggccctggctatcagtcagcggtggcagcagcaggacaaggcggccaacaaggagctcaccttcctgctattctcctgcccgcaccgcctgcgggagcacctggagaggggccgcggaaacctggagtggaaggagcccccctccatgcgcctgaaggcccgacccagcagccctggcttttccgtgcttacctgcagcgccttctccttctaccctccggagctgcaacttcggttcctgcggaatgggctggccgctggcaccggccagggtgacttcggccccaacagtgacggatccttccacgcctcgtcgtcactaacagtcaaaagtggcgatgagcaccactactgctgcattgtgcagcacgcggggctggcgcagcccctcagggtggagctggaatctccagccaagtcctccgtgctcgtggtgggaatcgtcatcggtgtcttgctactcacggcagcggctgtaggaggagctctgttgtggagaaggatgaggagtgggctgccagccccttggatctcccttcgtggagacgacaccggggtcctcctgcccaccccaggggaggcccaggatgctgatttgaaggatgtaaatgtgattccagccaccgcctgaccatccgccattccgactgctaaaagcgaatgtagtcaggcccctttcatgctgtgagacctcctggaacactggcatctctgagcctccagaaggggttctgggcctagttgtcctccctctggagccccgtcctgtggtctgcctcagtttcccctcctaatacatatggctgttttccacctcgataatataacacgagtttgggcccgaatcagtgtgttctcatcatttttcaggcaggggaggtaagggaataagtcgggggactgaatggcggctgggcctcggatctctcctacaggtaac

SEQ ID NO: 51630 - DNA, 1098 bp, Artificial Sequence
  derived and/or modified sequence
atgggagttcctcgcccgcaaccttgggccctggggttgctgctgttcctgctgccagggtccctcggagctgagagtcacctgtcattactttatcaccttacagccgtcagctcccccgcaccaggcacccccgctttttgggtcagcggatggctcgggcctcaacagtatctgtcctataacagcctccgtggcgaagccgagccatgcggagcttgggtctgggagaatcaggtttcctggtactgggaaaaggaaacaaccgatttacgcattaaagagaagctgttcttagaagcgttcaaagcgctgggaggaaaagggccctatactttacagggcctcctggggtgtgaacttggaccagacaatacttccgtgccaactgccaagtttgccctgaacggggaggagtttatgaacttcgatctcaaacaaggcacatggggcggggactggccggaggctctagctatatctcagcgttggcaacagcaggataaagccgcaaacaaagaattgaccttcctcctgttctcatgcccacaccgcttgcgagaacacctcgagcgcgggcgcggaaatttagagtggaaagagccacctagcatgcgactgaaggcacgcccgagctctcccggatttagtgtgcttacgtgctcggcctttagtttctaccctcccgagctccaactacgatttctaaggaatgggttggcagccggtactggccaaggagatttcggccctaactctgacggcagtttccacgcctctagttccctcaccgttaagagtggagacgaacaccactactgctgtattgtgcagcacgctgggctcgcacagcctctccgtgtggagttggagagcccagccaaaagttccgtgctcgtggtaggaattgtcatcggggtcctcctgttgacagctgctgccgttgggggggccctgctttggcggcggatgcggtctgggcttccagcaccctggatctccctgagaggagacgataccggagttttactcccaacgcccggggaggcgcaagacgccgacctgaaggatgtcaacgttattcctgctactgcctag

SEQ ID NO: 51631 - DNA, 1098 bp, Artificial Sequence
  derived and/or modified sequence
atgggcgttcctcgtccacagccctgggctctgggactgctcttatttttgctccccggctcattgggcgccgaatcccacctgtccttgctgtaccacttaacggctgtgtcgtcgcccgctcccggaacaccagccttctgggtctccggctggctgggacctcaacagtatttatcttataatagtctgcggggtgaggccgaaccgtgtggggcctgggtgtgggagaaccaggtaagttggtactgggaaaaggaaaccactgacctgcggatcaaggagaagctgtttcttgaggctttcaaggcactgggaggaaaaggcccctacaccttgcaaggtctcctggggtgcgagctcggaccggacaatacatctgtccccacagctaaatttgctttgaatggcgaggagtttatgaattttgatctcaagcagggcacatggggcggtgactggccggaagccctggcaatatctcagagatggcagcagcaggataaggctgccaataaggaactgacattcctgttatttagttgccctcaccggctgcgagagcacctggaacggggtaggggcaacctcgagtggaaggaacccccctccatgaggcttaaggccagaccctccagccctggctttagcgtgctgacttgctcagccttttcattttacccacccgaactgcagttgcggtttctcaggaatgggttagccgccggcactggccagggagactttggccctaacagcgatggcagtttccatgcttcttcctccttgaccgtaaagagcggcgatgagcatcactactgctgcatagtgcaacacgccggcctggcccagcctctgcgagtagagctggaatcacctgcaaagagcagcgtactggtggtgggtattgtgatcggggttctgctgctgacggccgcagccgtgggaggcgcgctactgtggaggcgcatgcgtagtggcttacctgccccatggatctcacttaggggagatgacacaggggttctgcttccaaccccaggcgaggcacaagacgctgatttgaaggacgtcaacgtgattcccgccacagcttag

SEQ ID NO: 51632 - DNA, 1098 bp, Artificial Sequence
  derived and/or modified sequence
atgggcgtgccccggccccagccctgggccctgggcctgctgctcttcctgctgcccggcagcctgggcgctgagagccacctgagcctgctgtaccacctgacagctgtgagcagccctgcccctggcaccccagccttctgggtgtctggctggctgggcccccagcagtacctgagctacaacagcctgcggggggaggccgagccctgtggggcctgggtgtgggagaaccaggtgtcctggtactgggagaaggagaccacagacctgcgcatcaaggagaagctgttcctggaggccttcaaggccctgggcggcaagggcccctacaccctgcagggcctgctgggctgtgagctgggccctgacaacacctctgtgcccacagccaagtttgccctgaatggagaggagttcatgaactttgacctgaagcagggcacctggggcggggactggccagaggccctggccatcagccagcgctggcagcagcaggacaaggccgccaacaaggagctgaccttcctgctcttcagctgcccccaccggctgcgggagcacctggagcggggccggggcaacctggagtggaaggagccccccagcatgaggctgaaggcccggcccagcagccctggcttctctgtgctgacctgcagcgccttctccttctacccacctgagctgcagctgcgcttcctgagaaatggcctggccgccggcaccggccagggcgactttggccccaacagtgatggcagcttccacgccagcagcagcctgactgtgaagtctggagatgagcaccactactgctgcatcgtgcagcacgccggcctggcccagcccctgcgggtggagctggagagccctgccaagagctctgtgctggtggtgggcatcgtgattggagtgctgctgctgacagctgctgctgtgggcggggccctgctgtggaggaggatgaggagcggcctgcctgccccctggatcagcctgcggggagatgacaccggggtgctgctgcccaccccaggagaggcccaggatgctgacctgaaggatgtgaatgtcatcccagccacagcctag

SEQ ID NO: 51633 - DNA, 1098 bp, Artificial Sequence
  derived and/or modified sequence
atgggcgtgccccggccccagccctgggccctgggcctgctgctgttcttgctcccaggcagtttgggcgccgaatctcacctgtctttactttatcacctgacagcggtgtcaagcccggcccccggtacccccgctttttgggtgtcaggttggctgggacctcagcaatacctctcgtataattctttgaggggcgaggctgagccgtgtggagcttgggtctgggaaaaccaagtgagctggtactgggaaaaagagacaacggatctccgcataaaggaaaaactttttcttgaagcttttaaagctctgggaggcaagggtccatacacgcttcagggactgcttgggtgcgaactgggtccggacaacacttctgtacctacagccaaattcgccttgaatggcgaagagttcatgaactttgatttaaaacagggaacctggggcggagactggcccgaagcgctggctatctcccagcgctggcaacagcaggacaaagccgcaaataaggagttgacattcttgctgttttcctgccctcatagactgcgcgagcacttggagcgagggagaggaaacctcgagtggaaggaacctccatctatgcgcctgaaagcccgcccctcctcgcctgggtttagtgtgctgacctgtagcgccttctcgttctaccccccagaattacagctgaggtttctgaggaatgggctcgccgctggcaccggtcagggggattttggaccgaattctgacggctcctttcacgcctcttcgtctctgacggtcaagtctggcgatgaacaccactactgctgtatagtgcaacatgccggcttagcccagcctctccgggttgagcttgaatccccggccaaaagcagtgtcctagtggttgggatcgtgattggtgtcctgctgcttaccgctgccgccgtggggggagccctcttatggcgccggatgagaagtggcctgcccgcgccttggatttctttgcggggcgatgacaccggcgtgttgctccccactcccggagaggcccaggatgccgacttgaaggacgtgaatgttatcccagctaccgcatag

SEQ ID NO: 51634 - DNA, 1098 bp, Artificial Sequence
  derived and/or modified sequence
atgggcgtgccccggccccagccctgggccctgggcctgctgctgttcctgttaccaggaagtttgggcgccgagagtcacctgagcttgctttaccacctgaccgcggtatcatcaccagcccccggcactccggcattctgggtatccgggtggctggggccacagcagtacttgtcctataactcattgcggggcgaagctgagccctgcggcgcttgggtgtgggagaaccaagtgagctggtactgggaaaaggagactaccgatctgcggataaaggaaaagctttttctggaggcctttaaagctcttgggggaaaggggccatataccctgcagggcctcctcggctgtgaacttggaccagacaatacatccgttcccactgctaaatttgcactgaatggtgaggagtttatgaactttgatttaaaacagggcacttggggcggggattggcctgaagccctggcaattagccagaggtggcagcagcaggataaagctgcaaataaagagctgacatttctcctgttttcttgccctcacaggctgcgagaacacttagagcgaggacgtggcaacttagaatggaaggagcctccatccatgagacttaaagcaaggcctagttctcctgggtttagcgtgctgacgtgttcggcattctccttttatccgcccgagctgcaattacggtttctacgcaacggcttggctgccggaactggtcagggtgattttggaccgaacagcgacggttcgttccatgcatcgtccagtttgactgtgaaaagcggggacgaacatcactattgctgcatcgtccagcatgcagggctagcccagcccttaagggtggagctggaatcacctgcaaagagttccgtgctggtggtgggaatcgtgatcggagtattgctgctaacggcagcagccgtcggcggagcactgctatggaggaggatgcgctctggtctccccgcaccatggatatcactcagaggggacgacacaggcgtcttgttacccacccctggtgaggctcaggatgcggatctcaaggatgtgaacgtcatacccgccacagcctag

SEQ ID NO: 51635 - DNA, 1098 bp, Artificial Sequence
  derived and/or modified sequence
atgggagttcctaggcctcagccttgggcgcttggcctgcttctgttcttgctgcccggtagccttggagcagaaagtcatctctctctgttgtaccatcttactgcggttagttccccggcacccggaacccccgctttctgggtgtctggttggctgggaccacaacagtatcttagttataatagtctgaggggtgaggccgaaccctgcggggcttgggtgtgggagaatcaagtgagttggtattgggagaaagagactacagacctgaggatcaaagagaagttgtttctcgaggcttttaaagctctcggtggcaagggtccctacactctgcagggactcctcggctgtgagctgggacctgataacaccagcgtgcccaccgcaaagtttgcgctgaacggcgaagagttcatgaatttcgatcttaaacaaggaacatggggtggtgattggccagaagccctggcgataagccagaggtggcagcaacaggacaaagcggctaacaaagaactgacctttctcctcttctcatgtcctcatagactgcgggagcacctcgagcgcggtcggggtaatctagaatggaaggagcccccttctatgagattgaaggcaagaccatcgagccccggattctccgtcttaacatgtagcgctttttctttctacccacctgagctccagctgcggttcctgaggaacggtctggccgctggaactggccaaggagatttcggccctaattcagacggcagtttccacgcctctagtagcctgaccgtcaagtctggtgacgaacatcattactgctgcatagtgcaacatgctggtctggcacaacctctgagagtggagctagaaagtcctgccaaaagcagtgtcttggtcgtcgggatagtaatcggggtattgctgctgactgctgctgctgtgggaggggcactgctctggagaagaatgcgctccggcctgcccgcaccgtggatcagcctgagaggggatgacactggggtgctgctccctacccccggtgaagcacaggatgcagatctgaaagatgtgaatgtgatccccgctactgcgtag

SEQ ID NO: 51636 - DNA, 1098 bp, Artificial Sequence
  derived and/or modified sequence
atgggcgtgccgcgtcctcagccttgggccctagggctgctgctgtttctcctccctggctctttgggggcagagagtcatctgagtctgctgtaccatcttaccgctgtttcgtctcctgcgcctggcacgccggcattctgggtatctgggtggttgggaccccagcaatacctgagctataatagtctccggggagaagcagaaccgtgcggggcatgggtctgggagaatcaggtgagttggtactgggagaaagaaactacggatctgcgcattaaagaaaagttgttcttggaagccttcaaagcgttgggtgggaaaggcccttacacccttcagggactgctggggtgcgaactgggcccagataataccagcgtccctactgccaagtttgccttgaacggcgaagagttcatgaactttgatttgaagcagggtacttgggggggtgactggcctgaggcattagcgatttcgcagagatggcaacagcaagacaaagccgctaataaagagctgacatttctgttgtttagctgtccgcacaggctccgagaacacctggaacgcggacgcggaaacctggagtggaaagagccaccatccatgaggctaaaagctcgacccagtagtcccggattctctgttctgacctgttcagcctttagcttttatcctcccgagctgcagctgcggttcctcagaaacggcttagcagccggtaccggccaaggtgactttggcccaaacagcgacggatcttttcatgcctcctcatccctgaccgttaaatccggcgatgaacatcattattgttgcatcgtgcaacatgccggtcttgcacagcccctcagagtcgagttagagtccccagcgaagtccagcgtgcttgtcgtagggatcgtgataggggtgctgctgttgaccgcagcagccgtgggcggagctctactgtggagaaggatgcgctccggtctgccagctccatggatctctctaaggggtgacgatacgggagtgctcttacccacacctggagaggctcaggacgctgatctgaaagacgtgaacgtaattccagccacagcttag

SEQ ID NO: 51637 - DNA, 1098 bp, Artificial Sequence
  derived and/or modified sequence
atgggcgtgcccagaccccagccctgggccctgggcctgctgctgttcctgctgcccggcagcctgggcgccgagagccacctgagcctgctgtaccacctgaccgccgtgagcagccccgcccccggcacccccgccttctgggtgagcggctggctgggcccccagcagtacctgagctacaacagcctgagaggcgaggccgagccctgcggcgcctgggtgtgggagaaccaggtgagctggtactgggagaaggagaccaccgacctgagaatcaaggagaagctgttcctggaggccttcaaggccctgggcggcaagggcccctacaccctgcagggcctgctgggctgcgagctgggccccgacaacaccagcgtgcccaccgccaagttcgccctgaacggcgaggagttcatgaacttcgacctgaagcagggcacctggggcggcgactggcccgaggccctggccatcagccagagatggcagcagcaggacaaggccgccaacaaggagctgaccttcctgctgttcagctgcccccacagactgagagagcacctggagagaggcagaggcaacctggagtggaaggagccccccagcatgagactgaaggccagacccagcagccccggcttcagcgtgctgacctgcagcgccttcagcttctacccccccgagctgcagctgagattcctgagaaacggcctggccgccggcaccggccagggcgacttcggccccaacagcgacggcagcttccacgccagcagcagcctgaccgtgaagagcggcgacgagcaccactactgctgcatcgtgcagcacgccggcctggcccagcccctgagagtggagctggagagccccgccaagagcagcgtgctggtggtgggcatcgtgatcggcgtgctgctgctgaccgccgccgccgtgggcggcgccctgctgtggagaagaatgagaagcggcctgcccgccccctggatcagcctgagaggcgacgacaccggcgtgctgctgcccacccccggcgaggcccaggacgccgacctgaaggacgtgaacgtgatccccgccaccgcctag

SEQ ID NO: 51638 - protein, 901 aa, Artificial Sequence
  derived and/or modified sequence
MQREAAFRLGHCHPLRIMGSVDQEEPNAHKVASPPSGPAYPDDVLDYGLKPYSPLASLSGEPPGRFGEPDRVGPQKFLSAAKPAGASGLSPRIEITPSHELIQAVGPLRMRDAGLLVEQPPLAGVAASPRFTLPVPGFEGYREPLCLSPASSGSSASFISDTFSPYTSPCVSPNNGGPDDLCPQFQNIPAHYSPRTSPIMSPRTSLAEDSCLGRHSPVPRPASRSSSPGAKRRHSCAEALVALPPGASPQRSRSPSPQPSSHVAPQDHGSPAGYPPVAGSAVIMDALNSLATDSPCGIPPKMWKTSPDPSPVSAAPSKAGLPRHIYPAVEFLGPCEQGERRNSAPESILLVPPTWPKPLVPAIPICSIPVTASLPPLEWPLSSQSGSYELRIEVQPKPHHRAHYETEGSRGAVKAPTGGHPVVQLHGYMENKPLGLQIFIGTADERILKPHAFYQVHRITGKTVTTTSYEKIVGNTKVLEIPLEPKNNMRATIDCAGILKLRNADIELRKGETDIGRKNTRVRLVFRVHIPESSGRIVSLQTASNPIECSQRSAHELPMVERQDTDSCLVYGGQQMILTGQNFTSESKVVFTEKTTDGQQIWEMEATVDKDKSQPNMLFVEIPEYRNKHIRTPVKVNFYVINGKRKRSQPQHFTYHPVPAIKTEPTDEYDPTLICSPTHGGLGSQPYYPQHPMVAESPSCLVATMAPCQQFRTGLSSPDARYQQQNPAAVLYQRSKSLSPSLLGYQQPALMAAPLSLADAHRSVLVHAGSQGQSSALLHPSPTNQQASPVIHYSPTNQQLRCGSHQEFQHIMYCENFAPGTTRPGPPPVSQGQRLSPGSYPTVIQQQNATSQRAAKNGPPVSDQKEVLPAGVTIKQEQNLDQTYLDDELIDTHLSWIQNIL

SEQ ID NO: 51639 - DNA, 2706 bp, Artificial Sequence
  derived and/or modified sequence
atgcagagagaggccgccttcagactgggccactgccaccccctgagaatcatgggcagcgtggaccaggaggagcccaacgcccacaaggtggccagcccccccagcggccccgcctaccccgacgacgtgctggactacggcctgaagccctacagccccctggccagcctgagcggcgagccccccggcagattcggcgagcccgacagagtgggcccccagaagttcctgagcgccgccaagcccgccggcgccagcggcctgagccccagaatcgagatcacccccagccacgagctgatccaggccgtgggccccctgagaatgagagacgccggcctgctggtggagcagccccccctggccggcgtggccgccagccccagattcaccctgcccgtgcccggcttcgagggctacagagagcccctgtgcctgagccccgccagcagcggcagcagcgccagcttcatcagcgacaccttcagcccctacaccagcccctgcgtgagccccaacaacggcggccccgacgacctgtgcccccagttccagaacatccccgcccactacagccccagaaccagccccatcatgagccccagaaccagcctggccgaggacagctgcctgggcagacacagccccgtgcccagacccgccagcagaagcagcagccccggcgccaagagaagacacagctgcgccgaggccctggtggccctgccccccggcgccagcccccagagaagcagaagccccagcccccagcccagcagccacgtggccccccaggaccacggcagccccgccggctacccccccgtggccggcagcgccgtgatcatggacgccctgaacagcctggccaccgacagcccctgcggcatcccccccaagatgtggaagaccagccccgaccccagccccgtgagcgccgcccccagcaaggccggcctgcccagacacatctaccccgccgtggagttcctgggcccctgcgagcagggcgagagaagaaacagcgcccccgagagcatcctgctggtgccccccacctggcccaagcccctggtgcccgccatccccatctgcagcatccccgtgaccgccagcctgccccccctggagtggcccctgagcagccagagcggcagctacgagctgagaatcgaggtgcagcccaagccccaccacagagcccactacgagaccgagggcagcagaggcgccgtgaaggcccccaccggcggccaccccgtggtgcagctgcacggctacatggagaacaagcccctgggcctgcagatcttcatcggcaccgccgacgagagaatcctgaagccccacgccttctaccaggtgcacagaatcaccggcaagaccgtgaccaccaccagctacgagaagatcgtgggcaacaccaaggtgctggagatccccctggagcccaagaacaacatgagagccaccatcgactgcgccggcatcctgaagctgagaaacgccgacatcgagctgagaaagggcgagaccgacatcggcagaaagaacaccagagtgagactggtgttcagagtgcacatccccgagagcagcggcagaatcgtgagcctgcagaccgccagcaaccccatcgagtgcagccagagaagcgcccacgagctgcccatggtggagagacaggacaccgacagctgcctggtgtacggcggccagcagatgatcctgaccggccagaacttcaccagcgagagcaaggtggtgttcaccgagaagaccaccgacggccagcagatctgggagatggaggccaccgtggacaaggacaagagccagcccaacatgctgttcgtggagatccccgagtacagaaacaagcacatcagaacccccgtgaaggtgaacttctacgtgatcaacggcaagagaaagagaagccagccccagcacttcacctaccaccccgtgcccgccatcaagaccgagcccaccgacgagtacgaccccaccctgatctgcagccccacccacggcggcctgggcagccagccctactacccccagcaccccatggtggccgagagccccagctgcctggtggccaccatggccccctgccagcagttcagaaccggcctgagcagccccgacgccagataccagcagcagaaccccgccgccgtgctgtaccagagaagcaagagcctgagccccagcctgctgggctaccagcagcccgccctgatggccgcccccctgagcctggccgacgcccacagaagcgtgctggtgcacgccggcagccagggccagagcagcgccctgctgcaccccagccccaccaaccagcaggccagccccgtgatccactacagccccaccaaccagcagctgagatgcggcagccaccaggagttccagcacatcatgtactgcgagaacttcgcccccggcaccaccagacccggccccccccccgtgagccagggccagagactgagccccggcagctaccccaccgtgatccagcagcagaacgccaccagccagagagccgccaagaacggcccccccgtgagcgaccagaaggaggtgctgcccgccggcgtgaccatcaagcaggagcagaacctggaccagacctacctggacgacgagctgatcgacacccacctgagctggatccagaacatcctgtag

SEQ ID NO: 51640 - DNA, 2706 bp, Artificial Sequence
  derived and/or modified sequence
atgcagagggaagcagcattccggctcggccattgtcatcctctgcgcatcatggggtcagtggatcaggaggagccaaacgctcataaggtagcctctcctccatccgggcctgcctacccagacgatgtgttagattatggtctaaagccttactcaccgttggcatccctgagcggcgaacctcctggaaggttcggagagccagatcgggtgggaccccaaaagttcctgtccgcagcaaagcccgccggcgcttccggccttagtccacggatcgaaattacaccctcccatgaactcatccaggcggtgggtccactcagaatgagagatgcgggactcttggtggaacagccccccttagctggagtagccgcctctccacgcttcacactgcctgtgccaggctttgaaggctaccgggagcctctgtgcttatcacccgcatcatcaggcagttccgcaagcttcatttcagacacattctctccgtacacttctccatgtgtgagccccaataatggtggtccagatgacctctgtcctcagttccagaacattcccgctcattacagtcccaggacctcacctataatgagcccaagaacaagcctggcggaggatagctgcctgggtcggcactctccagtgccaaggccagcttccagaagcagctcacctggcgccaagcgcaggcatagctgcgccgaggctctagtcgcactgcctcccggtgcttcacctcagaggagcaggtccccatccccacagccctcctctcacgtggctccacaggatcacgggagccctgccggatatcctccggtggcgggttcggcagtcatcatggatgccttaaactccctggcaaccgattctccttgcgggatcccacccaagatgtggaaaactagcccggacccgtcaccagtgtccgccgctcccagtaaggcaggactgccacgtcacatttatccagcggtcgagttcttgggcccttgcgagcagggtgagagacggaactccgctccagagtctatcctgctggtgccccccacctggcccaaaccactcgtgcctgccattcccatatgctcaattccagtaacggctagtctcccacctctcgagtggcctttatcctcccagtctggctcgtatgagttgcggatcgaggtacagcctaagccgcaccatagagcccattacgagaccgaaggcagtagaggtgccgtgaaggcccccactggcgggcacccggtcgtgcagctacacggatatatggagaacaagccattagggctacagatattcatagggacggcagacgaaagaatcctgaagcctcacgctttttaccaggtgcataggataacaggtaaaaccgtaaccaccacaagttatgaaaaaatagtgggaaacaccaaagtgctagagatccccctggaacccaagaataacatgcgagcaacgatcgattgtgcaggcatcttaaaactgaggaatgccgatatcgagctcagaaaaggtgaaacagacataggtcgaaaaaatacaagagtccgcctggtattcagggtccacatccctgagagctcaggccgaatcgtttcattgcagactgcaagcaacccaatagaatgcagccagagatccgcacacgagttgccaatggtggaacggcaggacaccgacagttgcttggtatatggaggacagcaaatgattttaacaggtcagaactttaccagtgagtccaaagtcgtcttcacggaaaagacaaccgatggacagcagatttgggagatggaggcgactgtggataaggacaaatctcagccgaacatgttgttcgtagagattccggaatacaggaacaagcacatccggacgccagtgaaggtgaatttttacgtgatcaacggcaaacgaaagaggagccagcctcagcattttacgtaccatcctgtcccagccatcaagaccgagccaaccgacgagtatgatccaactttaatctgctcccctacacatggaggcttgggtagccagccttactacccccagcaccctatggtggctgagagcccctcttgcctggtcgccacaatggccccctgccagcagtttcgtacgggactctcgtctcccgacgcccgatatcagcagcagaatcccgctgccgtcctgtaccaaagatctaaatccctgtccccgagtctcttgggttaccagcagcccgccctcatggcagcccctctgagcctggcggatgcccataggagtgtcctggtgcatgctggctcacagggtcagtcctctgcactgctccatccaagtcctacgaatcaacaggcaagcccagttattcattattccccaacaaaccagcagttaagatgtggatcccatcaggagtttcagcacattatgtattgtgagaattttgctccagggacaacacgaccaggaccaccacccgtgtcacaaggacaaaggctaagcccgggatcctacccaaccgtcatccagcagcagaatgctactagccaaagagctgccaaaaatggacccccggtcagcgatcagaaggaggttttgcctgcaggggtgaccattaaacaggagcagaacctggatcagacatacctggatgacgaattgattgatacccacctgtcctggattcagaacatactctag

SEQ ID NO: 51641 - DNA, 2706 bp, Artificial Sequence
  derived and/or modified sequence
atgcagcgggaggccgccttccggctgggccactgccaccccctgcgcatcatgggctctgtggaccaggaggagcccaatgcccacaaggtggccagcccccccagcggccctgcctacccagatgatgtgctggactatggcctgaagccctacagccccctggccagcctgtctggagagcccccaggccgctttggagagccagacagagtgggcccccagaagttcctgtctgctgccaagccagctggggccagcggcctgagccccagaattgagatcacccccagccatgagctgatccaggccgtgggccccctgaggatgagagatgctggcctgctggtggagcagccccccctggccggcgtggccgccagcccccgcttcaccctgcctgtgcccggctttgagggctaccgggagcccctgtgcctgagccctgccagcagcggcagcagcgccagcttcatcagtgacaccttcagcccctacaccagcccctgtgtgagccccaacaatggaggcccagatgacctgtgcccccagttccagaacatcccagcccactacagccccaggaccagccccatcatgagccccaggaccagcctggccgaggacagctgcctgggccgccacagccctgtgcccaggcctgccagccgcagcagcagccctggggccaagaggaggcacagctgtgccgaggccctggtggccctgcccccaggggccagcccccagaggagccgcagccccagcccccagcccagcagccacgtggccccccaggaccacggcagccctgctggctacccacctgtggccggcagcgctgtgatcatggatgccctgaacagcctggccacagacagcccctgtggcatcccccccaagatgtggaagaccagcccagaccccagccctgtgtctgctgcccccagcaaggccggcctgcccaggcacatctacccagctgtggagttcctgggcccctgtgagcagggcgagaggagaaattctgcccctgagagcatcctgctggtgccccccacctggcccaagcccctggtgcctgccatccccatctgcagcatccctgtgacagccagcctgccccccctggagtggcccctgagcagccagagcggcagctatgagctgcgcatcgaggtgcagcccaagccccaccaccgggcccactatgaaacagagggcagcagaggagctgtgaaggcccccactggaggccaccctgtggtgcagctgcacggctacatggagaacaagcccctgggcctgcagatcttcatcggcacagcagatgagcgcatcctgaagccccacgccttctaccaggtgcaccgcatcaccgggaagacagtgaccaccaccagctatgagaagatcgtgggcaacaccaaggtgctggagatccccctggagcccaagaacaacatgagggccaccatcgactgtgccggcatcctgaagctgagaaatgctgacatcgagctgaggaagggggagacagacattggaaggaagaacaccagggtgcggctggtgttccgggtgcacatccctgagagcagcggcagaattgtgtccctgcagacagccagcaaccccatcgagtgcagccagaggtctgcccacgagctgcccatggtggagcggcaggacacagacagctgcctggtgtatggaggccagcagatgatcctgaccggccagaacttcaccagcgagagcaaggtggtgttcacagagaagaccacagatggccagcagatctgggagatggaggccaccgtggacaaggacaagagccagcccaacatgctgtttgtggagatccctgagtacagaaacaagcacatccgcacccctgtgaaggtgaacttctacgtgatcaacgggaagaggaagaggagccagccccagcacttcacctaccaccctgtgcctgccatcaagacagagcccacagatgaatatgaccccaccctcatctgcagccccacccatggaggcctgggcagccagccctactacccccagcaccccatggtggccgagagccccagctgcctggtggccaccatggccccctgccagcagttcagaacaggcctgagcagcccagatgcccgctaccagcagcagaacccagctgctgtgctgtaccagaggagcaagagcctgagccccagcctgctgggctaccagcagcctgccctgatggccgcccccctgagcctggctgatgcccacaggtctgtgctggtgcacgccggcagccagggccagagcagcgccctgctgcaccccagccccaccaaccagcaggccagccctgtgatccactacagccccaccaaccagcagctgcgctgtggcagccaccaggagttccagcacatcatgtactgtgaaaattttgcccctggcaccacccggcccggccccccacctgtgtcccagggccagaggctgagccctggcagctaccccaccgtcatccagcagcagaatgccaccagccagagagctgccaagaatggacctcctgtgtctgaccagaaggaggtgctgcctgctggggtgaccatcaagcaggagcagaacctggaccagacctacctggatgatgagctgattgacacccacctgtcctggatccagaacatcctgtag

SEQ ID NO: 51642 - DNA, 2706 bp, Artificial Sequence
  derived and/or modified sequence
atgcagcgggaggccgccttccggctgggccactgccaccccctgagaataatggggtctgtggaccaggaggagcccaacgcacataaggtggcctctcctccatccgggccggcttacccagacgacgtgctggattacggactcaaaccctatagcccactggctagtctttcaggcgagcctcctggccggttcggggagcctgatcgtgttggacctcagaagttcctgtctgcagcaaagcctgcaggagcgagcggcctttcccccagaatagagatcacacccagccacgaactgatccaggcagtggggccattgcgtatgcgcgatgcaggcttgctcgtggaacagccccctctcgctggcgtggccgcctcccctaggttcactctaccagtccctgggttcgaaggctatcgcgaacccctctgtcttagcccggcctcctcgggctcgtccgcttcttttatatctgatacatttagcccctatacctccccgtgcgtgagcccaaataacggagggccagacgacctgtgtccacagtttcagaatattcccgcccattatagccctaggacgagtccaatcatgagccccagaaccagtctcgccgaggactcttgccttgggaggcacagccccgtacctcgacccgcaagtcggtccagcagccctggtgccaagcggagacactcttgtgccgaggcattggttgccctaccacctggcgcttctccccaacgttcgcgcagccccagccctcagccgtccagccatgtagccccacaagaccatgggtcccctgcagggtacccgccagttgctggatccgccgtgatcatggacgcactgaattcactcgctaccgactccccatgtggcatcccacctaaaatgtggaaaacatccccagaccccagcccggtgagtgccgccccttccaaagccggactgccccgccatatttacccagctgtggaatttctgggcccatgcgaacagggtgaacgccgtaactctgcaccggagtcaattctgctggtgccacccacatggcccaagccgctggtgcccgccattcctatctgttccattcctgttactgcctccttacctcctttggagtggcccctgtcctcccagagcgggtcttatgaactccggattgaggtccaaccaaaacctcaccaccgagcgcactacgaaaccgagggatctcggggggctgtgaaggcgcccacaggcggccacccagtcgtgcagctgcacggctatatggagaacaagcccctgggacttcagatttttatcggcacagccgacgaaaggattctgaaaccccacgctttttatcaggtacataggatcaccggaaagacagtgacaactacttcgtacgagaagattgtgggcaataccaaggtgctggagatcccacttgagccaaaaaataatatgagggctaccatcgattgtgccggaatcctcaagttaagaaacgccgacattgagctgcgcaaaggcgagacagatatcggacgcaaaaacacccgcgtccggctcgtgttccgggtgcatatcccggagagttcaggtcgaattgtgtctcttcaaacagcctctaacccaattgaatgcagccagaggagcgcccatgagctgcctatggtggaacggcaggataccgactcttgtctggtgtacggcggtcagcagatgatcctcacgggccagaattttacctcggagtctaaagtagtatttacagagaaaaccaccgacggccagcagatatgggaaatggaggccacagtggacaaagacaagtctcaacccaacatgctgtttgtggaaattcctgaatataggaacaagcatattagaacacccgttaaggtgaacttctatgtgatcaacgggaagaggaaacgctcacagccccagcactttacgtatcaccccgtgccagcaattaagacagaacccacagatgagtacgatcctacactgatctgcagccccactcatggcggattagggtctcagccctactacccccagcatcccatggtcgcagaatccccttcgtgcctggtggccactatggccccatgccaacaattccgtacaggcctgtctagcccagacgctcgctatcagcagcagaatcccgccgcagtgctctaccaaagatccaagagtctgagcccgagtctgctggggtaccaacagcccgccctgatggccgccccactgtctctcgccgacgcccatagatccgtgctggtccacgcggggtcccaggggcagagctcagctctcctccatccatctcctacaaaccagcaggcttctcccgtcatccactacagcccaacaaaccagcagctcaggtgtggaagccatcaggaattccaacacatcatgtactgtgaaaacttcgctcccggcaccacgcgtccaggacctcctcccgtgagtcaggggcaacggctgtctccaggttcctatccaactgtaattcagcaacagaatgctactagccagcgcgcggccaagaacggtccaccagtgagcgatcaaaaggaagtcttgccagccggcgtgaccataaagcaggaacagaatttagatcagacctatctggatgacgagctgattgacacccatctttcatggatacaaaacattctgtag

SEQ ID NO: 51643 - DNA, 1397 bp, Artificial Sequence
  derived and/or modified sequence
gactccgccgagccgggagccgggaggcgcgcagctcccgggtcgctccgaggctcctcggccagggcagccccgcgggcacgcggtagagaagacggcgtcccctcggctgctggtcgatacaaacagatccccctttccaaacacgcgccaagtccccgtgccctccagatgcagagagaggctgcgttcagactggggcactgccatcccctccgcatcatggggtctgtggaccaagaacctcgccaataatgtcacctcgaaccagcctcgccgaggacagctgcctgggccgccactcgcccgtgccccgtccggcctcccgctcctcatcgcctggtgccaagcggaggcattcgtgcgccgaggccttggttgccctgccgcccggagcctcaccccagcgctcccggagcccctcgccgcagccctcatctcacgtggcaccccaggaccacggctccccggctgggtacccccctgtggctggctctgccgtgatcatggatgccctgaacagcctcgccacggactcgccttgtgggatcccccccaagatgtggaagaccagccctgacccctcgccggtgtctgccgccccatccaaggccggcctgcctcgccacatctacccggccgtggagttcctggggccctgcgagcagggcgagaggagaaactcggctccagaatccatcctgctggttccgcccacttggcccaagccgctggtgcctgccattcccatctgcagcatcccagtgactgcatccctccctccacttgagtggccgctgtccagtcagtcaggctcttacgagctgcggatcgaggtgcagcccaagccacatcaccgggcccactatgagacagaaggcagccgaggggctgtcaaagctccaactggaggccaccctgtggttcagctccatggctacatggaaaacaagcctctgggacttcagatcttcattgggacagctgatgagcggatccttaagccgcacgccttctaccaggtgcaccgaatcacggggaaaactgtcaccaccaccagctatgagaagatagtgggcaacaccaaagtcctggagatacccttggagccctccacagcccctcaccttctgtctcctttcatgttcatctcccagcccggagtccacacgcggatcaatgtatgggcactaagcggactctcacttaaggagctcgccacctccctctaaacaccagagagaactcttcttttcggtttatgttttaaatcccagagagcatcctggttgatcttaatggtgttccgtccaaatagtaagcacctgctgaccaaaagcacattctacatgagacaggacactggaactctcctgagaacagagtgactggagctt

SEQ ID NO: 51644 - DNA, 2974 bp, Artificial Sequence
  derived and/or modified sequence
atgcagagagaggctgcgttcagactggggcactgccatcccctccgcatcatggggtctgtggaccaagaagagccgaatgcacataaggtcgccagcccaccctccggacccgcataccccgatgatgtcctggactatggcctcaagccatacagcccccttgctagtctctctggcgagccccccggccgattcggagagccggatagggtagggccgcagaagtttctgagcgcggccaagccagcaggggcctcgggcctgagccctcggatcgagatcactccgtcccacgaactgatccaggcagtggggcccctccgcatgagagacgcgggcctcctggtggagcagccgcccctggccggggtggccgccagcccgaggttcaccctgcccgtgcccggcttcgagggctaccgcgagccgctttgcttgagccccgctagcagcggctcctctgccagcttcatttctgacaccttctccccctacacctcgccctgcgtctcgcccaataacggcgggcccgacgacctgtgtccgcagtttcaaaacatccctgctcattattcccccagaacctcgccaataatgtcacctcgaaccagcctcgccgaggacagctgcctgggccgccactcgcccgtgccccgtccggcctcccgctcctcatcgcctggtgccaagcggaggcattcgtgcgccgaggccttggttgccctgccgcccggagcctcaccccagcgctcccggagcccctcgccgcagccctcatctcacgtggcaccccaggaccacggctccccggctgggtacccccctgtggctggctctgccgtgatcatggatgccctgaacagcctcgccacggactcgccttgtgggatcccccccaagatgtggaagaccagccctgacccctcgccggtgtctgccgccccatccaaggccggcctgcctcgccacatctacccggccgtggagttcctggggccctgcgagcagggcgagaggagaaactcggctccagaatccatcctgctggttccgcccacttggcccaagccgctggtgcctgccattcccatctgcagcatcccagtgactgcatccctccctccacttgagtggccgctgtccagtcagtcaggctcttacgagctgcggatcgaggtgcagcccaagccacatcaccgggcccactatgagacagaaggcagccgaggggctgtcaaagctccaactggaggccaccctgtggttcagctccatggctacatggaaaacaagcctctgggacttcagatcttcattgggacagctgatgagcggatccttaagccgcacgccttctaccaggtgcaccgaatcacggggaaaactgtcaccaccaccagctatgagaagatagtgggcaacaccaaagtcctggagatacccttggagcccaaaaacaacatgagggcaaccatcgactgtgcggggatcttgaagcttagaaacgccgacattgagctgcggaaaggcgagacggacattggaagaaagaacacgcgggtgagactggttttccgagttcacatcccagagtccagtggcagaatcgtctctttacagactgcatctaaccccatcgagtgctcccagcgatctgctcacgagctgcccatggttgaaagacaagacacagacagctgcctggtctatggcggccagcaaatgatcctcacggggcagaactttacatccgagtccaaagttgtgtttactgagaagaccacagatggacagcaaatttgggagatggaagccacggtggataaggacaagagccagcccaacatgctttttgttgagatccctgaatatcggaacaagcatatccgcacacctgtaaaagtgaacttctacgtcatcaatgggaagagaaaacgaagtcagcctcagcactttacctaccacccagtcccagccatcaagacggagcccacggatgaatatgaccccactctgatctgcagccccacccatggaggcctggggagccagccttactacccccagcacccgatggtggccgagtccccctcctgcctcgtggccaccatggctccctgccagcagttccgcacggggctctcatcccctgacgcccgctaccagcaacagaacccagcggccgtactctaccagcggagcaagagcctgagccccagcctgctgggctatcagcagccggccctcatggccgccccgctgtcccttgcggacgctcaccgctctgtgctggtgcacgccggctcccagggccagagctcagccctgctccacccctctccgaccaaccagcaggcctcgcctgtgatccactactcacccaccaaccagcagctgcgctgcggaagccaccaggagttccagcacatcatgtactgcgagaatttcgcaccaggcaccaccagacctggcccgcccccggtcagtcaaggtcagaggctgagcccgggttcctaccccacagtcattcagcagcagaatgccacgagccaaagagccgccaaaaacggacccccggtcagtgaccaaaaggaagtattacctgcgggggtgaccattaaacaggagcagaacttggaccagacctacttggatgatgagctgatagacacacaccttagctggatacaaaacatattatgaaacagaatgactgtgatctttgatccgagaaatcaaagttaaagttaatgaaattatcaggaaggagttttcaggacctcctgccagaaatcagacgtaaaagaagccattatagcaagacaccttctgtatctgacccctcggagccctccacagcccctcaccttctgtctcctttcatgttcatctcccagcccggagtccacacgcggatcaatgtatgggcactaagcggactctcacttaaggagctcgccacctccctcta

SEQ ID NO: 51645 - DNA, 2706 bp, Artificial Sequence
  derived and/or modified sequence
atgcaaagagaggctgcatttcgcctcgggcattgccacccactccgcattatgggatctgtggaccaagaagagcctaatgcacataaggtggctagccctccctccggccctgcatatcctgatgatgtactagactacggtctgaagccttattccccactagcgagtcttagcggagagccgccaggcagatttggagagcctgatcgggtggggccacagaaattcctcagcgccgcaaaacctgccggagctagcggattgtcacccagaatagagattacccctagccacgaactgattcaagccgttggccctcttaggatgagggatgccggactgcttgtggagcagccccctttagctggagtggctgcctccccgaggtttaccttgcctgtgcccggattcgaaggctatcgtgaacctctctgcctgtctccagccagctccggctcttccgcctccttcatttccgatacttttagcccctataccagtccctgtgtcagccccaataatgggggacccgatgatctgtgtcctcaattccaaaacatccctgctcactattctccaaggacgagccctattatgtccccaaggacctccttggcagaggactcatgtctggggaggcacagtccagtgcccaggccggcaagccgctctagcagccctggggctaagagaaggcatagctgcgccgaggctctcgtggcgctacccccaggagcttcacctcagagaagtagatcccctagcccgcagccttccagccacgtcgcccctcaagatcacggatcccccgcaggttaccccccagtggcaggttccgcagtgatcatggatgcactgaatagcctggcaacagactccccatgcggaattcccccaaaaatgtggaagacctcccctgacccgagccccgtgtcagctgcaccctccaaagccggattgcccagacacatttaccctgcagttgagttcttggggccttgtgagcagggagaacggaggaactcggcacctgaatcaattctgttggtgccaccaacatggcctaaacctctggttccagccattcccatctgtagcattcctgtgacagccagcctacctcccttggaatggccccttagcagccagtcgggatcctatgaactacggattgaggtgcagccgaaaccgcatcaccgggcacattacgaaactgagggatccagaggcgcagtcaaggcaccaactggtggccaccctgtggttcaattgcatggctacatggagaataaacctttaggcttgcaaattttcatcggaacagccgatgagagaatactcaagcctcacgcattttatcaggtccacagaattactgggaaaaccgtcactaccaccagctacgaaaagatcgtgggcaacactaaggtgctggaaattccactggagcccaaaaacaatatgcgagctactattgactgtgccggaatacttaaactgcgtaatgctgacatcgagctgaggaaaggagagacagacatcggaagaaaaaacacccgcgtgcggctcgtcttcagggtgcacattccagagtcctcgggacgaattgtatccctccaaaccgcctccaatcctatagaatgttcccagaggtcagcccatgagctccccatggtggagcggcaggatacggattcctgcctggtttatggaggacagcagatgattcttacagggcaaaactttacgtctgaatccaaggttgtgtttactgaaaagactaccgatggtcaacagatctgggagatggaagctactgttgacaaggataagtcccagcctaatatgttgttcgtggagattcctgagtacaggaacaaacacattcggacacccgtgaaggttaatttctatgtgattaatggaaagcggaagcgctctcagccccaacatttcacttaccatcctgttcctgccattaaaactgaacccacagacgaatacgatcccaccctgatctgcagccccactcacggcggtctcgggtcccagccgtattatcctcagcatccaatggtggcagaatccccaagctgtctggtcgctacgatggccccatgccaacagtttaggacgggcctgtcctcaccggacgcgagataccagcagcaaaatcccgcagccgtgctatatcaacgctctaaaagtctgagccccagcttactggggtatcaacagccagcgcttatggctgccccactctctctcgccgatgctcatcggtccgtactggtgcacgccggaagccaaggacagtcatctgcactactccatcccagtcctacgaatcaacaggcatcaccagtgatacactattctccaaccaaccaacagcttcgatgcggatcgcaccaggagtttcagcatattatgtattgtgagaactttgcacctggaactacccgtcctggacccccacccgtgtcccagggccagaggttgtccccagggagctacccgacggtgatacagcagcagaacgctacatcacagagagctgccaagaatggtccaccagtgagcgatcagaaggaggttttgcctgctggcgtgaccattaagcaggaacagaatctggaccagacctacctcgatgatgaactgattgatacacacctcagttggatccaaaatattctctag

SEQ ID NO: 51646 - protein, 964 aa, Artificial Sequence
  derived and/or modified sequence
MITTLPSLLPASLASISHRVTNLPSNSLSHNPGLSKPDFPGNSSPGLPSSSSPGRDLGAPAGSMGAASCEDEELEFKLVFGEEKEAPPLGAGGLGEELDSEDAPPCCRLALGEPPPYGAAPIGIPRPPPPRPGMHSPPPRPAPSPGTWESQPARSVRLGGPGGGAGGAGGGRVLECPSIRITSISPTPEPPAALEDNPDAWGDGSPRDYPPPEGFGGYREAGGQGGGAFFSPSPGSSSLSSWSFFSDASDEAALYAACDEVESELNEAASRFGLGSPLPSPRASPRPWTPEDPWSLYGPSPGGRGPEDSWLLLSAPGPTPASPRPASPCGKRRYSSSGTPSSASPALSRRGSLGEEGSEPPPPPPLPLARDPGSPGPFDYVGAPPAESIPQKTRRTSSEQAVALPRSEEPASCNGKLPLGAEESVAPPGGSRKEVAGMDYLAVPSPLAWSKARIGGHSPIFRTSALPPLDWPLPSQYEQLELRIEVQPRAHHRAHYETEGSRGAVKAAPGGHPVVKLLGYSEKPLTLQMFIGTADERNLRPHAFYQVHRITGKMVATASYEAVVSGTKVLEMTLLPENNMAANIDCAGILKLRNSDIELRKGETDIGRKNTRVRLVFRVHVPQGGGKVVSVQAASVPIECSQRSAQELPQVEAYSPSACSVRGGEELVLTGSNFLPDSKVVFIERGPDGKLQWEEEATVNRLQSNEVTLTLTVPEYSNKRVSRPVQVYFYVSNGRRKRSPTQSFRFLPVICKEEPLPDSSLRGFPSASATPFGTDMDFSPPRPPYPSYPHEDPACETPYLSEGFGYGMPPLYPQTGPPPSYRPGLRMFPETRGTTGCAQPPAVSFLPRPFPSDPYGGRGSSFSLGLPFSPPAPFRPPPLPASPPLEGPFPSQSDVHPLPAEGYNKVGPGYGPGEGAPEQEKSRGGYSSGFRDSVPIQGITLEEGGCGTGGCECECVQEIALHVC

SEQ ID NO: 51647 - protein, 914 aa, Artificial Sequence
  derived and/or modified sequence
MLSGRDLGAPAGSMGAASCEDEELEFKLVFGEEKEAPPLGAGGLGEELDSEDAPPCCRLALGEPPPYGAAPIGIPRPPPPRPGMHSPPPRPAPSPGTWESQPARSVRLGGPGGGAGGAGGGRVLECPSIRITSISPTPEPPAALEDNPDAWGDGSPRDYPPPEGFGGYREAGGQGGGAFFSPSPGSSSLSSWSFFSDASDEAALYAACDEVESELNEAASRFGLGSPLPSPRASPRPWTPEDPWSLYGPSPGGRGPEDSWLLLSAPGPTPASPRPASPCGKRRYSSSGTPSSASPALSRRGSLGEEGSEPPPPPPLPLARDPGSPGPFDYVGAPPAESIPQKTRRTSSEQAVALPRSEEPASCNGKLPLGAEESVAPPGGSRKEVAGMDYLAVPSPLAWSKARIGGHSPIFRTSALPPLDWPLPSQYEQLELRIEVQPRAHHRAHYETEGSRGAVKAAPGGHPVVKLLGYSEKPLTLQMFIGTADERNLRPHAFYQVHRITGKMVATASYEAVVSGTKVLEMTLLPENNMAANIDCAGILKLRNSDIELRKGETDIGRKNTRVRLVFRVHVPQGGGKVVSVQAASVPIECSQRSAQELPQVEAYSPSACSVRGGEELVLTGSNFLPDSKVVFIERGPDGKLQWEEEATVNRLQSNEVTLTLTVPEYSNKRVSRPVQVYFYVSNGRRKRSPTQSFRFLPVICKEEPLPDSSLRGFPSASATPFGTDMDFSPPRPPYPSYPHEDPACETPYLSEGFGYGMPPLYPQTGPPPSYRPGLRMFPETRGTTGCAQPPAVSFLPRPFPSDPYGGRGSSFSLGLPFSPPAPFRPPPLPASPPLEGPFPSQSDVHPLPAEGYNKVGPGYGPGEGAPEQEKSRGGYSSGFRDSVPIQGITLEEGGCGTGGCECECVQEIALHVC

SEQ ID NO: 51648 - protein, 933 aa, Artificial Sequence
  derived and/or modified sequence
MADGGADSAAQRLPEGPGRVAPGRDLGAPAGSMGAASCEDEELEFKLVFGEEKEAPPLGAGGLGEELDSEDAPPCCRLALGEPPPYGAAPIGIPRPPPPRPGMHSPPPRPAPSPGTWESQPARSVRLGGPGGGAGGAGGGRVLECPSIRITSISPTPEPPAALEDNPDAWGDGSPRDYPPPEGFGGYREAGGQGGGAFFSPSPGSSSLSSWSFFSDASDEAALYAACDEVESELNEAASRFGLGSPLPSPRASPRPWTPEDPWSLYGPSPGGRGPEDSWLLLSAPGPTPASPRPASPCGKRRYSSSGTPSSASPALSRRGSLGEEGSEPPPPPPLPLARDPGSPGPFDYVGAPPAESIPQKTRRTSSEQAVALPRSEEPASCNGKLPLGAEESVAPPGGSRKEVAGMDYLAVPSPLAWSKARIGGHSPIFRTSALPPLDWPLPSQYEQLELRIEVQPRAHHRAHYETEGSRGAVKAAPGGHPVVKLLGYSEKPLTLQMFIGTADERNLRPHAFYQVHRITGKMVATASYEAVVSGTKVLEMTLLPENNMAANIDCAGILKLRNSDIELRKGETDIGRKNTRVRLVFRVHVPQGGGKVVSVQAASVPIECSQRSAQELPQVEAYSPSACSVRGGEELVLTGSNFLPDSKVVFIERGPDGKLQWEEEATVNRLQSNEVTLTLTVPEYSNKRVSRPVQVYFYVSNGRRKRSPTQSFRFLPVICKEEPLPDSSLRGFPSASATPFGTDMDFSPPRPPYPSYPHEDPACETPYLSEGFGYGMPPLYPQTGPPPSYRPGLRMFPETRGTTGCAQPPAVSFLPRPFPSDPYGGRGSSFSLGLPFSPPAPFRPPPLPASPPLEGPFPSQSDVHPLPAEGYNKVGPGYGPGEGAPEQEKSRGGYSSGFRDSVPIQGITLEEGGCGTGGCECECVQEIALHVC

SEQ ID NO: 51649 - protein, 901 aa, Artificial Sequence
  derived and/or modified sequence
MGAASCEDEELEFKLVFGEEKEAPPLGAGGLGEELDSEDAPPCCRLALGEPPPYGAAPIGIPRPPPPRPGMHSPPPRPAPSPGTWESQPARSVRLGGPGGGAGGAGGGRVLECPSIRITSISPTPEPPAALEDNPDAWGDGSPRDYPPPEGFGGYREAGGQGGGAFFSPSPGSSSLSSWSFFSDASDEAALYAACDEVESELNEAASRFGLGSPLPSPRASPRPWTPEDPWSLYGPSPGGRGPEDSWLLLSAPGPTPASPRPASPCGKRRYSSSGTPSSASPALSRRGSLGEEGSEPPPPPPLPLARDPGSPGPFDYVGAPPAESIPQKTRRTSSEQAVALPRSEEPASCNGKLPLGAEESVAPPGGSRKEVAGMDYLAVPSPLAWSKARIGGHSPIFRTSALPPLDWPLPSQYEQLELRIEVQPRAHHRAHYETEGSRGAVKAAPGGHPVVKLLGYSEKPLTLQMFIGTADERNLRPHAFYQVHRITGKMVATASYEAVVSGTKVLEMTLLPENNMAANIDCAGILKLRNSDIELRKGETDIGRKNTRVRLVFRVHVPQGGGKVVSVQAASVPIECSQRSAQELPQVEAYSPSACSVRGGEELVLTGSNFLPDSKVVFIERGPDGKLQWEEEATVNRLQSNEVTLTLTVPEYSNKRVSRPVQVYFYVSNGRRKRSPTQSFRFLPVICKEEPLPDSSLRGFPSASATPFGTDMDFSPPRPPYPSYPHEDPACETPYLSEGFGYGMPPLYPQTGPPPSYRPGLRMFPETRGTTGCAQPPAVSFLPRPFPSDPYGGRGSSFSLGLPFSPPAPFRPPPLPASPPLEGPFPSQSDVHPLPAEGYNKVGPGYGPGEGAPEQEKSRGGYSSGFRDSVPIQGITLEEGGCGTGGCECECVQEIALHVC

SEQ ID NO: 51650 - protein, 436 aa, Artificial Sequence
  derived and/or modified sequence
MFIGTADERNLRPHAFYQVHRITGKMVATASYEAVVSGTKVLEMTLLPENNMAANIDCAGILKLRNSDIELRKGETDIGRKNTRVRLVFRVHVPQGGGKVVSVQAASVPIECSQRSAQELPQVEAYSPSACSVRGGEELVLTGSNFLPDSKVVFIERGPDGKLQWEEEATVNRLQSNEVTLTLTVPEYSNKRVSRPVQVYFYVSNGRRKRSPTQSFRFLPVICKEEPLPDSSLRGFPSASATPFGTDMDFSPPRPPYPSYPHEDPACETPYLSEGFGYGMPPLYPQTGPPPSYRPGLRMFPETRGTTGCAQPPAVSFLPRPFPSDPYGGRGSSFSLGLPFSPPAPFRPPPLPASPPLEGPFPSQSDVHPLPAEGYNKVGPGYGPGEGAPEQEKSRGGYSSGFRDSVPIQGITLEEGGCGTGGCECECVQEIALHVC

SEQ ID NO: 51651 - protein, 189 aa, Artificial Sequence
  derived and/or modified sequence
MDFSPPRPPYPSYPHEDPACETPYLSEGFGYGMPPLYPQTGPPPSYRPGLRMFPETRGTTGCAQPPAVSFLPRPFPSDPYGGRGSSFSLGLPFSPPAPFRPPPLPASPPLEGPFPSQSDVHPLPAEGYNKVGPGYGPGEGAPEQEKSRGGYSSGFRDSVPIQGITLEEGGCGTGGCECECVQEIALHVC

SEQ ID NO: 51652 - protein, 831 aa, Artificial Sequence
  derived and/or modified sequence
MHSPPPRPAPSPGTWESQPARSVRLGGPGGGAGGAGGGRVLECPSIRITSISPTPEPPAALEDNPDAWGDGSPRDYPPPEGFGGYREAGGQGGGAFFSPSPGSSSLSSWSFFSDASDEAALYAACDEVESELNEAASRFGLGSPLPSPRASPRPWTPEDPWSLYGPSPGGRGPEDSWLLLSAPGPTPASPRPASPCGKRRYSSSGTPSSASPALSRRGSLGEEGSEPPPPPPLPLARDPGSPGPFDYVGAPPAESIPQKTRRTSSEQAVALPRSEEPASCNGKLPLGAEESVAPPGGSRKEVAGMDYLAVPSPLAWSKARIGGHSPIFRTSALPPLDWPLPSQYEQLELRIEVQPRAHHRAHYETEGSRGAVKAAPGGHPVVKLLGYSEKPLTLQMFIGTADERNLRPHAFYQVHRITGKMVATASYEAVVSGTKVLEMTLLPENNMAANIDCAGILKLRNSDIELRKGETDIGRKNTRVRLVFRVHVPQGGGKVVSVQAASVPIECSQRSAQELPQVEAYSPSACSVRGGEELVLTGSNFLPDSKVVFIERGPDGKLQWEEEATVNRLQSNEVTLTLTVPEYSNKRVSRPVQVYFYVSNGRRKRSPTQSFRFLPVICKEEPLPDSSLRGFPSASATPFGTDMDFSPPRPPYPSYPHEDPACETPYLSEGFGYGMPPLYPQTGPPPSYRPGLRMFPETRGTTGCAQPPAVSFLPRPFPSDPYGGRGSSFSLGLPFSPPAPFRPPPLPASPPLEGPFPSQSDVHPLPAEGYNKVGPGYGPGEGAPEQEKSRGGYSSGFRDSVPIQGITLEEGGCGTGGCECECVQEIALHVC

SEQ ID NO: 51653 - DNA, 4976 bp, Artificial Sequence
  derived and/or modified sequence
gaagagaggacagagggagggagggtgggggaggacgaggggcgcgtggttttcccatctcatccctggaggaggggctggagcatccccggcagccaatcagggacaggctgggggggggaccgctttgaagaagtttgggggaaaaaagtttggaaaagtttctataataacgagggggcttctggagggaggcggcagcgacggaggagggggcttctcagagaaagggagggagggagccacccgggtgaagatacagcagcctcctgaactcccccctcccacccaggccgggacctgggggctcctgccggatccatgggggcggccagctgcgaggatgaggagctggaatttaagctggtgttcggggaggaaaaggaggcccccccgctgggcgcggggggattgggggaagaactggactcagaggatgccccgccatgctgccgtctggccttgggagagccccctccctatggcgctgcacctatcggtattccccgacctccaccccctcggcctggcatgcattcgccaccgccgcgaccagccccctcacctggcacctgggagagccagcccgccaggtcggtgaggctgggaggaccaggagggggtgctgggggtgctgggggtggccgtgttctcgagtgtcccagcatccgcatcacctccatctctcccacgccggagccgccagcagcgctggaggacaaccctgatgcctggggggacggctctcctagagattaccccccaccagaaggctttgggggctacagagaagcagggggccagggtgggggggccttcttcagcccaagccctggcagcagcagcctgtcctcgtggagcttcttctccgatgcctctgacgaggcagccctgtatgcagcctgcgacgaggtggagtctgagctaaatgaggcggcctcccgctttggcctgggctccccgctgccctcgccccgggcctcccctcggccatggacccccgaagatccctggagcctgtatggtccaagccccggaggccgagggccagaggatagctggctactcctcagtgctcctgggcccaccccagcctccccgcggcctgcctctccatgtggcaagcggcgctattccagctcgggaaccccatcttcagcctccccagctctgtcccgccgtggcagcctgggggaagaggggtctgagccacctccaccacccccattgcctctggcccgggacccgggctcccctggtccctttgactatgtgggggccccaccagctgagagcatccctcagaagacacggcggacttccagcgagcaggcagtggctctgcctcggtctgaggagcctgcctcatgcaatgggaagctgcccttgggagcagaggagtctgtggctcctccaggaggttcccggaaggaggtggctggcatggactacctggcagtgccctccccactcgcttggtccaaggcccggattgggggacacagccctatcttcaggacctctgccctacccccactggactggcctctgcccagccaatatgagcagctggagctgaggatcgaggtacagcctagagcccaccaccgggcccactatgagacagaaggcagccgtggagctgtcaaagctgcccctggcggtcaccccgtagtcaagctcctaggctacagtgagaagccactgaccctacagatgttcatcggcactgcagatgaaaggaacctgcggcctcatgccttctatcaggtgcaccgtatcacaggcaagatggtggccacggccagctatgaagccgtagtcagtggcaccaaggtgttggagatgactctgctgcctgagaacaacatggcggccaacattgactgcgcgggaatcctgaagcttcggaattcagacattgagcttcggaagggtgagacggacatcgggcgcaaaaacacacgtgtacggctggtgttccgggtacacgtgccccagggcggcgggaaggtcgtctcagtacaggcagcatcggtgcccatcgagtgctcccagcgctcagcccaggagctgccccaggtggaggcctacagccccagtgcctgctctgtgagaggaggcgaggaactggtactgactggctccaacttcctgccagactccaaggtggtgttcattgagaggggtcctgatgggaagctgcaatgggaggaggaggccacagtgaaccgactgcagagcaacgaggtgacgctgaccctgactgtccccgagtacagcaacaagagggtttcccggccagtccaggtctacttttatgtctccaatgggcggaggaaacgcagtcctacccagagtttcaggtttctgcctgtgatctgcaaagaggagcccctaccggactcatctctgcggggtttcccttcagcatcggcaaccccctttggcactgacatggacttctcaccacccaggcccccctacccctcctatccccatgaagaccctgcttgcgaaactccttacctatcagaaggcttcggctatggcatgccccctctgtacccccagacggggcccccaccatcctacagaccgggcctgcggatgttccctgagactaggggtaccacaggttgtgcccaaccacctgcagtttccttccttccccgccccttccctagtgacccgtatggagggcggggctcctctttctccctggggctgccattctctccgccagccccctttcggccgcctcctcttcctgcatccccaccgcttgaaggccccttcccttcccagagtgatgtgcatcccctacctgctgagggatacaataaggtagggccaggctatggccctggggagggggctccggagcaggagaaatccaggggtggctacagcagcggcttccgagacagtgtccctatccagggtatcacgctggaggaagtgagtgagatcattggccgagacctgagtggcttccctgcacctcctggagaagagcctcctgcctgaaccacgtgaactgtcatcacctggcaaccccagccccagcctcagccctgccccctttccctccttcctggagtggtggctacagaagcttggggccaaccctggctcctctttccccagcttctgtctgtctcactgtcttccctcccctcccccagctgaggtgtggccctcaggcctggtgctgccttggagggctgggggaaggagtgtgtggaggagggaggagggtgaagactgaggctaggtgccagaatggactggagtgaaggcgtgtctagagtgtgggctggctgttgtgctggaaagctggggacaggttgatggtaataaactgctcaatgaccagtgcttcaggctccagagctctttggagagatgggttggggcagcttactccagccctggcccaaggaggcccagaagttggaaagagatggaatgtggctgggaacattgcatcccaaagagcttctcagtggaggaggctggggaaggcatgagggggctcagaggctccttgactgggaccaggattgggggccagggcttgagtaggcctctccactctcctccttgggggtccagattccttaggagctttgggatgaggcccaggaggctgcatttttccaggtccttagtcttgccaccacacagatgattctgattcatagccaagatgaggacacactgatgtagctgatctctcatttacagaggaggattctaaagttcagagagggaaaggggcttgcctgaggtcacgtagataatcagcagcacattgaacgctgcactcctgggctcctgtccccagcccccattcagacacgctgactcaggaggtccaggcctctaaggcttctctccctggagtgagggtggaggtgagggagagctggcacaagccctccctctggatcctccactcctggggattatgaagatattctggaaagatttgtgcttcagaggtagactgcagaaagcaaacagtctacccagcagctctgaatgtcacctgccctggggcttacagcactatatgagttcctggcctatcctgcaaatatgcccatgctggccttctaaatagctggtacatccatcaccactgacgggcctggcctggaaacctggtttgtcccctgtcttgatggcctacgagaggccaagttccactgggctgggaaaagtcactttgtctgtcttgttcacctggagcctgacacaccgtaggtactgagtacaaatagcttgatttggctaggcttggctgcagggggacgtgcctaaaagacattccgggcatttgcacttgggaaacttgcctcaccttcaggcttgtggggcctctctatgcccaatgagtccaggcagtcctagcaagtactcaggagagcaggggtgggtgtgacagaggctggctctggattgggggacaacagaaccagagtaactcctcgcctgttgctgctttgcaatgaatttcctttacctttctggaacacaagctgctgtgaaccaaactgatatcaagtgattagctcaccgggccttggttgcttttcaaagatccccttcagccccctgccagagtcactgccccataatcaccatgtcagaagggaccctagggcattcgtgtcctatttatcaatcttcagcaccacctctaagatctctgagagagggtggatcagcctctgtgtaaacaaaaagctgttaggacttgttgcctctcaaggtggactattctgttttctgccaggacactgccattcatgcattgtcagatatttattaaacagcagcaaagtgccagccaatttgtcctggaggaattcatagcctcatggggcaaaagtaaataaacagcttattacaattcaacaaaaaaaaaaaaaaaaaaaaaaaaaaaaaaaaaaaaaaaaaaaaaaaaa

SEQ ID NO: 51654 - DNA, 2895 bp, Artificial Sequence
  derived and/or modified sequence
atgatcaccaccctgcccagcctgctgcccgccagcctggccagcatcagccacagagtgaccaacctgcccagcaacagcctgagccacaaccccggcctgagcaagcccgacttccccggcaacagcagccccggcctgcccagcagcagcagccccggcagagacctgggcgcccccgccggcagcatgggcgccgccagctgcgaggacgaggagctggagttcaagctggtgttcggcgaggagaaggaggccccccccctgggcgccggcggcctgggcgaggagctggacagcgaggacgcccccccctgctgcagactggccctgggcgagccccccccctacggcgccgcccccatcggcatccccagaccccccccccccagacccggcatgcacagccccccccccagacccgcccccagccccggcacctgggagagccagcccgccagaagcgtgagactgggcggccccggcggcggcgccggcggcgccggcggcggcagagtgctggagtgccccagcatcagaatcaccagcatcagccccacccccgagccccccgccgccctggaggacaaccccgacgcctggggcgacggcagccccagagactaccccccccccgagggcttcggcggctacagagaggccggcggccagggcggcggcgccttcttcagccccagccccggcagcagcagcctgagcagctggagcttcttcagcgacgccagcgacgaggccgccctgtacgccgcctgcgacgaggtggagagcgagctgaacgaggccgccagcagattcggcctgggcagccccctgcccagccccagagccagccccagaccctggacccccgaggacccctggagcctgtacggccccagccccggcggcagaggccccgaggacagctggctgctgctgagcgcccccggccccacccccgccagccccagacccgccagcccctgcggcaagagaagatacagcagcagcggcacccccagcagcgccagccccgccctgagcagaagaggcagcctgggcgaggagggcagcgagccccccccccccccccccctgcccctggccagagaccccggcagccccggccccttcgactacgtgggcgccccccccgccgagagcatcccccagaagaccagaagaaccagcagcgagcaggccgtggccctgcccagaagcgaggagcccgccagctgcaacggcaagctgcccctgggcgccgaggagagcgtggccccccccggcggcagcagaaaggaggtggccggcatggactacctggccgtgcccagccccctggcctggagcaaggccagaatcggcggccacagccccatcttcagaaccagcgccctgccccccctggactggcccctgcccagccagtacgagcagctggagctgagaatcgaggtgcagcccagagcccaccacagagcccactacgagaccgagggcagcagaggcgccgtgaaggccgcccccggcggccaccccgtggtgaagctgctgggctacagcgagaagcccctgaccctgcagatgttcatcggcaccgccgacgagagaaacctgagaccccacgccttctaccaggtgcacagaatcaccggcaagatggtggccaccgccagctacgaggccgtggtgagcggcaccaaggtgctggagatgaccctgctgcccgagaacaacatggccgccaacatcgactgcgccggcatcctgaagctgagaaacagcgacatcgagctgagaaagggcgagaccgacatcggcagaaagaacaccagagtgagactggtgttcagagtgcacgtgccccagggcggcggcaaggtggtgagcgtgcaggccgccagcgtgcccatcgagtgcagccagagaagcgcccaggagctgccccaggtggaggcctacagccccagcgcctgcagcgtgagaggcggcgaggagctggtgctgaccggcagcaacttcctgcccgacagcaaggtggtgttcatcgagagaggccccgacggcaagctgcagtgggaggaggaggccaccgtgaacagactgcagagcaacgaggtgaccctgaccctgaccgtgcccgagtacagcaacaagagagtgagcagacccgtgcaggtgtacttctacgtgagcaacggcagaagaaagagaagccccacccagagcttcagattcctgcccgtgatctgcaaggaggagcccctgcccgacagcagcctgagaggcttccccagcgccagcgccacccccttcggcaccgacatggacttcagcccccccagacccccctaccccagctacccccacgaggaccccgcctgcgagaccccctacctgagcgagggcttcggctacggcatgccccccctgtacccccagaccggccccccccccagctacagacccggcctgagaatgttccccgagaccagaggcaccaccggctgcgcccagccccccgccgtgagcttcctgcccagacccttccccagcgacccctacggcggcagaggcagcagcttcagcctgggcctgcccttcagcccccccgcccccttcagacccccccccctgcccgccagcccccccctggagggccccttccccagccagagcgacgtgcaccccctgcccgccgagggctacaacaaggtgggccccggctacggccccggcgagggcgcccccgagcaggagaagagcagaggcggctacagcagcggcttcagagacagcgtgcccatccagggcatcaccctggaggagggcggctgcggcaccggcggctgcgagtgcgagtgcgtgcaggagatcgccctgcacgtgtgctag

SEQ ID NO: 51655 - DNA, 2745 bp, Artificial Sequence
  derived and/or modified sequence
atgctgagcggcagagacctgggcgcccccgccggcagcatgggcgccgccagctgcgaggacgaggagctggagttcaagctggtgttcggcgaggagaaggaggccccccccctgggcgccggcggcctgggcgaggagctggacagcgaggacgcccccccctgctgcagactggccctgggcgagccccccccctacggcgccgcccccatcggcatccccagaccccccccccccagacccggcatgcacagccccccccccagacccgcccccagccccggcacctgggagagccagcccgccagaagcgtgagactgggcggccccggcggcggcgccggcggcgccggcggcggcagagtgctggagtgccccagcatcagaatcaccagcatcagccccacccccgagccccccgccgccctggaggacaaccccgacgcctggggcgacggcagccccagagactaccccccccccgagggcttcggcggctacagagaggccggcggccagggcggcggcgccttcttcagccccagccccggcagcagcagcctgagcagctggagcttcttcagcgacgccagcgacgaggccgccctgtacgccgcctgcgacgaggtggagagcgagctgaacgaggccgccagcagattcggcctgggcagccccctgcccagccccagagccagccccagaccctggacccccgaggacccctggagcctgtacggccccagccccggcggcagaggccccgaggacagctggctgctgctgagcgcccccggccccacccccgccagccccagacccgccagcccctgcggcaagagaagatacagcagcagcggcacccccagcagcgccagccccgccctgagcagaagaggcagcctgggcgaggagggcagcgagccccccccccccccccccctgcccctggccagagaccccggcagccccggccccttcgactacgtgggcgccccccccgccgagagcatcccccagaagaccagaagaaccagcagcgagcaggccgtggccctgcccagaagcgaggagcccgccagctgcaacggcaagctgcccctgggcgccgaggagagcgtggccccccccggcggcagcagaaaggaggtggccggcatggactacctggccgtgcccagccccctggcctggagcaaggccagaatcggcggccacagccccatcttcagaaccagcgccctgccccccctggactggcccctgcccagccagtacgagcagctggagctgagaatcgaggtgcagcccagagcccaccacagagcccactacgagaccgagggcagcagaggcgccgtgaaggccgcccccggcggccaccccgtggtgaagctgctgggctacagcgagaagcccctgaccctgcagatgttcatcggcaccgccgacgagagaaacctgagaccccacgccttctaccaggtgcacagaatcaccggcaagatggtggccaccgccagctacgaggccgtggtgagcggcaccaaggtgctggagatgaccctgctgcccgagaacaacatggccgccaacatcgactgcgccggcatcctgaagctgagaaacagcgacatcgagctgagaaagggcgagaccgacatcggcagaaagaacaccagagtgagactggtgttcagagtgcacgtgccccagggcggcggcaaggtggtgagcgtgcaggccgccagcgtgcccatcgagtgcagccagagaagcgcccaggagctgccccaggtggaggcctacagccccagcgcctgcagcgtgagaggcggcgaggagctggtgctgaccggcagcaacttcctgcccgacagcaaggtggtgttcatcgagagaggccccgacggcaagctgcagtgggaggaggaggccaccgtgaacagactgcagagcaacgaggtgaccctgaccctgaccgtgcccgagtacagcaacaagagagtgagcagacccgtgcaggtgtacttctacgtgagcaacggcagaagaaagagaagccccacccagagcttcagattcctgcccgtgatctgcaaggaggagcccctgcccgacagcagcctgagaggcttccccagcgccagcgccacccccttcggcaccgacatggacttcagcccccccagacccccctaccccagctacccccacgaggaccccgcctgcgagaccccctacctgagcgagggcttcggctacggcatgccccccctgtacccccagaccggccccccccccagctacagacccggcctgagaatgttccccgagaccagaggcaccaccggctgcgcccagccccccgccgtgagcttcctgcccagacccttccccagcgacccctacggcggcagaggcagcagcttcagcctgggcctgcccttcagcccccccgcccccttcagacccccccccctgcccgccagcccccccctggagggccccttccccagccagagcgacgtgcaccccctgcccgccgagggctacaacaaggtgggccccggctacggccccggcgagggcgcccccgagcaggagaagagcagaggcggctacagcagcggcttcagagacagcgtgcccatccagggcatcaccctggaggagggcggctgcggcaccggcggctgcgagtgcgagtgcgtgcaggagatcgccctgcacgtgtgctag

SEQ ID NO: 51656 - DNA, 2802 bp, Artificial Sequence
  derived and/or modified sequence
atggccgacggcggcgccgacagcgccgcccagagactgcccgagggccccggcagagtggcccccggcagagacctgggcgcccccgccggcagcatgggcgccgccagctgcgaggacgaggagctggagttcaagctggtgttcggcgaggagaaggaggccccccccctgggcgccggcggcctgggcgaggagctggacagcgaggacgcccccccctgctgcagactggccctgggcgagccccccccctacggcgccgcccccatcggcatccccagaccccccccccccagacccggcatgcacagccccccccccagacccgcccccagccccggcacctgggagagccagcccgccagaagcgtgagactgggcggccccggcggcggcgccggcggcgccggcggcggcagagtgctggagtgccccagcatcagaatcaccagcatcagccccacccccgagccccccgccgccctggaggacaaccccgacgcctggggcgacggcagccccagagactaccccccccccgagggcttcggcggctacagagaggccggcggccagggcggcggcgccttcttcagccccagccccggcagcagcagcctgagcagctggagcttcttcagcgacgccagcgacgaggccgccctgtacgccgcctgcgacgaggtggagagcgagctgaacgaggccgccagcagattcggcctgggcagccccctgcccagccccagagccagccccagaccctggacccccgaggacccctggagcctgtacggccccagccccggcggcagaggccccgaggacagctggctgctgctgagcgcccccggccccacccccgccagccccagacccgccagcccctgcggcaagagaagatacagcagcagcggcacccccagcagcgccagccccgccctgagcagaagaggcagcctgggcgaggagggcagcgagccccccccccccccccccctgcccctggccagagaccccggcagccccggccccttcgactacgtgggcgccccccccgccgagagcatcccccagaagaccagaagaaccagcagcgagcaggccgtggccctgcccagaagcgaggagcccgccagctgcaacggcaagctgcccctgggcgccgaggagagcgtggccccccccggcggcagcagaaaggaggtggccggcatggactacctggccgtgcccagccccctggcctggagcaaggccagaatcggcggccacagccccatcttcagaaccagcgccctgccccccctggactggcccctgcccagccagtacgagcagctggagctgagaatcgaggtgcagcccagagcccaccacagagcccactacgagaccgagggcagcagaggcgccgtgaaggccgcccccggcggccaccccgtggtgaagctgctgggctacagcgagaagcccctgaccctgcagatgttcatcggcaccgccgacgagagaaacctgagaccccacgccttctaccaggtgcacagaatcaccggcaagatggtggccaccgccagctacgaggccgtggtgagcggcaccaaggtgctggagatgaccctgctgcccgagaacaacatggccgccaacatcgactgcgccggcatcctgaagctgagaaacagcgacatcgagctgagaaagggcgagaccgacatcggcagaaagaacaccagagtgagactggtgttcagagtgcacgtgccccagggcggcggcaaggtggtgagcgtgcaggccgccagcgtgcccatcgagtgcagccagagaagcgcccaggagctgccccaggtggaggcctacagccccagcgcctgcagcgtgagaggcggcgaggagctggtgctgaccggcagcaacttcctgcccgacagcaaggtggtgttcatcgagagaggccccgacggcaagctgcagtgggaggaggaggccaccgtgaacagactgcagagcaacgaggtgaccctgaccctgaccgtgcccgagtacagcaacaagagagtgagcagacccgtgcaggtgtacttctacgtgagcaacggcagaagaaagagaagccccacccagagcttcagattcctgcccgtgatctgcaaggaggagcccctgcccgacagcagcctgagaggcttccccagcgccagcgccacccccttcggcaccgacatggacttcagcccccccagacccccctaccccagctacccccacgaggaccccgcctgcgagaccccctacctgagcgagggcttcggctacggcatgccccccctgtacccccagaccggccccccccccagctacagacccggcctgagaatgttccccgagaccagaggcaccaccggctgcgcccagccccccgccgtgagcttcctgcccagacccttccccagcgacccctacggcggcagaggcagcagcttcagcctgggcctgcccttcagcccccccgcccccttcagacccccccccctgcccgccagcccccccctggagggccccttccccagccagagcgacgtgcaccccctgcccgccgagggctacaacaaggtgggccccggctacggccccggcgagggcgcccccgagcaggagaagagcagaggcggctacagcagcggcttcagagacagcgtgcccatccagggcatcaccctggaggagggcggctgcggcaccggcggctgcgagtgcgagtgcgtgcaggagatcgccctgcacgtgtgctag

SEQ ID NO: 51657 - DNA, 2706 bp, Artificial Sequence
  derived and/or modified sequence
atgggcgccgccagctgcgaggacgaggagctggagttcaagctggtgttcggcgaggagaaggaggccccccccctgggcgccggcggcctgggcgaggagctggacagcgaggacgcccccccctgctgcagactggccctgggcgagccccccccctacggcgccgcccccatcggcatccccagaccccccccccccagacccggcatgcacagccccccccccagacccgcccccagccccggcacctgggagagccagcccgccagaagcgtgagactgggcggccccggcggcggcgccggcggcgccggcggcggcagagtgctggagtgccccagcatcagaatcaccagcatcagccccacccccgagccccccgccgccctggaggacaaccccgacgcctggggcgacggcagccccagagactaccccccccccgagggcttcggcggctacagagaggccggcggccagggcggcggcgccttcttcagccccagccccggcagcagcagcctgagcagctggagcttcttcagcgacgccagcgacgaggccgccctgtacgccgcctgcgacgaggtggagagcgagctgaacgaggccgccagcagattcggcctgggcagccccctgcccagccccagagccagccccagaccctggacccccgaggacccctggagcctgtacggccccagccccggcggcagaggccccgaggacagctggctgctgctgagcgcccccggccccacccccgccagccccagacccgccagcccctgcggcaagagaagatacagcagcagcggcacccccagcagcgccagccccgccctgagcagaagaggcagcctgggcgaggagggcagcgagccccccccccccccccccctgcccctggccagagaccccggcagccccggccccttcgactacgtgggcgccccccccgccgagagcatcccccagaagaccagaagaaccagcagcgagcaggccgtggccctgcccagaagcgaggagcccgccagctgcaacggcaagctgcccctgggcgccgaggagagcgtggccccccccggcggcagcagaaaggaggtggccggcatggactacctggccgtgcccagccccctggcctggagcaaggccagaatcggcggccacagccccatcttcagaaccagcgccctgccccccctggactggcccctgcccagccagtacgagcagctggagctgagaatcgaggtgcagcccagagcccaccacagagcccactacgagaccgagggcagcagaggcgccgtgaaggccgcccccggcggccaccccgtggtgaagctgctgggctacagcgagaagcccctgaccctgcagatgttcatcggcaccgccgacgagagaaacctgagaccccacgccttctaccaggtgcacagaatcaccggcaagatggtggccaccgccagctacgaggccgtggtgagcggcaccaaggtgctggagatgaccctgctgcccgagaacaacatggccgccaacatcgactgcgccggcatcctgaagctgagaaacagcgacatcgagctgagaaagggcgagaccgacatcggcagaaagaacaccagagtgagactggtgttcagagtgcacgtgccccagggcggcggcaaggtggtgagcgtgcaggccgccagcgtgcccatcgagtgcagccagagaagcgcccaggagctgccccaggtggaggcctacagccccagcgcctgcagcgtgagaggcggcgaggagctggtgctgaccggcagcaacttcctgcccgacagcaaggtggtgttcatcgagagaggccccgacggcaagctgcagtgggaggaggaggccaccgtgaacagactgcagagcaacgaggtgaccctgaccctgaccgtgcccgagtacagcaacaagagagtgagcagacccgtgcaggtgtacttctacgtgagcaacggcagaagaaagagaagccccacccagagcttcagattcctgcccgtgatctgcaaggaggagcccctgcccgacagcagcctgagaggcttccccagcgccagcgccacccccttcggcaccgacatggacttcagcccccccagacccccctaccccagctacccccacgaggaccccgcctgcgagaccccctacctgagcgagggcttcggctacggcatgccccccctgtacccccagaccggccccccccccagctacagacccggcctgagaatgttccccgagaccagaggcaccaccggctgcgcccagccccccgccgtgagcttcctgcccagacccttccccagcgacccctacggcggcagaggcagcagcttcagcctgggcctgcccttcagcccccccgcccccttcagacccccccccctgcccgccagcccccccctggagggccccttccccagccagagcgacgtgcaccccctgcccgccgagggctacaacaaggtgggccccggctacggccccggcgagggcgcccccgagcaggagaagagcagaggcggctacagcagcggcttcagagacagcgtgcccatccagggcatcaccctggaggagggcggctgcggcaccggcggctgcgagtgcgagtgcgtgcaggagatcgccctgcacgtgtgctag

SEQ ID NO: 51658 - DNA, 2805 bp, Artificial Sequence
  derived and/or modified sequence
atggccgacggcggcgccgacagcgccgcccagagactgcccgagggccccggcagagtggcccccggcagagacctgggcgcccccgccggcagcatgggcgccgccagctgcgaggacgaggagctggagttcaagctggtgttcggcgaggagaaggaggccccccccctgggcgccggcggcctgggcgaggagctggacagcgaggacgcccccccctgctgcagactggccctgggcgagccccccccctacggcgccgcccccatcggcatccccagaccccccccccccagacccggcatgcacagccccccccccagacccgcccccagccccggcacctgggagagccagcccgccagaagcgtgagactgggcggccccggcggcggcgccggcggcgccggcggcggcagagtgctggagtgccccagcatcagaatcaccagcatcagccccacccccgagccccccgccgccctggaggacaaccccgacgcctggggcgacggcagccccagagactaccccccccccgagggcttcggcggctacagagaggccggcggccagggcggcggcgccttcttcagccccagccccggcagcagcagcctgagcagctggagcttcttcagcgacgccagcgacgaggccgccctgtacgccgcctgcgacgaggtggagagcgagctgaacgaggccgccagcagattcggcctgggcagccccctgcccagccccagagccagccccagaccctggacccccgaggacccctggagcctgtacggccccagccccggcggcagaggccccgaggacagctggctgctgctgagcgcccccggccccacccccgccagccccagacccgccagcccctgcggcaagagaagatacagcagcagcggcacccccagcagcgccagccccgccctgagcagaagaggcagcctgggcgaggagggcagcgagccccccccccccccccccctgcccctggccagagaccccggcagccccggccccttcgactacgtgggcgccccccccgccgagagcatcccccagaagaccagaagaaccagcagcgagcaggccgtggccctgcccagaagcgaggagcccgccagctgcaacggcaagctgcccctgggcgccgaggagagcgtggccccccccggcggcagcagaaaggaggtggccggcatggactacctggccgtgcccagccccctggcctggagcaaggccagaatcggcggccacagccccatcttcagaaccagcgccctgccccccctggactggcccctgcccagccagtacgagcagctggagctgagaatcgaggtgcagcccagagcccaccacagagcccactacgagaccgagggcagcagaggcgccgtgaaggccgcccccggcggccaccccgtggtgaagctgctgggctacagcgagaagcccctgaccctgcagatgttcatcggcaccgccgacgagagaaacctgagaccccacgccttctaccaggtgcacagaatcaccggcaagatggtggccaccgccagctacgaggccgtggtgagcggcaccaaggtgctggagatgaccctgctgcccgagaacaacatggccgccaacatcgactgcgccggcatcctgaagctgagaaacagcgacatcgagctgagaaagggcgagaccgacatcggcagaaagaacaccagagtgagactggtgttcagagtgcacgtgccccagggcggcggcaaggtggtgagcgtgcaggccgccagcgtgcccatcgagtgcagccagagaagcgcccaggagctgccccaggtggaggcctacagccccagcgcctgcagcgtgagaggcggcgaggagctggtgctgaccggcagcaacttcctgcccgacagcaaggtggtgttcatcgagagaggccccgacggcaagctgcagtgggaggaggaggccaccgtgaacagactgcagagcaacgaggtgaccctgaccctgaccgtgcccgagtacagcaacaagagagtgagcagacccgtgcaggtgtacttctacgtgagcaacggcagaagaaagagaagccccacccagagcttcagattcctgcccgtgatctgcaaggaggagcccctgcccgacagcagcctgagaggcttccccagcgccagcgccacccccttcggcaccgacatggacttcagcccccccagacccccctaccccagctacccccacgaggaccccgcctgcgagaccccctacctgagcgagggcttcggctacggcatgccccccctgtacccccagaccggccccccccccagctacagacccggcctgagaatgttccccgagaccagaggcaccaccggctgcgcccagccccccgccgtgagcttcctgcccagacccttccccagcgacccctacggcggcagaggcagcagcttcagcctgggcctgcccttcagcccccccgcccccttcagacccccccccctgcccgccagcccccccctggagggccccttccccagccagagcgacgtgcaccccctgcccgccgagggctacaacaaggtgggccccggctacggccccggcgagggcgcccccgagcaggagaagagcagaggcggctacagcagcggcttcagagacagcgtgcccatccagggcatcaccctggaggaggtgagcgagatcatcggcagagacctgagcggcttccccgccccccccggcgaggagccccccgcctag

SEQ ID NO: 51659 - DNA, 2895 bp, Artificial Sequence
  derived and/or modified sequence
atgatcacaacactgccctccctgctgcccgcttccctcgcttccatatctcaccgggtgactaacctgcctagtaactcactttcacataacccaggcctgtccaagccggatttccccgggaatagctcccccggtcttccaagctcctcttctcccggccgggacctgggagcacccgcagggagcatgggcgctgcgtcctgcgaggatgaagaattggagttcaaactggtcttcggggaggaaaaagaagctccccccctgggcgccggggggcttggcgaagagctcgactctgaagatgcaccaccatgctgtagacttgccttgggggagccccctccatacggagccgctcccatcggcatccccaggccacctcccccaaggcccggaatgcatagtcccccgcctaggcccgcgccatctccaggaacttgggagtctcagccagcccgatcagtgagattgggtggccctggagggggcgctggcggagccgggggggggcgagtactcgagtgcccctcaatcaggatcacctcaatatctccaacccctgaaccccccgccgcactagaggacaacccagacgcctggggggatggctcccctcgggattatccaccccccgagggattcggtgggtatcgggaggctggcggccaaggggggggtgcctttttttccccatctccaggctctagttctctgtcatcatggagctttttctcagacgctagtgacgaagctgcattgtacgccgcttgcgatgaagtggaatcagagctgaacgaggccgccagtagatttggcctcgggtcaccactgccatccccacgggctagccctcgaccttggactccagaggatccctggtccttgtatggaccctctccaggcggaagaggtcccgaggatagttggctcctgttaagtgcaccaggaccaacccccgctagtccaaggccagctagtccctgcgggaaacggaggtactcctcttctgggaccccctcttctgcctcaccagctctgtctcggcgcggttctctcggggaagaggggagcgagcccccaccacccccacccctcccccttgcccgggatcctggttcaccaggcccattcgactatgtgggtgccccccccgcagaatctattcctcagaaaactagaagaacctcatccgagcaagccgtcgcgttacccaggagcgaagagccggcatcttgtaatggtaaactaccgctaggcgccgaggaaagtgtggcccccccaggtgggagccgtaaggaggttgccggaatggattacctcgcggtcccatcgcctctggcgtggagcaaggcgagaatcggtggtcatagccccattttcagaacgtccgccctgcctcccctggactggccactgcccagtcagtacgagcagctggagctcaggatcgaggtgcagccacgagcgcatcatcgtgcccattatgaaacagagggcagtcgtggcgccgtaaaggcggccccaggtgggcatcctgtcgttaaacttctgggttactccgaaaaaccattaacactgcagatgtttataggtacagcggacgaacgcaacctccggccccatgctttctaccaagttcacagaattacaggaaaaatggtggctacagccagctatgaggccgtggtttctgggacaaaggtccttgagatgacactgctgcccgagaataacatggcagccaatattgattgcgccggaatcctgaaactgaggaattcagatattgaattacgaaaaggagagactgatatcggccggaagaacacccgtgtccgtctcgtgttccgcgtgcatgttccccagggcggcggaaaggttgtctccgtgcaggccgcgtctgttccaatcgaatgctcccagagaagcgctcaggagctcccccaagtagaggcctatagtccaagtgcatgctcggtgcgaggcggcgaggagctggtactcactgggagcaatttcctcccggactcaaaagtggtgtttattgaaagaggtccagatggaaagctccaatgggaggaggaggccacggtgaacaggcttcaaagtaacgaagtgaccctcaccctgactgtgcctgagtatagcaacaagcgggtcagccgcccagtccaggtctatttttatgtaagcaatggtagaagaaagcggtccccaactcagagcttccgatttctccccgtcatttgtaaagaggaacccttacccgattccagtcttaggggcttcccatccgcctccgcaacacccttcgggaccgatatggacttttcaccaccacgaccaccatatccctcctacccacacgaggaccccgcatgcgaaaccccctacctgtcagagggttttggctatggcatgccgccactgtatccgcaaaccggacctccaccatcttatagacccggacttagaatgttccccgagactcgggggacaaccggctgcgctcagccgccagctgtatcattcctgccaagaccttttccatccgacccttacgggggccgcggatcttctttctcgctgggcctgcctttttccccaccagccccatttcgcccgccacccctgccagcgtctccacccctggagggcccctttccatcacaatctgatgtgcaccccctacccgctgagggatataacaaggtaggtccaggctacgggcccggagagggagctcccgaacaagagaaatctcgcggggggtactccagtggatttcgggacagcgtgcctattcagggaataaccctggaagagggaggttgtggcactggcggttgtgagtgtgaatgcgtgcaggagatagccttacatgtctgttag

SEQ ID NO: 51660 - DNA, 2745 bp, Artificial Sequence
  derived and/or modified sequence
atgctgtcagggagggacctcggggctccagccggctcaatgggggctgccagttgcgaggacgaggagctggagtttaaactcgtgtttggagaagaaaaggaagcacccccactaggagctggagggttaggcgaggagttggactccgaagatgccccaccctgttgccggctggctctcggagaacctcctccgtatggcgctgccccaatcgggatacccagaccccctccacctcggccaggtatgcattccccaccccctagacctgcacccagtcccgggacttgggagagccaacctgctcgctctgtgcgcctggggggcccaggtggaggggccggcggggctggcggcggccgagtgctggagtgtccaagcatcagaatcacgagcattagccccactccagaacctccagccgctttagaagataatcctgacgcatggggcgatggatcaccacgggattatcccccaccagagggatttggggggtatcgtgaagcaggcggacagggcggcggcgcctttttcagtccgtcccctggttcctcttcactgagttcttggtcattttttagcgatgcctctgatgaagctgccctgtacgctgcttgtgatgaggtcgagagcgagcttaatgaggccgcctcccgctttggattggggtcccccctaccatcccctagggctagtccccgcccatggacgccagaagacccttggagcttgtatggacctagccctggaggccgtggacccgaggacagttggcttctgctatcggcccccggacccacgcctgctagtccgaggcccgcgtcaccgtgcggaaaaaggcggtatagctcgagtggaaccccatcttccgccagcccagcgctgtcacggcgaggaagtctcggtgaagaggggagcgagcccccgccaccgccacctctgcctctcgcgagagatcctggttctccaggcccatttgactatgtcggagctccccccgctgagagcatcccacagaaaacgaggagaaccagctcagagcaggcagtcgcactacctagatccgaagaaccagcaagctgcaatggcaagctacctctcggggccgaggagtccgttgcccctccaggcgggtcccggaaagaagtcgctggcatggactacctagctgtgccttcacccttggcttggtcaaaggcaagaattggcggacacagtcccatattccgaaccagcgctctcccccctttggattggccgcttccaagtcagtacgagcaacttgaactccgcatcgaggtacagccgcgggcccaccaccgagcccattatgagacagaaggcagtaggggtgccgtaaaagccgcaccgggcggtcatcccgtggtcaagcttctcggttattctgagaaacctctgacgctccagatgtttattggtacagccgatgagaggaacctgagacctcacgctttttatcaggtccaccggattaccggaaaaatggtggcaactgcaagttatgaggcggtagtaagcggaactaaggtgctcgagatgaccctgttgcccgagaacaatatggcagcaaacatagactgtgccgggatcttaaaactgcgtaactctgatattgagctgcgaaaaggcgagaccgacattgggcggaaaaatactcgtgtgagactggtatttcgggtgcatgttccacagggaggaggtaaagtcgtcagcgtccaggccgcctctgtgccaatcgaatgttcacagcgatcagcccaggaactcccacaggttgaggcgtactctccgtccgcttgctctgtcagaggcggggaagagctggtgctgacaggctctaattttctccctgattctaaggtcgttttcattgagcgaggccccgacggaaaactccagtgggaagaagaggcgaccgtcaacagactccagtctaacgaagtcacactgacccttaccgtccctgaatacagcaataagagagtttccaggccggtgcaggtgtatttttacgtgtcgaatgggcggcgaaaaagatccccaacgcagtccttccggttcttgcctgtgatctgtaaagaggagccccttcccgatagctccttacgtggattcccctcagcgtcagctacacctttcgggacggatatggatttctcgccgcctcgaccaccttacccctcctatccgcatgaagaccctgcctgtgagacaccctacctgagcgaaggctttggatacggcatgccacccctgtatccacagaccggccctcctccaagctaccggcctggattacggatgttcccagagacccgcggtaccacagggtgcgcacagcctccggccgtatcatttctgccccgaccttttcccagtgacccatacgggggccgggggagcagtttcagtctgggcctgcccttttcccccccggctcctttccgtccaccccccttaccagcatccccccctcttgagggtccgtttccttctcagagtgacgtgcaccccctcccggcagaaggctacaacaaagtgggccctggctacggccctggcgagggtgccccagaacaggaaaagagccgcggaggctattcaagtggattcagagactctgttcctatccagggtatcacactggaagaagggggctgcggtactggcgggtgtgaatgcgaatgcgtgcaagagattgcactgcatgtatgttag

SEQ ID NO: 51661 - DNA, 2802 bp, Artificial Sequence
  derived and/or modified sequence
atggcagatggcggggccgattctgccgcccagcgactgcccgaagggccgggaagagtcgctcccggaagagatcttggagctccggctgggagtatgggcgccgccagctgtgaggatgaagagctcgaatttaagctcgtttttggagaggaaaaagaggccccccccttaggcgctggagggctgggggaagagctggatagcgaggacgccccaccctgttgcaggctggcactgggcgagccaccgccttacggcgctgctcccattggaatcccaaggccacccccaccccgccctggaatgcacagtcccccacctcgccctgcccctagcccgggtacttgggaaagccaacccgctaggagcgtaaggttgggaggacccggaggcggtgctgggggtgcgggcgggggccgcgtgctggagtgcccctctatcaggatcacgtcgattagccctaccccagaaccccccgccgctcttgaagataaccccgacgcctggggtgatggttcgccccgtgactacccaccaccagagggatttggcggctacagagaagctggcggccagggcggaggagcctttttcagtccaagtcccggatcatcttctctatctagctggtcctttttctctgacgcatcggacgaagccgcgctgtacgcagcttgcgacgaagtggagtccgagctgaacgaagccgccagtcgatttggactgggatcccctttaccctcgcctcgtgctagccccagaccctggacccccgaggatccctggtccctgtatggtccttcacctggaggcagaggccccgaagattcttggctgcttctatccgcgcctggtccgacccctgcaagtcctcgcccagcttcaccctgcggtaaacgccgttactcgagcagcgggacccccagttcagcgagcccagcactgtcaagaaggggaagcctcggcgaggagggtagtgagcctccacctcctccgcccctgccactggccagggaccccggcagtcctggcccctttgactatgtgggagctcctcccgctgagtccattcctcaaaagaccagaagaactagctcggagcaggcagttgccttgcctagaagtgaagagcctgcttcctgcaatggtaaattgcctctgggtgccgaagaatcagtggccccgcccgggggcagccgcaaggaggttgcagggatggattacttggctgtgccctcaccacttgcctggtcaaaagccagaattggaggtcattcccctatattccgaacctctgccttaccccccctcgattggcctctgcccagtcaatatgaacagctggaacttcgcattgaagtccagcccagggcgcaccatagggcccactacgagactgaaggcagtcgaggggcagtgaaggcagccccaggagggcatcctgttgtgaagttactggggtacagcgaaaagccacttaccctgcagatgttcatcggcactgcggacgaacggaacttacggccccacgcgttttatcaagttcaccgtatcaccggcaagatggtggcaaccgcgtcatacgaggccgttgtgtccggtacaaaagttctcgagatgacccttctgcccgaaaacaacatggcagccaatatcgactgtgcagggatcctcaagcttcgtaatagcgatattgagctgcgtaagggtgaaaccgatattgggcggaaaaacacccgggtgagattggtcttccgggttcacgtgccacagggcggcggcaaagtcgtctccgtccaggcggcaagtgtcccaatcgaatgcagtcagcgatccgcgcaggagctcccacaggtggaagcctactcacccagcgcatgctccgtacggggaggggaggaattggttctgaccggatctaactttctcccggacagcaaagtcgttttcattgaaaggggaccagacgggaaactccaatgggaggaggaagccaccgtcaacaggctgcaatcgaatgaggtgacccttacgcttactgtgccagaatattctaacaagcgggtgtcaaggccagtgcaagtgtatttctatgtgagtaatggacgcaggaaacgcagtcctacccaaagttttagattcctcccagttatctgtaaagaagagcctttgccagacagcagcctgcgcggctttccaagtgcctccgccactccattcggaaccgacatggacttctctcctcctcgccccccttacccatcttacccccacgaggatccagcctgcgagaccccttatctttcagagggcttcgggtacgggatgcctcccctgtacccccagaccggccctcctccaagctatcggcctggcctgagaatgttccctgaaacaaggggaaccacagggtgtgcccagcccccggccgtcagctttctgcccagacctttccccagcgacccttatgggggcagaggcagttcattttcgctgggtctccctttttcacctccggccccctttagacccccccccctccccgcttctccgccattagagggccctttcccgagccagagcgacgttcatcccctaccagcagaaggttataataaggtaggtcccggctacggccccggcgagggagcgccagagcaggagaaaagcaggggtggatattcatctggatttcgcgatagcgtaccaattcaaggaattacgcttgaggagggtgggtgcggcacagggggctgtgaatgcgagtgcgtgcaggaaatcgcacttcatgtatgttag

SEQ ID NO: 51662 - DNA, 2706 bp, Artificial Sequence
  derived and/or modified sequence
atgggtgccgcctcctgtgaggacgaggaactggaatttaagttggtgttcggcgaggagaaagaagcgcccccccttggcgcaggcgggttgggggaggagctggactccgaggacgcacctccctgctgtcgcctagccctgggagagcccccaccatacggtgcagcccccattggcattccacgacctcctccgcccagaccaggaatgcattctcctcctccgcgtccagctccctcacccggaacttgggagtctcagcccgctagatcagtccggcttggagggcctggaggcggagccgggggagcaggtggggggagagtgttggagtgccccagcatccgtatcacctccatcagtcctaccccagagccacccgcggctttggaagacaaccctgatgcctggggagacggcagcccccgcgattatccaccaccagagggcttcgggggatacagagaggccggaggccaggggggaggagctttttttagcccgtctcctgggagttccagcttgagctcttggtcattctttagcgacgctagtgatgaggctgctttatatgccgcttgcgacgaggtggaaagcgaattaaacgaggcagcttcacgtttcggcctaggatctcccctgcctagtccaagagcctctccgagaccatggacacccgaggacccgtggtcactgtatggaccttcacctggcgggcgcggaccagaagatagctggctgttgctttctgcccctggcccgacgcccgcaagcccacgaccagccagcccatgtggcaagaggcgctactccagcagcggaaccccctctagtgccagtcccgctctgtcccggcggggctcattaggggaagagggaagcgagcctcctcctccacctcccctgcctctggcccgggaccccggatcaccaggtccctttgactatgttggtgcccctcctgcggagagcattcctcagaagaccaggcgcacgtcctcagagcaagctgtggcgttacctaggagcgaagagccagcgtcatgcaacggaaagttgccacttggggccgaggaatcggtagctccgcccggagggagtcgcaaggaagtggccggaatggattatcttgctgtccctagccctttggcatggtctaaggctaggatcggcggacattcccctatctttcgcaccagcgctctacctcccctcgactggcctttgccttcccaatacgaacagctggagctgagaatagaggtacagccacgggctcatcatcgggcccattacgaaaccgaagggtcccgtggcgccgtaaaggcagccccaggcggccacccagttgtgaagctcctaggttactcggagaagcccctgactcttcaaatgttcatcggtaccgctgacgaaaggaatctgcgcccccatgcattctatcaggtgcataggatcaccggaaaaatggtggccactgcttcctacgaagctgtggtcagcggcactaaggtcttagaaatgacactcttgccagaaaacaacatggccgccaatattgactgtgccgggatactgaagctgaggaattctgacatcgagttacgaaagggagaaactgacatcgggcgtaaaaatacccgcgtgagactggttttccgggtccatgtaccccagggggggggtaaggtggtctctgtccaggctgcatcagtgccaattgaatgcagtcaaaggtcggctcaggagctgccgcaggttgaagcctattctccttcggcttgtagcgtccgagggggtgaggagctggtcctaacggggtctaatttccttccggactccaaagtcgtgttcatcgagcgcggaccggatggtaagctgcagtgggaagaagaagctaccgtgaaccggctgcagtctaacgaggtgaccctgactctcaccgtgcccgaatacagtaataaacgcgtgagtaggccagtacaggtgtacttttacgtcagtaatggccgcaggaaaagatcgccaacccaaagttttagattcctacctgtgatttgtaaggaagagcccttgccagacagttccctgcgggggtttcccagtgcctctgccaccccctttggcaccgatatggacttttcacccccacgccctccataccctagctatcctcacgaggaccctgcttgtgaaactccctatctgtcggaggggttcggctatggtatgccacctctctaccctcaaaccggaccgcccccttcataccggccaggtttgaggatgtttcccgagacccgtggtactaccggctgcgcgcagccgccggctgtgtcattcttacctaggccttttcccagcgacccttacggggggcgaggctcttccttctccttaggacttcctttctccccacctgccccatttagacctccgccgttgcccgcttctcctccattggagggtccttttccttcccagtcagacgtgcatcccctgccagccgaaggatataacaaagttgggccagggtatgggcccggggagggcgccccagagcaggaaaaatccaggggaggttactcgtcaggattccgtgacagcgtacccatccagggtattaccctggaagagggtggctgtggtacgggaggatgcgaatgcgagtgcgtacaggaaattgccctccacgtgtgttag

SEQ ID NO: 51663 - DNA, 2805 bp, Artificial Sequence
  derived and/or modified sequence
atggccgacggaggcgctgatagtgcagctcagaggctccccgagggacccggacgggtggctccggggcgggacctgggggccccggcaggtagcatgggcgctgcctcctgcgaggatgaggagctcgagtttaagctcgttttcggggaggagaaggaggcgcccccacttggagccggcgggctgggtgaggaacttgactcagaggacgcccctccatgctgtagactggctttgggggagccaccaccttacggagctgcacccattggcataccacggccacctcccccgcgccccggaatgcacagtccccccccacgccctgctccctcgccagggacttgggaatcgcagccagcgagaagtgtgcgacttggtggcccaggcggcggtgccggaggagcaggcggcgggagagtgctggaatgtccatcaatccgaatcacctcaatcagccctaccccggaaccaccagcagctctggaagataatccagatgcttggggcgacgggtcacctagagattatccacctcccgaaggctttgggggatatagggaagcaggcggacaggggggaggagctttcttttcaccttcacctggaagctcttctctgagctcatggagtttcttcagcgacgcctcagacgaagcagccctgtatgccgcgtgtgatgaagtggagagcgaactcaacgaggcggcctcgagatttggacttgggagtccacttccatcgccccgggctagcccacggccatggacccctgaagacccctggtcgctgtacggacccagcccgggtgggaggggccccgaggatagctggcttctactgagtgcacctgggcccaccccggcatccccacgccctgctagcccctgtggtaagcgccggtatagctcgtccgggacaccctcttcggcctcaccggcattgagccgccgcggtagcctcggcgaggagggatctgagcccccaccaccacctccactgcctcttgcgcgggacccaggctctccgggaccgtttgattacgtgggggcaccacctgcggagtcaataccccagaagacgaggcgcacttcttctgagcaagctgtcgccctcccacgtagcgaggagccagcttcgtgtaacgggaagctgccactgggggccgaggagtcagtggcgccccccggcgggagccggaaggaggtggccggtatggattacctagcagtcccctcaccattggcctggagcaaggcacggatcggtgggcatagtccaatcttcagaacaagcgcactacctcctttggactggccactgccatctcagtacgaacagcttgagctgcgtattgaagttcagccaagagcacatcatagagcccactatgaaacggaaggaagtcgaggcgctgtgaaggccgcccccggcggccaccccgtagtgaagctgcttggatattctgagaagcctctgacactacagatgtttattggtaccgcagatgagcgcaatctacgcccacacgctttttatcaggtccacaggatcaccggcaaaatggtcgcaactgcctcttacgaggctgtcgtttccgggactaaggtgttagagatgaccctgctgcctgagaataacatggcggcaaacatcgactgcgccgggatactgaaactaaggaacagcgatatcgagctgagaaaaggcgaaactgacattggccgtaagaatacgagagttagattagtcttccgagttcatgtcccacagggaggtggtaaggtcgtctcagtccaagctgcatcagtgcctattgagtgtagccagaggtcagcacaggaacttccacaggtcgaggcctatagcccaagcgcttgctcagtccgaggcggcgaagagctggtgctgacagggagtaattttcttcctgacagcaaggtggtgtttatcgaaagggggcccgacggtaagttgcagtgggaagaggaagccacagtcaatcgcctgcaatctaacgaggtcaccctcactctgaccgtccccgagtatagcaataaacgcgtgtcgcgcccagtacaggtctatttttacgtttccaacggccggcggaaacggagccccacacagagctttagatttctgccagttatctgcaaagaggagccactccccgactcttcattacgaggctttccctcagcatctgccactccttttggtaccgatatggatttttcccccccaaggcccccttatccaagctatccccacgaagaccccgcatgcgaaaccccttacctttccgaagggttcggctatggtatgccccctctgtaccctcaaaccggccctccaccttcatataggcccggccttcgaatgtttccggaaacacgggggacaaccggttgcgctcagccccccgccgtttctttcttgcctcggcccttcccaagcgacccatacggcggacgaggatcttcattttctttgggactcccattctctcctccagcaccattcaggcccccacctctcccagcatcccctccgctcgagggacctttcccgtcccagtcagatgtgcatccactgcctgccgaaggatacaacaaggtgggacctggttacggcccaggcgagggagcccctgagcaggagaagagccgaggtggttactctagcggctttcgcgactcggtcccaattcagggcatcacactcgaggaagtgtcagagattattggccgggatctttccgggttccccgcccctcccggggaggagccgcctgcttag

SEQ ID NO: 51664 - DNA, 2895 bp, Artificial Sequence
  derived and/or modified sequence
atgatcaccaccctgcccagcctgctgcctgccagcctggccagcatcagccaccgggtgaccaacctgcccagcaacagcctgagccacaaccctggcctgagcaagccagacttccctggcaacagcagccctggcctgcccagcagcagcagccctggccgggacctgggcgccccagctggctccatgggcgccgccagctgtgaagatgaggagctggagttcaagctggtgtttggagaggagaaggaggccccacccctgggcgccggcggcctgggggaggagctggacagtgaagatgccccaccctgctgccgcctggccctgggggagcccccaccctatggagctgcccccatcggcatccccaggcctcctccaccccggcccggcatgcacagccccccacccaggcctgcccccagccctggcacctgggagagccagcctgcccggtctgtgcggctgggcggccctgggggcggggccggcggggccggcggcggccgggtgctggagtgccccagcatccgcatcaccagcatcagccccaccccagagcccccagctgccctggaggacaacccagatgcctggggagatggcagcccccgggactacccacctcctgagggctttggaggctaccgggaggccggcggccagggcggcggggccttcttcagccccagccctggcagcagcagcctgagctcctggagcttcttcagtgatgccagtgatgaggccgccctgtatgctgcctgtgatgaggtggagagcgagctgaatgaggccgccagccgcttcggcctgggcagccccctgcccagcccccgggccagcccccggccctggaccccagaggacccctggagcctgtatggccccagccctgggggccggggcccagaagattcctggctgctgctgagcgcccctggccccaccccagccagccccaggcctgccagcccctgtgggaagaggcgctacagcagcagcggcacccccagcagcgccagccctgccctgagcagaagaggcagcctgggggaggagggcagcgagcccccacctcctccacccctgcccctggcccgggaccccggcagccctggcccctttgattatgtgggcgcccccccagctgagagcatcccccagaagaccaggaggaccagcagcgagcaggccgtggccctgcccaggtctgaggagcccgccagctgcaatggcaagctgcccctgggcgctgaggagagcgtggcccctcctgggggcagcaggaaggaggtggccggcatggactacctggccgtgcccagccccctggcctggagcaaggcccgcatcggcggccacagccccatcttccgcaccagcgccctgccccccctggactggcccctgcccagccagtatgagcagctggagctgcgcatcgaggtgcagccccgggcccaccaccgggcccactatgaaacagagggcagcagaggagctgtgaaggccgcccctgggggccaccctgtggtgaagctgctgggctacagcgagaagcccctgaccctgcagatgtttattggaacagcagatgaaagaaacctgcggccccacgccttctaccaggtgcaccgcatcaccgggaagatggtggccacagccagctatgaggccgtggtgtctggcaccaaggtgctggagatgaccctgctgcctgagaacaacatggccgccaacatcgactgtgccggcatcctgaagctgaggaacagcgacatcgagctgaggaaaggagaaacagacatcggcaggaagaacaccagggtgcggctggtgttccgggtgcacgtgccccagggcggcggcaaggtggtgtctgtgcaggccgcctctgtgcccattgaatgttcccagaggtctgcccaggagctgccccaggtggaggcctacagccccagcgcctgcagcgtgcggggcggggaggagctggtgctgaccggcagcaacttcctgcctgacagcaaggtggtgttcatcgagcggggcccagatggcaagctgcagtgggaggaggaggccaccgtgaaccggctgcagagcaatgaggtgaccctgaccctgactgtgcctgagtacagcaacaagagggtgtccaggcctgtgcaggtgtacttctacgtgtccaatggaagaaggaagaggagccccacccagagcttccgcttcctgcccgtcatctgcaaggaggagcccctgcctgacagcagcctgcggggcttccccagcgccagcgccacccccttcggcacagacatggacttcagcccccccaggcctccctaccccagctacccccatgaagatcctgcctgtgagaccccctacctgtctgagggcttcggctacggcatgccacccctgtacccccagacaggccccccacccagctacagacctggcctgaggatgtttcctgagacccggggcaccaccggctgtgcccagcccccagctgtgtccttcctgccccggcccttccccagcgacccctatggaggccggggcagcagcttcagcctgggcctgcccttcagccccccagcccccttccggcccccacccctgcctgccagcccccccctggagggccccttccccagccagagtgatgtgcaccccctgcctgctgagggctacaacaaggtgggccctggctacggccctggagagggcgcccctgagcaggagaagagccggggcggctacagcagcggcttccgggacagcgtgcccatccagggcatcaccctggaggagggcggctgcggcaccggcggctgtgaatgtgaatgtgtgcaggagatcgccctgcacgtgtgctag

SEQ ID NO: 51665 - DNA, 2745 bp, Artificial Sequence
  derived and/or modified sequence
atgctgagcggccgggacctgggcgccccagctggctccatgggcgccgccagctgtgaagatgaggagctggagttcaagctggtgtttggagaggagaaggaggccccacccctgggcgccggcggcctgggggaggagctggacagtgaagatgccccaccctgctgccgcctggccctgggggagcccccaccctatggagctgcccccatcggcatccccaggcctcctccaccccggcccggcatgcacagccccccacccaggcctgcccccagccctggcacctgggagagccagcctgcccggtctgtgcggctgggcggccctgggggcggggccggcggggccggcggcggccgggtgctggagtgccccagcatccgcatcaccagcatcagccccaccccagagcccccagctgccctggaggacaacccagatgcctggggagatggcagcccccgggactacccacctcctgagggctttggaggctaccgggaggccggcggccagggcggcggggccttcttcagccccagccctggcagcagcagcctgagctcctggagcttcttcagtgatgccagtgatgaggccgccctgtatgctgcctgtgatgaggtggagagcgagctgaatgaggccgccagccgcttcggcctgggcagccccctgcccagcccccgggccagcccccggccctggaccccagaggacccctggagcctgtatggccccagccctgggggccggggcccagaagattcctggctgctgctgagcgcccctggccccaccccagccagccccaggcctgccagcccctgtgggaagaggcgctacagcagcagcggcacccccagcagcgccagccctgccctgagcagaagaggcagcctgggggaggagggcagcgagcccccacctcctccacccctgcccctggcccgggaccccggcagccctggcccctttgattatgtgggcgcccccccagctgagagcatcccccagaagaccaggaggaccagcagcgagcaggccgtggccctgcccaggtctgaggagcccgccagctgcaatggcaagctgcccctgggcgctgaggagagcgtggcccctcctgggggcagcaggaaggaggtggccggcatggactacctggccgtgcccagccccctggcctggagcaaggcccgcatcggcggccacagccccatcttccgcaccagcgccctgccccccctggactggcccctgcccagccagtatgagcagctggagctgcgcatcgaggtgcagccccgggcccaccaccgggcccactatgaaacagagggcagcagaggagctgtgaaggccgcccctgggggccaccctgtggtgaagctgctgggctacagcgagaagcccctgaccctgcagatgtttattggaacagcagatgaaagaaacctgcggccccacgccttctaccaggtgcaccgcatcaccgggaagatggtggccacagccagctatgaggccgtggtgtctggcaccaaggtgctggagatgaccctgctgcctgagaacaacatggccgccaacatcgactgtgccggcatcctgaagctgaggaacagcgacatcgagctgaggaaaggagaaacagacatcggcaggaagaacaccagggtgcggctggtgttccgggtgcacgtgccccagggcggcggcaaggtggtgtctgtgcaggccgcctctgtgcccattgaatgttcccagaggtctgcccaggagctgccccaggtggaggcctacagccccagcgcctgcagcgtgcggggcggggaggagctggtgctgaccggcagcaacttcctgcctgacagcaaggtggtgttcatcgagcggggcccagatggcaagctgcagtgggaggaggaggccaccgtgaaccggctgcagagcaatgaggtgaccctgaccctgactgtgcctgagtacagcaacaagagggtgtccaggcctgtgcaggtgtacttctacgtgtccaatggaagaaggaagaggagccccacccagagcttccgcttcctgcccgtcatctgcaaggaggagcccctgcctgacagcagcctgcggggcttccccagcgccagcgccacccccttcggcacagacatggacttcagcccccccaggcctccctaccccagctacccccatgaagatcctgcctgtgagaccccctacctgtctgagggcttcggctacggcatgccacccctgtacccccagacaggccccccacccagctacagacctggcctgaggatgtttcctgagacccggggcaccaccggctgtgcccagcccccagctgtgtccttcctgccccggcccttccccagcgacccctatggaggccggggcagcagcttcagcctgggcctgcccttcagccccccagcccccttccggcccccacccctgcctgccagcccccccctggagggccccttccccagccagagtgatgtgcaccccctgcctgctgagggctacaacaaggtgggccctggctacggccctggagagggcgcccctgagcaggagaagagccggggcggctacagcagcggcttccgggacagcgtgcccatccagggcatcaccctggaggagggcggctgcggcaccggcggctgtgaatgtgaatgtgtgcaggagatcgccctgcacgtgtgctag

SEQ ID NO: 51666 - DNA, 2802 bp, Artificial Sequence
  derived and/or modified sequence
atggctgatggaggagctgacagcgctgcccagaggctgcctgagggccctggccgggtggcccctggccgggacctgggcgccccagctggctccatgggcgccgccagctgtgaagatgaggagctggagttcaagctggtgtttggagaggagaaggaggccccacccctgggcgctgggggcctgggggaggagctggacagtgaagatgccccaccctgctgccgcctggccctgggggagcccccaccctacggggccgcccccatcggcatcccccggcccccaccacccaggcctggcatgcacagccccccacccaggcctgcccccagccctggcacctgggagagccagcctgcccggtctgtgcggctgggcggccctgggggcggggccggcggggccggcggcggccgggtgctggagtgccccagcatccgcatcaccagcatcagccccaccccagagcccccagctgccctggaggacaacccagatgcctggggagatggcagcccccgggactacccacctcctgagggctttggaggctaccgggaggccggcggccagggcggcggggccttcttcagccccagccctggcagcagcagcctgagctcctggagcttcttcagtgatgccagtgatgaagctgccctgtatgctgcctgtgatgaggtggagagcgagctgaatgaagctgccagcagatttggcctgggcagccccctgcccagcccccgggccagcccccggccctggaccccagaggacccctggagcctgtatggccccagccctgggggccggggccctgaggacagctggctgctgctgagcgcccctggccccaccccagccagccccaggcctgccagcccctgtgggaagaggcgctacagcagcagcggcacccccagcagcgccagccctgccctgagccggcggggcagcctgggggaggagggcagcgagcccccacctcctccacccctgcccctggcccgggaccccggcagccctggcccctttgattatgtgggcgcccctcctgctgagagcatcccccagaagaccaggaggaccagcagcgagcaggccgtggccctgcccaggtctgaggagcccgccagctgcaatggcaagctgcccctgggcgctgaggagagcgtggcccctcctgggggcagcaggaaggaggtggccggcatggactacctggccgtgcccagccccctggcctggagcaaggccagaattggaggccacagccccatcttccgcaccagcgccctgccccccctggactggcccctgcccagccagtatgagcagctggagctgagaattgaggtgcagccccgggcccaccaccgggcccactatgaaacagagggcagcagaggagctgtgaaggccgcccctgggggccaccctgtggtgaagctgctgggctacagcgagaagcccctgaccctgcagatgttcatcggcacagcagatgagaggaacctgcggccccacgccttctaccaggtgcaccgcatcaccgggaagatggtggccacagccagctatgaagctgtggtgtctggcaccaaggtgctggagatgaccctgctgcctgagaacaacatggccgccaacatcgactgtgccggcatcctgaagctgaggaacagcgacatcgagctgaggaagggggagacagacattggaaggaagaacaccagggtgcggctggtgttccgggtgcacgtgccccagggcggcggcaaggtggtgtctgtgcaggccgcctctgtgcccatcgagtgcagccagaggtctgcccaggagctgccccaggtggaggcctacagccccagcgcctgcagcgtgcggggcggggaggagctggtgctgaccggcagcaacttcctgcctgacagcaaggtggtgttcatcgagcggggcccagatggcaagctgcagtgggaggaggaggccaccgtgaaccggctgcagagcaatgaggtgaccctgaccctgactgtgcctgagtacagcaacaagagggtgtccaggcctgtgcaggtgtacttctacgtgtccaatggccgcaggaagaggagccccacccagagcttccgcttcctgcctgtgatctgcaaggaggagcccctgcctgacagcagcctgcggggcttccccagcgccagcgccaccccatttggaacagacatggacttcagccccccccggcccccctaccccagctacccccatgaggaccctgcctgtgagaccccctacctgtctgagggcttcggctacggcatgccacccctgtacccccagacaggccccccacccagctaccggcccggcctgaggatgtttcctgagacccggggcaccaccggctgtgcccagcccccagctgtgtccttcctgccccggcccttccccagcgacccctacggcggccggggcagcagcttcagcctgggcctgcccttcagccccccagcccccttccggcccccacccctgcctgccagcccccccctggagggccccttccccagccagagtgatgtgcaccccctgcctgctgagggctacaacaaggtgggccctggctacggccctggagagggcgcccctgagcaggagaagagcagaggaggctacagcagcggcttccgggacagcgtgcccatccagggcatcaccctggaggagggcggctgcggcactggaggctgtgaatgtgaatgtgtgcaggagatcgccctgcacgtgtgctag

SEQ ID NO: 51667 - DNA, 2706 bp, Artificial Sequence
  derived and/or modified sequence
atgggcgccgccagctgtgaagatgaggagctggagttcaagctggtgtttggagaggagaaggaggccccacccctgggcgctgggggcctgggggaggagctggacagtgaagatgccccaccctgctgccgcctggccctgggggagcccccaccctacggggccgcccccatcggcatcccccggcccccaccacccaggcctggcatgcacagccccccacccaggcctgcccccagccctggcacctgggagagccagcctgcccggtctgtgcggctgggcggccctgggggcggggccggcggggccggcggcggccgggtgctggagtgccccagcatccgcatcaccagcatcagccccaccccagagcccccagctgccctggaggacaacccagatgcctggggagatggcagcccccgggactacccacctcctgagggctttggaggctaccgggaggccggcggccagggcggcggggccttcttcagccccagccctggcagcagcagcctgagctcctggagcttcttcagtgatgccagtgatgaagctgccctgtatgctgcctgtgatgaggtggagagcgagctgaatgaagctgccagcagatttggcctgggcagccccctgcccagcccccgggccagcccccggccctggaccccagaggacccctggagcctgtatggccccagccctgggggccggggccctgaggacagctggctgctgctgagcgcccctggccccaccccagccagccccaggcctgccagcccctgtgggaagaggcgctacagcagcagcggcacccccagcagcgccagccctgccctgagccggcggggcagcctgggggaggagggcagcgagcccccacctcctccacccctgcccctggcccgggaccccggcagccctggcccctttgattatgtgggcgcccctcctgctgagagcatcccccagaagaccaggaggaccagcagcgagcaggccgtggccctgcccaggtctgaggagcccgccagctgcaatggcaagctgcccctgggcgctgaggagagcgtggcccctcctgggggcagcaggaaggaggtggccggcatggactacctggccgtgcccagccccctggcctggagcaaggccagaattggaggccacagccccatcttccgcaccagcgccctgccccccctggactggcccctgcccagccagtatgagcagctggagctgagaattgaggtgcagccccgggcccaccaccgggcccactatgaaacagagggcagcagaggagctgtgaaggccgcccctgggggccaccctgtggtgaagctgctgggctacagcgagaagcccctgaccctgcagatgttcatcggcacagcagatgagaggaacctgcggccccacgccttctaccaggtgcaccgcatcaccgggaagatggtggccacagccagctatgaagctgtggtgtctggcaccaaggtgctggagatgaccctgctgcctgagaacaacatggccgccaacatcgactgtgccggcatcctgaagctgaggaacagcgacatcgagctgaggaagggggagacagacattggaaggaagaacaccagggtgcggctggtgttccgggtgcacgtgccccagggcggcggcaaggtggtgtctgtgcaggccgcctctgtgcccatcgagtgcagccagaggtctgcccaggagctgccccaggtggaggcctacagccccagcgcctgcagcgtgcggggcggggaggagctggtgctgaccggcagcaacttcctgcctgacagcaaggtggtgttcatcgagcggggcccagatggcaagctgcagtgggaggaggaggccaccgtgaaccggctgcagagcaatgaggtgaccctgaccctgactgtgcctgagtacagcaacaagagggtgtccaggcctgtgcaggtgtacttctacgtgtccaatggccgcaggaagaggagccccacccagagcttccgcttcctgcctgtgatctgcaaggaggagcccctgcctgacagcagcctgcggggcttccccagcgccagcgccaccccatttggaacagacatggacttcagccccccccggcccccctaccccagctacccccatgaggaccctgcctgtgagaccccctacctgtctgagggcttcggctacggcatgccacccctgtacccccagacaggccccccacccagctaccggcccggcctgaggatgtttcctgagacccggggcaccaccggctgtgcccagcccccagctgtgtccttcctgccccggcccttccccagcgacccctacggcggccggggcagcagcttcagcctgggcctgcccttcagccccccagcccccttccggcccccacccctgcctgccagcccccccctggagggccccttccccagccagagtgatgtgcaccccctgcctgctgagggctacaacaaggtgggccctggctacggccctggagagggcgcccctgagcaggagaagagcagaggaggctacagcagcggcttccgggacagcgtgcccatccagggcatcaccctggaggagggcggctgcggcactggaggctgtgaatgtgaatgtgtgcaggagatcgccctgcacgtgtgctag

SEQ ID NO: 51668 - DNA, 2805 bp, Artificial Sequence
  derived and/or modified sequence
atggctgatggaggagctgacagcgctgcccagaggctgcctgagggccctggccgggtggcccctggccgggacctgggcgccccagctggctccatgggcgccgccagctgtgaagatgaggagctggagttcaagctggtgtttggagaggagaaggaggccccacccctgggcgctgggggcctgggggaggagctggacagtgaagatgccccaccctgctgccgcctggccctgggggagcccccaccctacggggccgcccccatcggcatcccccggcccccaccacccaggcctggcatgcacagccccccacccaggcctgcccccagccctggcacctgggagagccagcctgcccggtctgtgcggctgggcggccctgggggcggggccggcggggccggcggcggccgggtgctggagtgccccagcatccgcatcaccagcatcagccccaccccagagcccccagctgccctggaggacaacccagatgcctggggagatggcagcccccgggactacccacctcctgagggctttggaggctaccgggaggccggcggccagggcggcggggccttcttcagccccagccctggcagcagcagcctgagctcctggagcttcttcagtgatgccagtgatgaagctgccctgtatgctgcctgtgatgaggtggagagcgagctgaatgaagctgccagcagatttggcctgggcagccccctgcccagcccccgggccagcccccggccctggaccccagaggacccctggagcctgtatggccccagccctgggggccggggccctgaggacagctggctgctgctgagcgcccctggccccaccccagccagccccaggcctgccagcccctgtgggaagaggcgctacagcagcagcggcacccccagcagcgccagccctgccctgagccggcggggcagcctgggggaggagggcagcgagcccccacctcctccacccctgcccctggcccgggaccccggcagccctggcccctttgattatgtgggcgcccctcctgctgagagcatcccccagaagaccaggaggaccagcagcgagcaggccgtggccctgcccaggtctgaggagcccgccagctgcaatggcaagctgcccctgggcgctgaggagagcgtggcccctcctgggggcagcaggaaggaggtggccggcatggactacctggccgtgcccagccccctggcctggagcaaggccagaattggaggccacagccccatcttccgcaccagcgccctgccccccctggactggcccctgcccagccagtatgagcagctggagctgagaattgaggtgcagccccgggcccaccaccgggcccactatgaaacagagggcagcagaggagctgtgaaggccgcccctgggggccaccctgtggtgaagctgctgggctacagcgagaagcccctgaccctgcagatgttcatcggcacagcagatgagaggaacctgcggccccacgccttctaccaggtgcaccgcatcaccgggaagatggtggccacagccagctatgaagctgtggtgtctggcaccaaggtgctggagatgaccctgctgcctgagaacaacatggccgccaacatcgactgtgccggcatcctgaagctgaggaacagcgacatcgagctgaggaagggggagacagacattggaaggaagaacaccagggtgcggctggtgttccgggtgcacgtgccccagggcggcggcaaggtggtgtctgtgcaggccgcctctgtgcccatcgagtgcagccagaggtctgcccaggagctgccccaggtggaggcctacagccccagcgcctgcagcgtgcggggcggggaggagctggtgctgaccggcagcaacttcctgcctgacagcaaggtggtgttcatcgagcggggcccagatggcaagctgcagtgggaggaggaggccaccgtgaaccggctgcagagcaatgaggtgaccctgaccctgactgtgcctgagtacagcaacaagagggtgtccaggcctgtgcaggtgtacttctacgtgtccaatggccgcaggaagaggagccccacccagagcttccgcttcctgcctgtgatctgcaaggaggagcccctgcctgacagcagcctgcggggcttccccagcgccagcgccaccccatttggaacagacatggacttcagccccccccggcccccctaccccagctacccccatgaggaccctgcctgtgagaccccctacctgtctgagggcttcggctacggcatgccacccctgtacccccagacaggccccccacccagctaccggcccggcctgaggatgtttcctgagacccggggcaccaccggctgtgcccagcccccagctgtgtccttcctgccccggcccttccccagcgacccctacggcggccggggcagcagcttcagcctgggcctgcccttcagccccccagcccccttccggcccccacccctgcctgccagcccccccctggagggccccttccccagccagagtgatgtgcaccccctgcctgctgagggctacaacaaggtgggccctggctacggccctggagagggcgcccctgagcaggagaagagcagaggaggctacagcagcggcttccgggacagcgtgcccatccagggcatcaccctggaggaggtgtctgagatcatcggccgggacctgagcggcttccctgcccctcctggagaggagcccccagcctag

SEQ ID NO: 51669 - DNA, 2895 bp, Artificial Sequence
  derived and/or modified sequence
atgatcaccaccctgcccagcctgctgcccgccagcctggccagcatctcccaccgggtgacaaacttgccatccaacagcctgtcacataaccccggactcagcaagcccgactttccgggtaatagctcccccggtctcccaagttccagctccccaggtagggatctcggagcccctgctggttcaatgggagcagcgagctgcgaagatgaagagctggagtttaaactcgtgttcggagaagagaaagaggcaccccctctaggggcgggggggttgggcgaagagctcgattcagaggatgctccgccgtgttgccggttagccttgggcgagcccccgccctatggggctgcgcccatcggaatcccacggccaccccctcctcgacccggcatgcactccccacccccacgccctgccccctcccctggcacctgggaaagccagccagcgcgatcagtgagactcgggggcccaggcgggggggccggaggggccggcggcggacgcgtgctcgagtgtcccagtatccgcatcacaagcatatccccaactcctgagccaccagccgccctcgaggacaatcccgacgcgtggggagatgggagcccgcgcgactaccctcctccggaggggtttggcgggtaccgggaggctggaggccagggtggcggcgctttctttagtccctcaccgggttccagcagtctgtcctcatggtccttcttttctgatgctagcgacgaggccgctctgtacgccgcctgcgacgaagtcgagagcgagttaaatgaggccgcaagtagattcggccttgggagcccactcccctcaccacgggcatctcccagaccatggacgcccgaggacccatggagcttgtacgggccctcacctggtgggcggggcccggaagattcctggctgctgcttagcgcccccggtcccacccctgcgtcccccaggcccgcatctccttgcggaaagcgtcggtacagttcatcaggaaccccaagcagcgcgtctccagctctgtcacgcagaggttcactgggggaggaaggcagtgagcccccaccccctcccccacttcctttagcaagagaccctgggtcacccggcccatttgactacgtcggggcgcctccagcggagtctattcctcagaaaacaaggcgcaccagctccgagcaggctgttgcactgccccgctccgaagagccagcctcctgcaacggtaaactgcccctaggggccgaggaatccgtggctccacctggcgggagtaggaaggaggttgctgggatggactacctggcagtcccttctcccctggcctggagtaaggccagaatcggcggtcacagtcccatctttagaacttctgccttaccccccttagactggccactgccatcccaatatgagcagctggaactgagaatagaagtgcagcctcgggcccatcacagggcacactatgaaaccgagggcagccgcggagccgtaaaagcggctccggggggtcatcccgtcgttaagcttctaggctactcagagaaaccactgaccctgcaaatgtttattggcaccgccgacgaaaggaaccttagacctcacgccttctaccaagtccaccgcatcaccggcaaaatggtggccaccgcttcttatgaagcagttgtgtccggaactaaggtcctggaaatgactctcttgccagagaataatatggcggcaaacatcgactgtgctggtatcctgaaactccggaacagtgacatcgaattgcggaagggggagacggacattgggaggaagaatacacgcgtacgactggtgtttcgtgtgcacgtgccacagggcgggggcaaggttgttagtgtgcaagcagcctccgtgcctattgagtgctcccagcgatccgcccaggagctgccacaggtagaggcatattctccctcagcgtgctccgtgcgaggtggtgaagagcttgtccttaccggaagtaacttcctcccggatagtaaggttgtgttcatagaacggggccccgacgggaaattacagtgggaagaggaggccactgtcaacaggttacaaagcaacgaagtcaccctgaccctgacagtgcccgaatactctaacaagcgcgtctctagaccagtgcaggtgtacttctacgtatccaacggaaggaggaagcgaagcccaacacagtcttttcgcttcctccctgtgatctgcaaagaagaaccactccctgactcttcgcttcgggggtttccttctgcttctgccactccttttggtaccgacatggacttttccccgccacgcccaccctatccaagctacccacatgaagacccagcttgcgaaaccccctatctcagcgagggatttggttatggcatgccccccctttaccctcagacagggccacctccttcctataggcctggcctacgcatgtttcctgagacgaggggcaccactggatgtgcccagccaccggctgtgtctttcttgccaaggccatttccatccgatccctacggcggccgagggagcagctttagcctcggtctgccctttagtccacctgccccattccggcctcctcccttgcccgcatcaccacctttagaggggcctttcccatctcagagtgatgttcacccactccccgccgaggggtacaataaggtggggcctggctacggacctggagaaggtgcccccgagcaggaaaagagcagaggtggatattcaagtggattcagagattctgtcccaattcaaggaatcactctggaagagggagggtgtggaaccggaggttgtgagtgcgagtgtgtccaagagatcgcactgcacgtgtgctag

SEQ ID NO: 51670 - DNA, 2745 bp, Artificial Sequence
  derived and/or modified sequence
atgctgagcggccgggacctgggcgcccccgccggcagcatgggcgctgcgagttgcgaggacgaggaactggaattcaagttagtgttcggcgaggagaaagaggctcccccactgggtgctgggggactcggcgaagaactagattcggaggacgccccgccctgttgcagactggcactgggcgagccgcccccttatggagccgccccaatcggtataccgcgcccaccacctccccgaccaggaatgcatagccccccccccagacctgccccctctccggggacttgggaatcccagccggctcggagcgtgcggcttggaggccctggaggtggcgctggcggcgccgggggagggcgggtattggaatgtccatctatccgcattacctctataagtccaacgcctgagccccccgccgcattagaagataacccagatgcctggggcgacggtagtccaagggattatcctccgcccgagggattcggcgggtaccgcgaggcaggaggacagggggggggagcctttttttcaccatccccaggctcctcttcgctctctagctggagtttctttagtgacgcgtctgacgaggctgcactgtacgctgcttgcgatgaagtcgaaagtgaacttaatgaggccgcgagtaggttcggactgggatctcccttgccaagccctcgggctagcccccgaccttggacacctgaggatccatggtccctctacggaccaagcccagggggcagaggccccgaagacagctggttgctgttgagcgcgcccggccctacacctgccagtcctcgaccagcttccccctgcggcaaacggcggtatagcagcagcggcaccccatccagtgcttctcccgctctcagccgtcgtgggagcctgggcgaggagggctccgaaccacccccgcccccaccacttcctctagcacgggatcctgggtcccccgggccgttcgattatgtgggggcccctcctgcagagtcgataccacagaagactcgccgtacctcttcagaacaggctgtggccctgcctaggtccgaggaacccgcgtcttgtaatggtaagctacccttgggcgcagaggaatctgttgcacccccgggggggagccggaaggaggtcgctggcatggattacctggccgtccccagcccactggcttggtccaaagccaggatcggaggacacagcccaattttccggacatccgccctgcccccattggactggccattaccgtcccagtatgagcaactcgagctgcgaattgaagtccaaccacgagcgcaccacagggcgcactacgaaaccgagggttccaggggcgccgttaaggccgcccccggtggtcatccagttgtgaagcttctcggatattccgaaaaaccgctgacacttcagatgtttattggaactgccgatgagcgtaatctcaggccccacgcattctaccaggtccaccgaatcacaggcaagatggtggctacagcctcttatgaagccgttgtgtccggcacaaaggtcctggagatgaccttgctaccggagaataacatggccgccaatatcgactgtgccggcattctaaagttaaggaatagtgacattgaactgcgtaagggggaaacggatattggccgcaagaatacccgcgtcaggctcgtgtttcgggtccatgtgcctcagggtggaggaaaggtggtttccgtgcaggcggcctccgtgccgatcgagtgcagtcaacggtccgcgcaggagctcccccaggtagaggcatactctccctccgcatgttccgttcgagggggcgaagagctggttttaacgggtagtaacttcctgcctgacagtaaagtcgtttttatcgaacgaggacccgatgggaagcttcagtgggaggaggaggctactgtcaataggctgcagtcaaatgaggtcaccttaacgttgactgtacccgaatacagcaacaagcgtgttagcaggccagttcaggtctacttttacgtgagcaatgggcggaggaagcgcagccctacacagtcctttcgtttcttaccggttatttgcaaagaagaaccgttgcctgattcctcccttagaggctttccgtccgcctcagccacacctttcggaaccgacatggatttcagcccccctagacctccttacccttcctacccgcacgaagatccggcatgcgagactccgtacctgagtgaggggtttggatacggaatgccccctctttatccccagacgggaccccctccatcgtatagacctggcttgcgaatgttcccggagactaggggcaccacaggatgtgctcaaccacctgccgtctcatttcttcctaggccttttccaagcgacccatatggtggcagaggctctagcttttccctggggctgccgttttccccccctgccccttttcgccctccacccctccccgccagtcccccacttgaggggccttttccctcacagagcgacgtccacccgttgcccgcagaggggtacaacaaagtgggtcccggttacggaccgggagagggtgcccccgaacaggaaaaatcccgagggggatacagttccggctttagagactctgtgccaatccagggaatcaccctggaggaagggggctgcggaaccggggggtgcgaatgcgaatgcgtccaggagatcgcactgcatgtgtgctag

SEQ ID NO: 51671 - DNA, 2802 bp, Artificial Sequence
  derived and/or modified sequence
atggccgacggcggcgccgacagcgccgcccagcggctgcccgaggggcctggacgagtggccccaggaagggatcttggtgcccctgccggttcgatgggagccgcttcctgcgaagatgaagagctagagtttaagttggtgttcggcgaggagaaggaagcccctcctctcggagcagggggacttggggaggaattagacagcgaagacgcccctccttgttgtagactagccctgggcgaacctcctccttacggagctgccccaatagggattccgaggccccctccccctagacccgggatgcactcaccacctccccgacccgctccatcacctggtacatgggaatcccagcctgcccgatcagttcgcctgggtgggcctggtggcggtgcgggcggggcggggggaggcagggtgttggaatgccctagcatcagaatcacatccatctctcctacgcccgagccacccgcagcgttggaagataatccagatgcatggggtgatgggtctcccagggattacccaccacctgaaggattcggaggttatcgggaggctgggggtcaaggcggtggggccttcttcagcccctctccggggtcgtcttcactgtcatcctggtcgttcttctccgacgcttccgacgaggctgctctctatgccgcgtgcgatgaggtggaaagtgagcttaacgaggcagctagcaggttcggacttggctcccctcttccctcccctagagcctcgccacggccctggacccctgaggatccttggtctctgtacggcccctctcccggcggacggggacctgaggattcctggctactgctttccgcacctggccctacacccgcatctcctcgacctgcttccccttgtggaaagagacgatattcttcctctggaactccaagttccgctagtcccgccctctcaagaaggggctctcttggggaagaaggttccgaaccaccccctcctccccccctcccactggcccgggaccctggctctcctggacccttcgattatgtaggcgcccccccggctgagtcaataccacaaaagacgaggagaacgtcttcggagcaggcagtggcgctgcctaggtctgaggaacccgcctcctgcaatggtaaattgccactcggagccgaggagagcgtagcacccccgggcggatctcgaaaagaagtcgccgggatggattacctcgcagttcccagcccgcttgcttggtcaaaagcgcgtattggtggccattctcctattttccgaacctctgccctcccaccccttgattggcccctaccgagccagtacgagcagctcgagctgcgcatcgaagttcagcctagagcccaccacagggctcattatgagaccgagggatctcgcggggctgtgaaagccgctccaggcggccaccctgttgttaagctgctgggctatagcgagaagcctcttacacttcagatgttcattggaactgctgatgagaggaacctgaggccccacgccttttatcaggttcaccgcatcactggtaagatggtggctaccgcttcctatgaagctgtggtgtccgggacaaaagtattagaaatgaccttgctgcctgagaataacatggcggccaatatcgattgcgccgggatcttaaagttacgtaacagcgacatcgagctgcggaagggagaaacagacattggccgcaaaaacacccgggtacgtctggtgtttagagttcacgtgccccaaggcggcgggaaggtggtgtctgtgcaggccgcctctgtgccaatcgagtgcagccagagaagcgcacaagagctcccccaggtagaggcttattctcctagtgcctgcagcgttcgtggcggcgaagaactggttctcactgggagcaacttcttaccagatagcaaggtggtgttcatcgagcgagggcctgacggtaaactccagtgggaggaagaggccacagtcaatagactgcagtctaacgaagtgactttaacactcacggtccctgagtacagcaacaagagagtgtctaggcccgtgcaggtgtatttctatgtgtctaacgggcggagaaagcggtctcctacccagagcttccggttcctgcctgtgatttgcaaggaagaaccccttcctgacagttctctccggggttttccctccgcctctgcgaccccctttggcactgacatggattttagcccgccccgaccgccctatcctagctacccacacgaagaccctgcgtgcgaaaccccatacctctcagaggggttcgggtacgggatgcccccactttatcctcagactggaccacccccttcctaccgacccggtctgcggatgttccccgaaacacgaggaaccaccggctgtgcccagcctcccgccgttagtttcctgcctcgtcctttcccgtctgacccttacggtggaaggggatcgagcttttctcttggcctcccattctctcccccagcgccatttaggccaccccccttaccagcatctcctcccctggagggcccattccccagtcagtccgacgtccaccccctgcccgccgaggggtacaacaaggtgggccctggctatggacccggtgaaggtgcaccagagcaggaaaagagtcgcggagggtactccagcggcttcagggacagtgttccaattcagggcataaccctggaggaaggagggtgcggcacaggagggtgtgagtgcgaatgcgtgcaggagattgctctccatgtgtgctag

SEQ ID NO: 51672 - DNA, 2706 bp, Artificial Sequence
  derived and/or modified sequence
atgggcgccgccagctgcgaggacgaggagctggagttcaagctggtgttcggggaggagaaggaggccccccccctcggtgccggtggcttaggagaagaattggacagtgaggatgcacctccttgttgccggttggccttaggcgagcctcctccctacggggctgcaccaattggtattccaaggcctccaccacctaggcctgggatgcatagcccccccccgagaccagcccctagccccggaacctgggaatcccaaccggccagatctgtgagactaggcggtcctggtggaggagcaggcggtgccggcggaggtcgggtcctcgagtgcccgtcgattcggattacaagtatttctccgacgcctgaaccacccgccgccctggaagacaacccagatgcctggggagatggttcacccagggactatccaccccccgaaggttttggcggctatcgtgaagccgggggtcagggtggcggcgcatttttttccccatcgccgggcagttccagcctctcaagctggtctttcttctctgacgcttcagacgaggccgcgctatacgccgcatgtgatgaggttgagagcgagcttaatgaggccgccagccggttcggtctgggatcaccattgcccagcccccgcgccagtccaagaccgtggacacctgaagatccatggtccctgtatggcccaagccccggtggccgcgggccagaagattcttggttactcctcagtgcacccggccctactcctgcctcccccaggcccgcaagcccttgtggcaagaggagatactcatcttctggaacaccaagcagtgcatccccagccctttcaaggcgcgggtcattgggcgaagagggcagtgagcctccaccgcctcctccactcccactggccagagaccccggctcgcccggccccttcgactacgttggagcgccccctgccgaatcaatccctcagaagacccgtaggactagctccgagcaggccgtggccctcccccgatccgaggaacctgcctcctgtaacggcaagctcccattaggcgctgaggaatctgtcgccccccccggcggcagccgcaaggaggtcgctggcatggattatttggcagtccctagcccgctcgcctggtcaaaggctagaattggtggccactcacccatctttaggacttcagccctgcccccgctggattggcctctgccctcccagtacgaacagctggagctgaggatcgaggttcaaccgagggctcaccaccgagctcattacgagacggaaggctcaaggggcgccgtcaaggctgccccaggaggccatccggtggtgaagctccttggctacagcgagaagcccctgaccctgcaaatgttcattggcacagccgatgagaggaatttgcgaccccacgccttctaccaggtgcacagaattacaggcaaaatggttgccaccgctagttatgaagcagtggtcagcggaactaaagtgctggaaatgacactgctccctgaaaataacatggctgccaatatcgactgtgccggcatcctgaagctgagaaattccgacatagaactgcggaagggtgaaacagacatcggccgcaaaaatactcgtgtgcggcttgtctttcgagtgcacgtcccacaggggggggggaaggttgtgagtgttcaggccgcctctgtgcccatcgagtgttcacagcgcagcgcgcaggaacttccacaagttgaggcctatagtccttctgcatgctcggttcgtggcggagaagaacttgttctcactggaagtaacttcctcccggactctaaggtggtgtttattgagaggggcccagatggtaaattgcaatgggaggaggaggccacagtgaatcgcctgcaaagtaacgaggtgacactcacgcttaccgtgcccgaatacagcaacaaaagagtgagcagaccagtccaggtgtacttctacgtgtctaacggtagacggaagagaagtccaacacagagcttcagatttcttcctgtgatttgcaaggaggagccgctcccagatagctcactgcggggcttcccttcagcaagtgcgactcccttcggcaccgatatggacttttccccacctaggccaccatatcccagctacccacacgaagaccctgcatgcgaaactccctatctgtcagaggggttcggctatggaatgccacctctgtacccacagactggaccgccgccctcgtataggcccggattgagaatgtttcccgaaaccagagggacaacggggtgcgctcaaccacctgctgtgtccttcctaccccggccttttcctagcgacccatacggtgggagaggatcttctttctctttgggcctccctttctctccgccggccccctttaggccacccccgctacctgcatctcctcctctcgaggggccatttcctagccagtcagacgtgcaccctcttcctgctgaaggttacaacaaggtcgggcctggctatggccccggagaaggggccccggagcaggaaaaatcccggggcggttacagctctgggttcagggactccgtgccaattcaaggcataactttggaggaaggtggctgcggcactggtgggtgcgagtgcgaatgtgtgcaagagattgcgctgcacgtgtgttag

SEQ ID NO: 51673 - DNA, 2805 bp, Artificial Sequence
  derived and/or modified sequence
atggccgacggcggcgccgacagcgccgcccagcggctgcccgaggggccaggacgcgtcgcccctggccgggacctgggcgcgccggcaggaagtatgggcgccgccagctgcgaggacgaagagttagagtttaaactggtgttcggagaagagaaggaagcaccacccttaggagctggcggacttggagaggagctggactccgaagacgctccaccttgctgtcgtttggccctgggcgaacctcccccatatggagcagcgcccatcgggattccccgcccaccccctccaagaccaggcatgcactccccccctcccaggccagccccaagtccaggaacctgggagtcccagcctgcccggtcagtaaggttaggcgggccaggcggaggggcaggaggagccggaggtggacgcgtgcttgaatgcccaagcatccgcattactagcatcagcccgacacctgaaccaccagcagcactagaggacaacccggacgcttggggcgacggttcaccgagagattaccctccacctgaagggttcggtggatacagggaggccgggggtcaagggggcggtgcattcttttcacccagccccggaagcagctcgctaagctcttggtcctttttcagcgacgcctcagacgaggcagcattatatgcagcctgcgacgaagtcgagtccgagcttaacgaagctgcgtcccgctttggcctcggctcgccactgccttcaccacgggcttcgccgagaccatggactcccgaggatccatggtcgttgtatggaccgtctccaggcggaagggggcctgaggattcttggttgctactgtcagctcctgggcccacacctgcaagcccccgaccagcatctccgtgcggaaaacggcggtacagttcatcaggcactcctagcagtgccagtcccgctttatccagaagaggttctcttggtgaggaagggagcgaaccacctcccccacccccactccctctggcccgggaccctggctctcccgggccctttgactacgtcggagcacccccagctgaaagcatcccccagaagaccaggcgtaccagctccgagcaggcagtcgccttgcctagatcagaggaacccgcaagttgcaacgggaaactgccgctgggcgccgaggagtccgtggctccaccaggaggtagtaggaaggaggtggccggtatggattatctggccgttcccagtccgttggcatggtctaaggcccggattggggggcactctcctattttcaggacctcagcattacctcctctggattggcccctaccctcccagtacgaacaacttgagctgcggatcgaggtacaaccacgggcacaccaccgggcccattacgaaacagaggggtcccggggggctgtgaaggctgcacctggcgggcacccagtggtgaagctcctgggctatagcgagaaaccgctgacacttcagatgttcattggaacagccgatgagaggaacctgagaccacacgccttctatcaagtccaccgcatcacggggaagatggttgcgacggcgtcctatgaggctgtggtcagcggcacgaaggtcttggaaatgactttactgcccgagaataacatggctgcgaatattgattgtgcggggatcctgaaactcagaaattcggatatcgagttacgcaaaggagagaccgacatagggcgcaaaaacaccagggttaggttagtttttcgcgtgcacgttcctcaaggaggcggaaaggttgtttctgtgcaagcagcaagtgtaccgattgagtgttctcagcgcagtgctcaggaactgccccaggtggaagcttactccccttctgcttgctcagtaagggggggagaagagctggtgcttactggatccaacttcctgcccgatagcaaagtagtctttatcgaacggggccctgatgggaaactacagtgggaagaagaggcaacggtcaaccggttgcagtccaatgaggtgaccttgactctcacagtgcccgagtatagcaacaagagggtaagtcggcctgtgcaggtctacttctatgtatcgaatggccgccgtaagcgatcgccaacacagagcttcaggtttttaccagtcatctgcaaggaggagcctctgcctgactcctcactgcgaggcttccctagcgcatctgcaacacccttcggaaccgatatggatttcagcccgccccgcccaccttaccctagctatccccatgaggatccagcatgtgaaactccgtacctcagtgaaggcttcggttatggcatgccgcccttgtatcctcagaccggcccaccaccatcatatcgaccagggctgcggatgtttccagagacccgcggaacgactggctgcgcccagcccccagccgtttcattcttgccacggccgtttccatccgacccctacggcggcagaggcagctctttttcccttggactgccctttagcccccccgctccatttagaccccctccattgcctgccagtccacctctggagggcccttttccctcccagagcgacgttcatcctctacctgcggagggatacaataaggttgggcccggatacggcccaggtgaaggcgcacctgagcaggagaagtccagaggcggttattcatctgggtttcgagacagcgtgcccatacagggcatcacattggaagaggtgtcggaaattataggacgcgacctttccggttttcctgcacctcccggggaagagccgccagcctag

SEQ ID NO: 51674 - DNA, 4749 bp, Artificial Sequence
  derived and/or modified sequence
gcttctggagggaggcggcagcgacggaggagggggcttctcagagaaagggagggagggagccacccgggtgaagatacagcagcctcctgaactcccccctcccacccaggccgggacctgggggctcctgccggatccatgggggcggccagctgcgaggatgaggagctggaatttaagctggtgttcggggaggaaaaggaggcccccccgctgggcgcggggggattgggggaagaactggactcagaggatgccccgccatgctgccgtctggccttgggagagccccctccctatggcgctgcacctatcggtattccccgacctccaccccctcggcctggcatgcattcgccaccgccgcgaccagccccctcacctggcacctgggagagccagcccgccaggtcggtgaggctgggaggaccaggagggggtgctgggggtgctgggggtggccgtgttctcgagtgtcccagcatccgcatcacctccatctctcccacgccggagccgccagcagcgctggaggacaaccctgatgcctggggggacggctctcctagagattaccccccaccagaaggctttgggggctacagagaagcagggggccagggtgggggggccttcttcagcccaagccctggcagcagcagcctgtcctcgtggagcttcttctccgatgcctctgacgaggcagccctgtatgcagcctgcgacgaggtggagtctgagctaaatgaggcggcctcccgctttggcctgggctccccgctgccctcgccccgggcctcccctcggccatggacccccgaagatccctggagcctgtatggtccaagccccggaggccgagggccagaggatagctggctactcctcagtgctcctgggcccaccccagcctccccgcggcctgcctctccatgtggcaagcggcgctattccagctcgggaaccccatcttcagcctccccagctctgtcccgccgtggcagcctgggggaagaggggtctgagccacctccaccacccccattgcctctggcccgggacccgggctcccctggtccctttgactatgtgggggccccaccagctgagagcatccctcagaagacacggcggacttccagcgagcaggcagtggctctgcctcggtctgaggagcctgcctcatgcaatgggaagctgcccttgggagcagaggagtctgtggctcctccaggaggttcccggaaggaggtggctggcatggactacctggcagtgccctccccactcgcttggtccaaggcccggattgggggacacagccctatcttcaggacctctgccctacccccactggactggcctctgcccagccaatatgagcagctggagctgaggatcgaggtacagcctagagcccaccaccgggcccactatgagacagaaggcagccgtggagctgtcaaagctgcccctggcggtcaccccgtagtcaagctcctaggctacagtgagaagccactgaccctacagatgttcatcggcactgcagatgaaaggaacctgcggcctcatgccttctatcaggtgcaccgtatcacaggcaagatggtggccacggccagctatgaagccgtagtcagtggcaccaaggtgttggagatgactctgctgcctgagaacaacatggcggccaacattgactgcgcgggaatcctgaagcttcggaattcagacattgagcttcggaagggtgagacggacatcgggcgcaaaaacacacgtgtacggctggtgttccgggtacacgtgccccagggcggcgggaaggtcgtctcagtacaggcagcatcggtgcccatcgagtgctcccagcgctcagcccaggagctgccccaggtggaggcctacagccccagtgcctgctctgtgagaggaggcgaggaactggtactgactggctccaacttcctgccagactccaaggtggtgttcattgagaggggtcctgatgggaagctgcaatgggaggaggaggccacagtgaaccgactgcagagcaacgaggtgacgctgaccctgactgtccccgagtacagcaacaagagggtttcccggccagtccaggtctacttttatgtctccaatgggcggaggaaacgcagtcctacccagagtttcaggtttctgcctgtgatctgcaaagaggagcccctaccggactcatctctgcggggtttcccttcagcatcggcaaccccctttggcactgacatggacttctcaccacccaggcccccctacccctcctatccccatgaagaccctgcttgcgaaactccttacctatcagaaggcttcggctatggcatgccccctctgtacccccagacggggcccccaccatcctacagaccgggcctgcggatgttccctgagactaggggtaccacaggttgtgcccaaccacctgcagtttccttccttccccgccccttccctagtgacccgtatggagggcggggctcctctttctccctggggctgccattctctccgccagccccctttcggccgcctcctcttcctgcatccccaccgcttgaaggccccttcccttcccagagtgatgtgcatcccctacctgctgagggatacaataaggtagggccaggctatggccctggggagggggctccggagcaggagaaatccaggggtggctacagcagcggcttccgagacagtgtccctatccagggtatcacgctggaggaagtgagtgagatcattggccgagacctgagtggcttccctgcacctcctggagaagagcctcctgcctgaaccacgtgaactgtcatcacctggcaaccccagccccagcctcagccctgccccctttccctccttcctggagtggtggctacagaagcttggggccaaccctggctcctctttccccagcttctgtctgtctcactgtcttccctcccctcccccagctgaggtgtggccctcaggcctggtgctgccttggagggctgggggaaggagtgtgtggaggagggaggagggtgaagactgaggctaggtgccagaatggactggagtgaaggcgtgtctagagtgtgggctggctgttgtgctggaaagctggggacaggttgatggtaataaactgctcaatgaccagtgcttcaggctccagagctctttggagagatgggttggggcagcttactccagccctggcccaaggaggcccagaagttggaaagagatggaatgtggctgggaacattgcatcccaaagagcttctcagtggaggaggctggggaaggcatgagggggctcagaggctccttgactgggaccaggattgggggccagggcttgagtaggcctctccactctcctccttgggggtccagattccttaggagctttgggatgaggcccaggaggctgcatttttccaggtccttagtcttgccaccacacagatgattctgattcatagccaagatgaggacacactgatgtagctgatctctcatttacagaggaggattctaaagttcagagagggaaaggggcttgcctgaggtcacgtagataatcagcagcacattgaacgctgcactcctgggctcctgtccccagcccccattcagacacgctgactcaggaggtccaggcctctaaggcttctctccctggagtgagggtggaggtgagggagagctggcacaagccctccctctggatcctccactcctggggattatgaagatattctggaaagatttgtgcttcagaggtagactgcagaaagcaaacagtctacccagcagctctgaatgtcacctgccctggggcttacagcactatatgagttcctggcctatcctgcaaatatgcccatgctggccttctaaatagctggtacatccatcaccactgacgggcctggcctggaaacctggtttgtcccctgtcttgatggcctacgagaggccaagttccactgggctgggaaaagtcactttgtctgtcttgttcacctggagcctgacacaccgtaggtactgagtacaaatagcttgatttggctaggcttggctgcagggggacgtgcctaaaagacattccgggcatttgcacttgggaaacttgcctcaccttcaggcttgtggggcctctctatgcccaatgagtccaggcagtcctagcaagtactcaggagagcaggggtgggtgtgacagaggctggctctggattgggggacaacagaaccagagtaactcctcgcctgttgctgctttgcaatgaatttcctttacctttctggaacacaagctgctgtgaaccaaactgatatcaagtgattagctcaccgggccttggttgcttttcaaagatccccttcagccccctgccagagtcactgccccataatcaccatgtcagaagggaccctagggcattcgtgtcctatttatcaatcttcagcaccacctctaagatctctgagagagggtggatcagcctctgtgtaaacaaaaagctgttaggacttgttgcctctcaaggtggactattctgttttctgccaggacactgccattcatgcattgtcagatatttattaaacagcagcaaagtgccagccaatttgtcctggaggaattcatagcctcatggggcaaaagtaaataaacagcttattacaattcaacaa

SEQ ID NO: 51675 - DNA, 5700 bp, Artificial Sequence
  derived and/or modified sequence
gtaaacgtctgacctggggccgtcgcttaaccgtttagttgctgggatggggcggcgttgggggtgcggccctgaaccggagggatttagagactggagacgcggcctctaagagaggttgaaactgtgtgtgtgtgggagaaaatgataaccaccctcccatctctcctacccgccagcctcgccagtatctcccaccgagtcacgaatctcccatctaactccctctcacacaacccaggcctctccaagcctgactttcccggaaactccagtccaggtcttccttcctcctccagcccaggccgggacctgggggctcctgccggatccatgggggcggccagctgcgaggatgaggagctggaatttaagctggtgttcggggaggaaaaggaggcccccccgctgggcgcggggggattgggggaagaactggactcagaggatgccccgccatgctgccgtctggccttgggagagccccctccctatggcgctgcacctatcggtattccccgacctccaccccctcggcctggcatgcattcgccaccgccgcgaccagccccctcacctggcacctgggagagccagcccgccaggtcggtgaggctgggaggaccaggagggggtgctgggggtgctgggggtggccgtgttctcgagtgtcccagcatccgcatcacctccatctctcccacgccggagccgccagcagcgctggaggacaaccctgatgcctggggggacggctctcctagagattaccccccaccagaaggctttgggggctacagagaagcagggggccagggtgggggggccttcttcagcccaagccctggcagcagcagcctgtcctcgtggagcttcttctccgatgcctctgacgaggcagccctgtatgcagcctgcgacgaggtggagtctgagctaaatgaggcggcctcccgctttggcctgggctccccgctgccctcgccccgggcctcccctcggccatggacccccgaagatccctggagcctgtatggtccaagccccggaggccgagggccagaggatagctggctactcctcagtgctcctgggcccaccccagcctccccgcggcctgcctctccatgtggcaagcggcgctattccagctcgggaaccccatcttcagcctccccagctctgtcccgccgtggcagcctgggggaagaggggtctgagccacctccaccacccccattgcctctggcccgggacccgggctcccctggtccctttgactatgtgggggccccaccagctgagagcatccctcagaagacacggcggacttccagcgagcaggcagtggctctgcctcggtctgaggagcctgcctcatgcaatgggaagctgcccttgggagcagaggagtctgtggctcctccaggaggttcccggaaggaggtggctggcatggactacctggcagtgccctccccactcgcttggtccaaggcccggattgggggacacagccctatcttcaggacctctgccctacccccactggactggcctctgcccagccaatatgagcagctggagctgaggatcgaggtacagcctagagcccaccaccgggcccactatgagacagaaggcagccgtggagctgtcaaagctgcccctggcggtcaccccgtagtcaagctcctaggctacagtgagaagccactgaccctacagatgttcatcggcactgcagatgaaaggaacctgcggcctcatgccttctatcaggtgcaccgtatcacaggcaagatggtggccacggccagctatgaagccgtagtcagtggcaccaaggtgttggagatgactctgctgcctgagaacaacatggcggccaacattgactgcgcgggaatcctgaagcttcggaattcagacattgagcttcggaagggtgagacggacatcgggcgcaaaaacacacgtgtacggctggtgttccgggtacacgtgccccagggcggcgggaaggtcgtctcagtacaggcagcatcggtgcccatcgagtgctcccagcgctcagcccaggagctgccccaggtggaggcctacagccccagtgcctgctctgtgagaggaggcgaggaactggtactgactggctccaacttcctgccagactccaaggtggtgttcattgagaggggtcctgatgggaagctgcaatgggaggaggaggccacagtgaaccgactgcagagcaacgaggtgacgctgaccctgactgtccccgagtacagcaacaagagggtttcccggccagtccaggtctacttttatgtctccaatgggcggaggaaacgcagtcctacccagagtttcaggtttctgcctgtgatctgcaaagaggagcccctaccggactcatctctgcggggtttcccttcagcatcggcaaccccctttggcactgacatggacttctcaccacccaggcccccctacccctcctatccccatgaagaccctgcttgcgaaactccttacctatcagaaggcttcggctatggcatgccccctctgtacccccagacggggcccccaccatcctacagaccgggcctgcggatgttccctgagactaggggtaccacaggttgtgcccaaccacctgcagtttccttccttccccgccccttccctagtgacccgtatggagggcggggctcctctttctccctggggctgccattctctccgccagccccctttcggccgcctcctcttcctgcatccccaccgcttgaaggccccttcccttcccagagtgatgtgcatcccctacctgctgagggatacaataaggtagggccaggctatggccctggggagggggctccggagcaggagaaatccaggggtggctacagcagcggcttccgagacagtgtccctatccagggtatcacgctggaggaaggtgggtgtgggactgggggctgtgagtgtgagtgtgtgcaagagattgctctgcatgtttgctgagggctggagctgggcttttcagagatcgggcatccctggtctctcagggccagttggaggttcccaggaggcatgttcttgatgcctgtggctgcctgaatccaattaactgaattctgaagagtgcatggggtaactgtctcagcctttctcctgtctctgcctctgtcctctgctccaaatcataaaatctcagagctagaagcactttcaagatcattccatccagcgcattcaatttgcaagtttaggcgttgagttccagagagggatggtagcttgctgaggtcccagtcaagcacacttgccattgcctcagctttcccctaaacacggtgtctgtggtcagggttggtgaggaggagctttcctgttttgcctctccttcttcccattggctacacccatctctggccctgctgataccgattcccctgacatttcaggctaagccagcaggaaagggctaggacgggtgcctgggagcccacatggagggagttgggcaagatttgattcggagcaggtgtcaagacgtgttggggaaactgaggcccagtggaatagaagccagtagaggaggaatctagaggcctcctagattaagacctgcctggaatggattgggggtgggtctttggaaaaggaggggacccacctctagcccagtctctcaactgcccctcctttacagtgagtgagatcattggccgagacctgagtggcttccctgcacctcctggagaagagcctcctgcctgaaccacgtgaactgtcatcacctggcaaccccagccccagcctcagccctgccccctttccctccttcctggagtggtggctacagaagcttggggccaaccctggctcctctttccccagcttctgtctgtctcactgtcttccctcccctcccccagctgaggtgtggccctcaggcctggtgctgccttggagggctgggggaaggagtgtgtggaggagggaggagggtgaagactgaggctaggtgccagaatggactggagtgaaggcgtgtctagagtgtgggctggctgttgtgctggaaagctggggacaggttgatggtaataaactgctcaatgaccagtgcttcaggctccagagctctttggagagatgggttggggcagcttactccagccctggcccaaggaggcccagaagttggaaagagatggaatgtggctgggaacattgcatcccaaagagcttctcagtggaggaggctggggaaggcatgagggggctcagaggctccttgactgggaccaggattgggggccagggcttgagtaggcctctccactctcctccttgggggtccagattccttaggagctttgggatgaggcccaggaggctgcatttttccaggtccttagtcttgccaccacacagatgattctgattcatagccaagatgaggacacactgatgtagctgatctctcatttacagaggaggattctaaagttcagagagggaaaggggcttgcctgaggtcacgtagataatcagcagcacattgaacgctgcactcctgggctcctgtccccagcccccattcagacacgctgactcaggaggtccaggcctctaaggcttctctccctggagtgagggtggaggtgagggagagctggcacaagccctccctctggatcctccactcctggggattatgaagatattctggaaagatttgtgcttcagaggtagactgcagaaagcaaacagtctacccagcagctctgaatgtcacctgccctggggcttacagcactatatgagttcctggcctatcctgcaaatatgcccatgctggccttctaaatagctggtacatccatcaccactgacgggcctggcctggaaacctggtttgtcccctgtcttgatggcctacgagaggccaagttccactgggctgggaaaagtcactttgtctgtcttgttcacctggagcctgacacaccgtaggtactgagtacaaatagcttgatttggctaggcttggctgcagggggacgtgcctaaaagacattccgggcatttgcacttgggaaacttgcctcaccttcaggcttgtggggcctctctatgcccaatgagtccaggcagtcctagcaagtactcaggagagcaggggtgggtgtgacagaggctggctctggattgggggacaacagaaccagagtaactcctcgcctgttgctgctttgcaatgaatttcctttacctttctggaacacaagctgctgtgaaccaaactgatatcaagtgattagctcaccgggccttggttgcttttcaaagatccccttcagccccctgccagagtcactgccccataatcaccatgtcagaagggaccctagggcattcgtgtcctatttatcaatcttcagcaccacctctaagatctctgagagagggtggatcagcctctgtgtaaacaaaaagctgttaggacttgttgcctctcaaggtggactattctgttttctgccaggacactgccattcatgcattgtcagatatttattaaacagcagcaaagtgccagccaatttgtcctggaggaattcatagcctcatggggcaaaagtaaataaacagcttattacaattcaacaa

SEQ ID NO: 51676 - DNA, 5488 bp, Artificial Sequence
  derived and/or modified sequence
gaagaggaggggaacccacagggtccggaggtttcaggcccctagtaaacctggcaaggatttttagaagagccggagtgggatgctatcgggccgggacctgggggctcctgccggatccatgggggcggccagctgcgaggatgaggagctggaatttaagctggtgttcggggaggaaaaggaggcccccccgctgggcgcggggggattgggggaagaactggactcagaggatgccccgccatgctgccgtctggccttgggagagccccctccctatggcgctgcacctatcggtattccccgacctccaccccctcggcctggcatgcattcgccaccgccgcgaccagccccctcacctggcacctgggagagccagcccgccaggtcggtgaggctgggaggaccaggagggggtgctgggggtgctgggggtggccgtgttctcgagtgtcccagcatccgcatcacctccatctctcccacgccggagccgccagcagcgctggaggacaaccctgatgcctggggggacggctctcctagagattaccccccaccagaaggctttgggggctacagagaagcagggggccagggtgggggggccttcttcagcccaagccctggcagcagcagcctgtcctcgtggagcttcttctccgatgcctctgacgaggcagccctgtatgcagcctgcgacgaggtggagtctgagctaaatgaggcggcctcccgctttggcctgggctccccgctgccctcgccccgggcctcccctcggccatggacccccgaagatccctggagcctgtatggtccaagccccggaggccgagggccagaggatagctggctactcctcagtgctcctgggcccaccccagcctccccgcggcctgcctctccatgtggcaagcggcgctattccagctcgggaaccccatcttcagcctccccagctctgtcccgccgtggcagcctgggggaagaggggtctgagccacctccaccacccccattgcctctggcccgggacccgggctcccctggtccctttgactatgtgggggccccaccagctgagagcatccctcagaagacacggcggacttccagcgagcaggcagtggctctgcctcggtctgaggagcctgcctcatgcaatgggaagctgcccttgggagcagaggagtctgtggctcctccaggaggttcccggaaggaggtggctggcatggactacctggcagtgccctccccactcgcttggtccaaggcccggattgggggacacagccctatcttcaggacctctgccctacccccactggactggcctctgcccagccaatatgagcagctggagctgaggatcgaggtacagcctagagcccaccaccgggcccactatgagacagaaggcagccgtggagctgtcaaagctgcccctggcggtcaccccgtagtcaagctcctaggctacagtgagaagccactgaccctacagatgttcatcggcactgcagatgaaaggaacctgcggcctcatgccttctatcaggtgcaccgtatcacaggcaagatggtggccacggccagctatgaagccgtagtcagtggcaccaaggtgttggagatgactctgctgcctgagaacaacatggcggccaacattgactgcgcgggaatcctgaagcttcggaattcagacattgagcttcggaagggtgagacggacatcgggcgcaaaaacacacgtgtacggctggtgttccgggtacacgtgccccagggcggcgggaaggtcgtctcagtacaggcagcatcggtgcccatcgagtgctcccagcgctcagcccaggagctgccccaggtggaggcctacagccccagtgcctgctctgtgagaggaggcgaggaactggtactgactggctccaacttcctgccagactccaaggtggtgttcattgagaggggtcctgatgggaagctgcaatgggaggaggaggccacagtgaaccgactgcagagcaacgaggtgacgctgaccctgactgtccccgagtacagcaacaagagggtttcccggccagtccaggtctacttttatgtctccaatgggcggaggaaacgcagtcctacccagagtttcaggtttctgcctgtgatctgcaaagaggagcccctaccggactcatctctgcggggtttcccttcagcatcggcaaccccctttggcactgacatggacttctcaccacccaggcccccctacccctcctatccccatgaagaccctgcttgcgaaactccttacctatcagaaggcttcggctatggcatgccccctctgtacccccagacggggcccccaccatcctacagaccgggcctgcggatgttccctgagactaggggtaccacaggttgtgcccaaccacctgcagtttccttccttccccgccccttccctagtgacccgtatggagggcggggctcctctttctccctggggctgccattctctccgccagccccctttcggccgcctcctcttcctgcatccccaccgcttgaaggccccttcccttcccagagtgatgtgcatcccctacctgctgagggatacaataaggtagggccaggctatggccctggggagggggctccggagcaggagaaatccaggggtggctacagcagcggcttccgagacagtgtccctatccagggtatcacgctggaggaaggtgggtgtgggactgggggctgtgagtgtgagtgtgtgcaagagattgctctgcatgtttgctgagggctggagctgggcttttcagagatcgggcatccctggtctctcagggccagttggaggttcccaggaggcatgttcttgatgcctgtggctgcctgaatccaattaactgaattctgaagagtgcatggggtaactgtctcagcctttctcctgtctctgcctctgtcctctgctccaaatcataaaatctcagagctagaagcactttcaagatcattccatccagcgcattcaatttgcaagtttaggcgttgagttccagagagggatggtagcttgctgaggtcccagtcaagcacacttgccattgcctcagctttcccctaaacacggtgtctgtggtcagggttggtgaggaggagctttcctgttttgcctctccttcttcccattggctacacccatctctggccctgctgataccgattcccctgacatttcaggctaagccagcaggaaagggctaggacgggtgcctgggagcccacatggagggagttgggcaagatttgattcggagcaggtgtcaagacgtgttggggaaactgaggcccagtggaatagaagccagtagaggaggaatctagaggcctcctagattaagacctgcctggaatggattgggggtgggtctttggaaaaggaggggacccacctctagcccagtctctcaactgcccctcctttacagtgagtgagatcattggccgagacctgagtggcttccctgcacctcctggagaagagcctcctgcctgaaccacgtgaactgtcatcacctggcaaccccagccccagcctcagccctgccccctttccctccttcctggagtggtggctacagaagcttggggccaaccctggctcctctttccccagcttctgtctgtctcactgtcttccctcccctcccccagctgaggtgtggccctcaggcctggtgctgccttggagggctgggggaaggagtgtgtggaggagggaggagggtgaagactgaggctaggtgccagaatggactggagtgaaggcgtgtctagagtgtgggctggctgttgtgctggaaagctggggacaggttgatggtaataaactgctcaatgaccagtgcttcaggctccagagctctttggagagatgggttggggcagcttactccagccctggcccaaggaggcccagaagttggaaagagatggaatgtggctgggaacattgcatcccaaagagcttctcagtggaggaggctggggaaggcatgagggggctcagaggctccttgactgggaccaggattgggggccagggcttgagtaggcctctccactctcctccttgggggtccagattccttaggagctttgggatgaggcccaggaggctgcatttttccaggtccttagtcttgccaccacacagatgattctgattcatagccaagatgaggacacactgatgtagctgatctctcatttacagaggaggattctaaagttcagagagggaaaggggcttgcctgaggtcacgtagataatcagcagcacattgaacgctgcactcctgggctcctgtccccagcccccattcagacacgctgactcaggaggtccaggcctctaaggcttctctccctggagtgagggtggaggtgagggagagctggcacaagccctccctctggatcctccactcctggggattatgaagatattctggaaagatttgtgcttcagaggtagactgcagaaagcaaacagtctacccagcagctctgaatgtcacctgccctggggcttacagcactatatgagttcctggcctatcctgcaaatatgcccatgctggccttctaaatagctggtacatccatcaccactgacgggcctggcctggaaacctggtttgtcccctgtcttgatggcctacgagaggccaagttccactgggctgggaaaagtcactttgtctgtcttgttcacctggagcctgacacaccgtaggtactgagtacaaatagcttgatttggctaggcttggctgcagggggacgtgcctaaaagacattccgggcatttgcacttgggaaacttgcctcaccttcaggcttgtggggcctctctatgcccaatgagtccaggcagtcctagcaagtactcaggagagcaggggtgggtgtgacagaggctggctctggattgggggacaacagaaccagagtaactcctcgcctgttgctgctttgcaatgaatttcctttacctttctggaacacaagctgctgtgaaccaaactgatatcaagtgattagctcaccgggccttggttgcttttcaaagatccccttcagccccctgccagagtcactgccccataatcaccatgtcagaagggaccctagggcattcgtgtcctatttatcaatcttcagcaccacctctaagatctctgagagagggtggatcagcctctgtgtaaacaaaaagctgttaggacttgttgcctctcaaggtggactattctgttttctgccaggacactgccattcatgcattgtcagatatttattaaacagcagcaaagtgccagccaatttgtcctggaggaattcatagcctcatggggcaaaagtaaataaacagcttattacaattcaacaa

SEQ ID NO: 51677 - DNA, 5686 bp, Artificial Sequence
  derived and/or modified sequence
ttccagactacagttctagggaggaggctgccaacttcccgtggaggctaattcacggcccctctgggtggctgggacaagggcagcggcaaagcctggcctggatctacgcccatcaagggctgtgggcctagggacagttctcaaagcctctttggctcggactgctcccagaggcatccaggctggctaagcgttcttcatctttgggggtcctggaggaatggctgatggaggcgctgattcggcagcgcaaagacttccagaaggcccgggcagagtagccccaggccgggacctgggggctcctgccggatccatgggggcggccagctgcgaggatgaggagctggaatttaagctggtgttcggggaggaaaaggaggcccccccgctgggcgcggggggattgggggaagaactggactcagaggatgccccgccatgctgccgtctggccttgggagagccccctccctatggcgctgcacctatcggtattccccgacctccaccccctcggcctggcatgcattcgccaccgccgcgaccagccccctcacctggcacctgggagagccagcccgccaggtcggtgaggctgggaggaccaggagggggtgctgggggtgctgggggtggccgtgttctcgagtgtcccagcatccgcatcacctccatctctcccacgccggagccgccagcagcgctggaggacaaccctgatgcctggggggacggctctcctagagattaccccccaccagaaggctttgggggctacagagaagcagggggccagggtgggggggccttcttcagcccaagccctggcagcagcagcctgtcctcgtggagcttcttctccgatgcctctgacgaggcagccctgtatgcagcctgcgacgaggtggagtctgagctaaatgaggcggcctcccgctttggcctgggctccccgctgccctcgccccgggcctcccctcggccatggacccccgaagatccctggagcctgtatggtccaagccccggaggccgagggccagaggatagctggctactcctcagtgctcctgggcccaccccagcctccccgcggcctgcctctccatgtggcaagcggcgctattccagctcgggaaccccatcttcagcctccccagctctgtcccgccgtggcagcctgggggaagaggggtctgagccacctccaccacccccattgcctctggcccgggacccgggctcccctggtccctttgactatgtgggggccccaccagctgagagcatccctcagaagacacggcggacttccagcgagcaggcagtggctctgcctcggtctgaggagcctgcctcatgcaatgggaagctgcccttgggagcagaggagtctgtggctcctccaggaggttcccggaaggaggtggctggcatggactacctggcagtgccctccccactcgcttggtccaaggcccggattgggggacacagccctatcttcaggacctctgccctacccccactggactggcctctgcccagccaatatgagcagctggagctgaggatcgaggtacagcctagagcccaccaccgggcccactatgagacagaaggcagccgtggagctgtcaaagctgcccctggcggtcaccccgtagtcaagctcctaggctacagtgagaagccactgaccctacagatgttcatcggcactgcagatgaaaggaacctgcggcctcatgccttctatcaggtgcaccgtatcacaggcaagatggtggccacggccagctatgaagccgtagtcagtggcaccaaggtgttggagatgactctgctgcctgagaacaacatggcggccaacattgactgcgcgggaatcctgaagcttcggaattcagacattgagcttcggaagggtgagacggacatcgggcgcaaaaacacacgtgtacggctggtgttccgggtacacgtgccccagggcggcgggaaggtcgtctcagtacaggcagcatcggtgcccatcgagtgctcccagcgctcagcccaggagctgccccaggtggaggcctacagccccagtgcctgctctgtgagaggaggcgaggaactggtactgactggctccaacttcctgccagactccaaggtggtgttcattgagaggggtcctgatgggaagctgcaatgggaggaggaggccacagtgaaccgactgcagagcaacgaggtgacgctgaccctgactgtccccgagtacagcaacaagagggtttcccggccagtccaggtctacttttatgtctccaatgggcggaggaaacgcagtcctacccagagtttcaggtttctgcctgtgatctgcaaagaggagcccctaccggactcatctctgcggggtttcccttcagcatcggcaaccccctttggcactgacatggacttctcaccacccaggcccccctacccctcctatccccatgaagaccctgcttgcgaaactccttacctatcagaaggcttcggctatggcatgccccctctgtacccccagacggggcccccaccatcctacagaccgggcctgcggatgttccctgagactaggggtaccacaggttgtgcccaaccacctgcagtttccttccttccccgccccttccctagtgacccgtatggagggcggggctcctctttctccctggggctgccattctctccgccagccccctttcggccgcctcctcttcctgcatccccaccgcttgaaggccccttcccttcccagagtgatgtgcatcccctacctgctgagggatacaataaggtagggccaggctatggccctggggagggggctccggagcaggagaaatccaggggtggctacagcagcggcttccgagacagtgtccctatccagggtatcacgctggaggaaggtgggtgtgggactgggggctgtgagtgtgagtgtgtgcaagagattgctctgcatgtttgctgagggctggagctgggcttttcagagatcgggcatccctggtctctcagggccagttggaggttcccaggaggcatgttcttgatgcctgtggctgcctgaatccaattaactgaattctgaagagtgcatggggtaactgtctcagcctttctcctgtctctgcctctgtcctctgctccaaatcataaaatctcagagctagaagcactttcaagatcattccatccagcgcattcaatttgcaagtttaggcgttgagttccagagagggatggtagcttgctgaggtcccagtcaagcacacttgccattgcctcagctttcccctaaacacggtgtctgtggtcagggttggtgaggaggagctttcctgttttgcctctccttcttcccattggctacacccatctctggccctgctgataccgattcccctgacatttcaggctaagccagcaggaaagggctaggacgggtgcctgggagcccacatggagggagttgggcaagatttgattcggagcaggtgtcaagacgtgttggggaaactgaggcccagtggaatagaagccagtagaggaggaatctagaggcctcctagattaagacctgcctggaatggattgggggtgggtctttggaaaaggaggggacccacctctagcccagtctctcaactgcccctcctttacagtgagtgagatcattggccgagacctgagtggcttccctgcacctcctggagaagagcctcctgcctgaaccacgtgaactgtcatcacctggcaaccccagccccagcctcagccctgccccctttccctccttcctggagtggtggctacagaagcttggggccaaccctggctcctctttccccagcttctgtctgtctcactgtcttccctcccctcccccagctgaggtgtggccctcaggcctggtgctgccttggagggctgggggaaggagtgtgtggaggagggaggagggtgaagactgaggctaggtgccagaatggactggagtgaaggcgtgtctagagtgtgggctggctgttgtgctggaaagctggggacaggttgatggtaataaactgctcaatgaccagtgcttcaggctccagagctctttggagagatgggttggggcagcttactccagccctggcccaaggaggcccagaagttggaaagagatggaatgtggctgggaacattgcatcccaaagagcttctcagtggaggaggctggggaaggcatgagggggctcagaggctccttgactgggaccaggattgggggccagggcttgagtaggcctctccactctcctccttgggggtccagattccttaggagctttgggatgaggcccaggaggctgcatttttccaggtccttagtcttgccaccacacagatgattctgattcatagccaagatgaggacacactgatgtagctgatctctcatttacagaggaggattctaaagttcagagagggaaaggggcttgcctgaggtcacgtagataatcagcagcacattgaacgctgcactcctgggctcctgtccccagcccccattcagacacgctgactcaggaggtccaggcctctaaggcttctctccctggagtgagggtggaggtgagggagagctggcacaagccctccctctggatcctccactcctggggattatgaagatattctggaaagatttgtgcttcagaggtagactgcagaaagcaaacagtctacccagcagctctgaatgtcacctgccctggggcttacagcactatatgagttcctggcctatcctgcaaatatgcccatgctggccttctaaatagctggtacatccatcaccactgacgggcctggcctggaaacctggtttgtcccctgtcttgatggcctacgagaggccaagttccactgggctgggaaaagtcactttgtctgtcttgttcacctggagcctgacacaccgtaggtactgagtacaaatagcttgatttggctaggcttggctgcagggggacgtgcctaaaagacattccgggcatttgcacttgggaaacttgcctcaccttcaggcttgtggggcctctctatgcccaatgagtccaggcagtcctagcaagtactcaggagagcaggggtgggtgtgacagaggctggctctggattgggggacaacagaaccagagtaactcctcgcctgttgctgctttgcaatgaatttcctttacctttctggaacacaagctgctgtgaaccaaactgatatcaagtgattagctcaccgggccttggttgcttttcaaagatccccttcagccccctgccagagtcactgccccataatcaccatgtcagaagggaccctagggcattcgtgtcctatttatcaatcttcagcaccacctctaagatctctgagagagggtggatcagcctctgtgtaaacaaaaagctgttaggacttgttgcctctcaaggtggactattctgttttctgccaggacactgccattcatgcattgtcagatatttattaaacagcagcaaagtgccagccaatttgtcctggaggaattcatagcctcatggggcaaaagtaaataaacagcttattacaattcaacaa

SEQ ID NO: 51678 - DNA, 5367 bp, Artificial Sequence
  derived and/or modified sequence
atgggggcggccagctgcgaggatgaggagctggaatttaagctggtgttcggggaggaaaaggaggcccccccgctgggcgcggggggattgggggaagaactggactcagaggatgccccgccatgctgccgtctggccttgggagagccccctccctatggcgctgcacctatcggtattccccgacctccaccccctcggcctggcatgcattcgccaccgccgcgaccagccccctcacctggcacctgggagagccagcccgccaggtcggtgaggctgggaggaccaggagggggtgctgggggtgctgggggtggccgtgttctcgagtgtcccagcatccgcatcacctccatctctcccacgccggagccgccagcagcgctggaggacaaccctgatgcctggggggacggctctcctagagattaccccccaccagaaggctttgggggctacagagaagcagggggccagggtgggggggccttcttcagcccaagccctggcagcagcagcctgtcctcgtggagcttcttctccgatgcctctgacgaggcagccctgtatgcagcctgcgacgaggtggagtctgagctaaatgaggcggcctcccgctttggcctgggctccccgctgccctcgccccgggcctcccctcggccatggacccccgaagatccctggagcctgtatggtccaagccccggaggccgagggccagaggatagctggctactcctcagtgctcctgggcccaccccagcctccccgcggcctgcctctccatgtggcaagcggcgctattccagctcgggaaccccatcttcagcctccccagctctgtcccgccgtggcagcctgggggaagaggggtctgagccacctccaccacccccattgcctctggcccgggacccgggctcccctggtccctttgactatgtgggggccccaccagctgagagcatccctcagaagacacggcggacttccagcgagcaggcagtggctctgcctcggtctgaggagcctgcctcatgcaatgggaagctgcccttgggagcagaggagtctgtggctcctccaggaggttcccggaaggaggtggctggcatggactacctggcagtgccctccccactcgcttggtccaaggcccggattgggggacacagccctatcttcaggacctctgccctacccccactggactggcctctgcccagccaatatgagcagctggagctgaggatcgaggtacagcctagagcccaccaccgggcccactatgagacagaaggcagccgtggagctgtcaaagctgcccctggcggtcaccccgtagtcaagctcctaggctacagtgagaagccactgaccctacagatgttcatcggcactgcagatgaaaggaacctgcggcctcatgccttctatcaggtgcaccgtatcacaggcaagatggtggccacggccagctatgaagccgtagtcagtggcaccaaggtgttggagatgactctgctgcctgagaacaacatggcggccaacattgactgcgcgggaatcctgaagcttcggaattcagacattgagcttcggaagggtgagacggacatcgggcgcaaaaacacacgtgtacggctggtgttccgggtacacgtgccccagggcggcgggaaggtcgtctcagtacaggcagcatcggtgcccatcgagtgctcccagcgctcagcccaggagctgccccaggtggaggcctacagccccagtgcctgctctgtgagaggaggcgaggaactggtactgactggctccaacttcctgccagactccaaggtggtgttcattgagaggggtcctgatgggaagctgcaatgggaggaggaggccacagtgaaccgactgcagagcaacgaggtgacgctgaccctgactgtccccgagtacagcaacaagagggtttcccggccagtccaggtctacttttatgtctccaatgggcggaggaaacgcagtcctacccagagtttcaggtttctgcctgtgatctgcaaagaggagcccctaccggactcatctctgcggggtttcccttcagcatcggcaaccccctttggcactgacatggacttctcaccacccaggcccccctacccctcctatccccatgaagaccctgcttgcgaaactccttacctatcagaaggcttcggctatggcatgccccctctgtacccccagacggggcccccaccatcctacagaccgggcctgcggatgttccctgagactaggggtaccacaggttgtgcccaaccacctgcagtttccttccttccccgccccttccctagtgacccgtatggagggcggggctcctctttctccctggggctgccattctctccgccagccccctttcggccgcctcctcttcctgcatccccaccgcttgaaggccccttcccttcccagagtgatgtgcatcccctacctgctgagggatacaataaggtagggccaggctatggccctggggagggggctccggagcaggagaaatccaggggtggctacagcagcggcttccgagacagtgtccctatccagggtatcacgctggaggaaggtgggtgtgggactgggggctgtgagtgtgagtgtgtgcaagagattgctctgcatgtttgctgagggctggagctgggcttttcagagatcgggcatccctggtctctcagggccagttggaggttcccaggaggcatgttcttgatgcctgtggctgcctgaatccaattaactgaattctgaagagtgcatggggtaactgtctcagcctttctcctgtctctgcctctgtcctctgctccaaatcataaaatctcagagctagaagcactttcaagatcattccatccagcgcattcaatttgcaagtttaggcgttgagttccagagagggatggtagcttgctgaggtcccagtcaagcacacttgccattgcctcagctttcccctaaacacggtgtctgtggtcagggttggtgaggaggagctttcctgttttgcctctccttcttcccattggctacacccatctctggccctgctgataccgattcccctgacatttcaggctaagccagcaggaaagggctaggacgggtgcctgggagcccacatggagggagttgggcaagatttgattcggagcaggtgtcaagacgtgttggggaaactgaggcccagtggaatagaagccagtagaggaggaatctagaggcctcctagattaagacctgcctggaatggattgggggtgggtctttggaaaaggaggggacccacctctagcccagtctctcaactgcccctcctttacagtgagtgagatcattggccgagacctgagtggcttccctgcacctcctggagaagagcctcctgcctgaaccacgtgaactgtcatcacctggcaaccccagccccagcctcagccctgccccctttccctccttcctggagtggtggctacagaagcttggggccaaccctggctcctctttccccagcttctgtctgtctcactgtcttccctcccctcccccagctgaggtgtggccctcaggcctggtgctgccttggagggctgggggaaggagtgtgtggaggagggaggagggtgaagactgaggctaggtgccagaatggactggagtgaaggcgtgtctagagtgtgggctggctgttgtgctggaaagctggggacaggttgatggtaataaactgctcaatgaccagtgcttcaggctccagagctctttggagagatgggttggggcagcttactccagccctggcccaaggaggcccagaagttggaaagagatggaatgtggctgggaacattgcatcccaaagagcttctcagtggaggaggctggggaaggcatgagggggctcagaggctccttgactgggaccaggattgggggccagggcttgagtaggcctctccactctcctccttgggggtccagattccttaggagctttgggatgaggcccaggaggctgcatttttccaggtccttagtcttgccaccacacagatgattctgattcatagccaagatgaggacacactgatgtagctgatctctcatttacagaggaggattctaaagttcagagagggaaaggggcttgcctgaggtcacgtagataatcagcagcacattgaacgctgcactcctgggctcctgtccccagcccccattcagacacgctgactcaggaggtccaggcctctaaggcttctctccctggagtgagggtggaggtgagggagagctggcacaagccctccctctggatcctccactcctggggattatgaagatattctggaaagatttgtgcttcagaggtagactgcagaaagcaaacagtctacccagcagctctgaatgtcacctgccctggggcttacagcactatatgagttcctggcctatcctgcaaatatgcccatgctggccttctaaatagctggtacatccatcaccactgacgggcctggcctggaaacctggtttgtcccctgtcttgatggcctacgagaggccaagttccactgggctgggaaaagtcactttgtctgtcttgttcacctggagcctgacacaccgtaggtactgagtacaaatagcttgatttggctaggcttggctgcagggggacgtgcctaaaagacattccgggcatttgcacttgggaaacttgcctcaccttcaggcttgtggggcctctctatgcccaatgagtccaggcagtcctagcaagtactcaggagagcaggggtgggtgtgacagaggctggctctggattgggggacaacagaaccagagtaactcctcgcctgttgctgctttgcaatgaatttcctttacctttctggaacacaagctgctgtgaaccaaactgatatcaagtgattagctcaccgggccttggttgcttttcaaagatccccttcagccccctgccagagtcactgccccataatcaccatgtcagaagggaccctagggcattcgtgtcctatttatcaatcttcagcaccacctctaagatctctgagagagggtggatcagcctctgtgtaaacaaaaagctgttaggacttgttgcctctcaaggtggactattctgttttctgccaggacactgccattcatgcattgtcagatatttattaaacagcagcaaagtgccagccaatttgtcctggaggaattcatagcctcatggggcaaaagtaaataaacagcttattacaattcaacaa

SEQ ID NO: 51679 - DNA, 2924 bp, Artificial Sequence
  derived and/or modified sequence
atctacgcccatcaagggctgtgggcctagggacagttctcaaagcctctttggctcggactgctcccagaggcatccaggctggctaagcgttcttcatctttgggggtcctggaggaatggctgatggaggcgctgattcggcagcgcaaagacttccagaaggcccgggcagagtagccccaggccgggacctgggggctcctgccggatccatgggggcggccagctgcgaggatgaggagctggaatttaagctggtgttcggggaggaaaaggaggcccccccgctgggcgcggggggattgggggaagaactggactcagaggatgccccgccatgctgccgtctggccttgggagagccccctccctatggcgctgcacctatcggtattccccgacctccaccccctcggcctggcatgcattcgccaccgccgcgaccagccccctcacctggcacctgggagagccagcccgccaggtcggtgaggctgggaggaccaggagggggtgctgggggtgctgggggtggccgtgttctcgagtgtcccagcatccgcatcacctccatctctcccacgccggagccgccagcagcgctggaggacaaccctgatgcctggggggacggctctcctagagattaccccccaccagaaggctttgggggctacagagaagcagggggccagggtgggggggccttcttcagcccaagccctggcagcagcagcctgtcctcgtggagcttcttctccgatgcctctgacgaggcagccctgtatgcagcctgcgacgaggtggagtctgagctaaatgaggcggcctcccgctttggcctgggctccccgctgccctcgccccgggcctcccctcggccatggacccccgaagatccctggagcctgtatggtccaagccccggaggccgagggccagaggatagctggctactcctcagtgctcctgggcccaccccagcctccccgcggcctgcctctccatgtggcaagcggcgctattccagctcgggaaccccatcttcagcctccccagctctgtcccgccgtggcagcctgggggaagaggggtctgagccacctccaccacccccattgcctctggcccgggacccgggctcccctggtccctttgactatgtgggggccccaccagctgagagcatccctcagaagacacggcggacttccagcgagcaggcagtggctctgcctcggtctgaggagcctgcctcatgcaatgggaagctgcccttgggagcagaggagtctgtggctcctccaggaggttcccggaaggaggtggctggcatggactacctggcagtgccctccccactcgcttggtccaaggcccggattgggggacacagccctatcttcaggacctctgccctacccccactggactggcctctgcccagccaatatgagcagctggagctgaggatcgaggtacagcctagagcccaccaccgggcccactatgagacagaaggcagccgtggagctgtcaaagctgcccctggcggtcaccccgtagtcaagctcctaggctacagtgagaagccactgaccctacagatgttcatcggcactgcagatgaaaggaacctgcggcctcatgccttctatcaggtgcaccgtatcacaggcaagatggtggccacggccagctatgaagccgtagtcagtggcaccaaggtgttggagatgactctgctgcctgagaacaacatggcggccaacattgactgcgcgggaatcctgaagcttcggaattcagacattgagcttcggaagggtgagacggacatcgggcgcaaaaacacacgtgtacggctggtgttccgggtacacgtgccccagggcggcgggaaggtcgtctcagtacaggcagcatcggtgcccatcgagtgctcccagcgctcagcccaggagctgccccaggtggaggcctacagccccagtgcctgctctgtgagaggaggcgaggaactggtactgactggctccaacttcctgccagactccaaggtggtgttcattgagaggggtcctgatgggaagctgcaatgggaggaggaggccacagtgaaccgactgcagagcaacgaggtgacgctgaccctgactgtccccgagtacagcaacaagagggtttcccggccagtccaggtctacttttatgtctccaatgggcggaggaaacgcagtcctacccagagtttcaggtttctgcctgtgatctgcaaagaggagcccctaccggactcatctctgcggggtttcccttcagcatcggcaaccccctttggcactgacatggacttctcaccacccaggcccccctacccctcctatccccatgaagaccctgcttgcgaaactccttacctatcagaaggcttcggctatggcatgccccctctgtacccccagacggggcccccaccatcctacagaccgggcctgcggatgttccctgagactaggggtaccacaggttgtgcccaaccacctgcagtttccttccttccccgccccttccctagtgacccgtatggagggcggggctcctctttctccctggggctgccattctctccgccagccccctttcggccgcctcctcttcctgcatccccaccgcttgaaggccccttcccttcccagagtgatgtgcatcccctacctgctgagggatacaataaggtagggccaggctatggccctggggagggggctccggagcaggagaaatccaggggtggctacagcagcggcttccgagacagtgtccctatccagggtatcacgctggaggaagtgagtgagatcattggccgagacctgagtggcttccctgcacctcctggagaagagcctcctgcctga

SEQ ID NO: 51680 - DNA, 2895 bp, Artificial Sequence
  derived and/or modified sequence
atgattactaccctccccagcctcttacccgcatccttggcttcaatcagccatagagtgactaacctgccatcaaacagcttgtcccataacccaggacttagtaagcctgattttcccggaaactctagccctgggcttccctccagtagctcacccggaagggacttaggagcacctgctggcagcatgggggcagcatcgtgcgaggatgaggagcttgaattcaaactggtcttcggagaagagaaagaagcccctccgctgggtgcaggaggtctaggagaagagctggacagtgaggacgccccaccatgctgtcgtctggctctaggcgaaccgccaccatacggagcggcacccatcgggatacccaggccgcctcccccaaggcctggcatgcactctccacccccaaggcctgctccaagtcctgggacctgggagagtcagcccgctcgctcagtacgcttaggcggacccggaggcggtgccggtggcgcaggtgggggacgggtgctggaatgcccctccatccggattacaagtatttcaccaactcctgagccccctgcagctctggaggataacccggatgcttggggggacgggtctccaagagattacccccctcccgaggggttcggaggttatcgggaggccggtggtcaaggtggaggcgcttttttcagtccaagcccgggaagctcatctctgtcctcttggtctttcttcagcgacgcttcagatgaagccgctttgtacgccgcatgcgatgaagtcgaatccgagttgaacgaggctgccagccggttcggcctcggttcgcccttgcccagcccgcgagccagccccaggccatggacacccgaggatccgtggtcactgtatggacccagccctgggggtcgagggcctgaagacagctggctgctgctgagtgcacccggaccaactcccgcatcgccaagacccgcttccccatgcggcaagagacggtacagtagctccgggaccccttctagcgctagcccagcgctgagtcgcagggggagtttaggcgaggaaggttctgagccacctccccctccgcctctcccgctcgctagggaccctggatcaccaggacccttcgactacgtgggcgctcccccagctgagtccattccacagaagactaggagaacatctagtgagcaagcggtggcactcccgaggtccgaggagccagctagttgcaacggcaagctgccactgggtgccgaggagtcggtcgcccctcctggtggctcaaggaaagaagttgccggaatggattacttggcggtccccagtcctctcgcttggagtaaggccaggattggtggacatagcccaatatttagaacttcagcccttcctcctcttgattggccgctgccaagccagtatgagcagctagaattaagaatcgaggtgcaaccaagggcacatcacagggctcactacgaaactgaagggagcaggggggctgtgaaagcagcacccggtggacatccagtggtgaaactgctcggctattccgagaaacccctcaccctgcaaatgttcatcgggacagccgacgagcggaatttgcgcccacacgctttttaccaggttcataggatcaccggcaaaatggtagccacagcctcctatgaagcagtggtgtccggcacgaaagtgttggagatgactctccttccggagaacaacatggccgctaacatcgactgcgccggaattcttaagcttcgaaacagcgacattgagctgagaaagggtgaaaccgatatcggacgcaagaataccagagtgagacttgtattccgcgtccatgttcctcagggcggaggcaaggtggtaagtgttcaggccgcatccgtgcccatcgagtgtagtcagcggagcgcacaggaattgccccaggtggaagcctattccccatctgcatgcagcgtaagagggggagaagaattagtactcaccggcagcaacttcctgccagattcgaaggtcgtgtttatcgagcgcggtcccgacggaaaattgcagtgggaggaggaggctacggtgaaccggctgcagtctaacgaagtgacgctcaccctgacagtgcccgaatattccaacaagcgtgtgtctcggccagtgcaagtgtacttctacgtctccaatggtcggagaaaaagatcaccgacacagtctttcaggttcctcccggtgatttgcaaggaagagccattgccagactcatctctgagaggcttcccctcagcttcagccacgccctttggtaccgatatggatttctccccacctaggccaccctacccttcctatccacacgaggaccccgcttgcgagacaccctatcttagcgagggattcggctacggaatgcctccgttataccctcaaaccggcccacctccttcctacagacccggactgagaatgttccccgagactaggggtacgaccggctgcgcccagcctccagccgtgtccttcctccctcggcctttcccctctgacccgtacggagggaggggatcctcattttcccttggcctacccttctcccctcctgccccattccgccctccgccacttccagcctccccacctcttgagggaccctttccttcccagagtgatgtgcatcccctcccagctgaaggctataataaggtaggcccaggatacggtccgggagaaggcgctccagagcaagagaaatctcggggagggtatagtagcggctttagagatagtgtgcccatccaagggatcacgctggaggagggcggttgcggtacgggaggctgcgagtgtgagtgcgtgcaggagattgcgctccacgtctgctag

SEQ ID NO: 51681 - DNA, 2745 bp, Artificial Sequence
  derived and/or modified sequence
atgcttagcggacgagaccttggcgctccggctggaagcatgggagccgctagttgtgaggacgaagagttggagttcaaactggtgtttggagaggagaaagaagcaccgcctctgggagccggaggcctcggtgaggagctcgactcggaagacgctccgccttgctgtcgcctcgctctgggagaaccacctccttacggcgctgctccaatcgggatccccaggccaccccctcccaggcctggtatgcactcccctcctcccagaccggctccaagtcctgggacatgggagagccagcccgctcggagcgtccggctgggaggacccggagggggtgccggaggtgctgggggagggcgagtgctggaatgtccctcaattcggatcacttcaatcagtccaaccccagagccacccgctgctttagaagacaatcctgatgcatggggagatggttcaccacgcgactacccccctcctgaaggcttcggcggataccgggaagcagggggtcaaggcggaggagccttcttcagcccatctccaggatcttcaagtctatcgagctggtcatttttttcagatgccagcgatgaggccgctctctacgcggcttgtgatgaggtagagagcgaactgaatgaagccgctagtagatttggactgggcagccctctgcccagccctcgggcttctcctcggccatggacccccgaggatccctggtcactgtacggtccatctccgggtggaagaggcccagaggacagctggctacttctatctgctcccggaccgactcctgcaagtcctagaccagcttcaccatgtgggaaaagacggtattcctcctcaggcactccatcttctgccagccctgctctatcccgcaggggcagcctgggcgaggagggctctgaaccccctcccccacctccacttcccttagcgcgtgacccaggtagcccaggtccctttgactacgtgggagcaccccctgccgagagtatcccacagaagaccaggcggacgagcagtgagcaagctgtggccttgcctaggtccgaagagccagcttcgtgcaacggaaagcttccactcggagccgaggaatccgtggccccacccggtgggagcagaaaggaggtagctggcatggactacctcgcagttccctccccgctggcatggtctaaggcaaggatcggcggtcattcaccgatttttcgcaccagtgccctgccaccactggactggcctctgccttcacaatatgaacaattagagctgcgaatcgaagttcagcctcgggctcatcaccgtgcccactatgagacagagggctcccgaggggctgtgaaggccgctcccggtggccatcccgtggtcaaactcttgggctactccgagaagcctctcactctacagatgttcataggcaccgctgacgaaaggaacctgcggccacatgcattttaccaagttcataggatcaccgggaaaatggtggccactgcctcctacgaggcagtggtgtccggcacgaaggtattggaaatgacactattaccagagaacaatatggcagccaacattgactgtgcaggcatcttgaagctccgtaattccgacatagagctaagaaagggtgaaactgatatagggagaaaaaacacaagggtgagattagtatttcgggtgcatgttccccagggaggcggtaaggtggtgagtgtgcaagcagccagcgtcccaattgaatgttcccagagaagtgcgcaagagctcccacaggtggaagcttatagtccctcagcgtgcagcgtccggggtggtgaggagctggtgctgaccgggtccaacttcctacccgattcaaaagtcgtgttcattgagcggggacctgatggcaaattgcaatgggaagaagaagccactgtaaacagactacaatccaacgaagtcacacttactttaaccgtgcccgagtactccaataaacgggtgtcgcgcccagtccaggtgtacttctatgtgtctaatggcagacgtaaacggagccccacccagagcttcagatttctcccagttatttgcaaagaagagccactgccggactcctccttgcggggattccccagtgcctcagctacaccatttggtacggatatggacttttctcctcccaggcctccgtatccatcttatcctcacgaggacccagcctgcgagacgccttacctgagtgaaggcttcggttatgggatgcccccactgtatccgcagacagggccaccaccgtcctatcgccctgggcttcgaatgttccccgagacgcggggtaccactggatgcgcccagcctccagccgtatcgttcctaccacgtccattccctagcgacccttacggaggccgtggcagctcttttagtctgggccttccattttcacctcctgcaccattccgccctccccctctgcctgcctccccaccactggagggaccctttcctagccagagtgacgtgcatcccctcccagccgaggggtataataaggtgggcccaggatacggacccggagagggcgctccagagcaagagaagtcacgtggcggatactcctccggttttcgagacagtgtgcctattcaaggtattactctggaggagggtgggtgcgggacaggcggttgtgagtgtgagtgtgtgcaggaaattgccctgcatgtctgctag

SEQ ID NO: 51682 - DNA, 2802 bp, Artificial Sequence
  derived and/or modified sequence
atggccgatggcggtgcagatagtgccgctcagaggctccctgaaggtccaggacgcgttgctcctgggagggatttgggcgctcccgcaggcagtatgggggcagcctcttgcgaagacgaagagctagagtttaagctagtgttcggcgaagaaaaggaggctcctccgcttggagccggaggcctgggcgaagagctcgatagcgaagatgcccctccgtgctgtcgactggctttgggcgagccacccccttacggcgctgccccaatagggataccccgaccgccaccccctcgacctggtatgcactccccacctcctcggccagctcccagtcccggaacctgggagtcccagcccgctcgctctgtaagacttgggggacccggtggtggcgcaggcggagccggaggaggccgagtgctagaatgcccgtctattagaataactagcatttctcccacaccggagccgccagccgctctggaagataatccggacgcctggggagatggaagccctagagattaccctccacctgagggattcggaggttatcgagaagccggagggcagggtggcggtgcctttttttccccttccccaggtagtagttcgttgagcagctggtcttttttttctgacgcctctgacgaggcagccctgtatgccgcttgcgacgaggtcgaatccgaactgaatgaagcggcatcgaggtttgggctggggagcccactcccatcaccccgagcgtcaccccgaccatggacacccgaagacccatggagcctgtacggacctagccccggaggaagggggccagaggacagttggctactgttatccgcccctggcccaacacctgcctcccccagaccggcttcaccttgcgggaagagacgctattccagcagcggcacaccctcttccgccagtcccgctctctccagaaggggtagcctcggagaggaaggctctgaacctccccctcctccacccttaccactcgccagagaccctggatctcccggaccctttgactatgtgggggctccgccagcagaatcaattccgcagaaaacaaggcgcaccagtagcgagcaggcagttgccctccctagatctgaggagcccgcaagttgtaatggcaagctaccgctaggggctgaggagtcagtggcgccacccggaggttcccgcaaagaagtggcaggtatggattacctcgccgtgccatctccgctcgcttggtctaaagccagaatcggaggacactctcctattttccgaacttctgctcttccgccattggactggcctctgcccagccaatatgagcaactcgagctgagaatagaagttcagcctagggctcaccatagggcccactatgaaactgaagggtctagaggcgctgttaaagccgcacccggagggcacccagtcgttaagctgcttgggtactcagaaaagcccctaacgttgcaaatgttcatcggcacggcagatgaaaggaacctgaggccccacgctttttatcaggtgcatcgcatcactgggaagatggtcgccaccgcatcatatgaagccgtcgtcagtggaaccaaagttttagagatgaccctgttgccagagaacaatatggcggcaaacattgattgcgcaggcatacttaagctccgcaacagtgacattgagctgaggaagggggagactgacatcggccgaaagaacaccagagtgagattggtttttcgcgtgcacgttccacaggggggaggaaaagtggtcagcgtgcaggcggcttctgtgccaatcgaatgcagccagagatccgcacaggagcttccacaggtagaggcatattcaccatccgcatgtagtgtgaggggaggagaggaactagttctgacaggtagtaacttcttgcctgactcaaaggtcgtgtttattgagcggggacccgatgggaaactgcagtgggaagaggaagccacggtgaaccgcctgcaatccaatgaagtgaccctaactttgacagttccagagtattccaacaaacgcgtgagcaggcccgttcaagtgtatttttacgtgtccaacggcagaaggaaacgtagccctacacagtccttcaggtttcttcccgtgatatgcaaagaggagccactcccagatagctccctccggggtttccccagcgctagcgcaacccccttcggtactgacatggatttctctccaccacgccctccctatcccagctatccccatgaggatcctgcttgtgagacaccttacctgtcagagggattcggatatgggatgcctcctttataccctcagacaggacctccaccatcatacaggccgggtctgagaatgtttccagagactcggggtacaaccgggtgtgctcaaccacccgctgtttcgttcctgccacgaccttttcccagcgacccgtatggcggaagaggatcaagcttctccctgggcttaccattctcacctcccgcaccttttagaccccctcccctgccagcatcccctccgctcgagggtccctttcctagtcagagtgatgttcacccacttcctgctgaggggtataacaaggttggcccaggatatggtcctggagaaggagcccctgagcaggaaaaatcccggggagggtactccagtggcttcagagattctgtgccaattcaaggaataactttggaggagggcggatgtggtactggaggctgcgaatgcgaatgcgtgcaggaaatagctctgcacgtatgctag

SEQ ID NO: 51683 - DNA, 2706 bp, Artificial Sequence
  derived and/or modified sequence
atgggtgctgcttcctgcgaagatgaggagctggaattcaagctcgtgtttggcgaggagaaagaggcaccccctctgggagctggcggattaggtgaggagttggacagtgaggacgctccaccttgttgtaggctggccctgggggaacctcccccatatggggcagctcccattggaatccctagaccacctccccctcgtcccggaatgcactctcctccccctcgccctgccccttctccagggacttgggagagtcagcctgccaggagcgtgcggctcggcggacctggcggtggagccggtggggctgggggaggcagggtactggaatgtccttccattcgaataacttcgatctctcccaccccagaaccccctgcagcattggaggacaacccagacgcgtggggtgacggcagcccccgtgattaccctcctcccgaagggtttgggggatatcgggaggccggagggcaagggggaggggcattcttttccccgtccccaggctcttcttcactgtcgtcttggagcttcttttccgatgcaagcgacgaggcagccttatatgccgcttgcgacgaggttgaatctgaacttaatgaggccgcatcgagattcggactggggtccccattgccatctccacgggctagcccacgtccttggaccccggaggacccttggtccttgtacggacctagcccagggggtcggggaccagaggactcctggctccttctgagtgctcccggacctacccctgcttcacctcgaccagcaagtccctgcgggaaaaggaggtacagtagttctggcaccccatccagcgcttctccagcccttagccgccgaggctccctcggggaggagggatcagaaccaccccctcctccgccactgccactagccagggaccctggaagccccggtccattcgattacgtgggtgctcctccagcagagtctattcctcagaagacacgcaggactagctctgagcaggctgtcgcattacccaggtctgaggaacctgcctcctgcaacggtaagctgccattaggtgctgaagagtctgttgctcccccagggggaagccgaaaggaagttgccggaatggactatctcgctgtccccagcccgctggcctggtccaaggccaggattggagggcactctcccattttccggacctccgcactccctcccctggattggcctttgccatctcagtatgaacagctggaactgcgtatcgaggtacagcccagagcccatcacagggcccattacgaaacagaggggtcccgcggagctgtgaaggcagctcctggagggcatcccgtggtgaaactgcttggatatagtgaaaagccgctgactctacagatgttcataggaactgccgatgaaagaaatctccgacctcatgcgttttatcaggtccatagaatcaccggaaagatggttgcaacggctagctacgaagctgtggtctccggtacaaaagtgttggaaatgaccttactccctgagaacaacatggcggctaacattgactgtgccggaattctgaagctcagaaacagcgacatagagttaagaaagggtgagaccgatataggccgtaagaacaccagagtgcgactggtgttccgtgttcacgtgccacagggtggcggaaaggtggtgagcgtgcaggccgcttccgtgccaatagaatgcagccagcggtccgcacaagaactccctcaggttgaggcctattccccctctgcctgcagtgtccggggtggagaagagttggtattaacaggttcaaatttcctgccggactctaaggtcgtatttatcgaaaggggaccagacgggaaactccagtgggaggaggaggccacagtcaacagactgcagtccaatgaggtgaccctgacgctcaccgtgcccgagtattcgaacaaaagagtctcccgtccggtgcaagtatatttttatgtttcgaacgggaggagaaagaggtcacctacacagtcgtttagattcctccctgttatttgtaaagaggaaccactgcctgacagtagcttgcgaggctttcccagcgcatctgctaccccatttgggactgatatggacttttcccctccacgcccaccgtacccatcctaccctcacgaggatcctgcatgcgaaaccccttatttatctgaaggcttcgggtacgggatgccgccattatacccccaaaccgggcctcccccaagttacagaccaggcctcaggatgtttcctgaaacaagaggaactacaggatgcgcacagccacctgctgttagcttcttgcctaggccattcccttctgatccctatggcggacgtggatcgtcttttagcctcggcctcccattttcaccaccagcaccttttaggccccctccgctacccgcttccccgcctctggaaggaccttttccatcacagtcagacgttcatcccctaccagccgaggggtacaataaggtgggccctggttacggccctggagagggggcacccgagcaggagaagagccgcggaggttatagctcgggattccgggactctgttcccatccaggggattacccttgaggagggtggctgcggcactggtggctgcgaatgcgagtgtgtccaagagatcgctctacatgtgtgctag

SEQ ID NO: 51684 - DNA, 2805 bp, Artificial Sequence
  derived and/or modified sequence
atggctgatggaggcgcagacagtgcggcacagaggctgcctgagggtcccggaagagtggctcccggacgggacctgggtgcacccgctggatccatgggtgctgcttcatgtgaggatgaagaacttgagttcaagttggtctttggcgaggaaaaggaagctcctccgcttggggcaggagggctgggggaggaactggacagcgaggacgcacctccatgctgccgcctggccctgggcgagccccctccctatggagctgcccctattggaattcccaggccaccccctcccagaccaggtatgcactcccctcccccaaggcccgcaccatctccaggcacatgggagagccagccggcaaggtctgtgcgactgggagggccaggtggcggagccggtggggcaggagggggaagggtgctggagtgcccttctatccggataacctccatttcacccaccccagagcccccagctgctctcgaagataaccccgacgcatggggcgacggatcccccagagactacccaccgccagaaggattcggcggttatcgcgaagccggtggacagggcggtggcgcttttttctcaccctccccgggatcttcatcactgtcctcttggagcttttttagtgatgcatccgacgaagctgctttatacgcggcatgcgacgaggtggaaagtgaattgaatgaagccgcaagcaggtttggcctgggctctcctctcccctctccccgtgcttcccctagaccatggaccccagaagatccctggtcactgtacggaccctcccctggtggaaggggccctgaggattcctggctcctgctgtccgctcccggacctactcctgctagccccaggccagccagcccatgcggtaaacggaggtattcgtcttccggtaccccaagctctgctagccctgcattgtcacgcagaggaagccttggtgaagaaggttccgagccacccccaccgccaccactgccactcgctcgggatcctggcagtcccggtccctttgactatgttggagcacccccagcagagagtataccacagaaaacaagaagaacgtcttctgagcaggccgtcgcactgcctcgcagcgaggagcccgcaagctgcaatggaaaattgcctctcggcgctgaggagagtgtcgctcctccaggaggttcaagaaaagaagtggcaggaatggactatctcgcagtaccatccccacttgcatggagcaaggctaggattgggggacacagtcctatcttccgaacttcagcactccccccactggattggccactcccctctcaatacgagcagttggagctccgcatagaagttcagcctagagcacatcatcgcgctcattatgaaacagagggctccagaggtgccgtgaaagcagccccaggcggacaccctgtcgtgaaactcttaggatatagtgaaaaacccctgaccctccagatgttcattggtacagcagacgagaggaacctgcgccctcatgccttctaccaggtgcaccggataactggaaagatggttgccaccgccagctacgaagccgttgtgagcggcactaaagtgctggaaatgaccctgctcccagagaataatatggcggctaacatcgactgcgccggtatcctcaagctgagaaatagcgacatcgagctccgaaagggggagaccgacattggcagaaagaatacacgtgtccggctcgtctttcgcgtgcatgtgccccagggcggaggtaaggtggtctctgtgcaggccgcatcagtgccaatagagtgttctcagcgaagcgctcaggaactgccacaggtagaagcctacagccctagcgcctgcagcgtcagaggcggagaggagctcgtgctgacgggctccaactttttacctgactcaaaagttgtttttatagaacgaggacccgacgggaagctgcagtgggaggaggaagcaactgtcaacagactccaatctaacgaagtaaccctcaccttgactgtccccgagtacagcaacaaacgtgtcagtcgcccagtccaggtgtacttctatgtcagcaatgggaggcgtaagcgtagtccaacccaatcattcaggttcctcccggttatttgcaaagaggagccattgcctgattcctctctgcgaggcttcccttcagccagtgccactcctttcggtacagatatggactttagtccccctcggcctccgtatccgagctacccccacgaggaccccgcatgcgagacgccttacctgagtgaaggcttcggctacggcatgccaccgttatatcctcagacaggaccacccccatcgtataggcctgggttgcgaatgttccctgagacccgaggaaccacagggtgtgcccagcccccagctgtctcttttcttccacgccctttcccctccgatccttacgggggaaggggcagcagtttcagtctgggccttccattctctccccctgcgccatttcgtccacccccactacccgcttcacctccgctagaaggtccgttcccttcgcagtccgatgtgcacccactccccgctgagggctacaacaaagtgggacccggatatggaccaggcgaaggggctcctgaacaggaaaagtccaggggcggttacagttccgggttccgggattccgtgccgatccaaggcatcactttggaagaggtcagtgaaataatcggtcgagatctctctgggttccccgctcccccaggcgaagagccacccgcttag

SEQ ID NO: 51685 - protein, 1472 aa, Artificial Sequence
  derived and/or modified sequence
MDNALFCLAAVSNLDIESKLSVYYRAPWHQQRNIFLPATRPPCVEELHRHARQSLQALRREHRSRSDRREQRAAAPLSIAAPPLPAYPPAHSQRRREFKDRHFLTFNSTRSPSPTECCHMTPWSRKSHPPEDEDTDVMLGQRPKNPIHNIPSTLDKQTNWSKALPLPTPEEKMKQDAQVISSCIIPINVTGVGFDREASIRCSLVHSQSVLQRRRKLRRRKTISGIPRRVQQEIDSDESPVARERNVIVHTNPDPSNTVNRISGTRDSECQTEDILIAAPSRRRIRAQRGQSIAASLSHSAGNISALADKGDTMFTPAVSSRTRSRSLPREGNRGGDAEPKVGAKPSAYEEGESFVGDHERTPNDFSEAPSSPSAQDHQPTLGLACSQHLHSPQHKLSERGRSRLSRMAADSGSCDISSNSDTFGSPIHCISTAGVLLSSHMDQKDDHQSSSGNWSGSSSTCPSQTSETIPPAASPPLTGSSHCDSELSLNTAPHANEDASVFVTEQYNDHLDKVRGHRANSFTSTVADLLDDPNNSNTSDSEWNYLHHHHDASCRQDFSPERPKADSLGCPSFTSMATYDSFLEKSPSDKADTSSHFSVDTEGYYTSMHFDCGLKGNKSYVCHYAALGPENGQGVGASPGLPDCAWQDYLDHKRQGRPSISFRKPKAKPTPPKRSSSLRKSDGNADISEKKEPKISSGQHLPHSSREMKLPLDFANTPSRMENANLPTKQEPSWINQSEQGIKEPQLDASDIPPFKDEVAESTHYADLWLLNDLKTNDPYRSLSNSSTATGTTVIECIKSPESSESQTSQSESRATTPSLPSVDNEFKLASPEKLAGLASPSSGYSSQSETPTSSFPTAFFSGPLSPGGSKRKPKVPERKSSLQQPSLKDGTISLSKDLELPIIPPTHLDLSALHNVLNKPFHHRHPLHVFTHNKQNTVGETLRSNPPPSLAITPTILKSVNLRSINKSEEVKQKEENNTDLPYLEESTLTTAALSPSKIRPHTANKSVSRQYSTEDTILSFLDSSAVEMGPDKLHLEKNSTFDVKNRCDPETITSAGSSLLDSNVTKDQVRTETEPIPENTPTKNCAFPTEGFQRVSAARPNDLDGKIIQYGPGPDETLEQVQKAPSAGLEEVAQPESVDVITSQSDSPTRATDVSNQFKHQFVMSRHHDKVPGTISYESEITSVNSFPEKCSKQENIASGISAKSASDNSKAEETQGNVDEASLKESSPSDDSIISPLSEDSQAEAEGVFVSPNKPRTTEDLFAVIHRSKRKVLGRKDSGDMSVRSKSRAPLSSSSSSASSITSPSSNVTTPNSQRSPGLIYRNAKKSNTSNEEFKLLLLKKGSRSDSSYRMSATEILKSPILPKPPGELTAESPQSTDDAHQGSQGAEALSPLSPCSPRVNAEGFSSKSFATSASARVGRSRAPPAASSSRYSVRCRLYNTPMQAISEGETENSDGSPHDDRSSQSST

SEQ ID NO: 51686 - protein, 1474 aa, Artificial Sequence
  derived and/or modified sequence
MALACCMPKNAAVSNLDIESKLSVYYRAPWHQQRNIFLPATRPPCVEELHRHARQSLQALRREHRSRSDRREQRAAAPLSIAAPPLPAYPPAHSQRRREFKDRHFLTFNSTRSPSPTECCHMTPWSRKSHPPEDEDTDVMLGQRPKNPIHNIPSTLDKQTNWSKALPLPTPEEKMKQDAQVISSCIIPINVTGVGFDREASIRCSLVHSQSVLQRRRKLRRRKTISGIPRRVQQEIDSDESPVARERNVIVHTNPDPSNTVNRISGTRDSECQTEDILIAAPSRRRIRAQRGQSIAASLSHSAGNISALADKGDTMFTPAVSSRTRSRSLPREGNRGGDAEPKVGAKPSAYEEGESFVGDHERTPNDFSEAPSSPSAQDHQPTLGLACSQHLHSPQHKLSERGRSRLSRMAADSGSCDISSNSDTFGSPIHCISTAGVLLSSHMDQKDDHQSSSGNWSGSSSTCPSQTSETIPPAASPPLTGSSHCDSELSLNTAPHANEDASVFVTEQYNDHLDKVRGHRANSFTSTVADLLDDPNNSNTSDSEWNYLHHHHDASCRQDFSPERPKADSLGCPSFTSMATYDSFLEKSPSDKADTSSHFSVDTEGYYTSMHFDCGLKGNKSYVCHYAALGPENGQGVGASPGLPDCAWQDYLDHKRQGRPSISFRKPKAKPTPPKRSSSLRKSDGNADISEKKEPKISSGQHLPHSSREMKLPLDFANTPSRMENANLPTKQEPSWINQSEQGIKEPQLDASDIPPFKDEVAESTHYADLWLLNDLKTNDPYRSLSNSSTATGTTVIECIKSPESSESQTSQSESRATTPSLPSVDNEFKLASPEKLAGLASPSSGYSSQSETPTSSFPTAFFSGPLSPGGSKRKPKVPERKSSLQQPSLKDGTISLSKDLELPIIPPTHLDLSALHNVLNKPFHHRHPLHVFTHNKQNTVGETLRSNPPPSLAITPTILKSVNLRSINKSEEVKQKEENNTDLPYLEESTLTTAALSPSKIRPHTANKSVSRQYSTEDTILSFLDSSAVEMGPDKLHLEKNSTFDVKNRCDPETITSAGSSLLDSNVTKDQVRTETEPIPENTPTKNCAFPTEGFQRVSAARPNDLDGKIIQYGPGPDETLEQVQKAPSAGLEEVAQPESVDVITSQSDSPTRATDVSNQFKHQFVMSRHHDKVPGTISYESEITSVNSFPEKCSKQENIASGISAKSASDNSKAEETQGNVDEASLKESSPSDDSIISPLSEDSQAEAEGVFVSPNKPRTTEDLFAVIHRSKRKVLGRKDSGDMSVRSKSRAPLSSSSSSASSITSPSSNVTTPNSQRSPGLIYRNAKKSNTSNEEFKLLLLKKGSRSDSSYRMSATEILKSPILPKPPGELTAESPQSTDDAHQGSQGAEALSPLSPCSPRVNAEGFSSKSFATSASARVGRSRAPPAASSSRYSVRCRLYNTPMQAISEGETENSDGSPHDDRSSQSST

SEQ ID NO: 51687 - DNA, 4419 bp, Artificial Sequence
  derived and/or modified sequence
atggataatgccctcttctgtcttgccgctgtgtctaatctcgacattgagtccaagctctccgtgtattatcgcgcgccctggcaccagcaacgtaacatttttttacctgctacaagaccaccctgtgtggaggagctgcacagacatgccaggcagagcctgcaagccctccgacgcgagcacaggtcaaggagcgaccggcgtgagcagagagccgccgcgccgctgtccatagccgctccacccctccccgcctatcctcctgcacatagtcaacgccgacgcgagttcaaggacaggcatttcctgactttcaattcaacaagatccccgtccccaacagagtgctgtcatatgacgccatggagtaggaagtctcacccaccggaggacgaggacacagatgttatgctgggccagcgccctaagaatcccattcacaacatcccatctactctcgacaaacagaccaattggtcaaaagccctcccccttccaaccccagaggaaaaaatgaaacaagacgcacaggtgatatccagttgtataattcctattaacgtcaccggggtgggcttcgaccgggaagcatctattcgatgctctctggtgcactcgcagtccgtcctccagcgccgcagaaaattgaggcgaagaaagaccatatccggcattccacgcagagtgcaacaggagatcgactcagatgagagtcccgtggcacgcgagagaaacgtgatagtccacaccaacccggacccgagcaacacagttaatcgaatctcaggcaccagggatagcgagtgccagactgaggatatcctcatcgccgctccttctagacgtcggattagagctcagagggggcagagtatcgctgcatctctgagtcatagcgcagggaatatcagcgcccttgctgacaaaggtgataccatgtttacccctgccgtatcgtcaaggaccaggagtcgctcccttcccagggaaggaaacaggggaggcgacgcagagccgaaggtgggtgctaaacctagtgcatatgaggagggcgagtcattcgttggcgatcatgaacgaaccccaaatgacttctctgaagctcccagtagtccatctgcgcaggaccatcagccaaccctcggcttggcttgttcgcagcacctgcactcacctcaacacaagctttcagagcgtggcagatcccgactgagcagaatggctgcggattccggctcctgcgacatatccagcaacagcgatacctttgggtctcccatccactgcatttccacggccggggtcttactttccagccatatggaccaaaaagacgatcatcagtcttcatcaggtaattggtcaggcagctcttcgacatgccctagtcagactagcgagaccatccctcctgctgccagtccacccctcactggaagttcgcactgcgactctgaattatctctcaacaccgctccacacgccaacgaggatgcctctgtgttcgtcacagaacaatataacgaccacctggataaggtccgcggccatagagcaaactcattcacatccaccgttgccgacttgcttgacgaccctaataattccaatacttcggatagtgagtggaactatctgcaccaccatcacgatgctagctgccgccaggatttcagccctgagcgaccgaaggccgattcattagggtgtcctagtttcaccagtatggcaacctacgatagcttcttagagaagtccccttcagacaaagcggacacttcttcacatttttcagtagacaccgaaggatattatacctccatgcatttcgattgtggactgaagggtaacaaaagctacgtctgtcattatgcggcactaggaccagaaaatgggcaaggagtgggggcctctccaggcttgcctgactgtgcatggcaggactatctggaccacaagaggcagggtagaccctccatcagctttcgcaagcccaaagcgaagccgacccctccgaaacgtagctcctcccttagaaaatctgatggcaatgccgacatcagtgagaaaaaggaacctaagatctctagcggtcagcatctgccccattcatcacgcgaaatgaaactcccactggacttcgcaaacacgcctagccgcatggaaaacgcaaatttgcccacaaaacaggaaccatcctggattaatcagagtgagcagggcattaaggagcctcagctggacgcatcggatattcccccatttaaagatgaagttgcagagtctacccactacgccgatctgtggctgctgaatgatctgaagactaacgatccatataggtccctgtccaacagttctacagccacaggaactaccgtgatcgagtgtattaagtctcctgagagttccgaatcccagacaagccagagcgagtccagggccacaacaccgtccctcccctccgtcgataatgagttcaagttggcctcaccggagaagttggccggattagctagtccgagctctggttacagcagtcaatcagaaacccccacttcctctttcccaacggcgttcttcagtggccctctgtccccagggggatcaaagaggaaacctaaagtgcccgagcggaaatcaagcttgcagcaaccttcgctgaaagacggaacaatctccctatctaaggacctcgagctgccaattattcccccgacacatttagacttgtccgctctccacaacgtgctcaacaagccgtttcatcatagacacccacttcacgtcttcacccataacaagcagaataccgtgggcgagaccctccgaagcaatcctccaccgtccctggccataacgccaacaattctgaagtctgtgaatctgcgtagtatcaacaagtccgaagaagtgaaacagaaagaggagaacaatacagatttgccttacctcgaggagtcaactctgaccacagctgccctgtccccgagcaagatcagaccccacactgccaacaagtctgtgagtcgacagtattctactgaggacacaatactcagctttctggattctagcgctgttgaaatgggtcctgacaaacttcatctggagaaaaattcaacctttgatgtgaagaatagatgcgatcccgaaaccatcacgtcagccggtagcagtttactagattctaacgtgaccaaggatcaggtacggacagaaacggaaccaattccagaaaatacccctacaaagaactgcgctttccctacggagggttttcagcgagtgtctgccgcccggcctaacgacctggacgggaagattatccagtatggccccggacctgatgagactctggaacaggtccagaaggcaccctctgccggtctcgaagaggtggcccagcccgaatccgtggacgtgattacaagccaatctgattccccgacacgagcgactgacgtgtccaatcagtttaagcaccaattcgtgatgagcaggcatcatgacaaagtccccggcacaatcagctacgagagcgagatcacttcagttaactccttccccgaaaagtgctccaagcaggagaacatcgcaagcggcatcagtgcaaagagcgcttcggacaattctaaagccgaggagacccaggggaacgtggacgaagcttctcttaaagagagtagcccatctgatgatagcatcatctcccccctgagcgaagatagccaggcggaggccgaaggggtgtttgtgagcccgaacaagcctcgtacaacagaagacctcttcgcggtaattcaccgatctaagcgtaaggttctcggtcgtaaggactcaggggatatgtcagtgagaagcaagagtagggcccccctctcttcatcaagcagcagcgcgtcatctatcacctctccctcgtctaatgtaactacaccaaactcccagaggtcacccggcctaatctatcggaatgccaagaagtctaatacttcaaacgaagaattcaagctcctgctgctcaagaaagggtcaagatccgacagcagttataggatgagtgctactgagattctcaaatccccaatcttgcccaaaccacccggagagctgaccgctgagtcccctcagtccactgacgatgcgcaccagggatcccagggggccgaggcactaagccctctgtcgccctgtagccctagggttaacgccgaagggttcagttctaaatcctttgccacaagtgcatctgcccgggtggggcggtctcgcgccccccctgcagccagctcgagccgatattcagtgcgctgccggctgtacaacaccccaatgcaggctatcagcgagggtgagaccgagaactcagatgggagccctcatgatgacagatcctcacagtcttccacgtag

SEQ ID NO: 51688 - DNA, 4425 bp, Artificial Sequence
  derived and/or modified sequence
atggccctggcgtgttgtatgcctaaaaacgccgccgtaagcaacctcgatattgagagcaaactgagcgtttactatcgcgccccatggcatcagcagaggaacatctttctccctgctacccgacccccttgcgttgaggaactgcaccggcatgccagacaaagcctgcaggctcttcggcgggagcatcgcagcaggtccgacaggcgcgagcagcgtgccgctgcccctctctccattgcggctcctcctctccccgcgtacccccctgcccatagccaacgccggagggaattcaaggacaggcattttcttacattcaattccacccggagtccatccccaaccgagtgttgtcacatgaccccatggtctcggaaatcccaccccccagaggatgaagacacggatgtgatgttgggtcaacgacccaagaatcccatccataatataccttctactctggacaaacagacgaattggagtaaagccctgccccttccgaccccagaggagaaaatgaagcaggatgctcaggtcatctcaagctgcataatccccattaacgtaactggcgtgggcttcgaccgagaggcaagcattcgttgctcccttgtccactcccagtccgtcctccagagacggaggaagctgcgaaggaggaagacaatctcagggattccgagacgagtccagcaggaaattgattctgatgaatctcctgtagcccgagagaggaatgtcattgtgcacaccaaccctgacccaagcaacacagtaaacagaattagcggaacgcgagattctgagtgccagaccgaggatatccttatagccgcgccttcacggcgccggatccgggcgcaaagaggtcagtccatcgcggcctcactgtcacatagcgccggtaacatctcagcgctcgccgataaaggcgatactatgttcacaccggctgtgtcctcgaggacacgaagtcgctccctcccacgagagggcaatcgggggggggacgccgagccaaaggtcggtgcaaagccatccgcttatgaggaaggcgaatcatttgtgggagatcatgaacggacacccaatgatttcagtgaggcccccagttctccgtccgcccaggaccatcagcctactctcgggcttgcctgttctcaacacctccactccccacaacacaagctatccgagagaggtcggagcagactgtccagaatggccgctgacagtgggagttgcgacatatcaagcaactctgacacgttcgggagtcccatccactgtatttctacggccggcgtcctcctgtccagtcatatggatcagaaggacgatcatcaatcttccagtgggaactggtccggatcctcttctacttgcccatcccaaacatccgaaactattccacctgccgcctctcctccgctgactggctcatctcattgcgacagtgagttgagcctgaatacagcccctcacgccaacgaggacgcatcagtgttcgtcacagaacagtacaatgatcacttagataaagtccgggggcaccgtgccaattctttcacaagcaccgtggccgatttattggatgacccaaacaattccaacacgtcagattccgagtggaactatctccatcaccaccatgacgcctcttgtcggcaggactttagccccgagcggccaaaagccgattctcttgggtgcccttcattcactagcatggcaacctatgatagtttcctcgagaagagtccttcagataaggccgatactagttcgcatttctccgtggatacggaaggctactatactagtatgcattttgactgtggattaaaaggaaacaaatcctacgtatgccattatgccgcactggggccagagaacgggcagggtgttggtgcttcacctggcctgcctgattgtgcttggcaagattacctcgaccacaaaagacagggtagaccctccatcagcttcagaaagccgaaagcaaagcccaccccccctaagcgtagtagctctctgaggaaatcagacggcaatgctgacataagcgagaagaaagaaccgaagatcagcagcgggcagcatctgccacacagttcacgagagatgaaactgcccttagacttcgccaacaccccttctcggatggagaatgccaatcttccaactaaacaggaaccatcttggataaatcagtccgagcagggaattaaggaaccacagctggatgcctccgacattccgcctttcaaggatgaggtggccgagagtacacactacgccgatctctggctgctcaatgacctgaaaaccaatgatccctaccggagcctgagcaacagcagtacagcgacgggtactaccgtgattgaatgtattaagagtcctgagtcaagtgaatctcagacgtctcagtccgagagcagggccacaaccccgtccttgcccagcgtggataacgagttcaaactagcttcacccgagaaattggcaggactcgcctccccatcctccgggtacagcagtcagtcggagacacccacatcctcctttcccaccgccttcttttccgggcctctgtcacccggtgggtccaagagaaagcccaaggtacccgagcgcaaaagctcattgcaacagccatcgctgaaagacggcacaatctcgttgtctaaagacctggaattgccaatcatcccaccaacccatcttgatctcagtgccctgcacaatgtacttaataaaccctttcaccatagacacccactgcatgttttcacccacaataagcagaatacagtcggggaaactttgcgatccaacccaccccccagcttggctatcacaccaacaattctcaagagtgtgaatcttaggtctatcaacaaatctgaagaggtgaaacagaaggaagaaaacaataccgacctgccttatttagaggaatctaccctgacaacagccgccctctcaccatcaaaaattagaccccacaccgcgaataagtctgtgtctagacagtactcgacagaggacaccatcctgtcctttttggactcctctgctgtagagatgggtccagacaagctccatctggaaaagaacagcacctttgacgtgaagaatagatgcgaccctgagaccataacctctgccggatcttcattactcgattcgaacgtgacaaaagaccaagtacgtaccgagacagagcccattcctgagaatacccctacaaaaaactgcgctttccccaccgagggatttcaacgcgtgtctgctgcacgccctaacgaccttgacggtaagattattcagtatggcccaggcccggatgaaactctggagcaggtacagaaggcaccttcggccgggctcgaggaggttgcccagcctgagagcgtggacgtgatcacctctcagtccgattctcctacacgagccaccgatgtgtctaaccaattcaaacatcagtttgtaatgagccgccaccacgacaaggtgccggggactatttcctacgaatcagagattacatcggtgaactctttccctgagaagtgttccaagcaggaaaatattgccagcggtatttctgctaagtcagcttctgataattctaaagccgaggaaacacagggaaatgttgatgaagcatcccttaaagagtcatctcccagcgacgacagcattatcagtccactcagcgaggattctcaggccgaggctgagggagtgtttgtatctcctaacaaaccaagaacgacggaagacctgtttgccgtaattcatcgctccaagcggaaagtgctggggcgtaaggactctggcgacatgtccgttcgatcaaaatcccgtgccccgctcagttcatcctcctctagtgcatcctctattacatcacccagttccaacgtgacaactcccaatagccagcgaagtccagggctgatctatcggaatgctaaaaagtccaacaccagcaacgaggagtttaaactgttgctcctcaaaaagggaagtagaagtgatagtagctaccgcatgtccgctaccgaaatccttaaaagccccatcctgcccaaacctccaggagagctcaccgcagaaagccctcagagtaccgatgatgcccaccagggctcacagggtgccgaggcactgtcccctttgagcccttgttcaccgcgagttaacgcagaaggattttcttccaaatcttttgccaccagcgcgagcgcaagggtgggacgctccagagctcctcccgccgcctcttcttcacggtacagcgtgcggtgccggctgtataacactcccatgcaggctatcagtgagggggagacagagaattcagacggcagccctcacgacgatcgcagttctcagtccagcacatag

SEQ ID NO: 51689 - DNA, 4419 bp, Artificial Sequence
  derived and/or modified sequence
atggacaatgccctcttctgcctggccgctgtgagcaacctggacatcgagagcaagctgtctgtgtactaccgggccccctggcaccagcagaggaacatcttcctgcctgccaccaggcctccctgtgtggaggagctgcacagacatgcccggcagagcctgcaggccctgcggcgggagcacaggagcagaagtgaccggcgggagcagagagctgctgcccccctgagcattgctgccccacccctgcctgcctaccccccagcccacagccagaggagaagagagttcaaggacagacacttcctgaccttcaacagcaccaggagccccagccccacagagtgctgccacatgaccccctggagcaggaagagccaccccccagaagatgaggacacagatgtgatgctgggccagaggcccaagaaccccatccacaacatccccagcaccctggacaagcagaccaactggagcaaggccctgcccctgcccaccccagaggagaagatgaagcaggatgcccaggtgatcagcagctgcatcatccccatcaacgtgactggagtgggctttgaccgggaggccagcatccgctgcagcctggtgcacagccagagcgtgctgcagaggaggaggaagctgcggcggaggaagaccatcagcggcatcccccggcgggtgcagcaggagattgacagtgatgagagccctgtggcccgggagagaaatgtcatcgtgcacaccaacccagaccccagcaacacagtgaaccgcatcagcggcacccgggacagcgagtgccagacagaggacatcctgattgctgcccccagcagaagacgcatccgggcccagaggggccagagcattgctgccagcctgagccacagcgctggcaacatcagcgccctggccgacaagggggacaccatgttcaccccagctgtgagcagcaggaccaggagccgcagcctgccccgggagggcaacagaggaggagatgctgagcccaaggtgggcgccaagcccagcgcctatgaggagggggagagctttgtgggggaccacgagaggaccccaaatgacttcagcgaggcccccagcagccccagcgcccaggaccaccagcccaccctgggcctggcctgcagccagcacctgcacagcccccagcacaagctgtctgagcggggccgcagccggctgagcaggatggctgctgacagcggcagctgtgacatcagcagcaacagcgacaccttcggcagccccatccactgcatcagcacagctggggtgctgctgagcagccacatggaccagaaggatgaccaccagagcagcagcggcaactggagcggcagcagcagcacctgccccagccagaccagcgagaccatccccccagctgccagcccccccctgaccggcagcagccactgtgacagcgagctgagcctgaacacagcccctcatgccaatgaagatgcctctgtgtttgtgacagagcagtacaatgaccacctggacaaggtgcggggccaccgggccaacagcttcaccagcacagtggccgacctgctggatgaccccaacaacagcaacaccagtgacagcgagtggaactacctgcaccaccaccatgatgccagctgccggcaggacttcagccctgagcggcccaaggctgacagcctgggctgccccagcttcacctccatggccacctatgacagcttcctggagaagagccccagcgacaaggctgacaccagcagccacttctctgtggacacagagggctactacacctccatgcactttgactgtggcctgaagggcaacaagagctatgtgtgccactacgccgccctgggcccagaaaatggccagggcgtgggcgccagccctggcctgcctgactgtgcctggcaggactacctggaccacaagaggcagggccggcccagcatctccttcaggaagcccaaggccaagcccaccccacccaagaggagcagcagcctgaggaagagtgatggaaatgctgacatcagcgagaagaaggagcccaagatcagcagcggccagcacctgccccacagcagccgggagatgaagctgcccctggactttgccaacacccccagcaggatggagaatgccaacctgcccaccaagcaggagcccagctggatcaaccagagcgagcagggcatcaaggagccccagctggatgccagtgacatcccccccttcaaggatgaggtggccgagagcacccactatgctgacctgtggctgctgaatgacctgaagaccaatgacccctaccgcagcctgagcaacagcagcacagccaccggcaccaccgtgattgagtgcatcaagagccctgagagcagcgagagccagaccagccagagcgagagccgggccaccacccccagcctgcccagcgtggacaatgagttcaagctggccagccctgagaagctggccggcctggccagccccagcagcggctacagcagccagagcgagacccccaccagcagcttccccacagccttcttcagcggccccctgagccctgggggcagcaagaggaagcccaaggtgcctgagaggaagagcagcctgcagcagcccagcctgaaggatggcaccatcagcctgagcaaggacctggagctgcccatcatcccccccacccacctggacctgagcgccctgcacaacgtgctgaacaagcccttccaccaccgccaccccctgcacgtgttcacccacaacaagcagaacacagtgggggagaccctgcggagcaaccccccacccagcctggccatcacccccaccatcctgaagtctgtgaacctgcggagcatcaacaagtctgaggaggtgaagcagaaggaggagaacaacacagacctgccctacctggaggagagcaccctgaccacagctgccctgagccccagcaagatccggccccacacagccaacaagtctgtgtcccggcagtacagcacagaggacaccatcctgtccttcctggacagcagcgctgtggagatgggccctgacaagctgcacctggagaagaacagcacctttgatgtgaagaacagatgtgaccctgagaccatcaccagcgctggcagcagcctgctggacagcaatgtgaccaaggaccaggtgaggacagaaacagagcccatccctgagaacacccccaccaagaactgtgccttccccacagagggcttccagagggtgtctgctgcccggcccaatgacctggatggcaagatcatccagtatggccctggcccagatgagaccctggagcaggtgcagaaggcccccagcgctggcctggaggaggtggcccagcctgagagcgtggatgtgatcaccagccagagcgacagccccacccgggccacagatgtgagcaaccagttcaagcaccagtttgtgatgagccgccaccacgacaaggtgcccggcaccatctcctatgagagcgagatcacctctgtgaacagcttccctgagaagtgcagcaagcaggagaacatcgccagcggcatcagcgccaagagcgccagtgacaacagcaaggccgaggagacccagggcaatgtggatgaggccagcctgaaggagagcagccccagtgatgacagcatcatcagccccctgtctgaggacagccaggccgaggccgagggcgtgtttgtgagccccaacaagcccaggaccacagaggacctgtttgctgtgatccacaggagcaagaggaaggtgctgggcaggaaggacagcggggacatgtctgtgcgcagcaagagccgggcccccctgagcagcagcagcagcagcgccagcagcatcaccagccccagcagcaatgtgaccacccccaacagccagaggagccctggcctcatctacagaaatgccaagaagagcaacaccagcaatgaggagttcaagctgctgctgctgaagaagggcagcagaagtgacagcagctacaggatgtctgccacagagatcctgaagagccccatcctgcccaagcccccaggagagctgacagctgagagcccccagagcacagatgatgcccaccagggcagccagggcgctgaggccctgagccccctgagcccctgcagcccccgggtgaatgctgagggcttcagcagcaagagctttgccaccagcgccagcgcccgggtgggccgcagccgggcccccccagctgccagcagcagccgctacagcgtgcgctgccgcctgtacaacacccccatgcaggccatcagcgagggggagacagagaacagtgatggcagcccccatgatgacaggagcagccagagcagcacctag

SEQ ID NO: 51690 - DNA, 4425 bp, Artificial Sequence
  derived and/or modified sequence
atggccctggcctgctgcatgcccaagaatgctgctgtgagcaacctggacatcgagagcaagctgtctgtgtactaccgggccccctggcaccagcagaggaacatcttcctgcctgccaccaggcctccctgtgtggaggagctgcacagacatgcccggcagagcctgcaggccctgcggcgggagcacaggagcagaagtgaccggcgggagcagagagctgctgcccccctgagcattgctgccccacccctgcctgcctaccccccagcccacagccagaggagaagagagttcaaggacagacacttcctgaccttcaacagcaccaggagccccagccccacagagtgctgccacatgaccccctggagcaggaagagccaccccccagaagatgaggacacagatgtgatgctgggccagaggcccaagaaccccatccacaacatccccagcaccctggacaagcagaccaactggagcaaggccctgcccctgcccaccccagaggagaagatgaagcaggatgcccaggtgatcagcagctgcatcatccccatcaacgtgactggagtgggctttgaccgggaggccagcatccgctgcagcctggtgcacagccagagcgtgctgcagaggaggaggaagctgcggcggaggaagaccatcagcggcatcccccggcgggtgcagcaggagattgacagtgatgagagccctgtggcccgggagagaaatgtcatcgtgcacaccaacccagaccccagcaacacagtgaaccgcatcagcggcacccgggacagcgagtgccagacagaggacatcctgattgctgcccccagcagaagacgcatccgggcccagaggggccagagcattgctgccagcctgagccacagcgctggcaacatcagcgccctggccgacaagggggacaccatgttcaccccagctgtgagcagcaggaccaggagccgcagcctgccccgggagggcaacagaggaggagatgctgagcccaaggtgggcgccaagcccagcgcctatgaggagggggagagctttgtgggggaccacgagaggaccccaaatgacttcagcgaggcccccagcagccccagcgcccaggaccaccagcccaccctgggcctggcctgcagccagcacctgcacagcccccagcacaagctgtctgagcggggccgcagccggctgagcaggatggctgctgacagcggcagctgtgacatcagcagcaacagcgacaccttcggcagccccatccactgcatcagcacagctggggtgctgctgagcagccacatggaccagaaggatgaccaccagagcagcagcggcaactggagcggcagcagcagcacctgccccagccagaccagcgagaccatccccccagctgccagcccccccctgaccggcagcagccactgtgacagcgagctgagcctgaacacagcccctcatgccaatgaagatgcctctgtgtttgtgacagagcagtacaatgaccacctggacaaggtgcggggccaccgggccaacagcttcaccagcacagtggccgacctgctggatgaccccaacaacagcaacaccagtgacagcgagtggaactacctgcaccaccaccatgatgccagctgccggcaggacttcagccctgagcggcccaaggctgacagcctgggctgccccagcttcacctccatggccacctatgacagcttcctggagaagagccccagcgacaaggctgacaccagcagccacttctctgtggacacagagggctactacacctccatgcactttgactgtggcctgaagggcaacaagagctatgtgtgccactacgccgccctgggcccagaaaatggccagggcgtgggcgccagccctggcctgcctgactgtgcctggcaggactacctggaccacaagaggcagggccggcccagcatctccttcaggaagcccaaggccaagcccaccccacccaagaggagcagcagcctgaggaagagtgatggaaatgctgacatcagcgagaagaaggagcccaagatcagcagcggccagcacctgccccacagcagccgggagatgaagctgcccctggactttgccaacacccccagcaggatggagaatgccaacctgcccaccaagcaggagcccagctggatcaaccagagcgagcagggcatcaaggagccccagctggatgccagtgacatcccccccttcaaggatgaggtggccgagagcacccactatgctgacctgtggctgctgaatgacctgaagaccaatgacccctaccgcagcctgagcaacagcagcacagccaccggcaccaccgtgattgagtgcatcaagagccctgagagcagcgagagccagaccagccagagcgagagccgggccaccacccccagcctgcccagcgtggacaatgagttcaagctggccagccctgagaagctggccggcctggccagccccagcagcggctacagcagccagagcgagacccccaccagcagcttccccacagccttcttcagcggccccctgagccctgggggcagcaagaggaagcccaaggtgcctgagaggaagagcagcctgcagcagcccagcctgaaggatggcaccatcagcctgagcaaggacctggagctgcccatcatcccccccacccacctggacctgagcgccctgcacaacgtgctgaacaagcccttccaccaccgccaccccctgcacgtgttcacccacaacaagcagaacacagtgggggagaccctgcggagcaaccccccacccagcctggccatcacccccaccatcctgaagtctgtgaacctgcggagcatcaacaagtctgaggaggtgaagcagaaggaggagaacaacacagacctgccctacctggaggagagcaccctgaccacagctgccctgagccccagcaagatccggccccacacagccaacaagtctgtgtcccggcagtacagcacagaggacaccatcctgtccttcctggacagcagcgctgtggagatgggccctgacaagctgcacctggagaagaacagcacctttgatgtgaagaacagatgtgaccctgagaccatcaccagcgctggcagcagcctgctggacagcaatgtgaccaaggaccaggtgaggacagaaacagagcccatccctgagaacacccccaccaagaactgtgccttccccacagagggcttccagagggtgtctgctgcccggcccaatgacctggatggcaagatcatccagtatggccctggcccagatgagaccctggagcaggtgcagaaggcccccagcgctggcctggaggaggtggcccagcctgagagcgtggatgtgatcaccagccagagcgacagccccacccgggccacagatgtgagcaaccagttcaagcaccagtttgtgatgagccgccaccacgacaaggtgcccggcaccatctcctatgagagcgagatcacctctgtgaacagcttccctgagaagtgcagcaagcaggagaacatcgccagcggcatcagcgccaagagcgccagtgacaacagcaaggccgaggagacccagggcaatgtggatgaggccagcctgaaggagagcagccccagtgatgacagcatcatcagccccctgtctgaggacagccaggccgaggccgagggcgtgtttgtgagccccaacaagcccaggaccacagaggacctgtttgctgtgatccacaggagcaagaggaaggtgctgggcaggaaggacagcggggacatgtctgtgcgcagcaagagccgggcccccctgagcagcagcagcagcagcgccagcagcatcaccagccccagcagcaatgtgaccacccccaacagccagaggagccctggcctcatctacagaaatgccaagaagagcaacaccagcaatgaggagttcaagctgctgctgctgaagaagggcagcagaagtgacagcagctacaggatgtctgccacagagatcctgaagagccccatcctgcccaagcccccaggagagctgacagctgagagcccccagagcacagatgatgcccaccagggcagccagggcgctgaggccctgagccccctgagcccctgcagcccccgggtgaatgctgagggcttcagcagcaagagctttgccaccagcgccagcgcccgggtgggccgcagccgggcccccccagctgccagcagcagccgctacagcgtgcgctgccgcctgtacaacacccccatgcaggccatcagcgagggggagacagagaacagtgatggcagcccccatgatgacaggagcagccagagcagcacctag

SEQ ID NO: 51691 - DNA, 7946 bp, Artificial Sequence
  derived and/or modified sequence
atggacaacgccctgttttgtcttgcagccgtctccaacctggacatagagagtaagctgagtgtgtactaccgcgccccgtggcaccagcagcgcaacatcttcctcccagccacaaggccaccctgcgtggaggagctgcaccgccacgcccggcagagcctgcaagccctgcgcagagaacaccggagccggagcgatcgccgagagcaaagagcagctgcccccctttccattgcagctcctccactgccagcctaccctccagctcacagccagaggaggcgtgagtttaaggaccgtcactttttaacgtttaacagcacccgttcgccctcccccactgaatgttgccacatgaccccgtggagtagaaagtcccatcccccagaggatgaagatacagatgtcatgttagggcagaggccgaaaaacccaatacacaatatcccttccacactggacaagcagaccaactggagcaaagcactacctctcccgacgccagaggagaagatgaaacaagatgcccaagtgatttcttcttgcattattcccatcaatgttactggagttggctttgacagagaggctagtatacgctgctctctggttcattcacaatcggtactacagcggagacgaaaattgaggaggaggaaaaccatctcgggtatccccagaagagttcaacaagaaatagattctgatgaatcaccagtggccagggaaaggaatgtgattgtgcacacaaacccagacccctccaacactgtcaataggatatccggaaccagggactctgagtgccaaaccgaggatattctgattgctgccccatccagaaggagaatcagagctcaaaggggtcaaagcattgcagcttccctttctcattctgctggcaacatttctgccctagcagacaaaggtgacaccatgtttactcctgcagtgagcagccgcacaagatctcggagccttccccgggaaggtaatagaggtggggatgctgagcccaaagttggcgctaaaccctcagcatatgaagagggagagtcttttgtgggtgaccatgaaagaacccctaatgatttcagtgaggctccaagcagcccgagtgcccaggaccaccagcctactttgggcctggcctgctctcaacatcttcacagcccccagcacaaattaagtgagaggggaaggtcacgtctgtcccgaatggctgctgactctggcagctgtgacatctcctccaactcagacacgtttgggagccccatccactgcatctccacggctggcgtcctccttagcagccacatggaccagaaagatgaccaccagtcatccagtggcaactggagtgggagcagctccacgtgcccctcgcagacctcagaaaccatccctcctgcagcttctcctccactcactggctcttcacactgtgactcggagttgtcactaaacacagcccctcatgccaatgaggatgccagtgttttcgtgacagagcaatacaatgaccacttggataaagtgagaggccatcgggcaaactcctttacctccactgttgcagacctgctggatgatcccaacaacagcaacacaagtgacagtgagtggaattacctacaccaccaccatgatgcctcctgccgccaggattttagtcctgagcgtcccaaggcagacagcctgggctgcccaagcttcacaagcatggccacttatgacagctttctggaaaagtctccatcagacaaagcggacactagctctcacttttcagtagacacggaaggatactatacctccatgcactttgactgtggtctcaaaggtaataagagctatgtctgtcactatgcagccctgggcccagagaatggccagggtgtaggggcttcccctggtcttccagattgtgcctggcaggactacttagaccacaagaggcagggaagaccaagcatctctttcaggaaaccaaaggcaaagccgaccccacctaaacgtagctcatcattgaggaagtctgatggaaacgcagatatttctgagaagaaagaaccaaagataagcagtggtcagcacctgcctcacagttccagggaaatgaagctgcctcttgatttcgccaacacgccttctcgaatggaaaacgccaatcttcccaccaagcaggaaccttcttggataaaccagagtgaacaaggcattaaggaacctcagttagatgcttcggatattccaccattcaaagatgaagttgccgaatccacacactatgcagacctctggctcctaaatgacttgaaaacaaatgatccttatagatctctatctaattcaagcaccgctacgggtaccacagtcattgaatgcatcaaatctccagagagctctgaatcccaaacatcacaatcagaatcaagagccaccaccccatctcttccttctgttgacaatgagtttaaactggcttcaccagaaaagctggctggcttggcatctccatcaagtggctattcaagccagtctgaaacgccaacatcctctttccctacagctttcttttcaggtccattgtctcccggaggtagcaaaagaaaacctaaagtcccagaaagaaaatcctcactacagcaaccctctttaaaagatggaactatatcactgagtaaagaccttgaacttccaattatacctcctacccatcttgatctaagtgctcttcataatgtcttgaacaaaccattccaccaccgtcatccactgcatgtttttactcataataagcagaacacagtaggagaaacactgaggtcgaatcctccaccgtcccttgcaattacaccaacgatcctgaaatctgttaaccttaggtccatcaacaagtctgaagaagttaagcaaaaagaagaaaacaatacagatctcccttatttagaggaaagcacactcacaacggctgccttgtctccaagtaagattaggccgcatacagcaaataaatcagtatctcgtcaatactccactgaagacaccatactgtcctttttagactcttctgcagttgagatgggaccagataaactacatttagaaaaaaactctacttttgatgtgaagaatcgctgcgatccagaaaccataacatcagctggtagcagtcttctagattcaaatgtcacaaaagaccaagtgcgtacagagactgagcctattccagaaaacacgccaaccaaaaactgtgcttttcccacagaaggatttcagagggtctctgctgcccgcccaaatgatttggatggtaaaataatacaatatggacctggtccagacgaaactctagaacaggtacagaaggcaccctctgcaggtctggaggaagttgcacaacctgaatctgtggatgtaatcacatctcagtcagactcaccaactagagcaacagatgtaagcaatcaatttaagcatcaatttgttatgagccgccaccatgacaaagtgcctggtactatcagctatgaatcggagataacatctgtaaattcattccctgaaaaatgttccaagcaggaaaatattgcttcaggtatttcagccaaaagtgcctctgataacagcaaagcagaggagacccaaggaaatgtggatgaggcttcattgaaagaatcatcaccgagtgatgactccatcatttcaccacttagtgaagactcccaagctgaagcagagggtgtgttcgtgtctccaaacaaacctcgaacaactgaggatttatttgcagtcattcacagatccaagaggaaagtacttggaagaaaagattccggggacatgtctgttcgaagcaaatcgagagctcccctcagcagtagcagcagcagcgccagttccatcacttcacccagcagtaatgtgacaacccccaacagccagaggtctcctggtctcatataccgaaatgccaaaaagtccaacacatccaatgaagagtttaagctgttactgctcaagaaaggcagtcgctcagattctagttaccgcatgtctgccactgagatcctgaagagccccatactgcccaaacctcctggggagctcacagcagagtcccctcagagcaccgatgatgcccatcaggggtcacaaggggctgaggcattgtccccactctctccatgctccccacgagttaatgcagaaggcttttcctcgaagagctttgccacctcagcatcagcaagggttggacgttctcgggcccctcctgcagccagcagcagccgctacagtgtccgctgccggctgtacaatacgcccatgcaggcaatctccgagggagagacggaaaattctgacgggagcccacatgacgaccgttcctcccagagttcaacatagactgcctgtaccaggctgcctggcaaaggccaaaacccttactcacatgaggatggaggaacagaacagaggacttgggaaaagtctcaacttgatggggtagcatcactgctaagcaatgaatgaatttctaaatacagtatgtgctgggtaaacagaaagtggtttagacattcttgattagtttccatattttaagtagctgcagtctttcatgtttttctttagcatagtttgatttacgcaatctccttccttgtgaaaatagaggatacaaaattgtctaattttcatgacacctagaaaacgttttcccagagctgcctattcagaaactaaagccctcactgtcattattctttaagaagatgaaattactctggatgtttggtatttttttacattaaaacaaactaaagcaaaatttagaagaaagaactacacatatgtaaataccatatttttgataaaaatgtgtaaatagatttatcaatgatgagtggacatgtggtcaattatctactgcacaccaactgtttatagaatacacaaaaataaaatgtaataactgtattctgtgaataccattttcatatcaaatgccatatttaaatgtccaccaatatgatttctgagtggtaaacctcaaatatgaattttaaactggtgaactaaaggaaatcttgaggtcatatactgaaatatgaataaattaaaataatgaattcagatctaatcatttttatgacaaattgcagcaccaaacaaactaatagcaacccatggctgtgatttgttgtgtggtaatttggacagaatgaaaagcatgcttttgattttttttttaatcagtgagagaagtcatcattctcaacacaaagccctgaacaacagcatttgacagtgtcctttagattttaattttttcaatggattgctttaaagagaatgagtagggaaaatagtagttaattttaggttatgttttatattaggctactggggacataaacggtcataactaatgactgtaatcattaaactccttaaacagtttagaaattagctccaggttcttaaactaacaaaaataaaacctaagcatgccacagagctattgattaatcagtaagtacctgtaatgagttttcagtgaagctttctctctgtgctgatgagattcatgctacctaaaaattaacagaaatgacactgtgaacaatgtagttggaaaataggtatgtgtatatgcattatttatactcattgttaaactgggaatggggaacagctctggttcacaatactacatacaactgagtttttgtctggttttactatagtgtctgcttgatggcaaaaggggagggtggagggtgggagaggaaatgtcagggcatgtgctctgataaaataaaggcagggaaacaagctgaattacttgaaattacttgaattttcttgtcttaaaactgaaaaaaaaatgtagttacacgttaaaatctgcaaatggtttttacacctctgattttaacatgaacttatactaatgtttggaatcttatgtcagaaatataagcagctatgtacttagaataggttttgaatgggagaggtagaacagagagagaattaagaagggatctgacttataaaagactagaatgtgattagagtgatagaacataccaatgttaccaagaaattgacaagctgctggctttaagcttatgcaagtggtagttgggaaagtaggaggtgtggaagagggtttgcattttggattaattcatgcaaaatgaaggaggaagcctggtctaagaagatactgtctttcaatagaaatgatttctaaactgctacagattaagaatagataatctgattgctgttgttttgtttgtttggaaagaaaaaaaatgtctggcttcttctactatttgttttcactaccaaactgtgttactaaatttcttgtcatccttgtatgtaaaatgggtgctgggggtggaggggtataagaggagggagagtcagagagagtgtgtatgggtgtgtgtgagtgtgagtgtgtgtgtacgcacacacactggggatagataagctacctggtaaagggtttgaacatttacaaaatgtcacactttttcttaaaagaaaaatattttggggtttgaataaaatggaccaccatttctcattggaacccattaattaagaaaaccagcatggtttgacaccacatgggaacatgaataaatctgtctcatgatttgaaaagtacaccttgcaaagttttaaaaataaagtttttaggcaaatgcgataagaaaccgtcatttccagtcacagtaggcgatctttcgtaatttcataaaagcagttcgtttgcagtatggcttttgtgtagttaggggttttttaagtgtgaagaaaggtatgtgggctttaaaagtgattctaaatcttgaatagaaaacacatgaattggctttaataaaaatgtcacctttttattattgacattaagtaatggtaccatatattttttaaaatacatattgacttgaattgtgaggcaataagataccttctatatgtaatgatcacagaactaacccttataatatagttttacttattttgtttactctaaaaatctatagcagagtttctctattttatatttcatagatttaaaaaacccaaataaagatggatttaaaattcactgtggaaaagagtattgagttacaaactgagaagaaaaagcaggaagttccctaataatctggaatattctacatggcttgattacatagcaaacaagaccaagatttagggctgtcttaaacatcactgccgtcttgaagcagggtacacacgttaggtattgtgaagaacatcaatccgaacttttcttctgttgtttgcactgatgcgattttttgttcttttatgtttatacaacgtatctatgttgtgtaggggaaattttttcattttttaaaaattctactttggttttgttgttgttttgatttgtttttggctaagtagaggacatggactagttgtagcaaacagaacatgctgtttgctcttgccaaaggtcagtgagtgagtgcatttgctgcagtggtggcacgtagagaactagatggtaataaagatttaaaactatgaagaaggttacagtgtaactattttggtactagaaccagttcatgctggccgaaacgacaatggtttatggacttgcatccattttgtatttttgtaatatttgtaaatatgaactttttaaattgctgcaaagatggtttcttttgtaagatgttttcaacgtttacattcaatccaagcctttgtatattttagagctgtgcaacactttaagtcttgtatttatttttagtaaaaatggtgacagtttcattgtgaacccctctcaaaaaaaatgtatcagaaaagtttgattacctagaaagtgtgtatagaaactgcaaataaacgtgactgcaatt

SEQ ID NO: 51692 - DNA, 8213 bp, Artificial Sequence
  derived and/or modified sequence
ctgatttgccattcaagtgaaccctggagggattagcagccagcctagcacttgggtgagaccatctccccctccaggggggagtcctagatgcagcacagaggttctgtgaaaatctgccatcctccttgcagaaggttgccctctctcgccctccatcccccccgccgtgcttgctgacttaagcagatcagctttcagctctctggcattcagagacgtctttgcataaaagaaaaggcccttccttaaggagcagagcgggaatccaagcatggctctggcctgctgcatgcccaagaatgcagccgtctccaacctggacatagagagtaagctgagtgtgtactaccgcgccccgtggcaccagcagcgcaacatcttcctcccagccacaaggccaccctgcgtggaggagctgcaccgccacgcccggcagagcctgcaagccctgcgcagagaacaccggagccggagcgatcgccgagagcaaagagcagctgcccccctttccattgcagctcctccactgccagcctaccctccagctcacagccagaggaggcgtgagtttaaggaccgtcactttttaacgtttaacagcacccgttcgccctcccccactgaatgttgccacatgaccccgtggagtagaaagtcccatcccccagaggatgaagatacagatgtcatgttagggcagaggccgaaaaacccaatacacaatatcccttccacactggacaagcagaccaactggagcaaagcactacctctcccgacgccagaggagaagatgaaacaagatgcccaagtgatttcttcttgcattattcccatcaatgttactggagttggctttgacagagaggctagtatacgctgctctctggttcattcacaatcggtactacagcggagacgaaaattgaggaggaggaaaaccatctcgggtatccccagaagagttcaacaagaaatagattctgatgaatcaccagtggccagggaaaggaatgtgattgtgcacacaaacccagacccctccaacactgtcaataggatatccggaaccagggactctgagtgccaaaccgaggatattctgattgctgccccatccagaaggagaatcagagctcaaaggggtcaaagcattgcagcttccctttctcattctgctggcaacatttctgccctagcagacaaaggtgacaccatgtttactcctgcagtgagcagccgcacaagatctcggagccttccccgggaaggtaatagaggtggggatgctgagcccaaagttggcgctaaaccctcagcatatgaagagggagagtcttttgtgggtgaccatgaaagaacccctaatgatttcagtgaggctccaagcagcccgagtgcccaggaccaccagcctactttgggcctggcctgctctcaacatcttcacagcccccagcacaaattaagtgagaggggaaggtcacgtctgtcccgaatggctgctgactctggcagctgtgacatctcctccaactcagacacgtttgggagccccatccactgcatctccacggctggcgtcctccttagcagccacatggaccagaaagatgaccaccagtcatccagtggcaactggagtgggagcagctccacgtgcccctcgcagacctcagaaaccatccctcctgcagcttctcctccactcactggctcttcacactgtgactcggagttgtcactaaacacagcccctcatgccaatgaggatgccagtgttttcgtgacagagcaatacaatgaccacttggataaagtgagaggccatcgggcaaactcctttacctccactgttgcagacctgctggatgatcccaacaacagcaacacaagtgacagtgagtggaattacctacaccaccaccatgatgcctcctgccgccaggattttagtcctgagcgtcccaaggcagacagcctgggctgcccaagcttcacaagcatggccacttatgacagctttctggaaaagtctccatcagacaaagcggacactagctctcacttttcagtagacacggaaggatactatacctccatgcactttgactgtggtctcaaaggtaataagagctatgtctgtcactatgcagccctgggcccagagaatggccagggtgtaggggcttcccctggtcttccagattgtgcctggcaggactacttagaccacaagaggcagggaagaccaagcatctctttcaggaaaccaaaggcaaagccgaccccacctaaacgtagctcatcattgaggaagtctgatggaaacgcagatatttctgagaagaaagaaccaaagataagcagtggtcagcacctgcctcacagttccagggaaatgaagctgcctcttgatttcgccaacacgccttctcgaatggaaaacgccaatcttcccaccaagcaggaaccttcttggataaaccagagtgaacaaggcattaaggaacctcagttagatgcttcggatattccaccattcaaagatgaagttgccgaatccacacactatgcagacctctggctcctaaatgacttgaaaacaaatgatccttatagatctctatctaattcaagcaccgctacgggtaccacagtcattgaatgcatcaaatctccagagagctctgaatcccaaacatcacaatcagaatcaagagccaccaccccatctcttccttctgttgacaatgagtttaaactggcttcaccagaaaagctggctggcttggcatctccatcaagtggctattcaagccagtctgaaacgccaacatcctctttccctacagctttcttttcaggtccattgtctcccggaggtagcaaaagaaaacctaaagtcccagaaagaaaatcctcactacagcaaccctctttaaaagatggaactatatcactgagtaaagaccttgaacttccaattatacctcctacccatcttgatctaagtgctcttcataatgtcttgaacaaaccattccaccaccgtcatccactgcatgtttttactcataataagcagaacacagtaggagaaacactgaggtcgaatcctccaccgtcccttgcaattacaccaacgatcctgaaatctgttaaccttaggtccatcaacaagtctgaagaagttaagcaaaaagaagaaaacaatacagatctcccttatttagaggaaagcacactcacaacggctgccttgtctccaagtaagattaggccgcatacagcaaataaatcagtatctcgtcaatactccactgaagacaccatactgtcctttttagactcttctgcagttgagatgggaccagataaactacatttagaaaaaaactctacttttgatgtgaagaatcgctgcgatccagaaaccataacatcagctggtagcagtcttctagattcaaatgtcacaaaagaccaagtgcgtacagagactgagcctattccagaaaacacgccaaccaaaaactgtgcttttcccacagaaggatttcagagggtctctgctgcccgcccaaatgatttggatggtaaaataatacaatatggacctggtccagacgaaactctagaacaggtacagaaggcaccctctgcaggtctggaggaagttgcacaacctgaatctgtggatgtaatcacatctcagtcagactcaccaactagagcaacagatgtaagcaatcaatttaagcatcaatttgttatgagccgccaccatgacaaagtgcctggtactatcagctatgaatcggagataacatctgtaaattcattccctgaaaaatgttccaagcaggaaaatattgcttcaggtatttcagccaaaagtgcctctgataacagcaaagcagaggagacccaaggaaatgtggatgaggcttcattgaaagaatcatcaccgagtgatgactccatcatttcaccacttagtgaagactcccaagctgaagcagagggtgtgttcgtgtctccaaacaaacctcgaacaactgaggatttatttgcagtcattcacagatccaagaggaaagtacttggaagaaaagattccggggacatgtctgttcgaagcaaatcgagagctcccctcagcagtagcagcagcagcgccagttccatcacttcacccagcagtaatgtgacaacccccaacagccagaggtctcctggtctcatataccgaaatgccaaaaagtccaacacatccaatgaagagtttaagctgttactgctcaagaaaggcagtcgctcagattctagttaccgcatgtctgccactgagatcctgaagagccccatactgcccaaacctcctggggagctcacagcagagtcccctcagagcaccgatgatgcccatcaggggtcacaaggggctgaggcattgtccccactctctccatgctccccacgagttaatgcagaaggcttttcctcgaagagctttgccacctcagcatcagcaagggttggacgttctcgggcccctcctgcagccagcagcagccgctacagtgtccgctgccggctgtacaatacgcccatgcaggcaatctccgagggagagacggaaaattctgacgggagcccacatgacgaccgttcctcccagagttcaacatagactgcctgtaccaggctgcctggcaaaggccaaaacccttactcacatgaggatggaggaacagaacagaggacttgggaaaagtctcaacttgatggggtagcatcactgctaagcaatgaatgaatttctaaatacagtatgtgctgggtaaacagaaagtggtttagacattcttgattagtttccatattttaagtagctgcagtctttcatgtttttctttagcatagtttgatttacgcaatctccttccttgtgaaaatagaggatacaaaattgtctaattttcatgacacctagaaaacgttttcccagagctgcctattcagaaactaaagccctcactgtcattattctttaagaagatgaaattactctggatgtttggtatttttttacattaaaacaaactaaagcaaaatttagaagaaagaactacacatatgtaaataccatatttttgataaaaatgtgtaaatagatttatcaatgatgagtggacatgtggtcaattatctactgcacaccaactgtttatagaatacacaaaaataaaatgtaataactgtattctgtgaataccattttcatatcaaatgccatatttaaatgtccaccaatatgatttctgagtggtaaacctcaaatatgaattttaaactggtgaactaaaggaaatcttgaggtcatatactgaaatatgaataaattaaaataatgaattcagatctaatcatttttatgacaaattgcagcaccaaacaaactaatagcaacccatggctgtgatttgttgtgtggtaatttggacagaatgaaaagcatgcttttgattttttttttaatcagtgagagaagtcatcattctcaacacaaagccctgaacaacagcatttgacagtgtcctttagattttaattttttcaatggattgctttaaagagaatgagtagggaaaatagtagttaattttaggttatgttttatattaggctactggggacataaacggtcataactaatgactgtaatcattaaactccttaaacagtttagaaattagctccaggttcttaaactaacaaaaataaaacctaagcatgccacagagctattgattaatcagtaagtacctgtaatgagttttcagtgaagctttctctctgtgctgatgagattcatgctacctaaaaattaacagaaatgacactgtgaacaatgtagttggaaaataggtatgtgtatatgcattatttatactcattgttaaactgggaatggggaacagctctggttcacaatactacatacaactgagtttttgtctggttttactatagtgtctgcttgatggcaaaaggggagggtggagggtgggagaggaaatgtcagggcatgtgctctgataaaataaaggcagggaaacaagctgaattacttgaaattacttgaattttcttgtcttaaaactgaaaaaaaaatgtagttacacgttaaaatctgcaaatggtttttacacctctgattttaacatgaacttatactaatgtttggaatcttatgtcagaaatataagcagctatgtacttagaataggttttgaatgggagaggtagaacagagagagaattaagaagggatctgacttataaaagactagaatgtgattagagtgatagaacataccaatgttaccaagaaattgacaagctgctggctttaagcttatgcaagtggtagttgggaaagtaggaggtgtggaagagggtttgcattttggattaattcatgcaaaatgaaggaggaagcctggtctaagaagatactgtctttcaatagaaatgatttctaaactgctacagattaagaatagataatctgattgctgttgttttgtttgtttggaaagaaaaaaaatgtctggcttcttctactatttgttttcactaccaaactgtgttactaaatttcttgtcatccttgtatgtaaaatgggtgctgggggtggaggggtataagaggagggagagtcagagagagtgtgtatgggtgtgtgtgagtgtgagtgtgtgtgtacgcacacacactggggatagataagctacctggtaaagggtttgaacatttacaaaatgtcacactttttcttaaaagaaaaatattttggggtttgaataaaatggaccaccatttctcattggaacccattaattaagaaaaccagcatggtttgacaccacatgggaacatgaataaatctgtctcatgatttgaaaagtacaccttgcaaagttttaaaaataaagtttttaggcaaatgcgataagaaaccgtcatttccagtcacagtaggcgatctttcgtaatttcataaaagcagttcgtttgcagtatggcttttgtgtagttaggggttttttaagtgtgaagaaaggtatgtgggctttaaaagtgattctaaatcttgaatagaaaacacatgaattggctttaataaaaatgtcacctttttattattgacattaagtaatggtaccatatattttttaaaatacatattgacttgaattgtgaggcaataagataccttctatatgtaatgatcacagaactaacccttataatatagttttacttattttgtttactctaaaaatctatagcagagtttctctattttatatttcatagatttaaaaaacccaaataaagatggatttaaaattcactgtggaaaagagtattgagttacaaactgagaagaaaaagcaggaagttccctaataatctggaatattctacatggcttgattacatagcaaacaagaccaagatttagggctgtcttaaacatcactgccgtcttgaagcagggtacacacgttaggtattgtgaagaacatcaatccgaacttttcttctgttgtttgcactgatgcgattttttgttcttttatgtttatacaacgtatctatgttgtgtaggggaaattttttcattttttaaaaattctactttggttttgttgttgttttgatttgtttttggctaagtagaggacatggactagttgtagcaaacagaacatgctgtttgctcttgccaaaggtcagtgagtgagtgcatttgctgcagtggtggcacgtagagaactagatggtaataaagatttaaaactatgaagaaggttacagtgtaactattttggtactagaaccagttcatgctggccgaaacgacaatggtttatggacttgcatccattttgtatttttgtaatatttgtaaatatgaactttttaaattgctgcaaagatggtttcttttgtaagatgttttcaacgtttacattcaatccaagcctttgtatattttagagctgtgcaacactttaagtcttgtatttatttttagtaaaaatggtgacagtttcattgtgaacccctctcaaaaaaaatgtatcagaaaagtttgattacctagaaagtgtgtatagaaactgcaaataaa

SEQ ID NO: 51693 - DNA, 4419 bp, Artificial Sequence
  derived and/or modified sequence
atggacaacgccctgttctgcctggccgccgtgagcaacctggacattgaatctaagctctccgtgtactatcgggccccatggcatcagcagagaaacattttcctgcctgctacacgccccccttgtgtcgaggaactgcatcgccacgcccgccagtctctgcaggcactacgccgtgagcatcgctcacgctcagatcgtcgcgaacagcgcgcagctgctcccctttccatcgcagcccccccgctccccgcttatccccccgcacattctcagcgcaggagggagtttaaggaccggcacttcttaacatttaactccactagatcaccctcacccactgaatgctgccacatgaccccatggtccaggaagtctcatccaccggaagatgaagacaccgatgtgatgctcggccagcggcctaaaaatccaattcataacattccctccacacttgataagcaaacaaattggtccaaggcactgccactaccaactccagaggaaaagatgaaacaggacgcccaggtcatctcatcatgcatcattccaatcaacgttaccggagtggggttcgatcgggaagcttctattcgctgttccttagtgcactcacagagcgtgttgcagcggagacgcaaactgagaaggagaaaaacgatctctgggatcccacgcagagtacagcaagaaatagacagcgacgaaagccctgttgctcgcgagcgtaacgtaatcgttcacactaatcccgacccatcgaataccgtgaatcgtatcagcggtaccagagatagtgaatgccaaaccgaggacatccttatcgccgctcctagtagacgaagaatccgggctcaacgaggacagtctattgccgctagcctgagccactctgccggcaatatctcagccttagccgacaagggggacacaatgtttactcctgcggtgtcctcaagaactagaagccgcagtctacccagggagggcaaccgaggaggcgatgcagagccgaaggtgggagcaaaaccctcagcttatgaggaaggcgagtctttcgttggtgaccacgaacggacccctaacgatttctcagaggcaccctctagtccgtctgctcaggatcaccagcccaccctgggactcgcttgctcccagcacctgcatagccctcaacataaactttccgagcggggccgctcacgcctttcaagaatggctgcggattcaggatcctgcgacatttctagcaacagcgacacattcggtagcccaattcactgcatatccaccgcaggcgtcttgctctcgtctcatatggatcaaaaagatgatcaccagtcttcttcagggaactggtctggttcgagcagcacatgcccatcacaaactagtgagacaatacctcccgccgccagcccccccctgacaggctcatcccattgtgattctgaattatccctgaacacagcaccacacgcaaacgaggacgcttctgtttttgtcactgagcagtacaatgaccacctggacaaggttcggggccacagggcaaattctttcacctcaaccgtcgctgatcttctggatgacccgaacaacagtaacacctccgactcagagtggaattaccttcatcaccatcacgatgcgagctgtagacaagacttctcccccgagagacccaaggctgacagtctaggctgcccctcattcacttctatggccacatacgattctttcctcgagaagtcacccagtgacaaagctgacacctcttctcatttctcagtggacacagagggttactatacctcaatgcattttgactgcggcctgaagggaaacaaatcttacgtctgtcactatgctgccttagggccagaaaatggccaaggggtgggcgcatcccctgggctccccgattgcgcatggcaggactacttggaccacaaaagacagggacggccatcaatttcctttagaaagcctaaggccaagccaacccctcctaaaagaagcagctccctgagaaagagcgacgggaatgccgacatatctgagaaaaaagagcctaagattagtagtggccagcacctcccccactcttcaagggagatgaagctccccttagatttcgccaacaccccctcccgaatggagaatgctaatctgcctaccaaacaggaaccatcttggatcaaccagtctgagcaggggatcaaggaaccgcagctggacgctagcgatataccgcccttcaaggacgaagtggcagagtcaactcactacgctgatctctggttgctgaatgatctgaagactaatgacccctatcgctcactgtctaatagttcaactgctaccggaaccaccgtgatcgaatgcatcaagtcccccgagtctagtgagtctcagacctctcagagcgagagccgcgccacgacccctagcctgcccagcgtggacaatgagttcaagttagcctcccccgaaaaactcgctggactggcctcgccttctagtggatactccagccagagtgaaacacctaccagcagcttcccaacagcctttttttccgggcctctttcccccggaggctctaagaggaagccaaaggtcccggagcgtaagtcctcactgcagcagcctagcctgaaggatggaactatctccctgtcaaaagatttggagctacccattattcctccgacccacctggatctgtccgctttacataatgtgctgaacaaaccatttcaccacagacaccccttgcacgtgtttacacataataagcaaaatacagtaggtgaaacccttaggtcgaatcctccaccgagcctcgcaattacccctaccatccttaagtccgtgaatctgaggtccattaacaagtctgaagaggttaagcagaaagaggagaacaacaccgacctcccctatttggaggaatccacactgaccactgccgcactgtcaccatccaagattcggccacacaccgctaacaaatctgtatccaggcagtatagtacagaagacacaatcctctctttcctcgattctagcgcagtggaaatgggacccgacaaactacacttagagaaaaactctacatttgatgtgaaaaaccggtgtgaccctgagactattaccagtgccggttccagtctgctggattccaacgttacaaaagaccaggtgaggacagagaccgagcctatcccagagaacacacctaccaagaactgcgcctttccaacagaaggattccaacgtgtctcggccgcacgacctaacgatctagacggcaagatcattcaatatggtccgggccctgacgagacactggagcaggttcagaaagctcccagcgctggcctggaagaggtagctcaacccgagagcgtcgatgtaattacctctcagtccgactctccgaccagggcaaccgacgtatctaatcaattcaagcaccaattcgtgatgtcacgacaccacgataaggtgccagggacaatttcgtacgaatcagagatcacaagcgtcaactctttccctgaaaaatgttccaagcaggaaaacatcgcatctgggatatctgctaagtccgccagcgacaattcaaaagctgaggaaacccagggtaacgtggatgaggcatctctaaaagagagtagcccttctgatgatagtataatctctcccctgtcggaagacagccaagcagaagcagaaggagtgttcgtgagccccaataaaccgagaactacagaagatctgttcgccgtcattcaccgctcaaaacgtaaggttttggggcgtaaagattctggggacatgagtgtgagatcaaagtctagagctcccttgtctagctcatcgagctcagcttcctctatcaccagcccttcatccaacgtcaccaccccaaactcacaaaggtctccgggacttatctaccgaaatgcaaagaaatcaaataccagcaatgaggagttcaagctgctgctcctgaaaaagggtagtcgcagtgactcctcataccgaatgagcgcaaccgaaatcctaaaatcacctatcctgccaaagccccccggggagctcacagcagagtcaccacaatcaaccgacgatgcacatcaaggttcacagggagccgaagcactaagtccactgtctccctgttccccaagggtaaacgctgagggctttagtagcaaaagcttcgccaccagcgctagtgctagggtggggaggtctagagcgccccctgctgcgagtagttccaggtatagcgtgaggtgtcgattgtataataccccaatgcaggccatttccgaaggcgagacagagaacagcgatggcagccctcatgacgatagatcatcacagagcagcacctag

SEQ ID NO: 51694 - DNA, 4425 bp, Artificial Sequence
  derived and/or modified sequence
atggccctggcctgctgcatgcccaagaacgccgccgtgagcaacttagacattgaatctaagctatccgtgtactatcgcgcgccctggcaccagcagcgcaatatattcctaccagcaaccaggcctccgtgcgtagaagaacttcataggcacgcgcgtcagtctctgcaggctctgcgccgagagcacaggagtaggtcagatcggcgtgagcagcgcgccgctgcccccttgagcattgccgcgccaccattgcccgcatatcccccggcccattcccagcgaagaagagagttcaaggatcgtcactttctgacttttaactcaacccgctcacccagtcctaccgagtgttgccacatgacaccgtggagtcgcaagagtcatccccctgaggacgaagataccgacgtgatgctgggccagagaccaaaaaaccctattcataatattccttccacactggacaagcagaccaactggtccaaggctctaccacttcccacccctgaggaaaaaatgaagcaagatgcccaggtaatcagttcctgcatcattcctattaacgtgacgggcgtcggattcgaccgggaagcttcaatccgatgcagtctggtccactctcagtcagtcctgcagcgccgtcgcaagctccgccgccgaaagacgattagcggcattccgagacgggtgcaacaggaaatcgattctgatgaatccccagtagcacgagagaggaacgttatcgtgcatacaaaccctgatccgtctaacactgtcaataggatcagtggaacgcgggattcagagtgccagactgaagatattcttattgcagctccttcacggcgacgtatccgggcccagaggggccagagtatcgcggcttcacttagtcacagtgccggaaatatctccgccttggccgataagggggataccatgtttacccctgcagtttctagccggacaaggtctagaagtctaccgagggaagggaatagagggggagatgccgaacctaaggtaggggccaaacccagcgcatacgaagaaggagaatcctttgtgggcgaccacgaacggactccaaatgatttctccgaggctccctcctcaccatccgctcaggaccaccagccaaccttaggattggcatgtagtcaacatctgcactcacctcagcataaattgagcgaacggggcaggtctagactgtcgcgcatggctgctgatagcggctcctgtgacatttcctccaacagcgatacattcgggtcacctattcactgcattagcacagcaggcgtacttttgagctcccatatggatcagaaagatgaccaccagtcctcctccggcaactggagcggctcctcaagtacttgcccatcacagaccagtgagaccatccccccagcagcaagcccgccactgacaggtagttcccattgtgactccgagctcagtctgaacactgccccccacgctaacgaggatgcctctgtatttgtgacagaacagtataatgatcacctcgacaaagttcgcggtcatagggctaattcattcacgagcaccgtcgccgacctgttggatgaccccaacaacagcaataccagcgatagtgagtggaattacctgcatcaccaccatgatgcctcttgtcgacaagatttctcccccgaaaggcccaaagctgattcactaggatgcccttccttcacttcgatggcaacctatgactcctttctagaaaaatcacccagtgacaaagcggatactagctcccactttagcgtcgataccgaaggatactacacctccatgcactttgactgcgggctgaaaggcaacaaatcttatgtctgtcattacgccgccctgggtcctgagaatggacagggggtaggcgcctccccaggactgcccgactgcgcatggcaggattacctcgaccacaagcgtcaaggcaggcccagcatttcattcaggaaaccgaaggcgaagcccacaccccccaagcgcagcagttccttgagaaagtcagatggaaacgctgatatctccgagaagaaggaacccaaaatttcatctggccaacacctgccacatagcagccgagagatgaagctgccacttgatttcgctaacacccccagtaggatggaaaatgccaatctgccgactaagcaggaaccatcttggattaaccagagtgaacagggcataaaagagcctcaactcgatgcctctgacattcctccctttaaggacgaggtcgcagagagtacccactacgccgatctctggcttctgaatgatcttaaaactaacgacccttaccggtcactgtcaaattcatccaccgcaactggcaccacagtgatcgagtgtatcaaaagccccgagtctagcgagtcacagacgagccagagcgaatctagagccacaacgccttccttgccctccgtggacaacgagtttaagctggcctctccagagaaactggctggtctagccagccctagcagcgggtactcatcccagagcgagacacccacatcatctttccccacagccttctttagcggtcctctgagccccgggggaagcaagcgtaagccaaaagtgccagaacgtaaaagctctctccagcagccttcgcttaaggatggcaccattagcctgagtaaggacttagaactgcccattatcccacctacgcacctcgatttatctgctctccataatgtgctcaataaaccgtttcatcatcgccaccctttgcacgtcttcacccacaataagcagaacactgtcggcgagacactaaggagcaatccacccccgagcctcgcgatcactcctacaattctgaagtccgtgaacctgaggagcatcaataaatctgaagaggttaagcaaaaagaggaaaacaataccgacctaccctacctagaggaatcaaccctgacaacggctgctctttcaccatctaagatccgacctcacacggccaataaatcagtgagccgccagtacagcactgaggacaccattctgagcttcctggatagttcggctgtggagatgggtccggacaagcttcatctggagaagaacagcacatttgacgtgaagaaccgatgtgatcccgagactatcacatccgctggaagctctctcttggattccaacgtgactaaagatcaggtcaggacagagacagagcccataccggagaatacacccacaaaaaactgcgctttccccaccgaggggttccagcgcgtttctgccgctcgacccaacgacctagacggaaaaataattcagtatggccctggccctgacgaaaccttggagcaggttcagaaagcacctagtgccggtctggaagaggttgcacagcctgaatctgttgacgtaatcacttctcagtcagacagccctacaagggcgacagatgtgagcaaccagtttaagcatcagttcgtgatgtcaagacaccatgataaggtgcctggcacaatcagctatgagtcagagatcactagtgtgaactcatttcccgaaaagtgtagtaaacaagagaacatcgcttctggaatctctgccaaatctgccagcgacaacagcaaggccgaggaaactcaaggcaatgtggacgaagcctctttaaaagagtcttcacccagcgatgattccattatttctcctttgagcgaggacagtcaggcagaagccgaaggtgtcttcgtgtctcccaacaaaccccgcaccaccgaggatctttttgcggttatccatcggtctaagcggaaagtcttaggacggaaggacagtggagatatgagtgtgaggtccaagtccagggctcctttgtcaagtagctcgtccagcgctagtagtatcacctctccctctagcaatgtcacaaccccgaactcccaacgctcccctggcttgatttatcgcaatgcgaaaaaatccaatacttctaacgaagagtttaagcttctccttctgaaaaaggggtcccgctccgactcttcctacaggatgtccgctactgagattctgaagagtccgatcctcccaaagccaccaggcgagttgaccgctgaatcaccccagagtaccgacgatgcacaccagggttcacaaggggccgaagccctcagtcctctgagcccctgcagtccaagagtcaacgcggagggtttttcatcgaagtcatttgctaccagtgcatctgctagagttggccgcagtcgcgcccctcctgctgcttctagtagtcgatattccgtgcggtgcaggctctacaatactcccatgcaagcaatctcggagggtgaaacagaaaattctgacggcagtccccacgatgataggtcaagtcagagctccacttag

SEQ ID NO: 51695 - DNA, 4419 bp, Artificial Sequence
  derived and/or modified sequence
atggataatgccctcttctgcctcgcggcagtgtctaacttagacattgagtccaagttatccgtgtactacagggctccatggcaccaacagcggaacattttcttgccagctacgcggccaccgtgcgtggaagagctacacaggcatgcacgtcaaagccttcaggccctacgcagggagcaccgcagcaggagcgaccggagagagcagagagcggctgcgcctctgtcaattgccgctcctccgctcccagcttacccacctgctcatagccagagacgacgggagttcaaagataggcactttctgacttttaactcaacgcgtagtccctcaccaaccgaatgctgtcacatgacaccatggagcagaaagagccaccctcccgaagatgaggatacggacgtgatgttgggccagaggccaaagaaccccatacacaacataccatctactctggataaacaaaccaactggtcgaaagctcttcctctgcctacacccgaggagaagatgaagcaggacgcacaggtgatcagcagctgcataatcccaataaacgtgaccggggtaggctttgatcgggaggcttctattagatgctctctggttcactcacagagtgttctgcagaggcgccgtaagttacgcagaaggaaaactatctcaggtatacctcgcagggtgcagcaggaaattgacagtgatgaaagccctgtggcgcgagagaggaatgtaatcgtgcacactaacccagacccctctaatactgtcaaccgcatatcagggacacgtgatagcgagtgccagaccgaagacatcttgatcgctgccccatcacgccgaaggatacgggcacagagaggtcagtcaatcgctgccagcctgagtcactctgcaggaaacatctccgcgcttgcggacaagggcgataccatgttcacccccgctgtaagctccaggactcgcagtagaagtctacctcgggagggaaatcgagggggtgacgccgaaccaaaagtgggagctaaacctagtgcctatgaggaaggcgagagctttgtcggagatcatgaaaggaccccaaacgacttctccgaggcaccttcgagtccatctgctcaggaccatcagccaacgctcgggttggcctgctctcaacacctgcatagcccccaacacaaactttcagagagaggtcggtcacggctgtcccggatggccgcagatagcggaagttgcgatataagttcaaatagcgatactttcggcagtccgatccactgcatttccaccgcgggtgtactgctatctagccacatggatcaaaaggatgaccaccagtcctcatcaggtaactggagcggatcctctagcacctgtcccagccagacatcagaaactattccccctgcagcaagcccaccactcactggttcaagtcattgtgattcggagctctctctcaatacagcacctcatgcaaatgaggacgcgagtgtgttcgtgacagagcaatataacgaccacttggacaaagttcgcggtcatcgggctaatagcttcacgagcacggtggctgacttgctggatgaccccaacaatagtaataccagtgacagcgagtggaattatttgcaccaccaccatgatgcgagttgtagacaggactttagccccgagcgacctaaggccgattcactgggatgtccaagtttcacctccatggctacttacgacagctttctggagaaatctccctctgataaggctgacaccagtagccatttcagcgtggacactgaggggtattacaccagcatgcatttcgactgcggactgaaaggcaacaagagctatgtatgtcattacgccgctctgggcccagagaacggtcaaggagtaggtgcatccccgggactcccagactgcgcatggcaggactacctcgaccataagaggcagggccgaccgagcatttcattcaggaagcctaaggcgaaaccgacacccccaaaacgttcttctagcctgaggaagagcgacggaaacgccgatatttcagagaaaaaggaaccgaaaatatcatctggtcagcacttgcctcatagctcacgcgagatgaagttaccactggacttcgcgaatacaccctcccggatggagaacgcgaacctgcccactaaacaggaacccagttggatcaaccagagtgagcagggaattaaagagccacagttggatgcctccgacattcccccattcaaggacgaggtggccgaatccacccactacgctgatctctggctgttaaatgacttaaagacaaacgacccataccggtcgctgtctaatagttccaccgcaacaggaaccacggttattgagtgtataaaatcccctgagtcgtcggagagccagaccagccagagtgaatctcgcgctacaacaccatccctgccttctgtggacaatgaattcaaactggcttccccagagaaattggctgggctggcatccccaagctccgggtacagcagccaatccgaaacccctacctcttcatttcctaccgcattttttagtggccctctttcacccggtgggagcaagcgtaagccaaaggtgcctgaaaggaaatcctccctacagcagccttcactcaaggatggcacaatctctttatctaaggatctcgaactgcccatcatccctcctacccatctcgacctaagcgctctgcacaatgtgctcaacaagccctttcaccacaggcaccccttacacgtgttcacccataataaacagaacaccgtcggggaaaccctccgatctaaccctcccccaagtctggcaattacgcctacgatcctcaaatctgtaaacttacgttcaataaataagtcggaagaagtgaagcagaaggaagaaaacaacacagacctcccatacctcgaagagtctacactgaccacagctgccctgagcccatccaagattcggcctcacaccgcaaacaaatctgtttcacgacagtactccaccgaggacacaatcctgtccttcctcgattcttccgctgtggaaatgggcccagataagctgcatctcgagaagaactcaactttcgacgttaaaaatagatgcgacccagaaactataactagcgctgggtcatcactattggacagtaacgtgacgaaagatcaggtgcggaccgaaaccgagcccatccccgaaaacactccgaccaagaactgcgcgttcccgacagaggggttccagagggtatccgcagccaggccaaatgatctggatggtaagatcatacagtatggtcctgggcctgacgaaactcttgaacaggtgcaaaaggccccaagcgccggtctcgaagaggtggcacaacccgagtcggtcgatgtcatcacaagtcagagtgattctcctactagagccaccgatgtttccaatcaattcaagcaccagttcgttatgtctcgccatcatgataaggtgcctggaaccatcagttatgagtcagaaatcacatccgtaaatagtttccccgaaaagtgctcgaaacaggaaaatatcgccagcggaatatcagccaaatctgcttccgacaattctaaagccgaagaaactcagggaaatgtggacgaggcctcactcaaggaaagctccccgagcgacgactctatcatctctcctctgagtgaggatagccaagcggaggccgagggtgtctttgtctccccgaacaagcctcgcaccaccgaagacctcttcgcggtgatccacagatctaagcggaaggttttaggacggaaagatagtggtgacatgtctgtgagaagcaaatcccgggcaccactgagctctagcagctcttctgcctcttcaattacttcccctagcagcaatgtgaccactcctaattcccagcgctcaccaggactgatttatagaaatgcgaaaaagtccaatacgtccaacgaggagttcaaactactcttacttaagaagggttcaagaagcgacagttcttataggatgtccgcaactgagattcttaaatccccaattctgcctaaaccaccgggagagctcaccgccgagagccctcaatctacagatgatgctcaccaagggagccagggtgccgaagccctgtcaccgctcagcccctgttcccccagggtgaacgcagaagggttcagctctaagtcattcgccacgagtgcatccgcccgagtgggtagaagtagagcacctccagccgcaagtagtagcaggtactcggttcgctgccgtctgtacaacaccccaatgcaggctatctccgagggggagaccgagaatagcgacgggagcccccatgacgatcggtcgtcccagtcctctacttag

SEQ ID NO: 51696 - DNA, 4425 bp, Artificial Sequence
  derived and/or modified sequence
atggcgctggcttgttgtatgcctaagaacgccgctgtgagcaatctcgacatcgaatctaaactctctgtgtactacagagctccatggcaccaacaaagaaatatattcctgccagccactcgtccgccttgtgttgaagaacttcatcgtcatgcgcgacaatccctgcaggccctaaggcgagaacaccgatcaaggtcggatagacgggagcagcgcgcagccgcaccactgagcattgctgccccacctctcccagcgtatccccctgcccatagtcagcggaggagggaattcaaggacagacacttcctgacctttaactcaactcggtcccctagcccaaccgaatgctgtcatatgacaccatggtctcggaagtcgcatccacccgaagatgaagataccgatgttatgctgggccagaggcctaaaaacccaatccataacatcccatccaccttagacaaacagacaaattggtcgaaggctctcccgctgcccacgcccgaagagaaaatgaaacaggatgcccaggttatcagcagctgtataatccccattaatgtcacaggggtggggtttgatcgggaggcctccattcgctgctctctggttcatagccagtccgtattgcaaaggcgaaggaaactcaggcgtaggaaaacgataagcggaatcccaaggcgggtgcagcaggagatcgattcagatgagagccccgtggccagagagaggaacgtaatagtgcatacaaacccggatcccagcaacacagtgaaccggatctcaggcaccagagatagcgaatgccagaccgaggacatattgattgcggcaccatccaggcggagaattagggctcaacgcggacagagcatcgccgcttctctgtcacatagcgctggcaacatcagtgccttggcagacaaaggcgacaccatgttcacaccagctgtaagctcacgcacaagatcacgatctctgccgagagagggcaaccgcggtggtgatgcagagcctaaggtcggagctaaaccaagcgcatacgaagagggcgagtcttttgtcggggatcacgaacggacaccaaacgactttagcgaggccccatcctcacccagcgcccaggaccaccagccaactcttggcctcgcctgctctcagcacctgcatagcccccagcataagctatctgagagggggagaagtagactcagcagaatggccgctgactccggcagttgcgacattagctcaaactccgacacgtttggatcacctatccactgcatctctactgccggtgtcttgctgagttcacacatggaccagaaagacgatcatcagtccagcagtggcaactggtccgggagctcatctacctgcccaagccagacatccgagacgatccctccagccgcttcgcctcctctcactggatccagtcattgcgacagcgagctctccctgaacactgcccctcacgctaacgaagacgcgtctgtgtttgtgacagaacaatataacgatcatctggacaaggtgaggggacatcgagctaactccttcacaagtaccgtagccgatctgcttgacgacccaaacaactcaaacaccagcgactctgaatggaattatctccaccaccaccacgatgcctcttgccgccaggatttctcaccagagcgaccaaaagctgactcgctcggctgtccgagctttaccagcatggcgacatacgatagcttcctcgagaaatcaccttcagacaaagccgacacttccagccacttttccgtggatactgaggggtattatacctccatgcattttgactgtggactgaaaggaaataaatcatatgtctgccactatgccgctctgggacctgagaacggccaaggtgtgggggcatctcctgggctgcctgactgcgcctggcaagactacctggaccataagagacagggccgtcctagtatctccttccgtaagcctaaagccaagcctacgccacccaaacgatcttcttcgctgcgaaagagcgatggaaacgctgatatatctgagaaaaaggaaccgaaaatctcctccgggcagcacctgccccactcttcccgggagatgaaacttcccttggactttgccaatacacccagccggatggagaatgcgaacctgccgaccaagcaggaaccctcttggatcaaccagagcgaacagggcatcaaggagccacagttggatgcaagtgatattcccccattcaaagatgaagtagctgagagtacgcattacgcagacttatggctgttgaacgatcttaagacgaacgatccatataggagcctgagcaattcaagtacagcgactggcactactgtgattgagtgcattaagtctccagagtcttctgagtctcagacctcccaaagcgaatcccgcgcaactacccccagcctgcctagcgtggacaacgaatttaagcttgctagtccggaaaagctggcaggactggcaagtccatcttcaggctatagctcccagagcgagacacctacctcatcctttcctaccgcattcttctctggacctttgtcccctgggggttctaaacgtaagccaaaagtgcctgagaggaagtcctctttacaacagccaagcctgaaggacggaactatttctctttcaaaggacctggaactgccaattattccccctactcacctggacctgagtgctctccacaacgttcttaacaaacctttccaccataggcaccccctgcatgtgttcactcacaataagcaaaatacagttggggagactctccgctccaacccacctcccagcctagcaatcactccaactatactgaaaagcgtgaacctccggagcatcaacaagtcagaggaagtaaagcagaaggaagaaaacaacaccgacctcccttacctcgaagagagcacactgactacagccgctctctccccgtctaaaatacggcctcacacggcaaacaagagcgtgtctaggcagtatagtacagaggataccattctgtcttttctggactcgagtgccgtggagatgggacctgacaagctacatctggagaaaaactcaacgtttgatgtgaagaaccggtgtgaccctgagactatcacaagtgccggatcatccctacttgatagcaatgtcacaaaagaccaggtgagaaccgaaactgagccaatcccagagaatacccctaccaagaactgtgcttttccgacagagggctttcaacgggtttctgcagctcggcctaatgacttagatggaaaaataatccagtacggcccaggtccagacgagacacttgaacaagtccaaaaggcaccttccgcaggtctggaggaggtggcacagccagaaagtgtcgatgtcattacctcacagagcgacagtccaactagagccacggatgtgagtaatcagttcaaacaccagtttgtaatgtctcggcaccatgacaaggtgccaggcaccattagttacgagtctgagatcacaagcgtgaactcctttccagaaaaatgcagcaagcaagaaaatatcgctagcggtatcagtgctaaatctgccagcgacaatagcaaggctgaggaaacccagggtaatgttgatgaggcatccctcaaggagtccagtcctagtgacgattccatcattagccccctgagtgaagactcccaggcggaagcagagggtgtgttcgtgagcccgaacaagccacgaaccaccgaagatttgttcgccgtcatacacaggtcaaaacgaaaggtgttaggtaggaaagattcaggtgatatgtccgttcgttcaaagtcacgggcacccctgtcatcctccagtagtagtgctagtagcattacctcacctagttcaaacgtgaccactccaaattcccagaggagcccaggactgatttataggaatgcaaaaaagagcaatacgagcaacgaggagttcaagctgttgttgctgaagaagggcagcagatctgactcttcctaccgaatgtccgccacggagatcctaaaaagtccgatcctgcctaaaccaccaggtgagctcaccgctgagtcgccacagtcgactgacgacgcccatcaaggcagtcagggggcagaagctctgtccccccttagtccatgctctcctcgagtgaacgccgaaggttttagcagtaaatcattcgcaacatctgccagcgccagggtggggagaagccgcgctccaccagccgcatcctcgagccggtacagcgtccgatgccgcctatacaatacacctatgcaggcaatttctgagggggaaaccgaaaattcagatggttccccccatgatgaccgctctagtcagtccagtacttag

SEQ ID NO: 51697 - DNA, 4419 bp, Artificial Sequence
  derived and/or modified sequence
atggacaacgccctgttctgcctggccgccgtgagcaacctggacatcgagagcaagctgagcgtgtactacagagccccctggcaccagcagagaaacatcttcctgcccgccaccagacccccctgcgtggaggagctgcacagacacgccagacagagcctgcaggccctgagaagagagcacagaagcagaagcgacagaagagagcagagagccgccgcccccctgagcatcgccgccccccccctgcccgcctacccccccgcccacagccagagaagaagagagttcaaggacagacacttcctgaccttcaacagcaccagaagccccagccccaccgagtgctgccacatgaccccctggagcagaaagagccacccccccgaggacgaggacaccgacgtgatgctgggccagagacccaagaaccccatccacaacatccccagcaccctggacaagcagaccaactggagcaaggccctgcccctgcccacccccgaggagaagatgaagcaggacgcccaggtgatcagcagctgcatcatccccatcaacgtgaccggcgtgggcttcgacagagaggccagcatcagatgcagcctggtgcacagccagagcgtgctgcagagaagaagaaagctgagaagaagaaagaccatcagcggcatccccagaagagtgcagcaggagatcgacagcgacgagagccccgtggccagagagagaaacgtgatcgtgcacaccaaccccgaccccagcaacaccgtgaacagaatcagcggcaccagagacagcgagtgccagaccgaggacatcctgatcgccgcccccagcagaagaagaatcagagcccagagaggccagagcatcgccgccagcctgagccacagcgccggcaacatcagcgccctggccgacaagggcgacaccatgttcacccccgccgtgagcagcagaaccagaagcagaagcctgcccagagagggcaacagaggcggcgacgccgagcccaaggtgggcgccaagcccagcgcctacgaggagggcgagagcttcgtgggcgaccacgagagaacccccaacgacttcagcgaggcccccagcagccccagcgcccaggaccaccagcccaccctgggcctggcctgcagccagcacctgcacagcccccagcacaagctgagcgagagaggcagaagcagactgagcagaatggccgccgacagcggcagctgcgacatcagcagcaacagcgacaccttcggcagccccatccactgcatcagcaccgccggcgtgctgctgagcagccacatggaccagaaggacgaccaccagagcagcagcggcaactggagcggcagcagcagcacctgccccagccagaccagcgagaccatcccccccgccgccagcccccccctgaccggcagcagccactgcgacagcgagctgagcctgaacaccgccccccacgccaacgaggacgccagcgtgttcgtgaccgagcagtacaacgaccacctggacaaggtgagaggccacagagccaacagcttcaccagcaccgtggccgacctgctggacgaccccaacaacagcaacaccagcgacagcgagtggaactacctgcaccaccaccacgacgccagctgcagacaggacttcagccccgagagacccaaggccgacagcctgggctgccccagcttcaccagcatggccacctacgacagcttcctggagaagagccccagcgacaaggccgacaccagcagccacttcagcgtggacaccgagggctactacaccagcatgcacttcgactgcggcctgaagggcaacaagagctacgtgtgccactacgccgccctgggccccgagaacggccagggcgtgggcgccagccccggcctgcccgactgcgcctggcaggactacctggaccacaagagacagggcagacccagcatcagcttcagaaagcccaaggccaagcccaccccccccaagagaagcagcagcctgagaaagagcgacggcaacgccgacatcagcgagaagaaggagcccaagatcagcagcggccagcacctgccccacagcagcagagagatgaagctgcccctggacttcgccaacacccccagcagaatggagaacgccaacctgcccaccaagcaggagcccagctggatcaaccagagcgagcagggcatcaaggagccccagctggacgccagcgacatcccccccttcaaggacgaggtggccgagagcacccactacgccgacctgtggctgctgaacgacctgaagaccaacgacccctacagaagcctgagcaacagcagcaccgccaccggcaccaccgtgatcgagtgcatcaagagccccgagagcagcgagagccagaccagccagagcgagagcagagccaccacccccagcctgcccagcgtggacaacgagttcaagctggccagccccgagaagctggccggcctggccagccccagcagcggctacagcagccagagcgagacccccaccagcagcttccccaccgccttcttcagcggccccctgagccccggcggcagcaagagaaagcccaaggtgcccgagagaaagagcagcctgcagcagcccagcctgaaggacggcaccatcagcctgagcaaggacctggagctgcccatcatcccccccacccacctggacctgagcgccctgcacaacgtgctgaacaagcccttccaccacagacaccccctgcacgtgttcacccacaacaagcagaacaccgtgggcgagaccctgagaagcaaccccccccccagcctggccatcacccccaccatcctgaagagcgtgaacctgagaagcatcaacaagagcgaggaggtgaagcagaaggaggagaacaacaccgacctgccctacctggaggagagcaccctgaccaccgccgccctgagccccagcaagatcagaccccacaccgccaacaagagcgtgagcagacagtacagcaccgaggacaccatcctgagcttcctggacagcagcgccgtggagatgggccccgacaagctgcacctggagaagaacagcaccttcgacgtgaagaacagatgcgaccccgagaccatcaccagcgccggcagcagcctgctggacagcaacgtgaccaaggaccaggtgagaaccgagaccgagcccatccccgagaacacccccaccaagaactgcgccttccccaccgagggcttccagagagtgagcgccgccagacccaacgacctggacggcaagatcatccagtacggccccggccccgacgagaccctggagcaggtgcagaaggcccccagcgccggcctggaggaggtggcccagcccgagagcgtggacgtgatcaccagccagagcgacagccccaccagagccaccgacgtgagcaaccagttcaagcaccagttcgtgatgagcagacaccacgacaaggtgcccggcaccatcagctacgagagcgagatcaccagcgtgaacagcttccccgagaagtgcagcaagcaggagaacatcgccagcggcatcagcgccaagagcgccagcgacaacagcaaggccgaggagacccagggcaacgtggacgaggccagcctgaaggagagcagccccagcgacgacagcatcatcagccccctgagcgaggacagccaggccgaggccgagggcgtgttcgtgagccccaacaagcccagaaccaccgaggacctgttcgccgtgatccacagaagcaagagaaaggtgctgggcagaaaggacagcggcgacatgagcgtgagaagcaagagcagagcccccctgagcagcagcagcagcagcgccagcagcatcaccagccccagcagcaacgtgaccacccccaacagccagagaagccccggcctgatctacagaaacgccaagaagagcaacaccagcaacgaggagttcaagctgctgctgctgaagaagggcagcagaagcgacagcagctacagaatgagcgccaccgagatcctgaagagccccatcctgcccaagccccccggcgagctgaccgccgagagcccccagagcaccgacgacgcccaccagggcagccagggcgccgaggccctgagccccctgagcccctgcagccccagagtgaacgccgagggcttcagcagcaagagcttcgccaccagcgccagcgccagagtgggcagaagcagagccccccccgccgccagcagcagcagatacagcgtgagatgcagactgtacaacacccccatgcaggccatcagcgagggcgagaccgagaacagcgacggcagcccccacgacgacagaagcagccagagcagcacctag

SEQ ID NO: 51698 - DNA, 4425 bp, Artificial Sequence
  derived and/or modified sequence
atggccctggcctgctgcatgcccaagaacgccgccgtgagcaacctggacatcgagagcaagctgagcgtgtactacagagccccctggcaccagcagagaaacatcttcctgcccgccaccagacccccctgcgtggaggagctgcacagacacgccagacagagcctgcaggccctgagaagagagcacagaagcagaagcgacagaagagagcagagagccgccgcccccctgagcatcgccgccccccccctgcccgcctacccccccgcccacagccagagaagaagagagttcaaggacagacacttcctgaccttcaacagcaccagaagccccagccccaccgagtgctgccacatgaccccctggagcagaaagagccacccccccgaggacgaggacaccgacgtgatgctgggccagagacccaagaaccccatccacaacatccccagcaccctggacaagcagaccaactggagcaaggccctgcccctgcccacccccgaggagaagatgaagcaggacgcccaggtgatcagcagctgcatcatccccatcaacgtgaccggcgtgggcttcgacagagaggccagcatcagatgcagcctggtgcacagccagagcgtgctgcagagaagaagaaagctgagaagaagaaagaccatcagcggcatccccagaagagtgcagcaggagatcgacagcgacgagagccccgtggccagagagagaaacgtgatcgtgcacaccaaccccgaccccagcaacaccgtgaacagaatcagcggcaccagagacagcgagtgccagaccgaggacatcctgatcgccgcccccagcagaagaagaatcagagcccagagaggccagagcatcgccgccagcctgagccacagcgccggcaacatcagcgccctggccgacaagggcgacaccatgttcacccccgccgtgagcagcagaaccagaagcagaagcctgcccagagagggcaacagaggcggcgacgccgagcccaaggtgggcgccaagcccagcgcctacgaggagggcgagagcttcgtgggcgaccacgagagaacccccaacgacttcagcgaggcccccagcagccccagcgcccaggaccaccagcccaccctgggcctggcctgcagccagcacctgcacagcccccagcacaagctgagcgagagaggcagaagcagactgagcagaatggccgccgacagcggcagctgcgacatcagcagcaacagcgacaccttcggcagccccatccactgcatcagcaccgccggcgtgctgctgagcagccacatggaccagaaggacgaccaccagagcagcagcggcaactggagcggcagcagcagcacctgccccagccagaccagcgagaccatcccccccgccgccagcccccccctgaccggcagcagccactgcgacagcgagctgagcctgaacaccgccccccacgccaacgaggacgccagcgtgttcgtgaccgagcagtacaacgaccacctggacaaggtgagaggccacagagccaacagcttcaccagcaccgtggccgacctgctggacgaccccaacaacagcaacaccagcgacagcgagtggaactacctgcaccaccaccacgacgccagctgcagacaggacttcagccccgagagacccaaggccgacagcctgggctgccccagcttcaccagcatggccacctacgacagcttcctggagaagagccccagcgacaaggccgacaccagcagccacttcagcgtggacaccgagggctactacaccagcatgcacttcgactgcggcctgaagggcaacaagagctacgtgtgccactacgccgccctgggccccgagaacggccagggcgtgggcgccagccccggcctgcccgactgcgcctggcaggactacctggaccacaagagacagggcagacccagcatcagcttcagaaagcccaaggccaagcccaccccccccaagagaagcagcagcctgagaaagagcgacggcaacgccgacatcagcgagaagaaggagcccaagatcagcagcggccagcacctgccccacagcagcagagagatgaagctgcccctggacttcgccaacacccccagcagaatggagaacgccaacctgcccaccaagcaggagcccagctggatcaaccagagcgagcagggcatcaaggagccccagctggacgccagcgacatcccccccttcaaggacgaggtggccgagagcacccactacgccgacctgtggctgctgaacgacctgaagaccaacgacccctacagaagcctgagcaacagcagcaccgccaccggcaccaccgtgatcgagtgcatcaagagccccgagagcagcgagagccagaccagccagagcgagagcagagccaccacccccagcctgcccagcgtggacaacgagttcaagctggccagccccgagaagctggccggcctggccagccccagcagcggctacagcagccagagcgagacccccaccagcagcttccccaccgccttcttcagcggccccctgagccccggcggcagcaagagaaagcccaaggtgcccgagagaaagagcagcctgcagcagcccagcctgaaggacggcaccatcagcctgagcaaggacctggagctgcccatcatcccccccacccacctggacctgagcgccctgcacaacgtgctgaacaagcccttccaccacagacaccccctgcacgtgttcacccacaacaagcagaacaccgtgggcgagaccctgagaagcaaccccccccccagcctggccatcacccccaccatcctgaagagcgtgaacctgagaagcatcaacaagagcgaggaggtgaagcagaaggaggagaacaacaccgacctgccctacctggaggagagcaccctgaccaccgccgccctgagccccagcaagatcagaccccacaccgccaacaagagcgtgagcagacagtacagcaccgaggacaccatcctgagcttcctggacagcagcgccgtggagatgggccccgacaagctgcacctggagaagaacagcaccttcgacgtgaagaacagatgcgaccccgagaccatcaccagcgccggcagcagcctgctggacagcaacgtgaccaaggaccaggtgagaaccgagaccgagcccatccccgagaacacccccaccaagaactgcgccttccccaccgagggcttccagagagtgagcgccgccagacccaacgacctggacggcaagatcatccagtacggccccggccccgacgagaccctggagcaggtgcagaaggcccccagcgccggcctggaggaggtggcccagcccgagagcgtggacgtgatcaccagccagagcgacagccccaccagagccaccgacgtgagcaaccagttcaagcaccagttcgtgatgagcagacaccacgacaaggtgcccggcaccatcagctacgagagcgagatcaccagcgtgaacagcttccccgagaagtgcagcaagcaggagaacatcgccagcggcatcagcgccaagagcgccagcgacaacagcaaggccgaggagacccagggcaacgtggacgaggccagcctgaaggagagcagccccagcgacgacagcatcatcagccccctgagcgaggacagccaggccgaggccgagggcgtgttcgtgagccccaacaagcccagaaccaccgaggacctgttcgccgtgatccacagaagcaagagaaaggtgctgggcagaaaggacagcggcgacatgagcgtgagaagcaagagcagagcccccctgagcagcagcagcagcagcgccagcagcatcaccagccccagcagcaacgtgaccacccccaacagccagagaagccccggcctgatctacagaaacgccaagaagagcaacaccagcaacgaggagttcaagctgctgctgctgaagaagggcagcagaagcgacagcagctacagaatgagcgccaccgagatcctgaagagccccatcctgcccaagccccccggcgagctgaccgccgagagcccccagagcaccgacgacgcccaccagggcagccagggcgccgaggccctgagccccctgagcccctgcagccccagagtgaacgccgagggcttcagcagcaagagcttcgccaccagcgccagcgccagagtgggcagaagcagagccccccccgccgccagcagcagcagatacagcgtgagatgcagactgtacaacacccccatgcaggccatcagcgagggcgagaccgagaacagcgacggcagcccccacgacgacagaagcagccagagcagcacctag

SEQ ID NO: 51699 - protein, 325 aa, Artificial Sequence
  derived and/or modified sequence
MGKMVSVINTVDTSHEDMIHDAQMDYYGTRLATCSSDRSVKIFDVRNGGQILIADLRGHEGPVWQVAWAHPMYGNILASCSYDRKVIIWREENGTWEKSHEHAGHDSSVNSVCWAPHDYGLILACGSSDGAISLLTYTGEGQWEVKKINNAHTIGCNAVSWAPAVVPGSLIDHPSGQKPNYIKRFASGGCDNLIKLWKEEEDGQWKEEQKLEAHSDWVRDVAWAPSIGLPTSTIASCSQDGRVFIWTCDDASSNTWSPKLLHKFNDVVWHVSWSITANILAVSGGDNKVTLWKESVDGQWVCISDVNKGQGSVSASVTEGQQNEQ

SEQ ID NO: 51700 - protein, 322 aa, Artificial Sequence
  derived and/or modified sequence
MVSVINTVDTSHEDMIHDAQMDYYGTRLATCSSDRSVKIFDVRNGGQILIADLRGHEGPVWQVAWAHPMYGNILASCSYDRKVIIWREENGTWEKSHEHAGHDSSVNSVCWAPHDYGLILACGSSDGAISLLTYTGEGQWEVKKINNAHTIGCNAVSWAPAVVPGSLIDHPSGQKPNYIKRFASGGCDNLIKLWKEEEDGQWKEEQKLEAHSDWVRDVAWAPSIGLPTSTIASCSQDGRVFIWTCDDASSNTWSPKLLHKFNDVVWHVSWSITANILAVSGGDNKVTLWKESVDGQWVCISDVNKGQGSVSASVTEGQQNEQ

SEQ ID NO: 51701 - protein, 368 aa, Artificial Sequence
  derived and/or modified sequence
MREPVLTWCVPLELLCSHPLPLSAFLKSQVKLYTYRACAGKDEMGKMVSVINTVDTSHEDMIHDAQMDYYGTRLATCSSDRSVKIFDVRNGGQILIADLRGHEGPVWQVAWAHPMYGNILASCSYDRKVIIWREENGTWEKSHEHAGHDSSVNSVCWAPHDYGLILACGSSDGAISLLTYTGEGQWEVKKINNAHTIGCNAVSWAPAVVPGSLIDHPSGQKPNYIKRFASGGCDNLIKLWKEEEDGQWKEEQKLEAHSDWVRDVAWAPSIGLPTSTIASCSQDGRVFIWTCDDASSNTWSPKLLHKFNDVVWHVSWSITANILAVSGGDNKVTLWKESVDGQWVCISDVNKGQGSVSASVTEGQQNEQ

SEQ ID NO: 51702 - protein, 308 aa, Artificial Sequence
  derived and/or modified sequence
MIHDAQMDYYGTRLATCSSDRSVKIFDVRNGGQILIADLRGHEGPVWQVAWAHPMYGNILASCSYDRKVIIWREENGTWEKSHEHAGHDSSVNSVCWAPHDYGLILACGSSDGAISLLTYTGEGQWEVKKINNAHTIGCNAVSWAPAVVPGSLIDHPSGQKPNYIKRFASGGCDNLIKLWKEEEDGQWKEEQKLEAHSDWVRDVAWAPSIGLPTSTIASCSQDGRVFIWTCDDASSNTWSPKLLHKFNDVVWHVSWSITANILAVSGGDNKVTLWKESVDGQWVCISDVNKGQGSVSASVTEGQQNEQ

SEQ ID NO: 51703 - DNA, 1107 bp, Artificial Sequence
  derived and/or modified sequence
atgagagagcccgtgctgacctggtgcgtgcccctggagctgctgtgcagccaccccctgcccctgagcgccttcctgaagagccaggtgaagctgtacacctacagagcctgcgccggcaaggacgagatgggcaagatggtgagcgtgatcaacaccgtggacaccagccacgaggacatgatccacgacgcccagatggactactacggcaccagactggccacctgcagcagcgacagaagcgtgaagatcttcgacgtgagaaacggcggccagatcctgatcgccgacctgagaggccacgagggccccgtgtggcaggtggcctgggcccaccccatgtacggcaacatcctggccagctgcagctacgacagaaaggtgatcatctggagagaggagaacggcacctgggagaagagccacgagcacgccggccacgacagcagcgtgaacagcgtgtgctgggccccccacgactacggcctgatcctggcctgcggcagcagcgacggcgccatcagcctgctgacctacaccggcgagggccagtgggaggtgaagaagatcaacaacgcccacaccatcggctgcaacgccgtgagctgggcccccgccgtggtgcccggcagcctgatcgaccaccccagcggccagaagcccaactacatcaagagattcgccagcggcggctgcgacaacctgatcaagctgtggaaggaggaggaggacggccagtggaaggaggagcagaagctggaggcccacagcgactgggtgagagacgtggcctgggcccccagcatcggcctgcccaccagcaccatcgccagctgcagccaggacggcagagtgttcatctggacctgcgacgacgccagcagcaacacctggagccccaagctgctgcacaagttcaacgacgtggtgtggcacgtgagctggagcatcaccgccaacatcctggccgtgagcggcggcgacaacaaggtgaccctgtggaaggagagcgtggacggccagtgggtgtgcatcagcgacgtgaacaagggccagggcagcgtgagcgccagcgtgaccgagggccagcagaacgagcagtag

SEQ ID NO: 51704 - DNA, 1107 bp, Artificial Sequence
  derived and/or modified sequence
atgcgcgaaccagtcctgacatggtgcgtaccacttgagctgttgtgcagccatcccctgccattgagcgctttcctcaaatcacaggtgaagctctatacttatcgagcatgtgctggtaaagacgagatggggaagatggtatctgtgattaacacagtggacactagccacgaggacatgatccacgacgcgcagatggattattacggcaccagactggctacttgctctagcgacaggtctgtcaaaatctttgatgttagaaacggcggccaaatccttatcgctgatttacgtggtcatgaaggtcccgtgtggcaggtggcttgggcacatcccatgtacggcaacatcctcgcttcatgctcatacgatagaaaagtaataatctggcgggaagagaatgggacttgggagaaaagccatgaacatgcaggccacgacagctctgtgaacagcgtctgttgggctcctcatgactacggactcatactcgcctgcggctcatcagacggagctatctcacttctaacatatacaggggaagggcagtgggaggtgaagaagataaacaacgcacacactattggttgtaacgcggtctcttgggcccctgccgtagtgccaggtagtctcatagaccacccatcgggtcagaaacctaactatatcaagcgcttcgccagtggcggctgcgacaacctgatcaaactgtggaaagaagaagaggacggtcagtggaaagaggagcagaaactggaggcccatagtgactgggttagggatgttgcgtgggctccgagcataggtctcccaacaagtactatcgctagctgctcccaagacggccgagtttttatttggacatgtgatgatgcttctagtaacacctggtcacccaaactgctccataaatttaatgacgtggtgtggcatgttagctggagcattacagcaaatattctcgcagtatctggaggcgacaataaggtcacactgtggaaggaatctgtggatggccagtgggtgtgtatcagtgatgtgaataagggccaggggtcggtctccgcctctgtgacagagggtcagcagaatgagcagtag

SEQ ID NO: 51705 - DNA, 1107 bp, Artificial Sequence
  derived and/or modified sequence
atgagggagcctgtgctgacctggtgtgtgcccctggagctgctgtgcagccaccccctgcccctgagcgccttcctgaagagccaggtgaagctgtacacctaccgggcctgtgccggcaaggatgagatgggcaagatggtgtctgtcatcaacacagtggacaccagccatgaggacatgattcatgatgcccagatggactactacggcacccggctggccacctgcagcagtgacagatctgtgaagatctttgatgtgagaaatggaggccagatcctgattgctgacctgcggggccacgagggccctgtgtggcaggtggcctgggcccaccccatgtatggcaacatcctggccagctgcagctatgacaggaaggtgatcatctggagagaagaaaatggcacctgggagaagagccatgaacatgctggccatgacagctctgtgaacagcgtgtgctgggcccctcatgactatggcctcatcctggcctgtggcagcagtgatggagccatcagcctgctgacctacacaggagagggccagtgggaggtgaagaagatcaacaatgcccacaccatcggctgcaatgctgtgtcctgggccccagctgtggtgcccggcagcctgattgaccaccccagcggccagaagcccaactacatcaagagatttgccagcggcggctgtgacaacctgatcaagctgtggaaggaggaggaggatggccagtggaaggaggagcagaagctggaggcccacagcgactgggtgagagatgtggcctgggcccccagcatcggcctgcccaccagcaccatcgccagctgcagccaggacggccgggtcttcatctggacctgtgatgatgccagcagcaacacctggagccccaagctgctgcacaagttcaatgatgtggtgtggcacgtgtcctggagcatcacagccaacatcctggccgtgtctggaggagacaacaaggtgaccctgtggaaggagagcgtggatggccagtgggtgtgcatcagtgatgtgaacaagggccagggctctgtgtctgcctctgtgacagagggccagcagaatgagcagtag

SEQ ID NO: 51706 - DNA, 1479 bp, Artificial Sequence
  derived and/or modified sequence
gtccgagacctggagcagccaccgccgcaatcatgacttcggggacctggtttttagagagtctagaatctgatgagagaacctgtgcttacttggtgtgtacctcttgaactgctttgcagccatcctcttccactgtctgcctttctgaaatcacaagtcaaactttatacctacagggcttgtgctggaaaagatgaaatggggaaaatggtgtcagtaattaacactgtggatacctcccatgaggacatgattcacgacgcccagatggactactatggcacccgcctggcaacctgctcatcagacaggtccgtcaaaatctttgatgtgcgcaatggagggcagatccttatcgccgacctcaggggtcatgagggtcctgtgtggcaagtggcctgggctcaccccatgtacggcaacatcctggcatcgtgctcctatgaccggaaagtcattatctggagagaggaaaacggcacctgggagaagagccacgagcatgcgggacacgactcctcagtgaactcggtgtgctgggccccccatgactacggcctgatcctggcctgtgggagctcggatggggccatctccctgctgacttacaccggggaaggccaatgggaagtaaagaagatcaacaacgctcacaccattggctgcaatgccgtcagctgggcccctgctgttgtacctggaagcctcatagaccacccatcggggcagaaacccaattacatcaagaggtttgcatcaggtggctgtgacaacctcatcaagctgtggaaggaggaggaggacggccagtggaaggaggagcagaagctagaagcgcacagtgactgggttcgagatgtggcctgggccccctccatcggcctgcccaccagcaccatcgccagctgctcccaggatggtcgtgtgttcatttggacctgtgatgatgcctcaagcaatacgtggtcccctaaattgttgcacaagttcaacgatgtggtgtggcatgtgagctggtccatcacagccaacatcctggctgtctctggtggagacaataaggtgaccctgtggaaggagtcagttgatgggcagtgggtgtgcatcagtgatgtcaacaagggccagggctccgtatcagcatcagtgacagagggccagcagaacgagcagtgacaagacaggtggggcctggctccccacccgccagctccaggactgccccttcctgggccaactaaccagacaactgggaagagcccccaactccaacaggattattttcccaggaggagttacagatgcagccacagattgatcatctgccttaacgtgatcggagatgctttgtaatctactgtccagctgaaagcactcatgttacgaggaagaaactacaagtgatgttcaaatctattttgggtcatttttatgtacctttgggttcaggcattatttggggggttttgtttccaa

SEQ ID NO: 51707 - DNA, 1107 bp, Artificial Sequence
  derived and/or modified sequence
atgcgggagcccgtgctgacctggtgcgtgcccctggagctgctgtgcagccaccccctacctttatcggcctttttaaaaagccaggtaaagctttatacttacagagcatgcgctggaaaggatgaaatgggcaagatggtcagtgtgatcaatacagtggatacatctcacgaggacatgatccacgatgctcaaatggactactatggaacccggctagcaacctgctccagcgatcggtcagttaaaattttcgacgtgcgcaatggcggacagattctgatcgcggatttacgcggtcatgaaggacccgtgtggcaggttgcttgggcccacccgatgtatggaaatatactcgccagttgttcttacgatcggaaagtaatcatctggcgggaagagaacgggacatgggaaaagagtcacgaacatgcagggcacgatagcagcgtaaactccgtttgttgggccccacacgactatgggctgatccttgcatgcggctctagtgatggcgcgataagtctgctgacctatacaggggagggacaatgggaggtgaagaagattaacaatgcccataccattggctgtaacgccgtgtcctgggcacccgctgtggtgcctggctctctgatcgaccacccgtcaggacagaagcctaattatatcaagcgctttgcctccggaggctgtgacaacctgataaagctttggaaggaggaggaggatggtcagtggaaagaggagcagaaactggaagcccattccgactgggtgcgggatgttgcttgggcccccagtatagggttgccgacctctaccattgcttcctgttcccaagatggacgcgtttttatttggacgtgcgacgacgcctcctcaaatacctggagtcccaaactcttgcacaagttcaatgatgtcgtctggcatgtctcctggagcattactgctaatattctggcagtgtccggaggagacaataaggtgaccctgtggaaggaatccgtcgatggccagtgggtgtgcatcagtgacgttaataagggccaaggaagcgtgtccgcgtccgtcaccgaagggcagcagaacgaacaatag

SEQ ID NO: 51708 - DNA, 1107 bp, Artificial Sequence
  derived and/or modified sequence
atgcgagaacccgtattgacctggtgcgtacctctcgagctgctatgttctcatccacttccattgtccgcattcctcaagagtcaggtgaagttgtacacctatagggcctgcgcaggcaaagacgagatggggaagatggtttccgttatcaacactgtggatacgagccacgaggatatgattcatgacgcccaaatggactactacggcacgcgcttggccacgtgtagcagtgacaggtcggtgaagatcttcgatgttcggaacggcggacagattctcatcgcagacctgagagggcacgagggaccagtatggcaggttgcgtgggcccaccctatgtatgggaacattctcgcctcgtgcagctacgacagaaaggtgatcatatggcgcgaagagaatgggacctgggagaaatctcatgagcatgcgggacacgacagcagcgtgaactccgtgtgctgggctccgcatgactacggtttgattcttgcctgtggttctagcgatggcgctatttctctcttgacttacactggggagggtcagtgggaagtgaaaaaaataaataatgcacacaccattggctgcaacgccgtatcctgggcccctgcagtggtgccgggttctctgatagatcacccctcagggcagaaacctaactatattaagagatttgcctcaggtggatgtgacaatctcatcaagctgtggaaggaagaggaagacgggcagtggaaggaagagcaaaaactcgaagcccactctgactgggtgcgggacgtcgcctgggctcccagcattggcttgcccacatccactatagcctcttgctcacaggacggcagagtgttcatctggacctgtgatgatgcatcttctaatacctggtcccctaagctgctgcataaattcaacgacgtggtctggcacgtttcatggagtattaccgcgaatatactcgctgtgtctgggggagataacaaggtgacactctggaaggagtcagtggacggacagtgggtatgtatctcagacgtgaacaagggccagggctcagtgtcggccagcgtgaccgaaggtcagcagaacgaacagtag

SEQ ID NO: 51709 - DNA, 832 bp, Artificial Sequence
  derived and/or modified sequence
ccgcaatcatggtgagtgttggtactgaggaggcctagcagggtgaaggccacggtcgcggccttcacgggttcctcggccgtcctgagtcccaaatcccaagctggagccgttcagctcccctccaccgcttagagatttggggggctctggccccgtccttgcggaccattccgaggggagtccagaggtgaggccgaggaacctccctgactttgcggggcgcgccgctcctgcgtctcctgccagtctcccttccttcttttcggtcaacaattgaaaacaaaacgaggaacagcagaggagctactgtataccgagccctcagcattgttcgtaatctccgcctgctaacagccttgtgaagaaggtgctattcttctcaacactttacagatgaggacacttgaggttcggagacgtggagcctcttgcacagctgcttaagtggtagtagagccgagatttgaaccctcctaaccattcctttctgccgcctactgcagctcccagcagagatgattgaactgttgctcggggtagggcccccagggcttgtgctggaaaagatgaaatggggaaaatggtgtcagtaattaacactgtggatacctcccatgaggacatgattcacgacgcccagatggactactatggcacccgcctggcaacctgctcatcagacaggtccgtcaaaatctttgatgtgcgcaatggagggcagatccttatcgccgacctcaggggtcatgagggtcctgtgtggcaagtggcctgggctcaccccatgtacggcaacatcctggcatcgtgctcctatgaccggaaagtc

SEQ ID NO: 51710 - protein, 1594 aa, Artificial Sequence
  derived and/or modified sequence
MRTTKVYKLVIHKKGFGGSDDELVVNPKVFPHIKLGDIVEIAHPNDEYSPLLLQVKSLKEDLQKETISVDQTVTQVFRLRPYQDVYVNVVDPKDVTLDLVELTFKDQYIGRGDMWRLKKSLVSTCAYITQKVEFAGIRAQAGELWVKNEKVMCGYISEDTRVVFRSTSAMVYIFIQMSCEMWDFDIYGDLYFEKAVNGFLADLFTKWKEKNCSHEVTVVLFSRTFYDAKSVDEFPEINRASIRQDHKGRFYEDFYKVVVQNERREEWTSLLVTIKKLFIQYPVLVRLEQAEGFPQGDNSTSAQGNYLEAINLSFNVFDKHYINRNFDRTGQMSVVITPGVGVFEVDRLLMILTKQRMIDNGIGVDLVCMGEQPLHAVPLFKLHNRSAPRDSRLGDDYNIPHWINHSFYTSKSQLFCNSFTPRIKLAGKKPASEKAKNGRDTSLGSPKESENALPIQVDYDAYDAQVFRLPGPSRAQCLTTCRSVRERESHSRKSASSCDVSSSPSLPSRTLPTEEVRSQASDDSSLGKSANILMIPHPHLHQYEVSSSLGYTSTRDVLENMMEPPQRDSSAPGRFHVGSAESMLHVRPGGYTPQRALINPFAPSRMPMKLTSNRRRWMHTFPVGPSGEAIQIHHQTRQNMAELQGSGQRDPTHSSAELLELAYHEAAGRHSNSRQPGDGMSFLNFSGTEELSVGLLSNSGAGMNPRTQNKDSLEDSVSTSPDPMPGFCCTVGVDWKSLTTPACLPLTTDYFPDRQGLQNDYTEGCYDLLPEADIDRRDEDGVQMTAQQVFEEFICQRLMQGYQIIVQPKTQKPNPAVPPPLSSSPLYSRGLVSRNRPEEEDQYWLSMGRTFHKVTLKDKMITVTRYLPKYPYESAQIHYTYSLCPSHSDSEFVSCWVEFSHERLEEYKWNYLDQYICSAGSEDFSLIESLKFWRTRFLLLPACVTATKRITEGEAHCDIYGDRPRADEDEWQLLDGFVRFVEGLNRIRRRHRSDRMMRKGTAMKGLQMTGPISTHSLESTAPPVGKKGTSALSALLEMEASQKCLGEQQAAVHGGKSSAQSAESSSVAMTPTYMDSPRKDGAFFMEFVRSPRTASSAFYPQVSVDQTATPMLDGTSLGICTGQSMDRGNSQTFGNSQNIGEQGYSSTNSSDSSSQQLVASSLTSSSTLTEILEAMKHPSTGVQLLSEQKGLSPYCFISAEVVHWLVNHVEGIQTQAMAIDIMQKMLEEQLITHASGEAWRTFIYGFYFYKIVTDKEPDRVAMQQPATTWHTAGVDDFASFQRKWFEVAFVAEELVHSEIPAFLLPWLPSRPASYASRHSSFSRSFGGRSQAAALLAATVPEQRTVTLDVDVNNRTDRLEWCSCYYHGNFSLNAAFEIKLHWMAVTAAVLFEMVQGWHRKATSCGFLLVPVLEGPFALPSYLYGDPLRAQLFIPLNISCLLKEGSEHLFDSFEPETYWDRMHLFQEAIAHRFGFVQDKYSASAFNFPAENKPQYIHVTGTVFLQLPYSKRKFSGQQRRRRNSTSSTNQNMFCEERVGYNWAYNTMLTKTWRSSATGDEKFADRLLKDFTDFCINRDNRLVTFWTSCLEKMHASAP

SEQ ID NO: 51711 - DNA, 4785 bp, Artificial Sequence
  derived and/or modified sequence
atgaggaccacaaaggtttacaagcttgttatccataagaaagggttcggaggcagcgacgacgaattggtcgtcaatccaaaggtgttcccacacattaagctgggggacatcgtggaaattgcacaccccaacgacgaatactcacctctgctgcttcaagtgaagtctttgaaggaagacctgcagaaagagacaatctccgtggatcagaccgtaacacaggtctttaggctgaggccctatcaggatgtgtacgttaatgtggttgacccaaaggacgtcaccctcgacctagtcgagctgaccttcaaggatcaatacatcggtcggggcgatatgtggcggctcaagaaatcactggtttcaacttgcgcatacatcacacaaaaagtggagttcgcagggatacgtgctcaggccggagagctctgggttaagaatgagaaagtcatgtgtggatatatcagcgaggacacccgtgtagttttcaggtcaacttccgctatggtctatatatttattcagatgtcttgtgagatgtgggactttgacatctatggtgacctttatttcgaaaaagccgtgaacgggttcttagctgatttgtttacaaagtggaaagaaaaaaattgtagtcacgaagtaaccgttgtgctttttagtcggactttttacgatgctaagagcgtagacgaattccctgagattaatcgtgcaagtattaggcaggatcataagggtagattttatgaggacttttacaaagtcgttgtgcagaacgaaaggcgcgaggagtggactagcctgttggttaccattaaaaaactttttatacagtacccggtattagttcgcctggaacaggccgagggatttcctcaaggagacaactccacttccgctcaggggaactaccttgaagcaatcaacttgagcttcaacgttttcgataaacactacatcaacaggaatttcgatcgcacagggcagatgtccgtcgtgattacccccggagtcggtgtcttcgaggtggatcggctgcttatgattctcacaaagcagcgaatgatcgacaacgggattggtgtggatctggtgtgtatgggtgagcagccactgcatgccgtacccttgtttaagttacacaatagatccgcaccaagggacagtagacttggagacgattacaatatcccacactggatcaaccatagcttttatactagtaagtcccaactgttctgtaactccttcacaccccgaatcaaacttgccggcaagaagcccgcatctgagaaagctaaaaatggcagggatacatccttggggtcacccaaagagtctgagaacgctctccccatccaggtagactacgatgcttatgatgctcaagttttccgcttgccaggcccctcacgtgctcagtgtctcacgacctgtagatccgtacgcgaacgtgaatcgcactctagaaagtccgcctccagctgcgacgtgagttcatctccgtcccttccaagtcgcacccttcctacggaggaagtccggtctcaggccagcgacgacagttctcttgggaagagcgctaacatcctaatgatcccccatccccatcttcatcagtatgaagtttcgtcaagccttggatatacatccaccagggatgtgctggagaatatgatggaaccccctcagagagacagtagcgcacccggacggtttcacgtagggagtgctgaatctatgctgcatgtccgccccggtggatacacgccccagcgcgccttaatcaatccattcgcaccaagccgcatgcctatgaaactcacgtccaaccgcagaagatggatgcacactttcccagtcggaccaagcggcgaggctattcagattcaccatcagacacgccagaacatggctgaactccaagggtctgggcagcgggaccctacccactcctcagccgagttgctggaactggcttatcacgaagccgcaggacgccacagcaacagtcgtcagcctggcgacggtatgtctttcttgaactttagcggcactgaggagttgtcagtgggtctcctctcaaattctggggcgggaatgaacccccgcactcagaacaaagattctctcgaggactcagtgtcaaccagccccgacccaatgcctggcttttgttgcaccgtcggcgtagattggaaatcgctaactacccccgcctgtttgcctctaaccaccgattatttccctgaccgccaaggcttgcagaatgactatacagaagggtgttacgatctactgcctgaagctgatattgataggcgtgacgaagacggagtgcagatgacagcccaacaggtgtttgaggagtttatttgtcaacgcctgatgcagggctaccaaataatcgtgcagccaaaaacacagaaaccaaacccagccgtaccacctcccctgtcgtcatctcccctgtattccagaggtcttgtaagtcgaaatagacccgaagaggaggaccagtattggctatcgatggggcgtacatttcacaaggttacgctaaaggataaaatgattacagtgacaaggtaccttcctaagtacccatatgagagcgcccaaattcactatacatatagcctgtgcccctcccattccgactccgaattcgtgtcatgttgggttgagttcagtcatgagagactcgaggagtacaaatggaactacttggaccaatacatctgttctgctggctctgaggatttctctctgatcgagagcctcaaattttggaggacccgcttcttactcctgcccgcttgtgtgactgctacaaaaaggatcacggagggagaagctcactgcgatatctatggtgatcggcccagagccgatgaggacgagtggcagctcctcgatggatttgtgagatttgtggagggactgaaccgcatccgccggagacacaggtcagacaggatgatgaggaagggtaccgcgatgaagggacttcagatgacgggccccatttcaacccactcgctggagtctaccgctccaccagtgggcaagaaggggacctccgctctgagcgccctattggagatggaagcatcacagaagtgcttaggtgagcagcaggcagctgtccatggcgggaaaagcagtgctcagtctgcagaatcctcctcagtggctatgacgcctacatacatggattcaccacgtaaagatggcgcattcttcatggaattcgtgcgctcgccacgcaccgcctccagtgccttctacccacaggtgagcgtcgaccagactgcgacaccaatgctggacggtacaagccttggaatctgcaccggacagagcatggaccggggcaactctcagacattcggcaactctcagaatatcggcgagcagggatacagcagtactaattcatctgattctagctcccaacagctcgtggcatctagtctcacaagctcttctaccctgactgagattttggaggcaatgaaacatccctctacaggagtccaactactgtcagaacagaagggtctctcgccatactgcttcattagcgcagaggtcgtgcattggcttgtgaaccacgtagaggggatccagacacaggctatggctatcgatatcatgcagaaaatgctggaggagcaattgatcactcacgcctctggagaggcttggagaacatttatttatggattttacttctacaaaatagtaacagacaaagagccagatcgggttgccatgcaacagcccgcaaccacgtggcacaccgccggcgttgacgactttgcttccttccagcgcaaatggtttgaagttgcatttgtcgcagaggagcttgtgcatagtgaaatcccagcattcctgcttccgtggttaccatcccgcccagcatcctatgcctctagacactcctctttttcaagaagctttgggggacgatcccaagcagctgccttgctggccgccaccgtgccggagcagcgcaccgtgaccctcgatgtggatgtcaataaccgtacagatcgccttgaatggtgcagttgttactaccacggcaacttctcgctcaacgctgccttcgaaatcaagctgcactggatggccgtgactgctgccgtactgtttgagatggtccagggatggcaccggaaggctacatcttgcggctttctgctggtacccgtgttggaaggcccttttgcacttccctcgtacctctacggcgaccctctgcgcgctcagctttttattcctttgaacatttcgtgcctactgaaggaaggtagcgaacatctcttcgactcgttcgagccggagacatactgggatcgaatgcacctgttccaagaggctatagcccaccggttcggcttcgtccaggataagtactctgctagcgccttcaattttcctgcagagaataagccgcagtacatccatgtcacaggcacagtgttcctacaactgccttattccaaaagaaagttttctggccagcagcgacgccgcaggaatagcacctcctctactaaccagaatatgttctgtgaggaaagagtggggtacaactgggcctacaacaccatgctcactaagacctggaggagcagcgcaacaggagatgaaaagttcgcagacaggctgctaaaagatttcaccgacttttgcatcaatcgagacaacaggctagtgactttttggacttcatgtctggagaagatgcacgcttcagccccctag

SEQ ID NO: 51712 - DNA, 4785 bp, Artificial Sequence
  derived and/or modified sequence
atgaggaccaccaaggtgtacaagctggtgatccacaagaagggctttggaggcagtgatgatgagctggtggtgaaccccaaggtgttcccccacatcaagctgggggacatcgtggagatcgcccaccccaatgatgagtacagccccctgctgctgcaggtgaagagcctgaaggaggacctgcagaaggagaccatctctgtggaccagacagtgacccaggtgttccggctgcggccctaccaggatgtgtatgtgaatgtggtggaccccaaggatgtgaccctggacctggtggagctgaccttcaaggaccagtacatcggccgcggggacatgtggaggctgaagaagagcctggtgtccacctgtgcctacatcacccagaaggtggagtttgctggcatccgggcccaggccggggagctgtgggtgaagaatgagaaggtgatgtgtggctacatcagcgaggacaccagggtggtgttccgcagcaccagcgccatggtgtacatcttcatccagatgagctgtgagatgtgggactttgacatctatggagacctgtactttgagaaggctgtgaatggcttcctggccgacctcttcaccaagtggaaggagaagaactgcagccatgaggtgacagtggtgctcttcagcaggaccttctatgatgccaagtctgtggatgagttccctgagatcaacagagccagcatccggcaggaccacaagggccgcttctatgaggacttctacaaggtggtggtgcagaatgaaagaagagaggagtggaccagcctgctggtgaccatcaagaagctgttcatccagtaccctgtgctggtgcggctggagcaggccgagggcttcccccagggcgacaacagcaccagcgcccagggcaactacctggaggccatcaacctgtccttcaacgtgtttgacaagcactacatcaacagaaactttgacagaacaggccagatgtctgtggtgatcaccccaggagtgggcgtgtttgaggtggaccggctgctgatgatcctgaccaagcagaggatgattgacaatggcatcggcgtggacctggtgtgcatgggagagcagcccctgcatgctgtgcccctcttcaagctgcacaacagaagtgccccccgggacagccggctgggagatgactacaacatcccccactggatcaaccacagcttctacaccagcaagagccagctgttctgcaacagcttcaccccccgcatcaagctggccggcaagaagccagccagcgagaaggccaagaatggccgggacaccagcctgggcagccccaaggagagtgaaaatgccctgcccatccaggtggactatgatgcctatgatgcccaggtgttccggctgcccggccccagccgggcccagtgcctgaccacctgccgctctgtgcgggagcgggagagccacagcaggaagagcgccagcagctgtgatgtgagcagcagccccagcctgcccagcaggaccctgcccacagaggaggtgcgcagccaggccagtgatgacagcagcctgggcaagagcgccaacatcctgatgatcccccacccccacctgcaccagtatgaggtgagcagcagcctgggctacaccagcaccagagatgtgctggagaacatgatggagcccccccagagggacagcagcgcccctggccgcttccacgtgggcagcgctgagagcatgctgcacgtgcggcctgggggctacaccccccagagggccctgatcaacccctttgcccccagcaggatgcccatgaagctgaccagcaacagaagacgctggatgcacaccttccctgtgggccccagcggggaggccatccagatccaccaccagacccggcagaacatggccgagctgcagggcagcggccagagggaccccacccacagcagcgctgagctgctggagctggcctaccacgaggccgccggccgccacagcaacagccggcagcctggagatggcatgtccttcctgaacttcagcggcacagaggagctgtctgtgggcctgctgagcaacagcggggccggcatgaaccccaggacccagaacaaggacagcctggaggacagcgtgtccaccagcccagaccccatgcctggcttctgctgcaccgtgggcgtggactggaagagcctgaccaccccagcctgcctgcccctgaccacagactacttcccagaccggcagggcctgcagaatgactacacagagggctgctatgacctgctgcctgaggccgacatcgacagaagagatgaagatggagtgcagatgacagcccagcaggtgtttgaggagttcatctgccagaggctgatgcagggctaccagatcatcgtgcagcccaagacccagaagcccaacccagctgtgcccccacccctgagcagcagccccctgtacagccggggcctggtgtccaggaacagacctgaggaggaggaccagtactggctgtccatgggccgcaccttccacaaggtgaccctgaaggacaagatgatcaccgtgacccgctacctgcccaagtacccctatgagagcgcccagatccactacacctacagcctgtgccccagccacagcgacagcgagtttgtgtcctgctgggtggagttcagccatgagcggctggaggagtacaagtggaactacctggaccagtacatctgcagcgctggcagcgaggacttcagcctgattgagagcctgaagttctggaggacccgcttcctgctgctgcctgcctgtgtgacagccaccaagaggatcacagaaggagaggcccactgtgacatctacggggaccggcccagggcagatgaagatgagtggcagctgctggatggctttgtgcgctttgtggagggcctgaaccgcatcagaagaagacacagaagtgacaggatgatgaggaaaggaacagccatgaagggcctgcagatgacaggccccatcagcacccacagcctggagagcacagcccctcctgtgggcaagaagggcaccagcgccctgagcgccctgctggagatggaggccagccagaagtgcctgggggagcagcaggccgctgtgcatggaggcaagagcagcgcccagagcgctgagagcagctctgtggccatgacccccacctacatggacagccccaggaaggatggagccttcttcatggagtttgtgcgcagccccaggacagccagcagcgccttctacccccaggtgtctgtggaccagacagccacccccatgctggatggcaccagcctgggcatctgcaccggccagagcatggaccggggcaacagccagacctttggaaacagccagaacattggagagcagggctacagcagcaccaacagcagtgacagcagcagccagcagctggtggccagcagcctgaccagcagcagcaccctgacagagatcctggaggccatgaagcaccccagcactggagtgcagctgctgtctgagcagaagggcctgagcccctactgcttcatctctgctgaggtggtgcactggctggtgaaccacgtggagggcatccagacccaggccatggccatcgacatcatgcagaagatgctggaggagcagctgatcacccacgccagcggggaggcctggaggaccttcatctacggcttctacttctacaagatcgtgacagacaaggagccagacagagtggccatgcagcagcctgccaccacctggcacacagctggggtggatgactttgccagcttccagaggaagtggtttgaggtggcctttgtggccgaggagctggtgcacagcgagatcccagccttcctgctgccctggctgcccagcaggcctgccagctatgccagccgccacagcagcttcagccgcagctttggaggccgcagccaggccgccgccctgctggccgccaccgtgcctgagcagaggacagtgaccctggatgtggatgtgaacaacagaacagaccggctggagtggtgcagctgctactaccacggcaacttcagcctgaatgctgcctttgagatcaagctgcactggatggctgtgacagctgctgtgctgtttgagatggtgcagggctggcacaggaaggccaccagctgtggcttcctgctggtgcctgtgctggagggcccctttgccctgcccagctacctgtatggagaccccctgcgggcccagctgttcatccccctgaacatcagctgcctgctgaaggagggcagcgagcacctgtttgacagctttgagcctgagacctactgggacaggatgcacctgttccaggaggccatcgcccacagatttggatttgtgcaggacaagtacagcgccagcgccttcaacttccctgctgagaacaagccccagtacatccacgtgactggaacagtgttcctgcagctgccctacagcaagaggaagttcagcggccagcagaggagaagaagaaacagcaccagcagcaccaaccagaacatgttctgtgaggagcgggtgggctacaactgggcctacaacaccatgctgaccaagacctggaggagcagcgccactggagatgagaagtttgctgaccggctgctgaaggacttcacagacttctgcatcaacagagacaaccggctggtgaccttctggaccagctgcctggagaagatgcacgccagcgccccctag

SEQ ID NO: 51713 - DNA, 4785 bp, Artificial Sequence
  derived and/or modified sequence
atgcggaccaccaaggtgtacaagctggtgatccacaagaagggcttcggcggctctgatgacgagctggttgtaaaccccaaagtcttcccgcatattaagcttggcgacattgtcgagattgcccaccctaatgatgagtattcccccctgctgctccaggtaaaaagcttgaaggaggacctacaaaaagagacgattagtgtggaccagacagtgacccaagtcttcagactgcggccctaccaggacgtatacgtgaacgtggtcgatccaaaggatgtcacactcgacttggttgaattaacattcaaggaccagtacatcgggcggggcgacatgtggaggctgaagaaaagtttggtgtccacctgtgcctacattacacagaaggtcgagtttgccgggatcagggcccaggccggagagctttgggtaaagaatgaaaaagtgatgtgcggctatatcagcgaggatactagagttgtgttccggtccacaagtgccatggtctacatttttatccagatgagctgcgagatgtgggattttgacatttacggggacctttactttgagaaggccgtgaatggatttctagcagatctatttactaaatggaaagaaaaaaactgctcacacgaagttaccgtggtcctcttctcccggacattttacgacgccaagtccgtcgacgaattcccggagattaacagagcgtctattcgccaggaccataagggccgattctatgaagatttttataaggtcgtagtccaaaatgagcgacgtgaggagtggacatctttgctagttacaatcaagaaattgttcatccaataccccgtgctcgttcgccttgaacaagccgagggattcccacaaggggataattctacatctgctcagggtaattacctcgaggctattaacttgagctttaacgtctttgataagcactacataaaccgtaatttcgatcgcactggacagatgtcagttgtcatcaccccaggcgtaggtgtgtttgaggtggacagacttttgatgattctaacgaaacaaaggatgatcgacaatggcattggagttgacctggtatgcatgggagagcaacccctacacgcagtaccactcttcaaactccataatcggtccgcccctcgtgatagcagactcggagatgactacaatattccccactggatcaaccactccttctataccagcaaatcccagctgttttgcaactccttcactccacgcattaagctcgcgggaaagaagcctgctagcgagaaggctaaaaacggccgggatacatcactgggatccccgaaggagagcgaaaatgcactgccaatccaggttgactatgatgcctatgacgcccaagtgtttcggctacctgggccctctagagcacagtgtctgactacctgcagatctgtgcgggagagagagtcgcactcccgtaagagcgctagcagttgtgacgtgtcctcgagccccagcctgccttccagaacgctgccaacagaggaggtgcggtcacaggcttcagacgactcctcattaggcaagagtgccaatattctcatgatcccgcatccgcatcttcatcaatatgaggtgtctagttcacttggatatacatctacacgggatgtgctggagaatatgatggagccacctcagagagattcatctgcgcctggaaggttccacgtcgggtctgctgaatccatgctgcatgtgcgcccaggaggctatacaccccagcgcgctctgatcaatcctttcgctccttccagaatgcccatgaagcttacatccaaccgccgcagatggatgcacacctttccagtcggaccgtcaggggaggctatccaaatccaccaccagacacggcagaatatggctgaactgcagggatccggtcagagggacccaacccactcatccgcagagctgcttgaactggcatatcacgaggctgcgggacgccattctaatagccgacaacccggagacgggatgtcctttctcaattttagcgggacagaggagttgagcgtaggtctgctttccaatagcggcgccggcatgaaccctagaacgcagaacaaggacagtctggaagattctgtctcgaccagccctgaccccatgcccggattttgctgcacagtgggggttgactggaaatcccttaccacaccagcctgtctgccactgactaccgactacttcccagatcggcaaggtctgcaaaatgattatactgagggctgctacgatcttctacctgaggcagatatcgataggagagacgaagacggagtgcaaatgacggctcaacaggtatttgaagaattcatctgccaacggcttatgcagggttatcagatcattgtccagcccaagacccaaaagcctaaccctgcagtgccccctcccttgagctccagtcctttatattcccgcggcctggtatccagaaatcgacctgaggaggaagaccagtactggctttccatggggaggactttccacaaggtgacattgaaggataagatgattacggttacccgctacttgccaaaatacccctatgagtctgcgcaaattcactatacttacagcctgtgtcctagccacagtgactctgaattcgtgtcatgctgggtggaattctcccacgagcggttggaggaatacaaatggaattatctcgaccagtatatttgttctgctggaagcgaggattttagcttgatcgaaagcctgaagttttggcgaactaggtttctcctactcccagcctgcgttaccgccaccaagcggatcacagagggcgaagcccactgcgatatctatggggatcggccccgcgccgacgaagacgaatggcaactactggacggattcgtgcggttcgtcgaaggcttgaaccgcatccggcgccggcacaggtcggatcgtatgatgcggaaggggactgccatgaagggcctccagatgactggcccaatcagtactcacagcctggagagcaccgcaccacctgtgggaaagaaaggcacttctgcactatcagctctacttgaaatggaggcgagtcaaaaatgcctcggcgagcagcaagccgctgtgcacggcggcaaatcctcagctcagtcagcggagtcttcaagcgtcgctatgaccccgacctacatggactctcctcggaaggatggagccttctttatggagttcgtcagatcaccaagaactgcctctagcgctttctaccctcaggtgtcagtagaccagactgccacaccgatgctcgatggcacctctctcgggatctgcacaggacaatccatggatagaggcaacagccaaacattcggaaatagccagaatatcggtgagcaaggttattcatccaccaacagctccgactcctccagtcagcagttggtggcatcctcactgacctcgagctctactctgacagagatactggaggcaatgaagcacccttcaactggcgtccaattgctttctgagcagaaaggtctgagtccttattgcttcatttccgccgaagttgttcactggctagtgaaccacgtggagggtatacagacccaggctatggccatcgacatcatgcagaaaatgctggaggaacagctgattacacatgcctctggcgaagcctggcgaaccttcatctatgggttttacttctataaaattgtgacggataaagagcccgaccgggtggccatgcagcagcctgcaaccacctggcataccgctggcgttgacgatttcgcaagttttcagaggaaatggttcgaagtagccttcgtcgcggaggagctggtgcactctgagattccagcctttttgctcccctggttaccgagtagacccgccagctacgcctctcgccactcaagcttctcgcgctcattcggaggacgtagccaggccgcggccctgttggcggccacggtgcctgagcagaggacggtgacactcgacgttgacgtgaacaacaggacggaccgtttagagtggtgctcctgttattatcacggaaacttttcactgaatgcagccttcgagattaagctgcactggatggcagtgacagccgccgtgctgttcgaaatggtacaaggctggcacagaaaagccaccagctgcggatttctcttggtcccagtgctcgaggggcctttcgcgttgccaagttacctgtacggtgaccccctgcgggctcaacttttcattccgctgaacatatcttgtttactcaaggaaggatccgagcatctctttgattccttcgagcccgaaacttactgggacagaatgcacctgtttcaggaggccatcgcacaccgttttgggtttgtccaggacaagtatagtgcaagcgcctttaacttccccgcagagaataagccgcagtatatccacgtgactggaacggtgttcctgcagttgccttattctaaacgtaagttttccggccagcagcgccgtcggcgtaacagcacgtcctcaaccaatcagaatatgttctgcgaagaaagagtgggttataactgggcctacaataccatgctgaccaaaacatggcggtctagtgccactggtgacgagaagtttgccgataggcttttgaaggacttcacagatttttgcattaaccgggacaacagacttgtcaccttctggacaagctgcctggagaaaatgcacgcatccgccccttag

SEQ ID NO: 51714 - DNA, 4785 bp, Artificial Sequence
  derived and/or modified sequence
atgcgcaccactaaggtttataagcttgtgattcacaagaaaggctttggcggaagtgatgatgagctggtcgtgaatcctaaggtattcccacatataaaactcggggatatcgtggagatcgctcatcccaatgatgaatattcacccttactgctgcaggtaaaatctcttaaagaggacctgcagaaagagaccatatccgtggatcaaacagttacacaagtcttccgcctgcggccttaccaggacgtgtacgtgaacgttgtggatccaaaggatgtgactcttgacctggttgagcttactttcaaggaccagtacataggtaggggcgatatgtggcggttgaaaaaatccctggtgtcaacctgcgcctacattacccagaaggtggaatttgctggtatcagagctcaggctggtgagctctgggtgaaaaatgaaaaggtcatgtgcgggtatatctcagaagacactcgggtagttttcaggtcaacatcagctatggtgtatatttttatccaaatgagttgtgagatgtgggacttcgacatctacggagatctgtacttcgagaaggcagtgaacggcttcctggcggacctgttcaccaaatggaaggagaagaattgctctcatgaagtcaccgttgttctcttttcacgcactttttatgatgccaaaagcgtggatgagttcccagagattaatagggcgtcgattcgacaagaccacaaaggcaggttctatgaggatttctacaaggtcgtggtccagaatgaacgcagggaggagtggacatcacttctggtcacgatcaaaaaactttttattcaatatcctgtgctggtgagactcgagcaggccgaggggttcccgcagggcgacaattctaccagtgcccagggtaactacctcgaggcgataaatctgtcatttaatgtttttgataagcactacattaataggaattttgatagaaccggacaaatgagcgtcgttattactcccggtgtcggagtgttcgaggtcgaccgtctgctgatgatcttaaccaagcagaggatgatcgacaacgggattggagtagacttagtatgcatgggagagcagccgctgcatgccgtgcccctgttcaagctgcacaaccgcagcgcacctcgcgattcaaggttaggagacgactacaatatccctcactggatcaaccactccttctacacctctaagagccagctattttgcaatagctttaccccacggatcaagttggcaggcaaaaagcctgccagcgagaaagcaaaaaatggaagagatacaagcctgggttcccccaaagaatcagaaaacgcgctgccaatacaggtggattacgacgcttatgatgcgcaggtctttcggctgccaggaccaagcagagcacaatgtctgactacctgcaggagcgtgcgcgagcgtgaatcccacagcaggaaaagcgccagctcgtgcgatgtcagctcaagcccaagtctcccttcccggactctgccgacagaagaagttcgaagccaagcatccgatgactcctctttgggaaaatcagccaatattctgatgatcccccacccacacttacaccagtacgaagtttcctccagcctgggttatacatcaacccgagatgtgttggagaacatgatggagccccctcagagagattcttctgcccctggtcgattccacgtaggctctgctgagtccatgctgcacgtgaggcctggaggttacactcctcagcgagctttgatcaacccctttgcaccctccagaatgccaatgaaacttactagtaaccggcgaagatggatgcacacctttcccgtgggtccctccggcgaagccatccagattcaccaccaaactcggcagaatatggctgaattgcaggggagcgggcagagagacccaacacacagctccgctgaattactcgagctcgcctatcacgaggctgctggtcggcactcgaattctagacagcctggagatggaatgtcgttcctgaatttcagcggcactgaagagctgtccgtcggactcctttccaattctggtgcaggaatgaaccccaggacacaaaataaggacagcctggaggacagcgtgtccacctcaccagacccgatgcccggtttctgttgtacggtgggcgtggattggaagagcttaacaacacctgcatgcctgcccctgaccaccgattactttcccgacagacagggcctgcagaatgactataccgagggctgttatgatctgttacccgaggccgatatcgaccgtagagacgaagatggagtgcagatgacagcacagcaggtttttgaggagttcatatgccaacgtttgatgcaggggtatcaaatcattgttcagccaaagactcagaagcctaatcccgctgtacctccgccactgagctcaagcccactgtactccagagggctagtatcacgcaacagacctgaagaagaagaccagtattggttgtccatgggcaggacgtttcataaagttacgttgaaggataagatgatcactgtaacaaggtatctcccaaaatatccttatgaaagtgcccaaatccactacacatattcactctgcccctcacattccgactcggagtttgtgagctgctgggttgaattctcccacgagaggctcgaggagtacaaatggaattatttggaccagtatatctgctctgcgggttccgaagacttcagcctaatcgagtctttgaagttttggagaactcgttttctgcttctgcctgcttgcgtgacagccaccaagcgcatcacggaaggcgaggcccattgtgacatatacggagatcgccctagagccgacgaggatgagtggcagttgctggacgggttcgtgaggttcgtggaaggcctaaacaggatccgtcggaggcataggagtgatcggatgatgcggaaaggcactgccatgaaaggcctgcagatgacggggcctatttctacccactctcttgaaagcaccgctcctcctgtcggaaagaaaggaacctccgccctgtccgccctcctggagatggaggcatctcaaaaatgcctcggcgaacaacaagcggcagtgcatggcggtaagtcttccgctcagagcgccgaatccagctcagtagccatgacgccaacatacatggactccccacgaaaagatggagccttctttatggaatttgtgcggtccccacgtaccgcctcctctgccttctacccacaggttagtgtggatcagaccgcaactccaatgctggacgggacatcacttgggatctgcaccggtcagtctatggacaggggcaactcccaaaccttcggtaatagccaaaatatcggggaacaagggtactccagcactaacagtagcgattcatcttcccagcaattagtagcatctagcttgacgtccagctccacccttacagagattctcgaagcaatgaaacacccctccacaggagttcaacttctctctgaacagaagggcctgtctccatactgttttatttctgcagaagtggtccactggctggtcaatcatgttgaaggcatccagactcaggctatggccatagacatcatgcagaagatgctcgaggaacagctcattacccacgcgtctggcgaggcctggcggacgttcatctatggattctacttttacaagattgtgactgacaaggaaccagatcgagtggccatgcagcaaccagcaactacctggcataccgccggagttgacgattttgcgtcgttccagcggaaatggttcgaagtggccttcgttgcagaagagttggttcactccgagattcccgctttcctcctcccctggctgccatcaaggccagcttcctatgcgagcagacactcgtctttctcgcggagtttcggtgggcgaagtcaagcagctgcactgttggcagccactgtacccgaacagcgtactgtgactttagatgtggacgtgaacaacaggaccgacaggcttgaatggtgctcttgttattaccacggaaatttttctctgaatgcagcgttcgagattaaattgcactggatggcagtgaccgccgctgtcctgttcgagatggtgcaggggtggcaccggaaggccacctcatgcgggtttctgctggtccctgtgctggagggcccattcgccttaccctcttacctctacggcgacccactgcgtgcccaactgtttattcccctcaatatatcctgtctgctgaaggaagggtctgagcacctcttcgactcttttgagccagagacatattgggacagaatgcatctttttcaagaggctatagcacaccgctttgggtttgtacaggataagtactcagcttctgccttcaattttcctgccgaaaataaaccacagtatatacatgtgactgggacagtgtttcttcagctgccctatagcaaaagaaagttttcaggccagcagcggaggagacggaacagtacttcttctaccaaccaaaacatgttttgcgaggagcgggttggatacaattgggcttacaacacaatgctaaccaaaacatggcggagcagtgccacaggcgacgagaagttcgccgataggctgcttaaggattttactgatttttgcatcaatcgtgacaatcgcctcgtgacattttggacgagttgccttgaaaagatgcatgcatctgcaccatag

SEQ ID NO: 51715 - DNA, 4785 bp, Artificial Sequence
  derived and/or modified sequence
atgagaaccaccaaggtgtacaagctggtgatccacaagaagggcttcggcggcagcgacgacgagctggtggtgaaccccaaggtgttcccccacatcaagctgggcgacatcgtggagatcgcccaccccaacgacgagtacagccccctgctgctgcaggtgaagagcctgaaggaggacctgcagaaggagaccatcagcgtggaccagaccgtgacccaggtgttcagactgagaccctaccaggacgtgtacgtgaacgtggtggaccccaaggacgtgaccctggacctggtggagctgaccttcaaggaccagtacatcggcagaggcgacatgtggagactgaagaagagcctggtgagcacctgcgcctacatcacccagaaggtggagttcgccggcatcagagcccaggccggcgagctgtgggtgaagaacgagaaggtgatgtgcggctacatcagcgaggacaccagagtggtgttcagaagcaccagcgccatggtgtacatcttcatccagatgagctgcgagatgtgggacttcgacatctacggcgacctgtacttcgagaaggccgtgaacggcttcctggccgacctgttcaccaagtggaaggagaagaactgcagccacgaggtgaccgtggtgctgttcagcagaaccttctacgacgccaagagcgtggacgagttccccgagatcaacagagccagcatcagacaggaccacaagggcagattctacgaggacttctacaaggtggtggtgcagaacgagagaagagaggagtggaccagcctgctggtgaccatcaagaagctgttcatccagtaccccgtgctggtgagactggagcaggccgagggcttcccccagggcgacaacagcaccagcgcccagggcaactacctggaggccatcaacctgagcttcaacgtgttcgacaagcactacatcaacagaaacttcgacagaaccggccagatgagcgtggtgatcacccccggcgtgggcgtgttcgaggtggacagactgctgatgatcctgaccaagcagagaatgatcgacaacggcatcggcgtggacctggtgtgcatgggcgagcagcccctgcacgccgtgcccctgttcaagctgcacaacagaagcgcccccagagacagcagactgggcgacgactacaacatcccccactggatcaaccacagcttctacaccagcaagagccagctgttctgcaacagcttcacccccagaatcaagctggccggcaagaagcccgccagcgagaaggccaagaacggcagagacaccagcctgggcagccccaaggagagcgagaacgccctgcccatccaggtggactacgacgcctacgacgcccaggtgttcagactgcccggccccagcagagcccagtgcctgaccacctgcagaagcgtgagagagagagagagccacagcagaaagagcgccagcagctgcgacgtgagcagcagccccagcctgcccagcagaaccctgcccaccgaggaggtgagaagccaggccagcgacgacagcagcctgggcaagagcgccaacatcctgatgatcccccacccccacctgcaccagtacgaggtgagcagcagcctgggctacaccagcaccagagacgtgctggagaacatgatggagcccccccagagagacagcagcgcccccggcagattccacgtgggcagcgccgagagcatgctgcacgtgagacccggcggctacaccccccagagagccctgatcaaccccttcgcccccagcagaatgcccatgaagctgaccagcaacagaagaagatggatgcacaccttccccgtgggccccagcggcgaggccatccagatccaccaccagaccagacagaacatggccgagctgcagggcagcggccagagagaccccacccacagcagcgccgagctgctggagctggcctaccacgaggccgccggcagacacagcaacagcagacagcccggcgacggcatgagcttcctgaacttcagcggcaccgaggagctgagcgtgggcctgctgagcaacagcggcgccggcatgaaccccagaacccagaacaaggacagcctggaggacagcgtgagcaccagccccgaccccatgcccggcttctgctgcaccgtgggcgtggactggaagagcctgaccacccccgcctgcctgcccctgaccaccgactacttccccgacagacagggcctgcagaacgactacaccgagggctgctacgacctgctgcccgaggccgacatcgacagaagagacgaggacggcgtgcagatgaccgcccagcaggtgttcgaggagttcatctgccagagactgatgcagggctaccagatcatcgtgcagcccaagacccagaagcccaaccccgccgtgcccccccccctgagcagcagccccctgtacagcagaggcctggtgagcagaaacagacccgaggaggaggaccagtactggctgagcatgggcagaaccttccacaaggtgaccctgaaggacaagatgatcaccgtgaccagatacctgcccaagtacccctacgagagcgcccagatccactacacctacagcctgtgccccagccacagcgacagcgagttcgtgagctgctgggtggagttcagccacgagagactggaggagtacaagtggaactacctggaccagtacatctgcagcgccggcagcgaggacttcagcctgatcgagagcctgaagttctggagaaccagattcctgctgctgcccgcctgcgtgaccgccaccaagagaatcaccgagggcgaggcccactgcgacatctacggcgacagacccagagccgacgaggacgagtggcagctgctggacggcttcgtgagattcgtggagggcctgaacagaatcagaagaagacacagaagcgacagaatgatgagaaagggcaccgccatgaagggcctgcagatgaccggccccatcagcacccacagcctggagagcaccgccccccccgtgggcaagaagggcaccagcgccctgagcgccctgctggagatggaggccagccagaagtgcctgggcgagcagcaggccgccgtgcacggcggcaagagcagcgcccagagcgccgagagcagcagcgtggccatgacccccacctacatggacagccccagaaaggacggcgccttcttcatggagttcgtgagaagccccagaaccgccagcagcgccttctacccccaggtgagcgtggaccagaccgccacccccatgctggacggcaccagcctgggcatctgcaccggccagagcatggacagaggcaacagccagaccttcggcaacagccagaacatcggcgagcagggctacagcagcaccaacagcagcgacagcagcagccagcagctggtggccagcagcctgaccagcagcagcaccctgaccgagatcctggaggccatgaagcaccccagcaccggcgtgcagctgctgagcgagcagaagggcctgagcccctactgcttcatcagcgccgaggtggtgcactggctggtgaaccacgtggagggcatccagacccaggccatggccatcgacatcatgcagaagatgctggaggagcagctgatcacccacgccagcggcgaggcctggagaaccttcatctacggcttctacttctacaagatcgtgaccgacaaggagcccgacagagtggccatgcagcagcccgccaccacctggcacaccgccggcgtggacgacttcgccagcttccagagaaagtggttcgaggtggccttcgtggccgaggagctggtgcacagcgagatccccgccttcctgctgccctggctgcccagcagacccgccagctacgccagcagacacagcagcttcagcagaagcttcggcggcagaagccaggccgccgccctgctggccgccaccgtgcccgagcagagaaccgtgaccctggacgtggacgtgaacaacagaaccgacagactggagtggtgcagctgctactaccacggcaacttcagcctgaacgccgccttcgagatcaagctgcactggatggccgtgaccgccgccgtgctgttcgagatggtgcagggctggcacagaaaggccaccagctgcggcttcctgctggtgcccgtgctggagggccccttcgccctgcccagctacctgtacggcgaccccctgagagcccagctgttcatccccctgaacatcagctgcctgctgaaggagggcagcgagcacctgttcgacagcttcgagcccgagacctactgggacagaatgcacctgttccaggaggccatcgcccacagattcggcttcgtgcaggacaagtacagcgccagcgccttcaacttccccgccgagaacaagccccagtacatccacgtgaccggcaccgtgttcctgcagctgccctacagcaagagaaagttcagcggccagcagagaagaagaagaaacagcaccagcagcaccaaccagaacatgttctgcgaggagagagtgggctacaactgggcctacaacaccatgctgaccaagacctggagaagcagcgccaccggcgacgagaagttcgccgacagactgctgaaggacttcaccgacttctgcatcaacagagacaacagactggtgaccttctggaccagctgcctggagaagatgcacgccagcgccccctag

SEQ ID NO: 51716 - DNA, 5363 bp, Artificial Sequence
  derived and/or modified sequence
tctgtggcagggaggcaagatgacttctctgccccaagcttggaacagctaaagggaaaaacagtgcaagatgagaacaacaaaggtctacaaactcgtcatccacaagaagggctttgggggcagtgatgatgagctagttgtgaaccccaaagtgttccctcacatcaagcttggagacattgtagagattgcacaccccaacgatgaatacagccctctgcttttgcaggtcaagtctcttaaggaagatttacagaaggaaactatcagtgtggaccagactgtgactcaagtgttccggctgagaccttatcaggatgtctatgttaatgtcgtagaccctaaggatgtgacccttgacctagtggaattaacttttaaggatcagtatattggccgtggggatatgtggcgactaaagaaaagtttggtcagcacatgtgcctatatcacccagaaggtggagtttgctggcatcagagcacaggctggtgaactgtgggttaagaatgagaaggtcatgtgtggctacatcagtgaagataccagggtggtgtttcgttctacgtcggctatggtttacatatttattcagatgagctgtgaaatgtgggattttgatatttatggggatttgtattttgagaaagctgtgaatggtttccttgctgatctatttaccaagtggaaggagaagaactgtagtcatgaagtgacagtggtcctgttttctagaactttctatgatgcaaaatctgttgatgaatttcctgaaataaaccgagcctcaattcgacaggatcacaaggggagattctatgaagacttttacaaagtggtggtgcagaatgagagaagagaagaatggacttcacttctcgtaaccattaaaaaactcttcatccagtatccagtgttggtgcgactggaacaggcagagggctttcctcaaggagataattctacctcagcacaaggaaactacctggaggccatcaatctgtcattcaatgtgtttgataagcactacatcaaccgcaactttgaccgaactgggcagatgtcagtggtgatcacgcccggggtgggtgtctttgaagtggaccgcctactcatgatcctgaccaagcagcggatgatagataatggaattggtgtggatttggtgtgcatgggagagcaaccgttacatgctgtcccattgttcaagctccataatcggagtgctccccgtgattctcgtctgggcgatgactataatatccctcactggataaaccacagtttctacacatccaaaagccagctcttttgtaatagtttcaccccacgaataaaactggcaggaaagaagcccgcctctgagaaagcaaaaaatggccgtgatacatctctcgggagtccaaaagaatctgagaacgcccttcccatccaagtagattatgacgcctatgacgctcaagtgttcaggctgcccggcccatcccgggcccagtgcctcaccacctgcagatctgtgcgagagcgagagagtcacagtcgaaagagtgccagctcctgtgatgtttcatccagcccttccctaccaagccgcacactgcccactgaggaagtgaggagccaggcttctgacgacagctccctaggcaagagtgccaacatcctgatgatcccacacccccacctgcaccagtatgaagtcagcagctccttgggatacaccagcactcgagatgtcctggagaacatgatggagccaccacagcgagactccagtgcaccagggaggtttcacgttggcagtgcagaatccatgctgcatgttcgacctggtggatacacgccccagagagcactgattaaccccttcgctccctctcggatgcccatgaagcttacgtccaacagaaggcgctggatgcacacttttcctgtggggccatccggagaagccatccagatccaccaccagacccgacagaatatggcggagctacaaggcagcgggcagagggatccaactcactcctctgcagagctgctggagttagcatatcatgaagctgctggaaggcacagcaattcccgccagcctggtgacggcatgtccttcttgaacttcagtggaacagaggagctttctgtcggcctgcttagcaacagtggtgcaggtatgaatcctaggacccagaataaggattctctagaggacagtgtttctacctctccagacccaatgccaggcttctgttgcacagttggagtggactggaagtctctcactactccggcgtgcctcccccttaccaccgactacttccctgaccgccagggcctgcagaatgactacacagagggctgttatgatctccttccagaagcagacatcgacaggagggacgaagatggtgtgcagatgacagcccagcaggtatttgaagagtttatttgccaacgtctcatgcagggctaccaaatcatagtgcagcccaagacacagaaacccaatcctgctgtcccgcccccgctgagcagtagcccactctatagccgaggccttgtgtcccgaaaccgccctgaggaggaggaccagtattggctgagtatgggcagaacgttccacaaagtgacgctgaaggataagatgatcacagtgacgcgataccttcccaagtatccttatgaatctgcccagatccactacacctacagcctctgtccttcccactcagactcagagttcgtctcctgctgggtggaattctcccacgaacggctggaggagtacaagtggaattacttagatcagtatatctgttctgccggctctgaagacttcagcttaattgagtccctgaagttctggaggacccgcttcctgctgctgccagcctgtgtcaccgccaccaagcgcatcacggagggggaggcccactgcgacatctatggggacaggccccgtgcagacgaggacgagtggcaactcctggatggttttgtccgctttgtggagggcttgaatcgcattcgcaggcggcatcgctcggatcgcatgatgcggaaagggaccgccatgaaaggcttgcagatgactgggcccatttccacgcattctctggagtcaactgcacccccagtggggaagaagggaacctcagctctctctgccctgttggagatggaggccagtcagaagtgcctgggagaacagcaggcagctgtgcatggtgggaagagctccgcccagtcagccgagagcagcagcgttgccatgactcccacctacatggacagcccacgaaaggacggggccttctttatggagtttgtccgcagcccacgcacagcatcgtccgccttctaccctcaggtatctgtggaccaaacagccactcctatgttggacggcaccagtttgggcatatgcacaggccaatccatggacagaggcaacagccagacctttgggaactcccagaacataggagaacagggctactcctccacaaactccagtgacagcagctctcagcagctggtggcaagctccttgacctcatcctctaccctgacagagatcctggaagccatgaagcacccctcgacaggagtccagctgctctctgaacagaagggcctctcaccgtactgcttcatcagcgcggaggtggtacactggttggtgaaccacgtggaggggatccagacacaggcgatggccattgacatcatgcagaaaatgctggaagagcagctcatcacacatgcatctggcgaagcctggcggaccttcatctacggcttctatttctacaagatagtaacggacaaagagcccgaccgagtggccatgcagcagcccgccaccacctggcacacagcaggagtggacgacttcgccagcttccagcgcaagtggtttgaggtggcctttgtggcagaagagctcgtgcactctgagattcctgcctttctcctgccctggctgcctagccggccagcctcctatgcaagtaggcacagctcctttagccgaagttttggaggacggagccaggcggcagcacttttagctgccactgtcccagagcagaggactgtgaccctggatgttgacgtgaacaaccgcacagaccggctggagtggtgcagctgttattaccatggcaacttttctctgaatgcagcctttgagatcaagctgcactggatggcggtgaccgcagcagtactcttcgagatggtccaaggttggcatcggaaagccacctcctgtggcttcttgttagtcccagttttggaggggccttttgcactgcccagttacctgtatggcgacccccttcgtgcccagctcttcatcccactcaacatcagctgcttgctcaaggagggcagcgagcacctgtttgatagctttgaacccgaaacgtactgggatcgaatgcacctcttccaggaagccattgcacacaggtttgggtttgtacaagataaatattctgcctctgcttttaacttccctgctgagaacaagcctcagtatatccacgttacaggaacagtgtttctgcagctgccctactccaagcgcaagttctcagggcagcagcggcggcggcggaactccaccagctccaccaaccagaacatgttctgcgaggagcgggtcggctacaactgggcctacaacaccatgctcaccaaaacatggcgctccagcgccacaggggatgaaaagtttgctgatcggctgctgaaggacttcacggacttctgcatcaaccgtgacaaccggctggtcacgttctggacaagttgcctggagaagatgcatgccagtgccccgtgaggccaggctgcacctgtgctgggggaaggtgggtgagccactgccctcaaacccggggcggaggattccaggcaggctctaggagtcaggtgtccgtttgctgctatcagtgagtgggggccattgttttttgtttgtttgtttgtttgtttgtttgtttttggcccccacgacaagtcttctactctagaagaaagactttggaagcagctgctgctgctgccaccactcctgtcagcaagtgctcagagcaggtgggaggcacagattgtccgtgggagggctccagtgtctgggaagagggcaggcggcccccatgaatgtcctcggaagggggtggctcctggtagcatccttttccttcaccatctatgggatattaggggcagaatctgccacttcttgcccaggagtgtgcacagatgtaagataattttgtgaaataatgtaccatagactctcaccaactgtatatacctgtacatatcagaagcaaataaagagctcc

SEQ ID NO: 51717 - protein, 521 aa, Artificial Sequence
  derived and/or modified sequence
MEASVLSPTSWEKRRAWLRQSRNWQTQVLEEEAAAALQDVPDPEPSSLDDVFQEGNPINKIEDWLQDCGYSEEGFSEEAGQFIYNGFCSHGTSFEDDLTLGAEATLLAANGKLFSRSFLETARPCQLLDLGCSLASSSMTGGTNKTSSSISEILDKVQEDAEDVLFSLGFGQEDHKDTSRIPARFFTTPSQAKGIDFQLFLKSQVRRIEMEDPCLMLASRFKQVQTLAVTADAFFCLYSYVSKTPVQKFTPSHMFWNCNHPTDVPSIRILSREPEPQSPRDRLRKAISKMCLYTCPRDRPPPPHNTPKRNSLDQVVLEVMDKVKEEKQFLQQDSDLGQFSQEDPVPPAEGKKLPTSPYPCVFCCEEETQQRMSTVLAPSQTLDSNPKVPCCTHSLPIEDPQWSTDPAQIRRELCSLPATNTETHPAKDETFWKRKSRARKSLFQKNLMGRKVKSLDLSITQQKWKQSVDRPELRRSLSQQPQDTFDLEEVQSNSEEEQSQSRWPSRPRHPHHHQTFAGKDS

SEQ ID NO: 51718 - protein, 383 aa, Artificial Sequence
  derived and/or modified sequence
MTGGTNKTSSSISEILDKVQEDAEDVLFSLGFGQEDHKDTSRIPARFFTTPSQAKGIDFQLFLKSQVRRIEMEDPCLMLASRFKQVQTLAVTADAFFCLYSYVSKTPVQKFTPSHMFWNCNHPTDVPSIRILSREPEPQSPRDRLRKAISKMCLYTCPRDRPPPPHNTPKRNSLDQVVLEVMDKVKEEKQFLQQDSDLGQFSQEDPVPPAEGKKLPTSPYPCVFCCEEETQQRMSTVLAPSQTLDSNPKVPCCTHSLPIEDPQWSTDPAQIRRELCSLPATNTETHPAKDETFWKRKSRARKSLFQKNLMGRKVKSLDLSITQQKWKQSVDRPELRRSLSQQPQDTFDLEEVQSNSEEEQSQSRWPSRPRHPHHHQTFAGKDS

SEQ ID NO: 51719 - protein, 82 aa, Artificial Sequence
  derived and/or modified sequence
MEASVLSPTSWEKRRAWLRQSRNWQTQVLEEEAAAALQDVPDPEPSSLDDVFQEGNPINKIEDWLQDCGYSEEGFSEEAGQF

SEQ ID NO: 51720 - protein, 48 aa, Artificial Sequence
  derived and/or modified sequence
MEASVLSPTSWEKRRAWLRQSRNWQTQVLEEEAAAALQDVPDPEPSSL

SEQ ID NO: 51721 - DNA, 84 bp, Artificial Sequence
  derived and/or modified sequence
aggaaaagaaagaaatagaaaatgcgaaatggtaagaaaaaacagcataataaacatttgtatggtgttgatggacaatgcatt

SEQ ID NO: 51722 - DNA, 1566 bp, Artificial Sequence
  derived and/or modified sequence
atggaggccagcgtgctgagccccaccagctgggagaagagaagagcctggctgagacagagcagaaactggcagacccaggtgctggaggaggaggccgccgccgccctgcaggacgtgcccgaccccgagcccagcagcctggacgacgtgttccaggagggcaaccccatcaacaagatcgaggactggctgcaggactgcggctacagcgaggagggcttcagcgaggaggccggccagttcatctacaacggcttctgcagccacggcaccagcttcgaggacgacctgaccctgggcgccgaggccaccctgctggccgccaacggcaagctgttcagcagaagcttcctggagaccgccagaccctgccagctgctggacctgggctgcagcctggccagcagcagcatgaccggcggcaccaacaagaccagcagcagcatcagcgagatcctggacaaggtgcaggaggacgccgaggacgtgctgttcagcctgggcttcggccaggaggaccacaaggacaccagcagaatccccgccagattcttcaccacccccagccaggccaagggcatcgacttccagctgttcctgaagagccaggtgagaagaatcgagatggaggacccctgcctgatgctggccagcagattcaagcaggtgcagaccctggccgtgaccgccgacgccttcttctgcctgtacagctacgtgagcaagacccccgtgcagaagttcacccccagccacatgttctggaactgcaaccaccccaccgacgtgcccagcatcagaatcctgagcagagagcccgagccccagagccccagagacagactgagaaaggccatcagcaagatgtgcctgtacacctgccccagagacagacccccccccccccacaacacccccaagagaaacagcctggaccaggtggtgctggaggtgatggacaaggtgaaggaggagaagcagttcctgcagcaggacagcgacctgggccagttcagccaggaggaccccgtgccccccgccgagggcaagaagctgcccaccagcccctacccctgcgtgttctgctgcgaggaggagacccagcagagaatgagcaccgtgctggcccccagccagaccctggacagcaaccccaaggtgccctgctgcacccacagcctgcccatcgaggacccccagtggagcaccgaccccgcccagatcagaagagagctgtgcagcctgcccgccaccaacaccgagacccaccccgccaaggacgagaccttctggaagagaaagagcagagccagaaagagcctgttccagaagaacctgatgggcagaaaggtgaagagcctggacctgagcatcacccagcagaagtggaagcagagcgtggacagacccgagctgagaagaagcctgagccagcagccccaggacaccttcgacctggaggaggtgcagagcaacagcgaggaggagcagagccagagcagatggcccagcagacccagacacccccaccaccaccagaccttcgccggcaaggacagctag

SEQ ID NO: 51723 - DNA, 249 bp, Artificial Sequence
  derived and/or modified sequence
atggaggccagcgtgctgagccccaccagctgggagaagagaagagcctggctgagacagagcagaaactggcagacccaggtgctggaggaggaggccgccgccgccctgcaggacgtgcccgaccccgagcccagcagcctggacgacgtgttccaggagggcaaccccatcaacaagatcgaggactggctgcaggactgcggctacagcgaggagggcttcagcgaggaggccggccagttctag

SEQ ID NO: 51724 - DNA, 147 bp, Artificial Sequence
  derived and/or modified sequence
atggaggccagcgtgctgagccccaccagctgggagaagagaagagcctggctgagacagagcagaaactggcagacccaggtgctggaggaggaggccgccgccgccctgcaggacgtgcccgaccccgagcccagcagcctgtag

SEQ ID NO: 51725 - DNA, 1566 bp, Artificial Sequence
  derived and/or modified sequence
atggaggcgtctgtgctttctcccacttcctgggagaagcggcgcgcttggctgcggcagagtagaaattggcaaacacaagtgttggaagaggaggcagccgcagctctccaggatgtaccggatcccgagccttcgtcactggacgacgtttttcaggagggaaaccccatcaacaagattgaagactggttacaggactgcggctacagtgaggaaggcttttcagaggaggctggtcaatttatctataatgggttctgctctcacggcacaagtttcgaagacgatctgaccctgggcgcggaggctacactgctcgctgccaacggcaaattgtttagcagatccttcttagaaacggcacgaccgtgtcagctgctggacctggggtgctcacttgcgtcttcatccatgacaggcgggaccaacaaaacaagttcaagcattagcgagattctggacaaggtccaggaggacgctgaggatgtgctcttctctttgggcttcgggcaggaggaccacaaggatacaagccggatccccgcccggttctttacaacgcccagccaagcaaagggaattgactttcagctgtttcttaaatcccaagtgaggcggattgagatggaggacccgtgcctcatgcttgcctcccggttcaagcaagtccagacccttgcggtcactgccgatgcttttttttgcctgtattcttatgtctccaagacccccgtgcagaagtttaccccaagccacatgttctggaactgtaatcaccccacggatgtgccaagcatccgcatcctgtcaagagagcctgagccacaatcaccacgagaccgattacgtaaggccattagcaaaatgtgcctgtatacatgcccacgcgacaggccccctccaccacacaacacacccaaacgcaactctctcgatcaggtggtcctagaggtaatggacaaagtaaaggaggaaaagcagtttctgcagcaggactctgatctagggcagttcagccaggaagaccctgtgccccctgctgagggaaagaaattaccaacaagcccatacccatgtgtgttttgctgcgaagaggagacacagcaacgcatgtctacagtcttggccccaagccagactctggactctaacccaaaggtcccgtgttgcactcactcactgccaatcgaggatcctcagtggtcgactgatccggcacagattcgccgggagctctgcagcctacccgcaacgaacaccgagacacaccccgcaaaggacgaaaccttttggaaacgtaaaagcagagctagaaagagtctgttccaaaagaatctgatgggccgcaaagtcaaatccctggacctttctataactcagcagaaatggaagcagtccgtcgatagacctgaacttcgcaggagcctgtcgcagcagccacaggatacctttgatttggaggaagtgcagagcaatagtgaagaagaacagtcacagagccggtggccaagtcggccgcggcacccccaccatcatcagacttttgcaggtaaggattcatag

SEQ ID NO: 51726 - DNA, 1566 bp, Artificial Sequence
  derived and/or modified sequence
atggaggcctcagtgttgtctccgacctcttgggagaagcgccgcgcttggctcagacagtcacgcaactggcagacccaagttctcgaagaggaagccgccgccgcactccaagacgtgcccgaccccgaaccgtccagtctggacgacgtatttcaggagggcaaccctatcaacaaaatcgaagactggctccaggactgcggatattcagaggagggcttctctgaggaagcgggtcagtttatctataatgggttttgctcccatgggacatcatttgaagacgacttaacccttggagcagaagcaacgctgctggctgccaatgggaaattatttagcaggtcatttctggaaaccgctcggccctgtcaacttctggaccttggctgtagcctagcttcttcctcaatgacaggtggaacgaataaaacatcctcatcgatttctgaaattcttgataaggtgcaggaggacgctgaggatgttctgtttagtctgggtttcggccaagaggaccacaaggatacatctcgaatccctgcccgcttcttcaccaccccatctcaagccaaagggattgatttccaactgttcctcaagtcccaagtacgccgcattgaaatggaagacccgtgtttgatgctggcctcccgcttcaagcaggtacagaccctcgcagtgaccgcagacgccttcttctgtctgtacagctacgtctctaaaacaccggtccagaagttcacaccctcgcacatgttttggaattgtaaccatccgaccgacgtgccgagcatcaggattctgtcacgcgagcccgaacctcagtcgccgcgggatagattaaggaaggccatttccaagatgtgcctgtatacttgtccgcgggacagacccccgcctccccacaacactcccaaaaggaattccctggatcaggttgtcctggaagttatggacaaggttaaggaggaaaagcagtttttgcagcaggactccgacctgggtcagtttagccaggaggacccggttccccctgctgaaggaaaaaaactacccacatctccatacccgtgtgtcttctgctgcgaggaagagactcagcaacgtatgtccaccgttctggcgccttcgcaaacccttgattccaaccctaaggtcccatgttgtactcactctctgccgatcgaagatccccagtggagtaccgacccagctcagattcgccgagagctctgttccctgcctgcgactaacacagaaacccacccagccaaagatgaaacgttttggaagagaaaatctcgcgctaggaagagtttattccagaaaaacctgatggggaggaaagtcaagtccctcgacttgagcattactcagcaaaaatggaaacagagtgttgaccgaccagagctcaggaggagtctgtcgcaacagccacaggacacctttgatctggaagaagtgcagtccaatagtgaggaagaacaatcccaatctcgctggcccagccgccctcgtcatccccaccaccatcagacttttgcgggtaaagattcgtag

SEQ ID NO: 51727 - DNA, 249 bp, Artificial Sequence
  derived and/or modified sequence
atggaggcctcagtgctgtccccaacgagttgggagaaaagaagagcatggctgcgacagagtagaaactggcagactcaggtgctcgaggaagaagccgcggctgcattacaggatgtgcccgaccctgaaccttcatctctggatgacgtgttccaagagggaaacccaatcaacaagattgaggactggctccaggactgcggttacagtgaggagggctttagcgaggaggctggtcagttctag

SEQ ID NO: 51728 - DNA, 147 bp, Artificial Sequence
  derived and/or modified sequence
atggaggcctctgtcttgagcccaaccagttgggaaaaaaggcgggcctggctgcggcaaagccgcaactggcagactcaagtccttgaagaggaggccgcagctgcccttcaggatgtgccggacccagagccatcaagcctgtag

SEQ ID NO: 51729 - DNA, 1566 bp, Artificial Sequence
  derived and/or modified sequence
atggaggcctctgtgctgagccccacctcctgggagaagaggcgggcctggctgcggcagagcaggaactggcagacccaggtgctggaggaggaggccgctgctgccctgcaggatgtgcctgaccctgagcccagcagcctggatgatgtgttccaggagggcaaccccatcaacaagattgaggactggctgcaggactgtggctacagcgaggagggcttcagcgaggaggccggccagttcatctacaacggcttctgcagccacggcaccagctttgaagatgacctgaccctgggcgctgaggccaccctgctggccgccaacgggaagctgttcagccgctccttcctggagacagcccggccctgccagctgctggacctgggctgcagcctggccagcagctccatgactggaggcaccaacaagaccagcagcagcatcagcgagatcctggacaaggtgcaggaggatgctgaagatgtgctcttcagcctgggcttcggccaggaggaccacaaggacaccagccgcatcccagcccgcttcttcaccacccccagccaggccaagggcatcgacttccagctgttcctgaagagccaggtgcggcgcatcgagatggaggacccctgcctgatgctggccagccgcttcaagcaggtgcagaccctggccgtgacagcagatgccttcttctgcctgtacagctatgtgtccaagacccctgtgcagaagttcacccccagccacatgttctggaactgcaaccaccccacagatgtgcccagcatccgcatcctgagccgggagcctgagccccagagcccccgggaccggctgaggaaggccatcagcaagatgtgcctgtacacctgcccccgggaccggcccccaccaccccacaacacccccaagaggaacagcctggaccaggtggtgctggaggtgatggacaaggtgaaggaggagaagcagttcctgcagcaggacagcgacctgggccagttcagccaggaggaccctgtgcccccagctgagggcaagaagctgcccaccagcccctacccctgtgtgttctgctgtgaggaggagacccagcagaggatgagcacagtgctggcccccagccagaccctggacagcaaccccaaggtgccctgctgcacccacagcctgcccatcgaggacccccagtggagcacagatcctgcccagatccggcgggagctgtgcagcctgcctgccaccaacacagagacccacccagccaaggatgagaccttctggaagaggaagagccgggccaggaagagcctcttccagaagaacctgatgggcaggaaggtgaagagcctggacctgagcatcacccagcagaagtggaagcagagcgtggacaggcctgagctgcggcgcagcctgagccagcagccccaggacacctttgacctggaggaggtgcagagcaacagcgaggaggagcagagccagagccgctggcccagccggcccaggcacccccaccaccaccagacctttgctgggaaggacagctag

SEQ ID NO: 51730 - DNA, 249 bp, Artificial Sequence
  derived and/or modified sequence
atggaggcctctgtgctgagccccacctcctgggagaagaggcgggcctggctgcggcagagcaggaactggcagacccaggtgctggaggaggaggccgctgctgccctgcaggatgtgcctgaccctgagcccagcagcctggatgatgtgttccaggagggcaaccccatcaacaagattgaggactggctgcaggactgtggctacagcgaggagggcttcagcgaggaggccggccagttctag

SEQ ID NO: 51731 - DNA, 147 bp, Artificial Sequence
  derived and/or modified sequence
atggaggcctctgtgctgagccccacctcctgggagaagaggcgggcctggctgcggcagagcaggaactggcagacccaggtgctggaggaggaggccgctgctgccctgcaggatgtgcctgaccctgagcccagcagcctgtag

SEQ ID NO: 51732 - DNA, 1566 bp, Artificial Sequence
  derived and/or modified sequence
atggaggccagcgtgctgagccccaccagctgggagaagcggcgggcctggctcagacagtcacgcaattggcagactcaggtactagaggaggaagctgcagctgccctgcaggatgtcccggaccccgagcctagttcacttgatgatgtctttcaggagggcaatcccattaacaaaattgaggactggctgcaggattgcggatattctgaggaggggtttagtgaggaggccgggcagttcatctacaacgggttctgctcacacgggacaagttttgaggatgatctcacccttggcgccgaggctactttacttgccgccaacggaaaactgttctccagaagctttctcgaaacagctagaccgtgccaacttctggacttggggtgtagccttgcctcctcctcaatgacaggaggaaccaataaaacgtcttcgagcatctcagagatactcgacaaggtccaggaagatgccgaagatgtcctgtttagccttggcttcggtcaagaggaccacaaggacacctccaggattcctgcaaggtttttcactaccccatcccaggctaaggggattgattttcagctctttctcaagtcccaagtgcgaaggattgagatggaggatccttgcttgatgctcgcaagtcgcttcaagcaggtccagaccctagccgtgaccgccgacgccttcttttgcctatattcctatgtatccaagacccctgtgcagaaattcacccccagccacatgttctggaattgcaatcatccaaccgatgtgccttccataaggatcctgtctcgggagcctgagccccaatcaccccgcgaccgcctgagaaaagccatcagcaagatgtgcctgtatacctgtccccgggaccgaccacctcccccacacaatacaccaaagcgtaatagtctggatcaggtagtgctagaggtgatggataaagtcaaagaggagaaacagtttctgcaacaggacagtgatctgggccagttttcacaggaggaccccgtgccccctgccgaaggcaagaagctccctacctcgccctacccttgcgtgttctgctgtgaggaagaaacacagcagcgaatgtcaactgtcttagccccgtcacagaccctcgactccaatccgaaggtcccctgttgcacccacagcctgccaattgaagatccgcaatggtccacagatccggcacagatcagaagggagctatgcagtctgcccgccactaacactgagacacacccagcaaaggatgaaacattctggaaacggaaatccagagcacgcaagtccctgttccagaaaaacctgatggggcgcaaagtgaagtctctcgatttgtctattacacaacagaagtggaagcagagtgtcgataggcccgagctccgtaggtctctctcccaacagccgcaggacacatttgacctggaggaagtgcagagcaacagcgaagaagagcaaagtcagagtcgctggccgtccagacctcgccacccgcaccaccaccagacctttgctgggaaggactcttag

SEQ ID NO: 51733 - DNA, 1566 bp, Artificial Sequence
  derived and/or modified sequence
atggaggccagcgtgctgagccccaccagctgggagaagcggcgggcctggctcaggcagagccgcaattggcagacccaggtcctggaagaggaggcagcggcagcccttcaggacgtgccagatcccgagcctagcagcctcgatgatgtattccaggagggcaaccctatcaacaagatcgaagactggctgcaggactgtgggtactctgaggagggattttcagaggaggctggacagttcatttacaatggtttttgctcccacggcacctcttttgaagacgacttaacacttggcgcagaggccacgttgctggctgccaatggaaagctgttttctcggtccttccttgagactgcgcggccctgtcagctgttagacctcggttgcagtttagctagctctagcatgacaggaggcacaaacaagactagctcaagtatttccgaaattctcgacaaggttcaggaagacgccgaagatgtactgttctctctgggcttcggacaggaggatcataaggacacaagcaggatccccgcgaggtttttcacgacgccttcccaggccaagggcattgattttcaactgttcctgaagagccaggtgcgcaggatcgaaatggaggatccatgccttatgctggcttcccgctttaagcaggtgcagaccttggccgttacagctgacgctttcttctgcctctatagttacgtttcaaagacaccagtacaaaagtttaccccttctcatatgttctggaattgtaaccaccctaccgatgttccatctattaggatcttgtcgcgggaaccagagccccagtcccctcgcgatcgactacgaaaggctatctccaagatgtgcctctatacttgccctagggacaggccccctcctccccacaatactccgaagagaaactcgctggaccaggtggtcctggaggtgatggacaaggtgaaggaggaaaagcagttcctgcaacaggattcagatcttggccaattcagccaggaggatcctgtacctcccgccgaaggtaagaagctgccaacgagtccttatccttgcgtgttctgttgcgaggaggagactcaacagcgcatgagcacggtcttggccccttcccagaccctggattcaaatccgaaggtgccatgctgcacgcactctcttcctatcgaggaccctcagtggagtaccgacccggcccagatccgacgcgaactttgcagtttgcccgccaccaacactgaaacacatcccgccaaagacgagaccttctggaagagaaaatctagagcacgcaaatccttgtttcagaaaaaccttatggggagaaaagttaagtccctcgacctctcaatcactcagcaaaaatggaagcagagtgttgaccgtccagagctacgtaggagcctgagccaacagccccaggatacctttgacctggaagaggttcagagcaactcagaggaagagcaatcccaaagccgatggccatcacggccgcgccaccctcaccaccaccaaacatttgcaggcaaggacagttag

SEQ ID NO: 51734 - DNA, 249 bp, Artificial Sequence
  derived and/or modified sequence
atggaggccagcgtgctgagccccaccagctgggagaagcggcgggcttggctccgacagagtcgaaactggcagactcaggtgctggaggaggaagctgccgcagccctgcaggacgtccctgatccagagccttcttccctggatgatgtatttcaggagggcaacccgatcaataagatcgaagactggctgcaggattgcggatacagcgaagaggggttttccgaggaagcaggacagttttag

SEQ ID NO: 51735 - DNA, 147 bp, Artificial Sequence
  derived and/or modified sequence
atggaggccagcgtgctgagccccaccagctgggagaagcggcgggcttggctgcggcagtcaagaaactggcagacccaggtgctggaagaggaagccgcggccgccctgcaagatgttcctgaccctgaaccctcttctctgtag

SEQ ID NO: 51736 - DNA, 1566 bp, Artificial Sequence
  derived and/or modified sequence
atggaagcctccgtcttaagccctaccagctgggagaagagacgtgcctggctccgccagtctaggaattggcagacacaagtcctagaggaagaggcagcggcagcattgcaggacgtacccgacccagagccgagcagcctggatgacgtgtttcaggaaggcaacccaattaataagatcgaggattggctccaggattgcggctatagtgaagaaggttttagcgaagaggctgggcaattcatatataatggcttctgtagccatggcacttctttcgaagatgaccttactctcggagctgaagccacgctcctcgccgctaatggtaaacttttcagtaggtccttccttgagacggcccgtccctgtcagctgctggacctggggtgctccctggcgagtagctccatgacaggaggtactaataaaaccagtagcagcatttccgagatactggacaaagtgcaggaagatgcggaagatgtcctcttctccctcgggttcgggcaggaagatcataaggacaccagtaggatccctgccaggttttttacgaccccgagccaggcgaaaggaattgatttccaattgttcctgaaatcccaagtgcggcgaattgaaatggaggatccatgtctaatgctcgcctcaagatttaaacaggtacagaccctggcagtcaccgcagacgcttttttttgtttgtactcatacgtgagcaagactcctgtccagaagttcactccgagccatatgttctggaactgtaatcatccaacggatgttcccagcatccgaatactgtctagggagcctgagcctcagtcccctagagacaggctgcgcaaggctatctccaagatgtgtctatacacatgccctcgagacagaccccctcccccacacaatacaccaaagaggaacagcctggaccaagtcgtcctggaagtgatggacaaggtgaaagaggagaagcagttcctgcagcaagactccgacctaggtcagttctcacaggaggatcccgtgcctccagcggagggaaagaaactgcccacatcaccttacccctgtgttttctgttgcgaggaggaaacccagcagcgcatgtctaccgtcttagccccatcacaaaccctcgacagcaatccaaaggtaccctgttgtacccacagcctgcccatagaggatcctcagtggtctactgaccccgcacaaatccgtagagagctgtgttccttacccgctacaaatactgaaactcatcctgctaaggacgagaccttctggaagaggaagagcagggctcgcaaatcactcttccagaagaatcttatggggcgtaaggtgaagtcgcttgacctgtccattacccagcagaagtggaagcagagtgtggatcgacctgaactaaggcgttccctcagtcagcagccgcaggatacttttgacttagaggaggttcagagcaacagtgaggaggaacagagccagtctcgttggccaagcaggcccaggcaccctcaccaccaccaaacttttgctggaaaggactcctag

SEQ ID NO: 51737 - DNA, 1566 bp, Artificial Sequence
  derived and/or modified sequence
atggaggcctcggtgctgtccccaaccagttgggaaaaaagaagggcatggctgagacagtcgaggaattggcagacacaagtgttggaagaggaggcggctgcagcactgcaggatgttcctgacccggagcccagcagcttagacgacgtttttcaagaggggaacccaatcaataaaattgaagattggctgcaagattgtggctactccgaggaaggattctccgaggaagcaggccagtttatctacaatggtttttgtagccacggtacctcatttgaggacgacctgacactgggcgctgaggctacgctactggccgcaaacgggaagctttttagcagatctttcctagaaactgccaggccttgtcagctgctggatcttggatgctcactggcatcgtccagcatgacaggaggcactaataaaacatccagcagcattagcgaaatcctcgacaaagtgcaagaggacgccgaggacgtactgttttccctgggcttcgggcaggaggaccataaggataccagccgtattcctgccagatttttcacaactcccagtcaggctaaggggatagacttccagctgttcctgaagagccaggtgaggagaatcgagatggaagacccttgtctgatgctggccagcaggtttaagcaagtgcagacccttgccgtgactgccgacgcattcttctgcctgtactcatatgtctctaagacccccgtccagaaattcactcctagccatatgttctggaactgcaatcaccccaccgatgtcccgtcaatcagaattctcagtcgagagcctgaacctcagagcccacgtgacaggctccgcaaagctatatcgaagatgtgcctgtacacttgtcctagagaccgcccaccaccccctcacaacactcctaaacggaattccctggatcaggtcgtgttagaagtgatggataaggtgaaagaagaaaagcaattcctgcaacaggattctgacctgggtcagttttctcaggaggatcccgttccacctgcagaaggcaagaaattgccaacgtccccctacccgtgtgtgttctgttgcgaagaggagactcaacagcggatgtctacagtcctcgccccaagccaaacccttgatagtaatccaaaggtgccatgctgtacccattccctgcccattgaggacccacagtggtctaccgatcctgcccagattagacgggagctgtgctccttgcccgctacaaacactgaaacccaccccgctaaagacgagacattttggaagagaaagtctcgggctcgcaagagtctttttcagaagaatctgatgggaaggaaggtgaagtccctggatctctctattactcaacaaaagtggaaacagtccgtcgatagaccagagctgcgaaggagcctgtctcaacagccacaggataccttcgacctggaagaggtgcagtccaacagtgaagaggaacaaagccagagccgttggccctctagaccacgacacccacatcatcatcaaacgttcgcaggaaaggatagctag

SEQ ID NO: 51738 - DNA, 249 bp, Artificial Sequence
  derived and/or modified sequence
atggaagcttccgttctgagccccaccagttgggagaagaggcgcgcatggctgcggcagagtaggaattggcaaactcaggtgctggaagaagaggccgctgcggcactacaggacgtacccgatccagaaccaagtagcttggatgacgttttccaagagggcaatcctataaataaaatcgaggattggctgcaggattgtggttactctgaggaaggattttccgaggaggcagggcagttctag

SEQ ID NO: 51739 - DNA, 147 bp, Artificial Sequence
  derived and/or modified sequence
atggaagcttcggtgctgtcccctacttcctgggagaaacggcgtgcctggttgaggcagagccggaattggcagacacaggtgctggaggaagaggccgctgctgccttgcaggacgtccccgaccctgagccctcgagtctctag

SEQ ID NO: 51740 - DNA, 1898 bp, Artificial Sequence
  derived and/or modified sequence
aagtgtggcaggaggaaggctgtatgatataaaggaagaaagcatgcatctggaactcagaacttgacggcattactgttacgggaggccctgaagtctgagccagggccatggaggcctctgtgctgagccccacatcctgggagaaacggcgggcctggctccgtcagagccgtaactggcagacccaggtcctagaagaggaggctgccgccgccctgcaggatgtcccagatcctgagccttccagcctggatgacgttttccaagaagggaatccaatcaataaaattgaagactggctgcaggattgcggatactctgaagaaggattttctgaggaagcaggacagtttatctacaatggcttctgcagccatgggaccagctttgaagatgacttgaccctgggagcggaggccacactactggccgccaatggcaaactcttctccaggagtttcctcgagacagccaggccttgccagctacttgatcttggctgtagtttggcttccagcagcatgactggggggaccaacaagactagttcaagcatctcagaaattctggacaaagtgcaagaagatgcagaagatgtcctcttcagtctgggctttggccaagaggatcacaaagacacttctcggatacccgcccgatttttcaccaccccctctcaggccaagggcattgatttccagctcttcctgaagtcccaggtgcggaggattgaaatggaagacccctgcctcatgctggccagcaggtttaagcaggtgcaaacactggctgtcactgctgatgccttcttctgtctctactcctatgtgtctaagacacctgtccaaaagttcacaccatcccacatgttctggaattgcaaccatccaactgatgtgccatccatcaggattctgtcccgagagcctgaaccccagtcacccagagaccgccttcggaaagccatctccaagatgtgtctgtacacatgcccccgagaccggccaccaccaccccacaacacccccaaaaggaacagtttggaccaagttgtgttggaagtgatggacaaagtgaaagaagagaagcagttcctccagcaagactctgatttggggcaattctcacaggaagatcctgtgccccctgctgagggtaagaagttgcccacttctccctatccatgtgtcttctgctgtgaagaggaaacacagcagaggatgtccacagtgctagcaccatcccaaactctggattcgaaccccaaggtaccctgttgcacacattctctgcccatagaagatccacagtggagcacagacccagctcagataaggagagagctgtgtagtctaccagccaccaatacggaaacccatccagccaaggatgagactttctggaaaagaaagagcagagcaagaaagagcctcttccagaagaatctcatgggcaggaaggttaagtccttggacctgtccatcacccagcagaaatggaagcagagtgtagacagaccagaactgcgtcggtctttaagccagcagccacaggacacttttgacttggaggaggtgcaaagcaacagtgaggaggagcagagtcagagtcgctggcccagcagacccaggcacccccaccaccaccagacttttgctggcaaagactcgtgaagctttctccaccaccacaacagcatgtggtctgacagaattggcttcaaagaagaaactaaaagccacctcttgcaggaaactgcactgccctcaacatccagcccctactccttggtcctccaaacccccaaactctgcaggagaaaggcagcatggtacatggggaggaagaccagactgagcgatttggaatccacatcctaatgctgccacaagctg

SEQ ID NO: 51741 - DNA, 2010 bp, Artificial Sequence
  derived and/or modified sequence
gcttcacctctgtgcccacacctgtgaaggcctcggcccagcttcgacaactgctttgcctcaaactcagctttctaccagcagacaggacggcattactgttacgggaggccctgaagtctgagccagggccatggaggcctctgtgctgagccccacatcctgggagaaacggcgggcctggctccgtcagagccgtaactggcagacccaggtcctagaagaggaggctgccgccgccctgcaggatgtcccagatcctgagccttccagcctggatgacgttttccaagaagggaatccaatcaataaaattgaagactggctgcaggattgcggatactctgaagaaggattttctgaggaagcaggacagtttatctacaatggcttctgcagccatgggaccagctttgaagatgacttgaccctgggagcggaggccacactactggccgccaatggcaaactcttctccaggagtttcctcgagacagccaggccttgccagctacttgatcttggctgtagtttggcttccagcagcatgactggggggaccaacaagactagttcaagcatctcagaaattctggacaaagtgcaagaagatgcagaagatgtcctcttcagtctgggctttggccaagaggatcacaaagacacttctcggatacccgcccgatttttcaccaccccctctcaggccaagggcattgatttccagctcttcctgaagtcccaggtgcggaggattgaaatggaagacccctgcctcatgctggccagcaggtttaagcaggtgcaaacactggctgtcactgctgatgccttcttctgtctctactcctatgtgtctaagacacctgtccaaaagttcacaccatcccacatgttctggaattgcaaccatccaactgatgtgccatccatcaggattctgtcccgagagcctgaaccccagtcacccagagaccgccttcggaaagccatctccaagatgtgtctgtacacatgcccccgagaccggccaccaccaccccacaacacccccaaaaggaacagtttggaccaagttgtgttggaagtgatggacaaagtgaaagaagagaagcagttcctccagcaagactctgatttggggcaattctcacaggaagatcctgtgccccctgctgagggtaagaagttgcccacttctccctatccatgtgtcttctgctgtgaagaggaaacacagcagaggatgtccacagtgctagcaccatcccaaactctggattcgaaccccaaggtaccctgttgcacacattctctgcccatagaagatccacagtggagcacagacccagctcagataaggagagagctgtgtagtctaccagccaccaatacggaaacccatccagccaaggatgagactttctggaaaagaaagagcagagcaagaaagagcctcttccagaagaatctcatgggcaggaaggttaagtccttggacctgtccatcacccagcagaaatggaagcagagtgtagacagaccagaactgcgtcggtctttaagccagcagccacaggacacttttgacttggaggaggtgcaaagcaacagtgaggaggagcagagtcagagtcgctggcccagcagacccaggcacccccaccaccaccagacttttgctggcaaagactcgtgaagctttctccaccaccacaacagcatgtggtctgacagaattggcttcaaagaagaaactaaaagccacctcttgcaggaaactgcactgccctcaacatccagcccctactccttggtcctccaaacccccaaactctgcaggagaaaggcagcatggtacatggggaggaagaccagactgagcgatttggaatccacatcctaatgctgccacaagctgcatgcacaaagaccttaggcacatctcttcatttctctgtacactggtttctctactatgtgtgtattaaaatatataatgtggatgat

SEQ ID NO: 51742 - DNA, 4188 bp, Artificial Sequence
  derived and/or modified sequence
atgagaccacagtcataagagtaaaacaaaaattctgatggaaataaatgcttatttggtaggaagcaaaaagcacaaaaacaagattgtctttctttttctttttctttttaaatgagaaggatccacccttgtgggaaaggaactctcaaaagacagcagtgggcctgacatcttgggcactttccaggttcttgggaggaagggagaaaagaagcagagagagagaagaaatatctactatttttatatacggtgtattcctctcatatcttaaagaaaagctttatgtagaaaaaaagattcatgacgcagcttatgtaagaataaacttgtggaatggaattagttgcagggaggaggtctgatttcgttcagttctcacagtgatctagtgtctgacttttctagggaatccaatcaataaaattgaagactggctgcaggattgcggatactctgaagaaggattttctgaggaagcaggacagtttatctacaatggcttctgcagccatgggaccagctttgaagatgacttgaccctgggagcggaggccacactactggccgccaatggcaaactcttctccaggagtttcctcgagacagccaggccttgccagctacttgatcttggctgtagtttggcttccagcagcatgactggggggaccaacaagactagttcaagcatctcagaaattctggacaaagtgcaagaagatgcagaagatgtcctcttcagtctgggctttggccaagaggatcacaaagacacttctcggatacccgcccgatttttcaccaccccctctcaggccaagggcattgatttccagctcttcctgaagtcccaggtgcggaggattgaaatggaagacccctgcctcatgctggccagcaggtttaagcaggtgcaaacactggctgtcactgctgatgccttcttctgtctctactcctatgtgtctaagacacctgtccaaaagttcacaccatcccacatgttctggaattgcaaccatccaactgatgtgccatccatcaggattctgtcccgagagcctgaaccccagtcacccagagaccgccttcggaaagccatctccaagatgtgtctgtacacatgcccccgagaccggccaccaccaccccacaacacccccaaaaggaacagtttggaccaagttgtgttggaagtgatggacaaagtgaaagaagagaagcagttcctccagcaagactctgatttggggcaattctcacaggaagatcctgtgccccctgctgagggtaagaagttgcccacttctccctatccatgtgtcttctgctgtgaagaggaaacacagcagaggatgtccacagtgctagcaccatcccaaactctggattcgaaccccaaggtaccctgttgcacacattctctgcccatagaagatccacagtggagcacagacccagctcagataaggagagagctgtgtagtctaccagccaccaatacggaaacccatccagccaaggatgagactttctggaaaagaaagagcagagcaagaaagagcctcttccagaagaatctcatgggcaggaaggttaagtccttggacctgtccatcacccagcagaaatggaagcagagtgtagacagaccagaactgcgtcggtctttaagccagcagccacaggacacttttgacttggaggaggtgcaaagcaacagtgaggaggagcagagtcagagtcgctggcccagcagacccaggcacccccaccaccaccagacttttgctggcaaagactcgtgaagctttctccaccaccacaacagcatgtggtctgacagaattggcttcaaagaagaaactaaaagccacctcttgcaggaaactgcactgccctcaacatccagcccctactccttggtcctccaaacccccaaactctgcaggagaaaggcagcatggtacatggggaggaagaccagactgagcgatttggaatccacatcctaatgctgccacaagctgcatgcacaaagaccttaggcacatctcttcatttctctgtacactggtttctctactatgtgtgtattaaaatatataatgtggatgatagtaaactgaacaaagccttaattttctcccaagctttgacattgccaagggcagttaggagacttcaggatcaagtttaggggacaagtttttttctaatactttcaaaaggcccaagtgaagagaggaaggacacctcactttctggctctaaaagcatggtacatctcacactaggattccctctgcacctctgttcatccctgtattcctaactaaattccagaaaatcttctacaacactggagtcctatttttcttcttgagacctcctttgaagaaatcaacttggagactcctccttaaatccagtttctttctctacccaaaattttgcatctttatagaaaaagagataagtaggattcagagtctcttctcctagccattgtggggggaaaaaatgctatttctgttggcagaaaacaatacaaatattttttttaaatcatggcatgtttttaaagttaactaacagctgtagtttgctttggaagttaaatgttttgtcaataaacagggcttgagcacatgcagtgctctcttaggcagtatgtggtttcagagcatcttggacacatttctcccctgagaaaatattaatattaatagaatgggagaagtaagatgcacgcatttccagaagtatattatttggctgcctaataaattgtgagacaaaagaaaaaaaaaaaaaaaacaggaagagagggacttgagggaatttgagggaaatcataaccaaaagtttaaaggaaaaaattacaccagacatgataagcagaagttgattttgttctggtgctattgccagcattaggggagaaggcacaaactgagtctgatacgtagtgaggcagagacaaaagggctagggtggaaaaatttttaaaccatctgtgtttactaattccccataccaaaagaacaaaatgaactttctcctatttcatgataaaagatagtttcacaatttggaaaaagcccccccactccaagtttcctacccttcccacccacagaaaccaggagacaggggaactatcttccttgatgttaacatttcaaagaggtggttctcaggtcctagagaaagatattcctgagttgtaaaactgggaagaggctggaagaagatttagatctcaagaaatagaaagaactacagcaaattttctaaagcaaatattcttaagggaggtcaagggcctgaagtcaggaagaaacctatttggtcaagctgaggggaaagttaaggctatcttgtcacaagagaacagaaatatctgacaatatttcatttaaagaactgtattagtccattctcacactgctataaataaatacctgagactgggtaatttatacagaaaagaggtttaattggctcacagttccgcaggctgtacaggaagcatggcaacatcagtttctggggaggcctcagggagctttaactcatggtggaaagcaaagtgggagcaggcatcttacatggtatgagcaggaggaacaaaggaaaggggaggtgctaacacttttaaatgaccagatcttgtaagaactcactcattatacagtaccaaggggagatggtgctaaacgattaatgaaaactctacccagtaatccaatcaccacccaccaggccccacctccaacaatggggattacagtttgacatgagatttgggtgaggacacagatccaaactgtcaggcctctgagcccaagctaagccatcatatcccctgtgacctgcatgtatacatccagatggcctgaagcaagtggagaatcacaaaagaagtgaaaatggcctgttgctgccttaacagatgacattactttgtgaaattccttcttctggctcagaagctcccccactgagcaccttgtgacccccacccctgcctgccagagaataatcccctttgactgtaattttccactacctacctaaatcctataaaacagccccacccctatctccctttgctgactctctttttggactcagcctgcctgcacccaggtgattaaaaagctttattgctcacac

SEQ ID NO: 51743 - DNA, 783 bp, Artificial Sequence
  derived and/or modified sequence
cagcagttgaatgagttcagggagaaaggcataatctacaacatgatactttctcacttgcttcacctctgtgcccacacctgtgaaggcctcggcccagcttcgacaactgctttgcctcaaactcagctttctaccagcagacaggccctactctagtgtccatagctccaaccattgagagtacctggctgaaatcaactttgctttctgtgggtatgacctctttcttcagaagctgtagaagaaacttgttgagataaactgcagcaagatatattgaggtcagctacgagggaggatgtacacacttgagtgaggcactgcttggggcataggtacaaaacagacagaagagaagagaggtctgtctcatacatgtcccctagagcactaaaggcaaacctgggactgggccttggaaaccaagtgtggcaggaggaaggctgtatgatataaaggaagaaagcatgcatctggaactcagaacttgacggcattactgttacgggaggccctgaagtctgagccagggccatggaggcctctgtgctgagccccacatcctgggagaaacggcgggcctggctccgtcagagccgtaactggcagacccaggtcctagaagaggaggctgccgccgccctgcaggatgtcccagatcctgagccttccagcctggatgacgttttccaagaagggaatccaatcaataaaattgaagactggctgcaggattgcggatactctgaagaaggattttctgaggaagcaggacagttt

SEQ ID NO: 51744 - DNA, 523 bp, Artificial Sequence
  derived and/or modified sequence
cttttgagcaggcaacagcagttgaatgagttcagggagaaaggcataatctacaacatgatactttctcacttgcttcacctctgtgcccacacctgtgaaggcctcggcccagcttcgacaactgctttgcctcaaactcagctttctaccagcagacaggccctactctagtgtccatagctccaaccattgagagtacctggctgaaatcaactttgctttctgtgggtatgacctctttcttcagaagctgtagaagaaacttgttgagataaactgcagcaagatatattgaggtcagctacgagggaggatgtacacacttgagtgaggacggcattactgttacgggaggccctgaagtctgagccagggccatggaggcctctgtgctgagccccacatcctgggagaaacggcgggcctggctccgtcagagccgtaactggcagacccaggtcctagaagaggaggctgccgccgccctgcaggatgtcccagatcctgagccttccagcct

SEQ ID NO: 51745 - protein, 676 aa, Artificial Sequence
  derived and/or modified sequence
MAAATGDPGLSKLQFAPFSSALDVGFWHELTQKKLNEYRLDEAPKDIKGYYYNGDSAGLPARLTLEFSAFDMSAPTPARCCPAIGTLYNTNTLESFKTADKKLLLEQAANEIWESIKSGTALENPVLLNKFLLLTFADLKKYHFYYWFCYPALCLPESLPLIQGPVGLDQRFSLKQIEALECAYDNLCQTEGVTALPYFLIKYDENMVLVSLLKHYSDFFQGQRTKITIGVYDPCNLAQYPGWPLRNFLVLAAHRWSSSFQSVEVVCFRDRTMQGARDVAHSIIFEVKLPEMAFSPDCPKAVGWEKNQKGGMGPRMVNLSECMDPKRLAESSVDLNLKLMCWRLVPTLDLDKVVSVKCLLLGAGTLGCNVARTLMGWGVRHITFVDNAKISYSNPVRQPLYEFEDCLGGGKPKALAAADRLQKIFPGVNARGFNMSIPMPGHPVNFSSVTLEQARRDVEQLEQLIESHDVVFLLMDTRESRWLPAVIAASKRKLVINAALGFDTFVVMRHGLKKPKQQGAGDLCPNHPVASADLLGSSLFANIPGYKLGCYFCNDVVAPGDSTRDRTLDQQCTVSRPGLAVIAGALAVELMVSVLQHPEGGYAIASSSDDRMNEPPTSLGLVPHQVLDQYEREGFNFLAKVFNSSHSFLEDLTGLTLLHQETQAAEIWDMSDDETI

SEQ ID NO: 51746 - DNA, 2031 bp, Artificial Sequence
  derived and/or modified sequence
atggccgccgccaccggcgaccccggcctgagcaagctgcagttcgcccccttcagcagcgccctggacgtgggcttctggcacgagctgacccagaagaagctgaacgagtacagactggacgaggcccccaaggacatcaagggctactactacaacggcgacagcgccggcctgcccgccagactgaccctggagttcagcgccttcgacatgagcgcccccacccccgccagatgctgccccgccatcggcaccctgtacaacaccaacaccctggagagcttcaagaccgccgacaagaagctgctgctggagcaggccgccaacgagatctgggagagcatcaagagcggcaccgccctggagaaccccgtgctgctgaacaagttcctgctgctgaccttcgccgacctgaagaagtaccacttctactactggttctgctaccccgccctgtgcctgcccgagagcctgcccctgatccagggccccgtgggcctggaccagagattcagcctgaagcagatcgaggccctggagtgcgcctacgacaacctgtgccagaccgagggcgtgaccgccctgccctacttcctgatcaagtacgacgagaacatggtgctggtgagcctgctgaagcactacagcgacttcttccagggccagagaaccaagatcaccatcggcgtgtacgacccctgcaacctggcccagtaccccggctggcccctgagaaacttcctggtgctggccgcccacagatggagcagcagcttccagagcgtggaggtggtgtgcttcagagacagaaccatgcagggcgccagagacgtggcccacagcatcatcttcgaggtgaagctgcccgagatggccttcagccccgactgccccaaggccgtgggctgggagaagaaccagaagggcggcatgggccccagaatggtgaacctgagcgagtgcatggaccccaagagactggccgagagcagcgtggacctgaacctgaagctgatgtgctggagactggtgcccaccctggacctggacaaggtggtgagcgtgaagtgcctgctgctgggcgccggcaccctgggctgcaacgtggccagaaccctgatgggctggggcgtgagacacatcaccttcgtggacaacgccaagatcagctacagcaaccccgtgagacagcccctgtacgagttcgaggactgcctgggcggcggcaagcccaaggccctggccgccgccgacagactgcagaagatcttccccggcgtgaacgccagaggcttcaacatgagcatccccatgcccggccaccccgtgaacttcagcagcgtgaccctggagcaggccagaagagacgtggagcagctggagcagctgatcgagagccacgacgtggtgttcctgctgatggacaccagagagagcagatggctgcccgccgtgatcgccgccagcaagagaaagctggtgatcaacgccgccctgggcttcgacaccttcgtggtgatgagacacggcctgaagaagcccaagcagcagggcgccggcgacctgtgccccaaccaccccgtggccagcgccgacctgctgggcagcagcctgttcgccaacatccccggctacaagctgggctgctacttctgcaacgacgtggtggcccccggcgacagcaccagagacagaaccctggaccagcagtgcaccgtgagcagacccggcctggccgtgatcgccggcgccctggccgtggagctgatggtgagcgtgctgcagcaccccgagggcggctacgccatcgccagcagcagcgacgacagaatgaacgagccccccaccagcctgggcctggtgccccaccaggtgctggaccagtacgagagagagggcttcaacttcctggccaaggtgttcaacagcagccacagcttcctggaggacctgaccggcctgaccctgctgcaccaggagacccaggccgccgagatctgggacatgagcgacgacgagaccatctag

SEQ ID NO: 51747 - DNA, 531 bp, Artificial Sequence
  derived and/or modified sequence
atggccgccgccaccggcgaccccggcctgagcaagctgcagttcgcccccttcagcagcgccctggacgtgggcttctggcacgagctgacccagaagaagctgaacgagtacagactggacgaggcccccaaggacatcaagggctactactacaacggcgacagcgccggcctgcccgccagactgaccctggagttcagcgccttcgacatgagcgcccccacccccgccagatgctgccccgccatcggcaccctgtacaacaccaacaccctggagagcttcaagaccgccgacaagaagctgctgctggagcaggccgccaacgagatctgggagagcatcaagagcggcaccgccctggagaaccccgtgctgctgaacaagttcctgctgctgaccttcgccgacctgaagaagtaccacttctactactggttctgctaccccgccctgtgcctgcccgagagcctgcccctgatccagggccccgtgggcctggaccagagattcagcctgaagcagtag

SEQ ID NO: 51748 - DNA, 2296 bp, Artificial Sequence
  derived and/or modified sequence
ggaagttgagcggcggcaagaaataatggcggcagctacgggggatcctggactctctaaactgcagtttgccccttttagtagtgccttggatgttgggttttggcatgagttgacccagaagaagctgaacgagtatcggctggatgaagctcccaaggacattaagggttattactacaatggtgactctgctgggctgccagctcgcttaacattggagttcagtgcttttgacatgagtgctcccaccccagcccgttgctgcccagctattggaacactgtataacaccaacacactcgagtctttcaagactgcagataagaagctccttttggaacaagcagcaaatgagatatgggaatccataaaatcaggcactgctcttgaaaaccctgtactcctcaacaagttcctcctcttgacatttgcagatctaaagaagtaccacttctactattggttttgctatcctgccctctgtcttccagagagtttacctctcattcaggggccagtgggtttggatcaaaggttttcactaaaacagattgaagcactagagtgtgcatatgataatctttgtcaaacagaaggagtcacagctcttccttacttcttaatcaagtatgatgagaacatggtgctggtttccttgcttaaacactacagtgatttcttccaaggtcaaaggacgaagataacaattggtgtatatgatccctgtaacttagcccagtaccctggatggcctttgaggaattttttggtcctagcagcccacagatggagtagcagtttccagtctgttgaagttgtttgcttccgtgaccgtaccatgcagggggcgagagacgttgcccacagcatcatcttcgaagtgaagcttccagaaatggcatttagcccagattgtcctaaagcagttggatgggaaaagaaccagaaaggaggcatgggaccaaggatggtgaacctcagtgaatgtatggaccctaaaaggttagctgagtcatcagtggatctaaatctcaaactgatgtgttggagattggttcctactttagacttggacaaggttgtgtctgtcaaatgtctgctgcttggagccggcaccttgggttgcaatgtagctaggacgttgatgggttggggcgtgagacacatcacatttgtggacaatgccaagatctcctactccaatcctgtgaggcagcctctctatgagtttgaagattgcctagggggtggtaagcccaaggctctggcagcagcggaccggctccagaaaatattccccggtgtgaatgccagaggattcaacatgagcatacctatgcctgggcatccagtgaacttctccagtgtcactctggagcaagcccgcagagatgtggagcaactggagcagctcatcgaaagccatgatgtcgtcttcctattgatggacaccagggagagccggtggcttcctgccgtcattgctgcaagcaagagaaagctggtcatcaatgctgctttgggatttgacacatttgttgtcatgagacatggtctgaagaaaccaaagcagcaaggagctggggacttgtgtccaaaccaccctgtggcatctgctgacctcctgggctcatcgctttttgccaacatccctggttacaagcttggctgctacttctgcaatgatgtggtggccccaggagattcaaccagagaccggaccttggaccagcagtgcactgtgagtcgtccaggactggccgtgattgcaggagccctggccgtggaattgatggtatctgttttgcagcatccagaagggggctatgccattgccagcagcagtgacgatcggatgaatgagcctccaacctctcttgggcttgtgcctcaccaggttcttgatcaatatgaacgagaaggatttaacttcctagccaaggtgtttaattcttcacattccttcttagaagacttgactggtcttacattgctgcatcaagaaacccaagctgctgagatctgggacatgagcgatgatgagaccatctgagatggccccgctgtggggctgacttctccccggccgcctgctgaggagctctccatcgccagagcaggactgctgaccccaggcctggtgattctgggcccctcctccataccccgaggtctgggattcccccctctgctgcccaggagtggccagtgttcggcgttgctcgggattcaagataccaccagttcagagctaaataataaccttggccttggccttgctattgacctggga

SEQ ID NO: 51749 - DNA, 2031 bp, Artificial Sequence
  derived and/or modified sequence
atggccgccgccacaggagatcccggcctaagcaagctccagtttgcacctttttcctccgcactggacgttggcttttggcatgagctcacccaaaagaaactaaacgaatatcgtctcgatgaagcacccaaggacatcaagggttactactacaatggagactccgctgggctccccgctcggctgactctggaattctctgcgttcgacatgtcagcgcctacccccgcaaggtgttgccccgccatagggactctctataataccaacactctggaatctttcaagacggccgacaagaagctgctgttggagcaggctgctaacgagatctgggagtctatcaaaagcggcaccgctctcgaaaatcctgttctgctcaataaatttcttttgctgacatttgcggatctgaagaaataccacttttactattggttttgctacccggcgctatgtttgcccgaaagcctgcccctgattcagggacctgtgggtttagatcagagattttccctcaagcaaatcgaggccctggaatgcgcatatgacaacctttgccagacagagggtgtcaccgcgctgccctattttttgatcaagtacgatgagaacatggtgcttgtaagtctcctcaaacattatagcgattttttccaaggccagaggaccaagatcactatcggcgtgtatgatccctgcaatctcgcacaataccccgggtggcccctgcgtaactttctcgtcctggccgcacaccgctggtctagtagttttcagtctgtggaagttgtctgcttccgtgaccggaccatgcagggcgcccgagatgtggctcatagcattatctttgaggttaagctgccagaaatggccttcagccctgactgccctaaagcagttggttgggaaaagaatcaaaagggtggaatgggtccacgcatggtcaatctgagtgagtgtatggacccaaaacgtttagctgagagcagcgtggacttgaatctgaagctgatgtgttggcggctcgtccccacccttgacctagacaaggttgtgagtgttaaatgcctcctgctgggcgcgggcaccctggggtgtaacgtagcacggacgctgatgggctggggagttagacacattacctttgtcgacaacgctaaaatctcatacagcaaccccgtacggcagcctctatacgagttcgaagattgcctcggcggtggcaagccaaaggctctagccgcagcagaccggctgcagaaaatcttccccggcgtgaacgcccgcggattcaatatgtctatccccatgccaggacaccccgtgaacttctccagcgtcaccctggaacaggctagacgcgacgtcgagcagcttgaacaacttattgagtcccacgacgtggtgtttctgctaatggacactcgagagagtagatggctgccagctgtgattgcggcgtccaaaaggaaattggtgatcaacgccgccctagggtttgacacttttgttgtgatgcgacacggactgaagaaaccgaaacaacagggcgcaggagacctgtgccccaatcaccccgtggccagcgccgaccttttggggagcagcctgtttgccaatattccaggctataaactaggttgctacttctgtaacgatgttgttgctcccggagatagcacccgggacagaactctggaccagcagtgtacagttagtcgcccaggactggccgtcatcgcgggagctttagccgtggagcttatggtctcagtgctccagcatcctgagggagggtatgctattgccagttcatcagacgacagaatgaacgagcctcctacaagcctgggactggtcccccaccaagtgctggatcagtacgagcgcgagggatttaacttcctggccaaagtgttcaacagttctcacagttttctagaggatctgacaggccttaccctgttgcaccaggaaactcaggccgcagagatatgggacatgtctgacgacgagacaatctag

SEQ ID NO: 51750 - DNA, 531 bp, Artificial Sequence
  derived and/or modified sequence
atggcggccgccaccggcgatcccggactgtctaaacttcagttcgcacccttctccagcgccctcgacgtgggcttctggcacgagctaacacagaaaaaactgaatgagtatagattagacgaggctcccaaagacattaaggggtactactacaacggggactccgctggtctacctgccagattgaccttggagttctccgcgttcgatatgagcgctcccaccccagcgagatgttgtccagccataggcacactgtacaacacaaatactctggaaagttttaagacggctgacaagaagttgttgctcgagcaggccgcaaacgagatctgggagagtataaagtctggaactgcccttgagaatcccgtgctcctcaacaagtttcttctacttacattcgccgaccttaagaagtaccatttctactattggttctgctaccctgccctgtgcctccctgagtccttgcctctaatacaaggccccgtgggactggaccaaaggttttcccttaagcagtag

SEQ ID NO: 51751 - DNA, 2031 bp, Artificial Sequence
  derived and/or modified sequence
atggctgctgccactggagaccccggcctgagcaagctgcagtttgcccccttcagcagcgccctggatgtgggcttctggcatgagctgacccagaagaagctgaatgagtaccgcctggatgaggcccccaaggacatcaagggctactactacaatggagacagcgctggcctgcctgcccggctgaccctggagttcagcgcctttgacatgtctgcccccaccccagcccgctgctgcccagccatcggcaccctgtacaacaccaacaccctggagagcttcaagacagctgacaagaagctgctgctggagcaggccgccaatgagatctgggagagcatcaagagcggcacagccctggagaaccctgtgctgctgaacaagttcctgctgctgacctttgctgacctgaagaagtaccacttctactactggttctgctacccagccctgtgcctgcctgagagcctgcccctcatccagggccctgtgggcctggaccagcgcttcagcctgaagcagatcgaggccctggagtgtgcctatgacaacctgtgccagacagagggcgtgacagccctgccctacttcctgatcaagtatgatgagaacatggtgctggtgtccctgctgaagcactacagcgacttcttccagggccagaggaccaagatcaccatcggcgtgtatgacccctgcaacctggcccagtacccaggctggcccctgaggaacttcctggtgctggccgcccaccgctggagcagcagcttccagagcgtggaggtggtgtgcttccgggacaggaccatgcagggcgccagagatgtggcccacagcatcatctttgaggtgaagctgcctgagatggccttctccccagactgccccaaggctgtgggctgggagaagaaccagaagggcggcatgggccccaggatggtgaacctgtctgagtgcatggaccccaagaggctggccgagagctctgtggacctgaacctgaagctgatgtgctggaggctggtgcccaccctggacctggacaaggtggtgtctgtgaagtgcctgctgctgggcgccggcaccctgggctgcaatgtggcccggaccctgatgggctggggcgtgcgccacatcacctttgtggacaatgccaagatctcctacagcaaccctgtgcggcagcccctgtatgaatttgaggactgcctgggcggcggcaagcccaaggccctggccgctgctgaccggctgcagaagatcttccctggggtgaatgcccggggcttcaacatgagcatccccatgcctggccaccctgtgaacttcagctctgtgaccctggagcaggccaggagagatgtggagcagctggagcagctgattgagagccatgatgtggtgttcctgctgatggacacccgggagagccgctggctgcctgctgtgattgctgccagcaagaggaagctggtgatcaatgctgccctgggctttgacacctttgtggtgatgagacatggcctgaagaagcccaagcagcagggcgctggggacctgtgccccaaccaccctgtggccagcgctgacctgctgggcagcagcctgtttgccaacatccctggctacaagctgggctgctacttctgcaatgatgtggtggcccctggggacagcacccgggacaggaccctggaccagcagtgcaccgtgtccaggcctggcctggccgtgattgctggggccctggccgtggagctgatggtgtctgtgctgcagcaccctgagggcggctacgccatcgccagcagcagtgatgacaggatgaatgaaccacccaccagcctgggcctggtgccccaccaggtgctggaccagtatgaaagagagggcttcaacttcctggccaaggtgttcaacagcagccacagcttcctggaggacctgaccggcctgaccctgctgcaccaggagacccaggccgctgagatctgggacatgtctgatgatgagaccatctag

SEQ ID NO: 51752 - DNA, 531 bp, Artificial Sequence
  derived and/or modified sequence
atggctgctgccactggagaccccggcctgagcaagctgcagtttgcccccttcagcagcgccctggatgtgggcttctggcatgagctgacccagaagaagctgaatgagtaccgcctggatgaggcccccaaggacatcaagggctactactacaatggagacagcgctggcctgcctgcccggctgaccctggagttcagcgcctttgacatgtctgcccccaccccagcccgctgctgcccagccatcggcaccctgtacaacaccaacaccctggagagcttcaagacagctgacaagaagctgctgctggagcaggccgccaatgagatctgggagagcatcaagagcggcacagccctggagaaccctgtgctgctgaacaagttcctgctgctgacctttgctgacctgaagaagtaccacttctactactggttctgctacccagccctgtgcctgcctgagagcctgcccctcatccagggccctgtgggcctggaccagcgcttcagcctgaagcagtag

SEQ ID NO: 51753 - DNA, 2031 bp, Artificial Sequence
  derived and/or modified sequence
atggccgccgccaccggcgaccccggcctgagcaagctgcagttcgctccctttagctccgccctcgacgtgggtttctggcacgagttgacccagaagaagctcaatgagtacaggctggacgaagcacctaaggacattaagggttactactataacggggatagcgccggcctgcctgcccgcctgactttggagttcagcgccttcgacatgagcgctcctacccctgctcgctgctgccctgccataggaactctctacaacaccaataccctggagagctttaagactgcagacaaaaagctgctgctggaacaggccgctaatgagatctgggaatctataaagagcggcacagcgctcgaaaatcccgttctactgaataagtttcttctcctgacctttgccgatttgaagaagtatcacttctactactggttctgttacccagccctgtgccttcccgaatcactgcccctgattcaggggcccgtagggctggatcagcgcttttcgcttaaacagattgaggccctggaatgtgcctacgacaacctgtgccagacagagggcgttactgcgcttccttatttcctgatcaaatacgacgagaacatggtattagttagtctgctgaaacactactctgacttctttcagggccagcgaactaagattaccatcggcgtgtatgacccctgcaacttagcccagtaccctggctggccactaagaaattttctggtgctagccgcccacaggtggtccagctcattccagagtgtggaggtggtgtgttttcgcgaccgaactatgcagggtgcacgagatgtggcccacagcatcatctttgaagtgaaactacccgagatggcattttctcctgactgccctaaggcagtcggatgggagaagaaccagaaggggggcatgggtccacgcatggttaaccttagcgaatgtatggacccaaagcgcctcgccgagtcctctgtagatttgaacctcaagctcatgtgctggagactggttcccacgcttgacctggacaaagttgtgagcgtgaagtgccttctcctcggcgcaggaaccctgggatgtaacgttgcccgcaccctcatgggctggggagtacggcacatcactttcgtggacaacgcgaagatcagttacagtaaccccgtcaggcagccactctatgagttcgaggattgcctgggaggagggaagcctaaagccctagcggctgcagacagacttcagaaaatattcccaggagtgaacgcaaggggatttaacatgtcgataccaatgcctgggcatcccgtgaatttttcctctgtcactttagagcaggcaagaagggatgtcgaacagctggaacagctcatcgaatcgcacgacgtcgtgttcttgctcatggacacgagagagtctcgctggcttcctgcggtaatagccgcaagcaagcggaagctcgtgatcaacgccgctcttggcttcgatacttttgtggtcatgcgtcatggcctgaagaaacccaaacagcagggggcgggtgacctgtgtcctaaccatccagtggcatctgctgatctgctgggctccagcctctttgcaaacattccaggatataaattgggctgttacttttgtaatgacgttgtggcacctggcgattctacccgcgacaggaccctcgatcaacagtgcacagtgagtcgacctggccttgcggtgattgccggtgctttagcagtggaactaatggtcagcgttttgcagcatcctgagggaggttacgccattgctagtagcagcgatgatagaatgaatgaaccaccaaccagcctcggattggtgccccatcaggtcctcgatcagtatgaacgcgaggggttcaatttccttgcaaaagtttttaactcctctcactcctttcttgaggatctcaccggactgaccctgctccaccaggaaactcaggccgctgaaatttgggacatgtctgacgacgaaacaatttag

SEQ ID NO: 51754 - DNA, 531 bp, Artificial Sequence
  derived and/or modified sequence
atggccgccgccaccggcgaccccggcctgagcaagctgcagttcgccccctttagttctgcactggacgttgggttttggcatgaactcactcaaaagaagctcaacgagtatagacttgacgaagctccaaaagatattaaggggtattactacaacggggatagtgccggtcttccagccaggctaacactggaattctcagcttttgatatgagcgctcctaccccagcgcggtgctgtccagcaattggaaccctctacaacaccaatacgcttgagtctttcaagacagcggataagaaactcctcctggaacaagctgcgaacgaaatctgggagagtataaagagcggcacagccctcgagaatccagtgctactgaataagttcttgcttctgacattcgccgatcttaagaagtaccacttttattattggttctgttacccggctctttgccttccggaatcactgcctctcatccaagggccagtcggtttggaccaaaggttctccctcaaacagtag

SEQ ID NO: 51755 - DNA, 2031 bp, Artificial Sequence
  derived and/or modified sequence
atggccgcagctactggcgaccccggactgagcaaactgcagtttgcacccttttcttcagccctagacgtcgggttttggcatgaactgacgcagaaaaagctgaacgagtaccggttggatgaggcccctaaggatataaagggatactactacaacggggacagcgcaggtctacctgcccgtctcaccctcgagttctcagctttcgacatgagtgctccaacccccgctcggtgctgtcctgccatcgggaccctgtacaacaccaacaccctcgaatcatttaaaaccgccgataagaagcttctgctggaacaagcagcaaacgaaatttgggaatctataaagtccgggaccgccttggagaaccccgttttgctgaacaagttcttgctcctgactttcgccgacttgaaaaaataccacttctactactggttctgctaccccgctctatgtctgccggagtctctcccccttattcagggaccagttggcttagaccagaggttctctctgaagcagatcgaagcgctggagtgcgcatatgacaatctctgtcagacagaaggtgtgacagccctcccttacttcttgattaaatacgacgagaatatggtgcttgtttccctgctgaaacattacagcgacttttttcagggccagcggactaagattaccatcggggtctacgatccatgtaatctcgcccagtaccctgggtggccactgcgaaacttcttagttcttgcggcacacagatggtctagtagcttccaatccgttgaagtcgtttgttttcgcgacagaacaatgcaaggagccagagacgtggcccactcaatcatcttcgaggtgaagctccccgaaatggcattcagccccgactgtcctaaagccgtgggctgggagaaaaatcagaagggcggaatggggccacgcatggtgaatttaagcgagtgcatggaccctaaaagactggcagaatcttcggtggatctgaacctcaaattaatgtgttggaggcttgtgccaaccttagacctcgacaaagtggtttccgtcaagtgcttgttgctaggggctggcacccttggctgcaatgtggctaggaccctcatgggctggggcgtacgacatataacatttgtagataacgccaaaattagctactcaaatcccgtgcgacagcccctttatgaattcgaggactgcctgggtggcggtaagcccaaggctcttgccgctgccgacaggttacaaaaaatttttccaggcgtaaatgcccgaggcttcaatatgagcatcccaatgcctggccaccctgtaaacttctcttctgtgaccctggaacaggcgaggagagatgtggaacagctcgagcagctgattgagagtcacgatgttgtgttcctccttatggacacgagagaatcgcgctggctgcccgcagtcatagccgcttccaaacgcaagctggtgataaatgctgccttggggttcgatacctttgtcgtgatgagacacggactgaagaaaccgaagcaacaaggggcaggggacctttgtcccaaccacccagtggcctcagcagacctgctggggtcctctctgtttgctaacatccccggatacaagctcgggtgctacttctgtaacgatgttgttgcaccgggtgatagtacacgcgacaggaccctggatcagcaatgtaccgtgagccggccaggcctggccgtaatcgcgggtgccctcgccgtggaacttatggtgtccgttctgcagcaccctgaggggggatatgctattgcttcctccagtgatgaccggatgaatgaacccccaacatctttaggcctcgtcccccatcaggtactggaccagtacgagcgagaaggatttaacttcttagccaaagtgtttaatagctcacacagcttcctggaagatcttacgggcctgacactactccaccaggaaacacaggccgcagagatttgggatatgtcagacgacgagacaatctag

SEQ ID NO: 51756 - DNA, 531 bp, Artificial Sequence
  derived and/or modified sequence
atggccgctgcaacaggagatccaggcctctctaaattgcagttcgcccctttttcctctgccttggatgtaggattctggcatgaattaactcagaagaagctcaatgagtaccgcttggacgaagcgccaaaggacataaaggggtattactacaatggggatagcgctggactccctgctcggctgactctggaattctcagctttcgatatgtccgcaccaacgccagccagatgttgtccggctatcggaactttgtataacaccaacaccctagagagctttaaaactgcggacaaaaaactcctgctggaacaggccgctaatgaaatttgggagagtatcaaaagcggaactgcattggaaaacccagtcctcttgaacaaattcctgctcctgacattcgcagacctcaagaaataccacttttattactggttctgttatcccgcactgtgtctgcctgagtcactcccactcattcagggacctgtcggcctggaccagcgcttcagtcttaaacaatag

SEQ ID NO: 51757 - DNA, 972 bp, Artificial Sequence
  derived and/or modified sequence
ggcatgcctctgctcctttgcgcacgcgcgccgcttcccagtggcaagcgcgggcaggaccgcgttgcgtcatcggggcgcgcgcctcagagagagctgtggttgccggaagttgagcggcgagcagccttgtgagagacatttctgagacctgtatgtcctgcgtctatgattcttccctgatcaaggcttctcaaaccccataatgctggtatccagtgcatccgttctcaaaaactgaagctgatggacaccagattgcatgtgaaggtgaaggatattatagcagaaggaaaccaaaataaaagaaaaacagctcctggaagtaaccaatgagaaggacagataagagtttgaagactgtggatgtgactgcttgttccctggttgacacactgaagaagaaatcatgttgattcagagttggcttggaggcaagaaataatggcggcagctacgggggatcctggactctctaaactgcagtttgccccttttagtagtgccttggatgttgggttttggcatgagttgacccagaagaagctgaacgagtatcggctggatgaagctcccaaggacattaagggttattactacaatggtgactctgctgggctgccagctcgcttaacattggagttcagtgcttttgacatgagtgctcccaccccagcccgttgctgcccagctattggaacactgtataacaccaacacactcgagtctttcaagactgcagataagaagctccttttggaacaagcagcaaatgagatatgggaatccataaaatcaggcactgctcttgaaaaccctgtactcctcaacaagttcctcctcttgacatttgcagatctaaagaagtaccacttctactattggttttgctatcctgccctctgtcttccagagagtttacctctcattcaggggccagtgggtttggatcaaaggttttcactaaaacag

SEQ ID NO: 51758 - DNA, 753 bp, Artificial Sequence
  derived and/or modified sequence
atgcggatcctacagctaatactgctcgctcttgccacaggccttgtaggtggagagactagaattataaaaggctttgaatgtaagcctcacagccagccatggcaagccgccctcttcgagaagaccagactgttgtgcggagcaacacttatcgccccacggtggctgttgacagcagcacattgtctgaaaccccggtacatcgtgcatttaggccaacacaacctgcaaaaagaagaggggtgcgagcagacaagaacagcaaccgagtcattcccgcatccgggcttcaacaactccctccccaataaagaccatagaaatgacattatgctggttaagatggcgtcacctgtgagcatcacctgggccgtacgtcctctgacccttagcagcaggtgcgtcacggcaggcaccagctgcttgatctcaggatgggggagcacctcatctccgcaattaagactgccccacacactccgttgtgccaacataaccattattgagcaccagaagtgtgagaatgcctatcccgggaacattaccgacacaatggtgtgcgcctctgtgcaagaggggggaaaggactcatgtcagggggacagcggtggccccctcgtgtgcaaccagtcccttcagggcattattagctgggggcaggacccatgcgcaatcacacggaaacctggcgtctacacaaaagtgtgtaaatacgttgactggattcaagaaaccatgaagaacaactag

SEQ ID NO: 51759 - DNA, 753 bp, Artificial Sequence
  derived and/or modified sequence
atgaggattctccagctcatcttgctcgctctcgccacaggcttggtgggcggtgaaacgcgtatcatcaagggtttcgagtgcaagccacacagccagccctggcaggcagccctattcgagaaaactcgactgttgtgtggtgccacccttattgcgcctagatggctgctgaccgcagcccactgcctgaagccgcgatatattgtgcacctgggccagcacaacctccaaaaggaagaaggttgtgaacagactaggaccgccacagaatccttcccacatccagggttcaataattcactgcctaacaaggatcacaggaacgatatcatgttggtgaaaatggcaagtccggtgtccatcacttgggcagttcgaccacttacactgtcgagcaggtgcgtcaccgctggaacttcgtgtctgatttctggatggggcagtacaagctcaccacaactccgcctgccacacactctgaggtgcgctaatatcacaattattgaacaccagaaatgcgaaaacgcataccctggaaatataacagacaccatggtgtgtgcttccgtgcaagagggggggaaggatagctgccagggggacagtgggggacctttagtctgtaatcagagcctccaggggatcatcagctggggccaggatccctgcgctatcacgcggaagcccggcgtgtataccaaagtgtgtaagtacgtcgactggatccaagagaccatgaaaaacaattag

SEQ ID NO: 51760 - DNA, 753 bp, Artificial Sequence
  derived and/or modified sequence
atgaggatcctgcagctgatcctgctggccctggccaccggcctggtgggcggggagacccgcatcatcaagggctttgagtgcaagccccacagccagccctggcaggccgccctgtttgagaagacccggctgctgtgtggggccaccctcatcgccccccgctggctgctgacagctgcccactgcctgaagccccgctacatcgtgcacctgggccagcacaacctgcagaaggaggagggctgtgagcagaccaggacagccacagagagcttcccccaccctggcttcaacaacagcctgcccaacaaggaccacagaaatgacatcatgctggtgaagatggccagccctgtgtccatcacctgggccgtgcggcccctgaccctgagcagccgctgtgtgacagctggcaccagctgcctgatcagcggctggggcagcaccagcagcccccagctgcggctgccccacaccctgcgctgtgccaacatcaccatcatcgagcaccagaagtgtgaaaatgcctacccaggcaacatcacagacaccatggtgtgtgcctctgtgcaggagggcggcaaggacagctgccagggcgacagcggcggccccctggtgtgcaaccagagcctgcagggcatcatctcctggggccaggacccctgtgccatcaccaggaagccaggagtgtacaccaaggtgtgcaagtatgtggactggatccaggagaccatgaagaacaactag

SEQ ID NO: 51761 - DNA, 753 bp, Artificial Sequence
  derived and/or modified sequence
atgcggatcctgcagctgatcctgctggccctggccaccggcctggtaggcggcgaaacaaggatcatcaagggcttcgaatgcaaaccacatagtcagccttggcaggcggcactctttgagaagaccaggctcctgtgtggggctacacttatagcacccaggtggctcctgacggcagctcactgcctcaagccccgttacattgtacatcttggacagcataacctgcaaaaagaagagggctgcgaacagacaaggaccgcaactgaaagcttccctcaccccggtttcaacaactctcttccgaataaagatcatcgtaacgacattatgctagtgaagatggcatccccagtgtctatcacatgggctgttagacccctcaccctgtccagcagatgcgtcacagccggcacgagttgtcttatcagtggctgggggtcaacttcttctccacagctcaggctgccacataccctgaggtgtgccaatatcactatcatagagcatcagaaatgtgagaacgcatacccgggaaacatcactgataccatggtttgtgcttccgtgcaagaaggaggaaaggactcctgtcagggagattctgggggtcccctggtttgtaatcagtcactgcagggcattatcagttgggggcaggacccttgcgctattacgcggaagcctggcgtctatacgaaagtatgcaagtatgtggactggattcaggaaacaatgaagaataactag

SEQ ID NO: 51762 - DNA, 753 bp, Artificial Sequence
  derived and/or modified sequence
atgcggatcctgcagctgatcctgctggccctggccaccggcctggtaggcggagagacaaggatcataaaagggtttgaatgcaaacctcacagccaaccatggcaggctgcgctttttgagaaaacaaggctgttatgtggcgctacactcatcgcccctaggtggttactgaccgcagcacactgcctcaagcctaggtatattgtccatttaggccagcataacctgcaaaaggaagagggatgtgagcagaccaggaccgctactgagagtttcccacatccaggttttaataatagtctgcctaacaaagatcatcggaacgatatcatgctcgtcaagatggcttcacccgtcagcatcacttgggcagtgcgcccgctcaccctgtcctctcggtgtgtcacagcaggcacctcctgccttatcagcggttggggctctacaagctcacctcagctgagattgcctcacactttgcgatgcgccaacattaccataatagagcaccagaagtgcgaaaacgcatacccaggaaatataacagacaccatggtctgcgcatccgtgcaggaaggtggtaaggactcctgtcaaggcgatagcggcgggccactggtctgtaatcagagcctccaaggtatcatttcatgggggcaggacccctgcgcaataacccgtaagccaggggtttatactaaggtttgtaagtacgtagactggatccaggaaaccatgaaaaacaattag

SEQ ID NO: 51763 - DNA, 753 bp, Artificial Sequence
  derived and/or modified sequence
atgcggattctgcagctgattcttctagctctggcaacaggcctcgtcggtggggagaccaggattatcaaagggttcgagtgcaagcctcattcacagccatggcaggcggcactcttcgaaaagacccgtctgttgtgtggcgctacactcatagctccacggtggcttctgaccgccgctcactgtctcaagccacgttatatcgtccacctgggccaacataatttgcagaaagaagaaggatgcgagcagacccgcactgccaccgagtcttttccccatcccggattcaacaactccctgcctaacaaggaccatcgcaacgacatcatgctggtgaagatggcttctccggtgtccattacttgggccgtccggcctctaaccctctcaagtcggtgtgtcactgccggaaccagctgcctgatctctggctggggaagtacatcttctccacagctgcgactgccccatactctgagatgtgccaacattacgattatcgagcaccaaaagtgtgaaaatgcttatccaggcaacataaccgacaccatggtatgcgccagtgtacaggaaggagggaaagactcatgccagggggattctgggggacccctggtgtgcaatcagtcccttcaggggatcatatcatgggggcaggacccttgcgcaattacccgcaaacccggagtatacaccaaagtgtgcaagtatgtggattggattcaggagactatgaaaaacaactag

SEQ ID NO: 51764 - DNA, 753 bp, Artificial Sequence
  derived and/or modified sequence
atgcgaatccttcaactgatcctactggctctcgctacaggacttgtgggcggagagacccggatcatcaaaggcttcgaatgcaagccacatagccagccctggcaagccgcattgttcgagaagacgagacttctgtgcggcgcaacactcattgcaccacgttggttactgacagcagctcactgccttaagcccagatacatcgtccacttggggcagcacaacctccagaaggaggaggggtgtgagcagaccaggaccgccaccgagtcatttccccatccgggattcaacaacagcctgccaaacaaagatcaccgaaacgacatcatgctggtcaaaatggcctcccccgtgtcaatcacatgggccgtgcgacctctgaccttgtcatcccggtgcgtcactgctgggacatcttgcctgatttccgggtggggaagcacctcgtccccacagctgcgattaccccatactctgcgatgtgcaaacattacaataatcgagcatcaaaaatgcgagaatgcctaccctggaaacatcacggatacaatggtttgcgctagcgtgcaggaaggtggcaaagattcgtgccaaggagactctggtggccctctcgtgtgcaaccagagcttgcaaggcattatttcctggggccaggacccatgtgcgataaccaggaagcctggagtgtacacaaaagtgtgtaaatatgttgattggatccaggaaacaatgaaaaacaattag

SEQ ID NO: 51765 - DNA, 753 bp, Artificial Sequence
  derived and/or modified sequence
atgagaatcctgcagctgatcctgctggccctggccaccggcctggtgggcggcgagaccagaatcatcaagggcttcgagtgcaagccccacagccagccctggcaggccgccctgttcgagaagaccagactgctgtgcggcgccaccctgatcgcccccagatggctgctgaccgccgcccactgcctgaagcccagatacatcgtgcacctgggccagcacaacctgcagaaggaggagggctgcgagcagaccagaaccgccaccgagagcttcccccaccccggcttcaacaacagcctgcccaacaaggaccacagaaacgacatcatgctggtgaagatggccagccccgtgagcatcacctgggccgtgagacccctgaccctgagcagcagatgcgtgaccgccggcaccagctgcctgatcagcggctggggcagcaccagcagcccccagctgagactgccccacaccctgagatgcgccaacatcaccatcatcgagcaccagaagtgcgagaacgcctaccccggcaacatcaccgacaccatggtgtgcgccagcgtgcaggagggcggcaaggacagctgccagggcgacagcggcggccccctggtgtgcaaccagagcctgcagggcatcatcagctggggccaggacccctgcgccatcaccagaaagcccggcgtgtacaccaaggtgtgcaagtacgtggactggatccaggagaccatgaagaacaactag

SEQ ID NO: 51766 - DNA, 1551 bp, Artificial Sequence
  derived and/or modified sequence
atggagaacggccagagtaccgcggccaaactaggactgccaccattaacacctgagcagcaagaggccttgcagaaggccaagaagtacgcgatggagcagtctattaaaagtgtcttggtaaagcagactatagcccatcagcagcaacaactgaccaatttgcagatggcggccgtcaccatgggtttcggggaccctctctctcctctgcagtcaatggccgcacagagacaaagggccctggcaatcatgtgcagagtttatgtggggtctatatactatgaactgggcgaagacaccatcagacaagctttcgcacctttcggacccattaagtccatagacatgtcctgggattccgtcaccatgaagcataagggattcgctttcgtcgaatacgaggtgccagaagccgcgcagctggcactcgagcagatgaatagcgtcatgttgggggggagaaatatcaaagtgggccgccccagtaatatcggccaggctcagccaattatcgatcagcttgctgaagaagccagggctttcaaccgaatctacgtggctagcgtacaccaggacctgtctgacgacgacattaagtcagtgttcgaagccttcggaaagattaaatcttgtacgctggctagggacccgactacaggaaagcataagggctatgggtttatcgaatacgagaaggctcaatcctcacaggatgccgtctctagtatgaacctctttgatctaggcgggcaatatctgcgggtaggtaaggctgttactcctcctatgcccctgctcactccagcaaccccaggaggcttacccccagccgctgccgtggcggctgctgccgcaaccgccaagattactgcccaggaggccgttgctggagccgccgtgctgggcacattaggcacccctggccttgtgtcaccggcgcttacgctagcacagccccttgggacactgccacaggcggtcatggccgcacaggcccctggcgtgatcactggggtgacaccagctaggcctcccatccctgttaccattccttctgtgggagttgtgaatcctatccttgcctcacctcccaccctgggtctgctggaacccaagaaggagaaagaagaggaggaactcttcccagagtcagagcgccctgagatgttgtctgagcaagaacacatgtccattagcggcagcagtgcaaggcatatggtgatgcagaaactgctgcgcaagcaggaaagcaccgtgatggtgttgagaaacatggtggatccgaaagatatcgatgacgatcttgaaggcgaagtgactgaagaatgcggcaagtttggagcagtgaatcgcgtcattatctatcaggagaaacagggagaagaggaagacgctgagataattgtcaagatttttgttgagttcagcatcgcctctgaaacacacaaggctattcaggcgctgaatgggcgttggttcgccggacgaaaagtcgttgcagaggtgtacgatcaggagcgcttcgataattctgacctcagcgcttag

SEQ ID NO: 51767 - DNA, 1551 bp, Artificial Sequence
  derived and/or modified sequence
atggagaatggccagagcacagctgccaagctgggcctgccccccctgaccccagagcagcaggaggccctgcagaaggccaagaagtatgccatggagcagagcatcaagtctgtgctggtgaagcagaccatcgcccaccagcagcagcagctgaccaacctgcagatggctgctgtgaccatgggctttggagaccccctgagccccctgcagagcatggccgcccagaggcagagggccctggccatcatgtgccgggtgtatgtgggcagcatctactatgagctgggggaggacaccatccggcaggcctttgcccccttcggccccatcaagagcattgacatgtcctgggacagcgtgaccatgaagcacaagggctttgcctttgtggagtatgaggtgcctgaggccgcccagctggccctggagcagatgaacagcgtgatgctgggcggcaggaacatcaaggtgggccggcccagcaacatcggccaggcccagcccatcatcgaccagctggccgaggaggcccgggccttcaaccgcatctacgtggcctctgtgcaccaggacctgagtgatgatgacatcaagtctgtgtttgaggccttcggcaagatcaagagctgcaccctggcccgggaccccaccaccgggaagcacaagggctacggcttcattgaatatgagaaggcccagagcagccaggatgctgtgtcctccatgaacctgtttgacctgggcggccagtacctgcgggtgggcaaggctgtgaccccacccatgcccctgctgaccccagccacccctgggggcctgcccccagctgctgctgtggccgctgctgctgccacagccaagatcacagcccaggaggccgtggccggggctgctgtgctgggcaccctgggcaccccaggcctggtgtccccagccctgaccctggcccagcccctgggcaccctgccccaggccgtgatggccgcccaggcccctggggtcatcaccggggtgaccccagcccggccccccatccctgtgaccatccccagcgtgggcgtggtgaaccccatcctggccagcccccccaccctgggcctgctggagcccaagaaggagaaggaggaggaggagctgtttcctgagagcgagaggcctgagatgctgtctgagcaggagcacatgagcatcagcggcagcagcgcccggcacatggtgatgcagaagctgctgaggaagcaggagagcacagtgatggtgctgaggaacatggtggaccccaaggacattgatgatgacctggagggggaggtgacagaagaatgtgggaagtttggagctgtgaacagagtcatcatctaccaggagaagcagggcgaggaggaggatgctgagatcatcgtgaagatctttgtggagttcagcatcgccagcgagacccacaaggccatccaggccctgaatggccgctggtttgctggcaggaaggtggtggccgaggtgtatgaccaggagagatttgacaacagcgacctgagcgcctag

SEQ ID NO: 51768 - DNA, 1551 bp, Artificial Sequence
  derived and/or modified sequence
atggagaacggccagagcaccgccgccaagctgggcctgccccccctgacacccgaacagcaggaagctcttcaaaaggcaaagaaatacgccatggaacaatcgataaaatccgtcctagttaagcagactattgctcaccagcagcagcagcttacaaacctgcagatggcggccgtgaccatggggtttggcgatccactgtctcccctacagagcatggcagcgcagcggcagagagctttagctataatgtgccgtgtatacgtcggttcaatatactatgaactgggagaagacactatccggcaggccttcgccccttttggtcctattaagtccatcgacatgtcatgggactctgttacaatgaagcacaaaggtttcgcctttgtggagtacgaagtccctgaggccgcgcagcttgcactggagcagatgaactccgtgatgctcggtggacgaaatatcaaagtcgggcgcccctcaaatatagggcaagcgcagccaataatcgaccagctggccgaggaggcccgggcctttaatcgaatttacgttgcgtcagtgcaccaggatctatctgacgatgatataaagagtgtttttgaagcctttgggaaaatcaaatcatgcacacttgcaagggatcccacaactgggaagcataagggctatggatttattgaatacgagaaagctcagtcctcacaggacgctgttagttccatgaacttgtttgacttaggggggcagtacctaagggtcggcaaggccgtcactccacccatgccattactgactcccgctaccccgggggggctgcctccagcagccgccgtggcggccgccgccgctactgcgaagataacagcccaggaagccgtggctggcgctgccgtgttaggaaccctgggcacgccaggtttagtatcaccagcacttacgctggcccagcccctcggaaccctcccccaggccgtgatggccgcccaggccccaggcgtgatcaccggagtgaccccagctcgaccccccatcccagtgactataccatcggtgggggtcgtcaaccccatcctggcctcaccacccacactgggtctactggagcctaagaaagagaaggaagaggaagaactttttccggaaagcgaacgtccagagatgctcagcgagcaggaacacatgtcaataagtggcagctccgcacgccacatggtgatgcagaaattgcttcgcaaacaagagagcactgtgatggtgctgcgtaacatggtagatcccaaagatatcgacgacgatttagaaggggaggtcacagaggagtgtggtaaattcggcgccgttaatagagtgataatctaccaggagaagcagggggaagaggaggatgcagagatcattgtgaaaatcttcgtagaattttctatcgcttccgaaacccacaaagccatccaagcactgaacggaagatggtttgctggacggaaggtggtggcggaagtgtacgatcaggaacgattcgacaatagtgatctgtctgcctag

SEQ ID NO: 51769 - DNA, 1551 bp, Artificial Sequence
  derived and/or modified sequence
atggagaatgggcagtccactgctgccaagcttgggttgcctccgctgactccagaacagcaggaggcgctgcaaaaggctaaaaagtatgcaatggaacaatcaatcaagtctgtcctggttaagcagactatagcccatcagcaacaacaactcacaaatttgcaaatggccgctgtgaccatgggatttggggatcctctgtctcctctgcagtcaatggcagcacaacggcagcgtgccttggcaatcatgtgccgagtttatgtgggaagcatttactatgagctgggggaggatactatacgacaggcattcgcacctttcggaccgataaagtcgatagatatgtcctgggacagcgtcactatgaaacacaaagggtttgctttcgtcgaatacgaagtccccgaagcagcccagctggctctcgagcagatgaacagcgttatgttaggtggacggaacattaaggtcggcagaccctccaatataggacaagcccagcccataatcgaccagctcgcagaagaagctagggcttttaacagaatctatgtggcgagcgtgcaccaagacttatctgacgatgacataaaaagcgtgtttgaagcctttggtaagatcaagtcctgtactttggccagggaccccaccactggtaaacacaagggctatggctttatagagtacgaaaaagctcagtcatcacaggacgcggttagtagcatgaacctttttgaccttggcggacagtacctaagagtaggaaaggccgttactcccccaatgccactccttaccccggctacgcccggagggttgcctcccgctgctgccgttgccgcagccgcagcaactgctaaaatcactgcccaggaagcagtggccggagctgccgtcctaggaacactgggaacccctggccttgtgagcccagctctgactctggcccagccactgggcaccctcccccaagctgtcatggctgctcaggccccaggtgtaatcacaggcgtgacgccagcccgaccaccaatccccgttaccataccctcagttggagtagtcaacccaattttagcgtctccccctactctggggctgttagagcctaagaaggaaaaggaagaagaggagctctttcccgagagcgagagaccagagatgttatcagagcaggaacatatgtcaatttcagggtcttccgcgagacatatggtgatgcagaaactgctgcggaagcaagagtccaccgtaatggtgttacggaacatggtggatcccaaggacatagatgatgatttagaaggcgaggtgaccgaggaatgtggaaaatttggcgcagtaaatagggtgatcatctatcaggagaaacagggtgaggaagaagacgccgagatcatagtgaagatttttgtggaattttccatcgcctctgagacccataaggccattcaagctctaaacgggaggtggttcgctgggagaaaggtggtggccgaggtgtacgaccaggaacggtttgacaacagcgacctctcagcgtag

SEQ ID NO: 51770 - DNA, 1551 bp, Artificial Sequence
  derived and/or modified sequence
atggagaacggccagagcaccgccgccaagctgggcctgccccccctgacccccgagcagcaggaggccctgcagaaggccaagaagtacgccatggagcagagcatcaagagcgtgctggtgaagcagaccatcgcccaccagcagcagcagctgaccaacctgcagatggccgccgtgaccatgggcttcggcgaccccctgagccccctgcagagcatggccgcccagagacagagagccctggccatcatgtgcagagtgtacgtgggcagcatctactacgagctgggcgaggacaccatcagacaggccttcgcccccttcggccccatcaagagcatcgacatgagctgggacagcgtgaccatgaagcacaagggcttcgccttcgtggagtacgaggtgcccgaggccgcccagctggccctggagcagatgaacagcgtgatgctgggcggcagaaacatcaaggtgggcagacccagcaacatcggccaggcccagcccatcatcgaccagctggccgaggaggccagagccttcaacagaatctacgtggccagcgtgcaccaggacctgagcgacgacgacatcaagagcgtgttcgaggccttcggcaagatcaagagctgcaccctggccagagaccccaccaccggcaagcacaagggctacggcttcatcgagtacgagaaggcccagagcagccaggacgccgtgagcagcatgaacctgttcgacctgggcggccagtacctgagagtgggcaaggccgtgaccccccccatgcccctgctgacccccgccacccccggcggcctgccccccgccgccgccgtggccgccgccgccgccaccgccaagatcaccgcccaggaggccgtggccggcgccgccgtgctgggcaccctgggcacccccggcctggtgagccccgccctgaccctggcccagcccctgggcaccctgccccaggccgtgatggccgcccaggcccccggcgtgatcaccggcgtgacccccgccagaccccccatccccgtgaccatccccagcgtgggcgtggtgaaccccatcctggccagcccccccaccctgggcctgctggagcccaagaaggagaaggaggaggaggagctgttccccgagagcgagagacccgagatgctgagcgagcaggagcacatgagcatcagcggcagcagcgccagacacatggtgatgcagaagctgctgagaaagcaggagagcaccgtgatggtgctgagaaacatggtggaccccaaggacatcgacgacgacctggagggcgaggtgaccgaggagtgcggcaagttcggcgccgtgaacagagtgatcatctaccaggagaagcagggcgaggaggaggacgccgagatcatcgtgaagatcttcgtggagttcagcatcgccagcgagacccacaaggccatccaggccctgaacggcagatggttcgccggcagaaaggtggtggccgaggtgtacgaccaggagagattcgacaacagcgacctgagcgcctag

SEQ ID NO: 51771 - protein, 363 aa, Artificial Sequence
  derived and/or modified sequence
MTGRKRKWGETGTGSGAAPAAALRWSNMSDALANAVCQRCQARFSPAERIVNSNGELYHEHCFVCAQCFRPFPEGLFYEFEGRKYCEHDFQMLFAPCCGSCGEFIIGRVIKAMNNNWHPGCFRCELCDVELADLGFVKNAGRHLCRPCHNREKAKGLGKYICQRCHLVIDEQPLMFRSDAYHPDHFNCTHCGKELTAEARELKGELYCLPCHDKMGVPICGACRRPIEGRVVNALGKQWHVEHFVCAKCEKPFLGHRHYEKKGLAYCETHYNQLFGDVCYNCSHVIEGDVVSALNKAWCVSCFSCSTCNSKLTLKNKFVEFDMKPVCKRCYEKFPLELKKRLKKLSELTSRKAQPKATDLNSA

SEQ ID NO: 51772 - DNA, 1092 bp, Artificial Sequence
  derived and/or modified sequence
atgaccggcagaaagagaaagtggggcgagaccggcaccggcagcggcgccgcccccgccgccgccctgagatggagcaacatgagcgacgccctggccaacgccgtgtgccagagatgccaggccagattcagccccgccgagagaatcgtgaacagcaacggcgagctgtaccacgagcactgcttcgtgtgcgcccagtgcttcagacccttccccgagggcctgttctacgagttcgagggcagaaagtactgcgagcacgacttccagatgctgttcgccccctgctgcggcagctgcggcgagttcatcatcggcagagtgatcaaggccatgaacaacaactggcaccccggctgcttcagatgcgagctgtgcgacgtggagctggccgacctgggcttcgtgaagaacgccggcagacacctgtgcagaccctgccacaacagagagaaggccaagggcctgggcaagtacatctgccagagatgccacctggtgatcgacgagcagcccctgatgttcagaagcgacgcctaccaccccgaccacttcaactgcacccactgcggcaaggagctgaccgccgaggccagagagctgaagggcgagctgtactgcctgccctgccacgacaagatgggcgtgcccatctgcggcgcctgcagaagacccatcgagggcagagtggtgaacgccctgggcaagcagtggcacgtggagcacttcgtgtgcgccaagtgcgagaagcccttcctgggccacagacactacgagaagaagggcctggcctactgcgagacccactacaaccagctgttcggcgacgtgtgctacaactgcagccacgtgatcgagggcgacgtggtgagcgccctgaacaaggcctggtgcgtgagctgcttcagctgcagcacctgcaacagcaagctgaccctgaagaacaagttcgtggagttcgacatgaagcccgtgtgcaagagatgctacgagaagttccccctggagctgaagaagagactgaagaagctgagcgagctgaccagcagaaaggcccagcccaaggccaccgacctgaacagcgcctag

SEQ ID NO: 51773 - DNA, 1092 bp, Artificial Sequence
  derived and/or modified sequence
atgaccggcagaaagcgaaagtggggagagactgggaccgggagtggtgctgctcctgccgccgccctacggtggtccaacatgagtgacgctcttgccaatgccgtttgtcagcggtgccaggctaggttctccccagccgagaggatcgtgaatagcaatggcgagctctaccacgagcattgttttgtgtgtgcgcagtgcttcaggccattccccgaaggactcttctacgaatttgaaggtagaaagtactgcgaacatgatttccagatgttattcgcaccatgttgcggctcctgcggtgagtttatcattggcagggttatcaaagctatgaataataactggcatcccggatgtttccggtgtgaactctgtgacgtggaactggcagatctgggtttcgtgaaaaacgccgggcgacacctctgcagaccttgccacaatagagagaaggccaaaggcctcggaaaatatatatgccagaggtgtcaccttgtgattgacgaacagcctttgatgttccgaagcgacgcataccatcccgaccatttcaactgtactcactgcggtaaggaactgacagccgaggccagggaactgaaaggtgagctttattgcctgccatgccatgacaagatgggggttccgatttgtggcgcgtgccggcgtcccattgaggggagggtcgtaaacgctctcgggaagcagtggcatgtggaacactttgtgtgtgcaaagtgcgaaaaaccatttctagggcaccggcactatgaaaagaagggactggcttattgcgaaacacactacaaccagctatttggcgacgtttgttacaattgctcccacgtaatagagggggacgttgtctcagccctaaacaaagcatggtgcgtgtcctgctttagctgtagcacatgtaacagtaagctgactctgaaaaacaaatttgtggaatttgacatgaaaccagtatgcaaacggtgttatgagaaattcccccttgagttaaaaaagcggctgaagaagttgtctgaactcacaagtcggaaagcacagcctaaagctaccgatctgaactcagcttag

SEQ ID NO: 51774 - DNA, 1092 bp, Artificial Sequence
  derived and/or modified sequence
atgacaggaaggaaacgcaaatggggcgagaccggaaccggcagcggcgcggccccggctgccgctttacggtggtccaacatgtcagatgcccttgctaacgcagtgtgccagcggtgccaggctcggttcagcccagctgaacgaattgttaattccaatggcgagctgtaccatgagcattgtttcgtgtgtgcccaatgcttccgccctttccctgagggccttttctacgagtttgagggacgtaagtattgtgagcatgattttcaaatgctgttcgccccatgttgcggtagttgtggtgagttcataataggaagagtgattaaggctatgaacaataattggcaccctggctgctttcgctgtgagctttgtgatgtggagctggctgaccttgggtttgtgaagaacgcaggccgacatctgtgtagaccttgccacaatcgagagaaagccaagggactcggtaagtacatatgtcagcggtgtcatctcgtgattgacgaacagccattgatgttccgctccgatgcttaccaccccgaccactttaattgcacacattgtgggaaagaattgacggctgaggctcgagaattgaagggcgagctttattgcctgccttgtcatgacaagatgggagtccccatctgcggggcttgtaggcggccaatagaggggcgtgtggttaacgctctcggtaagcagtggcatgtcgagcactttgtttgcgccaaatgcgaaaaacctttcctaggccacagacattacgagaagaagggtcttgcatactgtgaaactcactataaccaattgttcggtgatgtgtgctataattgtagccatgttatcgagggggatgtggtgagcgccctgaataaggcctggtgcgtttcatgcttcagctgcagtacatgcaatagcaagctgactcttaagaacaagtttgtggaatttgacatgaaaccagtgtgtaagcgatgctacgagaagttcccactggagctgaaaaaacggttaaagaaactgtccgagctgacaagtaggaaggcccagccaaaagccaccgacctcaacagcgcctag

SEQ ID NO: 51775 - DNA, 2500 bp, Artificial Sequence
  derived and/or modified sequence
aagtgcatgactcaggactgggtgggagggggctgtccctgaggccctggtctcccccagccaagtcctggcagggggatgctgttcttcaggatcccatgacctggggctcttggggagccccagcccggagagtgacctgtggctttgctggggaaaggggcttggagggtacagggcagtgtccaggattgcagtctcaaatccgaggcccacaggggagctgcctctgtgatcgccattaaggctgtggcctggggtctcagggcagcccaggaaccaaaaatagcctgtaacttgtcactttgtaagtcctgccctccagacacacttccctttcttctccccaagcctctcttcccagttagctcccctgacttggagtcacctctaagccttggcccaggcccctctgcagtgagatggagggactcatcccccggagagtggcatctgcaggcccactggctgcctgtggtcaccccctagggttctagcggggctgcctcccattttcctcagagcatccctgccagctggctggttctcactctcctgttttctaggaaaagaaagtggggagagacaggaacagggtccggagcagccccagcagcagcattgaggtggagcaatatgtcggacgccttggccaacgccgtgtgccagcgctgccaggcccgcttctcccccgccgagcgcattgtcaacagcaatggggagctgtaccatgagcactgcttcgtgtgtgcccagtgcttccggcccttccccgaggggctcttctatgagtttgaaggccggaagtactgcgaacacgacttccaaatgctgtttgctccgtgctgtggatcctgcggtgagttcatcattggccgcgtcatcaaggccatgaacaacaactggcacccgggctgcttccgctgcgagctgtgtgatgtggagctggctgacctgggctttgtgaagaatgccggcaggcatctctgccggccttgccacaaccgtgagaaggccaagggcctgggcaagtacatctgccagcggtgccacctggtcatcgacgagcagcccctcatgttcaggagcgacgcctaccaccctgaccacttcaactgcacccactgtgggaaggagctgacagccgaggcccgcgagctgaagggtgagctctactgcctgccctgccatgacaagatgggcgtccccatctgcggggcctgccgccggcccatcgagggccgagtggtcaacgcgctgggcaagcagtggcacgtggagcactttgtctgtgccaagtgtgagaagccattcctggggcaccggcactatgagaagaagggcctggcctactgcgagactcactacaaccagctcttcggggacgtctgctacaactgcagccatgtgattgaaggcgatgtggtgtcggccctcaacaaggcctggtgtgtgagctgcttctcctgctccacctgcaacagcaagctcaccctgaagaacaagtttgtggagttcgacatgaagcccgtgtgtaagaggtgctacgagaagttcccgctggagctgaagaagcggctgaagaagctgtcggagctgacctcccgcaaggcccagcccaaggccacagacctcaactctgcctgaaggccctcttgcgcagctgcctctcggcccctccgccttctcccctcctgctgtccatgcttggccccctcgtccccatccacctgtgccctccgcatcttaccctccctttctctttcctcattgccttctcccttcctgttccctcatctctgccttccccatgtctctcctctccttggccgtggcttctgtctgtgaggaggcaggagctggggagtgggagcctatgaccccacgtctgacagccatgtccacctgtgcccacagcttccgcccacagacctccagggacaggagcaaattgcaccacagctccccgcctggcctggccctccccaggcggctcagtggctcatgctgtcctgtgagagcccctgccccagagcggccccactaagcgcatgtggctcctgggctacccacagccagggcagcctgctggagccacagggccagggccatgcagatggaggcctctgggagccacctccaatccctcaccactcactcaaccagtggcacagtgtccttgtgcccacactgagccagcaagtcctgctgtccacacccacaagctacctggagggacaggacccacctccatccttcggaaggccttcctggaatcccaccttggcctccgccctcggttccgccccgcccctctccccccgaccttggggcttgtgtcgagcccttgggtggggccaggaggaggtgatggcgtcagaggaggtgtggtcagaggtgacttgttcccacctccagggaggacgcttcgtcttcggccagcgcagacctggtgtttgtttgttgggctcacgcttgcacaatgaaggcttgttcacac

SEQ ID NO: 51776 - DNA, 2315 bp, Artificial Sequence
  derived and/or modified sequence
ctatactcccgcaacctcccaccgtcacctccccaacacccccaccaccctcagccttgacctccccatcccaccccgccccgcgggccccaccctgccacccccgcccacccctctcgcgggcggagcggctcttggccttttttgggcgtctccctgctccgcggcccgggctggcgggcgggcgctcggctggcggctgcagcagcagagggagacccgcggcaaccccggcaacccagggctcggcgtcgctgccaccatgacgggaagatgaggtcaccagaggccacagaggctgagccactcaggaggccagtcacaggtccaccagtgtccggccagtgtttgtccctgcagccctttctggaacctagctgggaaaagaaagtggggagagacaggaacagggtccggagcagccccagcagcagcattgaggtggagcaatatgtcggacgccttggccaacgccgtgtgccagcgctgccaggcccgcttctcccccgccgagcgcattgtcaacagcaatggggagctgtaccatgagcactgcttcgtgtgtgcccagtgcttccggcccttccccgaggggctcttctatgagtttgaaggccggaagtactgcgaacacgacttccaaatgctgtttgctccgtgctgtggatcctgcggtgagttcatcattggccgcgtcatcaaggccatgaacaacaactggcacccgggctgcttccgctgcgagctgtgtgatgtggagctggctgacctgggctttgtgaagaatgccggcaggcatctctgccggccttgccacaaccgtgagaaggccaagggcctgggcaagtacatctgccagcggtgccacctggtcatcgacgagcagcccctcatgttcaggagcgacgcctaccaccctgaccacttcaactgcacccactgtgggaaggagctgacagccgaggcccgcgagctgaagggtgagctctactgcctgccctgccatgacaagatgggcgtccccatctgcggggcctgccgccggcccatcgagggccgagtggtcaacgcgctgggcaagcagtggcacgtggagcactttgtctgtgccaagtgtgagaagccattcctggggcaccggcactatgagaagaagggcctggcctactgcgagactcactacaaccagctcttcggggacgtctgctacaactgcagccatgtgattgaaggcgatgtggtgtcggccctcaacaaggcctggtgtgtgagctgcttctcctgctccacctgcaacagcaagctcaccctgaagaacaagtttgtggagttcgacatgaagcccgtgtgtaagaggtgctacgagaagttcccgctggagctgaagaagcggctgaagaagctgtcggagctgacctcccgcaaggcccagcccaaggccacagacctcaactctgcctgaaggccctcttgcgcagctgcctctcggcccctccgccttctcccctcctgctgtccatgcttggccccctcgtccccatccacctgtgccctccgcatcttaccctccctttctctttcctcattgccttctcccttcctgttccctcatctctgccttccccatgtctctcctctccttggccgtggcttctgtctgtgaggaggcaggagctggggagtgggagcctatgaccccacgtctgacagccatgtccacctgtgcccacagcttccgcccacagacctccagggacaggagcaaattgcaccacagctccccgcctggcctggccctccccaggcggctcagtggctcatgctgtcctgtgagagcccctgccccagagcggccccactaagcgcatgtggctcctgggctacccacagccagggcagcctgctggagccacagggccagggccatgcagatggaggcctctgggagccacctccaatccctcaccactcactcaaccagtggcacagtgtccttgtgcccacactgagccagcaagtcctgctgtccacacccacaagctacctggagggacaggacccacctccatccttcggaaggccttcctggaatcccaccttggcctccgccctcggttccgccccgcccctctccccccgaccttggggcttgtgtcgagcccttgggtggggccaggaggaggtgatggcgtcagaggaggtgtggtcagaggtgacttgttcccacctccagggaggacgcttcgtcttcggccagcgcagacctggtgtttgtttgttgggctcacgcttgcacaatgaaggcttgttcacac

SEQ ID NO: 51777 - DNA, 2335 bp, Artificial Sequence
  derived and/or modified sequence
ttttgcagtctgtccgtggatactgtgaacatcaggctactcggccgggctcctgcgctcagggcttcgagaaatgctcattttggggctgcccctctgccggcctctctggattcagagggcagccgctgctccttttgttttgtgggcctggctctgggcccggagcagcacctccctggggaggccgcctttccttccgcggcttcttccgtctcctcctgaccccaaggtgcctccggcctctgcctccagctaaggacctctggccaagcctcctgcccagggagaggtgaagctgccgtgcctgggtgccccgtggtggccggacactcctggcggctgctcagtcttgcacgtggctgtgccaagcgggccaggcagctgctatttccctcagagaagttgctggcggcgctcagggaaggaagcacccgaggaggcggagcggcatctcagccacagagcaatatgtcggacgccttggccaacgccgtgtgccagcgctgccaggcccgcttctcccccgccgagcgcattgtcaacagcaatggggagctgtaccatgagcactgcttcgtgtgtgcccagtgcttccggcccttccccgaggggctcttctatgagtttgaaggccggaagtactgcgaacacgacttccaaatgctgtttgctccgtgctgtggatcctgcggtgagttcatcattggccgcgtcatcaaggccatgaacaacaactggcacccgggctgcttccgctgcgagctgtgtgatgtggagctggctgacctgggctttgtgaagaatgccggcaggcatctctgccggccttgccacaaccgtgagaaggccaagggcctgggcaagtacatctgccagcggtgccacctggtcatcgacgagcagcccctcatgttcaggagcgacgcctaccaccctgaccacttcaactgcacccactgtgggaaggagctgacagccgaggcccgcgagctgaagggtgagctctactgcctgccctgccatgacaagatgggcgtccccatctgcggggcctgccgccggcccatcgagggccgagtggtcaacgcgctgggcaagcagtggcacgtggagcactttgtctgtgccaagtgtgagaagccattcctggggcaccggcactatgagaagaagggcctggcctactgcgagactcactacaaccagctcttcggggacgtctgctacaactgcagccatgtgattgaaggcgatgtggtgtcggccctcaacaaggcctggtgtgtgagctgcttctcctgctccacctgcaacagcaagctcaccctgaagaacaagtttgtggagttcgacatgaagcccgtgtgtaagaggtgctacgagaagttcccgctggagctgaagaagcggctgaagaagctgtcggagctgacctcccgcaaggcccagcccaaggccacagacctcaactctgcctgaaggccctcttgcgcagctgcctctcggcccctccgccttctcccctcctgctgtccatgcttggccccctcgtccccatccacctgtgccctccgcatcttaccctccctttctctttcctcattgccttctcccttcctgttccctcatctctgccttccccatgtctctcctctccttggccgtggcttctgtctgtgaggaggcaggagctggggagtgggagcctatgaccccacgtctgacagccatgtccacctgtgcccacagcttccgcccacagacctccagggacaggagcaaattgcaccacagctccccgcctggcctggccctccccaggcggctcagtggctcatgctgtcctgtgagagcccctgccccagagcggccccactaagcgcatgtggctcctgggctacccacagccagggcagcctgctggagccacagggccagggccatgcagatggaggcctctgggagccacctccaatccctcaccactcactcaaccagtggcacagtgtccttgtgcccacactgagccagcaagtcctgctgtccacacccacaagctacctggagggacaggacccacctccatccttcggaaggccttcctggaatcccaccttggcctccgccctcggttccgccccgcccctctccccccgaccttggggcttgtgtcgagcccttgggtggggccaggaggaggtgatggcgtcagaggaggtgtggtcagaggtgacttgttcccacctccagggaggacgcttcgtcttcggccagcgcagacctggtgtttgtttgttgggctcacgcttgcacaatgaaggcttgttcacac

SEQ ID NO: 51778 - DNA, 596 bp, Artificial Sequence
  derived and/or modified sequence
gcgctcggctggcggctgcagcagcagagggagacccgcggcaaccccggcaacccagggctcggcgtcgctgccaccatgacgggaaggaaaagaaagtggggagagacaggaacagggtccggagcagccccagcagcagcattgaggtggagcaatatgtcggacgccttggccaacgccgtgtgccagcgctgccaggcccgcttctcccccgccgagcgcattgtcaacagcaatggggagctgtaccatgagcactgcttcgtgtgtgcccagtgcttccggcccttccccgaggggctcttctatgagtttgaaggccggaagtactgcgaacacgacttccaaatgctgtttgctccgtgctgtggatcctgcggtgagttcatcattggccgcgtcatcaaggccatgaacaacaactggcacccgggctgcttccgctgcgagctgtgtgatgtggagctggctgacctgggctttgtgaagaatgccggcaggcatctctgccggccttgccacaaccgtgagaaggccaagggcctgggcaagtacatctgccagcggtgccacctggtcatcgacgagcagcc

SEQ ID NO: 51779 - DNA, 1704 bp, Artificial Sequence
  derived and/or modified sequence
gactgcgtggactcggcggtcccgggtgcctcgggagggagtcagtgcccagatccgcggtgggaactccgggctaggaaagcccgggagggaggtggtctcagcatcgcccccacgcctaccatctcctgcacgcgtttgcggttggggcggcccagggactgcagagggggcgccgggcggggcgtcccggcggggctgtgggggtgggggtgcttgttcgcgtttattataactttactccctttaaaaggaaagctatgcccgggctggcgggcgggcgctcggctggcggctgcagcagcagagggagacccgcggcaaccccggcaacccagggctcggcgtcgctgccaccatgacgggaaggaaaagaaagtggggagagacaggaacagggtccggagcagccccagcagcagcattgaggtggagcaatatgtcggacgccttggccaacgccgtgtgccagcgctgccaggcccgcttctcccccgccgagcgcattgtcaacagcaatggggagctgtaccatgagcactgcttcgtgtgtgcccagtgcttccggcccttccccgaggggctcttctatgagtttgaaggccggaagtactgcgaacacgacttccaaatgctgtttgctccgtgctgtggatcctgcggtgagttcatcattggccgcgtcatcaaggccatgaacaacaactggcacccgggctgcttccgctgcgagctgtgtgatgtggagctggctgacctgggctttgtgaagaatgccggcaggcatctctgccggccttgccacaaccgtgagaaggccaagggcctgggcaagtacatctgccagcggtgccacctggtcatcgacgagcagcccctcatgttcaggagcgacgcctaccaccctgaccacttcaactgcacccactgtgggaaggagctgacagccgaggcccgcgagctgaagggtgagctctactgcctgccctgccatgacaagatgggcgtccccatctgcggggcctgccgccggcccatcgagggccgagtggtcaacgcgctgggcaagcagtggcacgtggagcactttgtctgtgccaagtgtgagaagccattcctggggcaccggcactatgagaagaagggcctggcctactgcgagactcactacaaccagctcttcggggacgtctgctacaactgcagccatgtgattgaaggcgatgtggtgtcggccctcaacaaggcctggtgtgtgagctgcttctcctgctccacctgcaacagcaagctcaccctgaagaacaagtttgtggagttcgacatgaagcccgtgtgtaagaggtgctacgagaagttcccgctggagctgaagaagcggctgaagaagctgtcggagctgacctcccgcaaggcccagcccaaggccacagacctcaactctgcctgaaggccctcttgcgcagctgcctctcggcccctccgccttctcccctcctgctgtccatgcttggccccctcgtccccatccacctgtgccctccgcatcttaccctccctttctctttcctcattgccttctcccttcctgttccctcatctctgccttccccatgtctctcctctccttggccgtggcttctgtctgtgaggaggcaggagctggggagtgggagcctatgaccccacgtctgacagccatgt

SEQ ID NO: 51780 - DNA, 2115 bp, Artificial Sequence
  derived and/or modified sequence
gccacccccgcccacccctctcgcgggcggagcggctcttggccttttttgggcgtctccctgctccgcggcccgggctggcgggcgggcgctcggctggcggctgcagcagcagagggagacccgcggcaaccccggcaacccagggctcggcgtcgctgccaccatgacgggaaggaaaagaaagtggggagagacaggaacagggtccggagcagccccagcagcagcattgaggtggagcaatatgtcggacgccttggccaacgccgtgtgccagcgctgccaggcccgcttctcccccgccgagcgcattgtcaacagcaatggggagctgtaccatgagcactgcttcgtgtgtgcccagtgcttccggcccttccccgaggggctcttctatgagtttgaaggccggaagtactgcgaacacgacttccaaatgctgtttgctccgtgctgtggatcctgcggtgagttcatcattggccgcgtcatcaaggccatgaacaacaactggcacccgggctgcttccgctgcgagctgtgtgatgtggagctggctgacctgggctttgtgaagaatgccggcaggcatctctgccggccttgccacaaccgtgagaaggccaagggcctgggcaagtacatctgccagcggtgccacctggtcatcgacgagcagcccctcatgttcaggagcgacgcctaccaccctgaccacttcaactgcacccactgtgggaaggagctgacagccgaggcccgcgagctgaagggtgagctctactgcctgccctgccatgacaagatgggcgtccccatctgcggggcctgccgccggcccatcgagggccgagtggtcaacgcgctgggcaagcagtggcacgtggagcactttgtctgtgccaagtgtgagaagccattcctggggcaccggcactatgagaagaagggcctggcctactgcgagactcactacaaccagctcttcggggacgtctgctacaactgcagccatgtgattgaaggcgatgtggtgtcggccctcaacaaggcctggtgtgtgagctgcttctcctgctccacctgcaacagcaagctcaccctgaagaacaagtttgtggagttcgacatgaagcccgtgtgtaagaggtgctacgagaagttcccgctggagctgaagaagcggctgaagaagctgtcggagctgacctcccgcaaggcccagcccaaggccacagacctcaactctgcctgaaggccctcttgcgcagctgcctctcggcccctccgccttctcccctcctgctgtccatgcttggccccctcgtccccatccacctgtgccctccgcatcttaccctccctttctctttcctcattgccttctcccttcctgttccctcatctctgccttccccatgtctctcctctccttggccgtggcttctgtctgtgaggaggcaggagctggggagtgggagcctatgaccccacgtctgacagccatgtccacctgtgcccacagcttccgcccacagacctccagggacaggagcaaattgcaccacagctccccgcctggcctggccctccccaggcggctcagtggctcatgctgtcctgtgagagcccctgccccagagcggccccactaagcgcatgtggctcctgggctacccacagccagggcagcctgctggagccacagggccagggccatgcagatggaggcctctgggagccacctccaatccctcaccactcactcaaccagtggcacagtgtccttgtgcccacactgagccagcaagtcctgctgtccacacccacaagctacctggagggacaggacccacctccatccttcggaaggccttcctggaatcccaccttggcctccgccctcggttccgccccgcccctctccccccgaccttggggcttgtgtcgagcccttgggtggggccaggaggaggtgatggcgtcagaggaggtgtggtcagaggtgacttgttcccacctccagggaggacgcttcgtcttcggccagcgcagacctggtgtttgtttgttgggctcacgcttgcacaatgaaggcttgttcacacaacc

SEQ ID NO: 51781 - DNA, 1092 bp, Artificial Sequence
  derived and/or modified sequence
atgacaggcaggaagaggaagtggggcgagactggaactggaagtggagctgccccagctgctgccctgcgctggagcaacatgtctgatgccctggccaatgctgtgtgccagcgctgccaggcccgcttcagccctgctgagcgcatcgtgaacagcaatggagagctgtaccacgagcactgctttgtgtgtgcccagtgcttccggcccttccctgagggcctcttctatgaatttgagggcaggaagtactgtgaacatgacttccagatgctgtttgccccctgctgcggcagctgtggggagttcatcatcggccgggtcatcaaggccatgaacaacaactggcaccctggctgcttccgctgtgagctgtgtgatgtggagctggccgacctgggctttgtgaagaatgccggccgccacctgtgccggccctgccacaaccgggagaaggccaagggcctgggcaagtacatctgccagcgctgccacctggtgattgatgagcagcccctgatgttcagaagtgatgcctaccacccagaccacttcaactgcacccactgcggcaaggagctgacagctgaggcccgggagctgaagggggagctgtactgcctgccctgccacgacaagatgggcgtgcccatctgtggggcctgccggcggcccatcgagggccgggtggtgaatgccctgggcaagcagtggcacgtggagcactttgtgtgtgccaagtgtgagaagcccttcctgggccaccgccactatgagaagaagggcctggcctactgtgagacccactacaaccagctgtttggagatgtgtgctacaactgcagccacgtgattgaaggagatgtggtgtctgccctgaacaaggcctggtgtgtgtcctgcttcagctgcagcacctgcaacagcaagctgaccctgaagaacaagtttgtggagtttgacatgaagcctgtgtgcaagcgctgctatgagaagttccccctggagctgaagaagaggctgaagaagctgtctgagctgaccagcaggaaggcccagcccaaggccacagacctgaacagcgcctag

SEQ ID NO: 51782 - DNA, 1092 bp, Artificial Sequence
  derived and/or modified sequence
atgaccggccggaagcggaagtggggcgagaccggcaccggcagcggcgccgcccctgccgccgccttgagatggtctaatatgagtgacgccctggccaatgccgtttgccagaggtgtcaggcaagattttccccagctgagcgcatcgttaatagcaatggcgagctataccacgagcactgtttcgtttgcgcccagtgtttcagacctttccctgagggacttttctacgaattcgaggggaggaaatattgcgagcatgatttccagatgctctttgctccctgctgcgggtcttgtggtgagttcatcattggacgggtcattaaggcgatgaacaacaactggcacccagggtgtttcaggtgcgagctgtgcgatgtggagcttgcggatctcggcttcgtaaaaaacgctgggaggcatctgtgtcggccttgccacaatcgcgagaaggccaaggggctggggaagtatatctgtcagcgatgtcacttggtgattgacgagcagccactgatgttccgcagtgacgcttaccatccagatcacttcaattgtactcattgtggaaaagaattaaccgcagaggcccgagagctgaaaggggaactgtactgtttgccctgtcatgacaagatgggcgtacctatctgtggtgcctgccgtcgtcccatcgaggggcgggttgttaatgccttaggaaagcagtggcacgttgaacactttgtatgtgccaaatgtgagaagcctttcctcggtcatagacactatgagaaaaagggacttgcctactgcgaaactcactacaaccagttgtttggcgacgtgtgctataactgtagtcacgtgattgagggtgacgtagtgagcgccctgaacaaggcttggtgcgtgtcttgcttttcctgttcgacatgtaatagcaagctcaccctgaagaataagttcgtagagttcgacatgaaaccagtgtgcaagcgttgctacgagaaattccccctggaactaaaaaagcggttgaaaaagctgtctgaactcacctcacgcaaagcccagcctaaagccaccgatctgaacagtgcctag

SEQ ID NO: 51783 - DNA, 1092 bp, Artificial Sequence
  derived and/or modified sequence
atgaccggccggaagcggaagtggggcgagaccggcaccggcagcggagctgccccagccgccgcacttcgctggagcaacatgagcgatgcactcgccaacgctgtttgtcaaaggtgtcaggctcgattctccccggccgaacgcatcgtaaactctaatggcgaactttatcatgaacattgttttgtgtgcgcacagtgcttccggccgttcccagaggggctgttctatgaatttgaaggacggaaatattgtgagcatgactttcagatgctcttcgcaccgtgctgtgggtcttgcggtgaatttattatcggtagggtgatcaaagccatgaacaataattggcaccccggctgcttcaggtgtgaattgtgcgacgtcgagctggcggatctgggattcgtgaaaaacgccggcagacacctgtgccgtccatgccataatcgagaaaaggctaaaggcctcggcaagtacatctgccagagatgtcaccttgtcattgacgagcaacctcttatgtttagatccgacgcctaccaccctgaccactttaattgtacccattgcggcaaggagctcacagccgaagcaagagaactcaagggagagctttattgcctgccctgtcacgataagatgggagtccccatttgcggcgcctgtaggagaccaattgaaggcagggtagtgaacgcgttaggcaagcagtggcatgtagagcattttgtgtgcgcaaaatgcgagaagccattcctgggacatcgacattacgagaaaaagggcctggcttattgtgagacccattataaccagctgttcggagacgtttgctacaactgttcacatgtcatagagggcgacgtcgtctccgccctgaacaaggcctggtgcgtgtcatgctttagctgttctacttgcaactctaagctgacgctgaaaaataaattcgtggaatttgacatgaaacctgtttgtaagaggtgctacgagaagttccccctggagctgaagaaacgcctcaaaaaactttccgaactcacctcacggaaggcccagcctaaggctacggacctcaatagcgcctag

SEQ ID NO: 51784 - DNA, 1092 bp, Artificial Sequence
  derived and/or modified sequence
atgactggtcggaagagaaaatggggtgaaactggcacgggatctggggcagctcctgcggctgcgttgcgctggtcaaatatgagcgacgcgctcgctaacgctgtctgccagagatgtcaagctagattcagtcccgcagaacgcattgttaacagcaatggcgagctgtatcacgagcactgtttcgtgtgcgcgcagtgctttaggccttttcccgaaggtctgttttacgagttcgaggggaggaaatactgcgagcatgatttccagatgctgtttgccccttgttgcggttcttgtggcgagttcattattgggagagttatcaaagccatgaacaataactggcatcccggttgcttccgatgcgaactctgtgacgttgagttggccgacttaggattcgtgaagaatgccggaaggcacttatgtagaccttgtcacaatcgtgaaaaagccaaaggattaggcaagtacatttgccagcgatgccacctggtgatcgacgagcagccgttgatgttcagatctgatgcctatcaccctgatcactttaactgtacacactgtggcaaggagctgaccgctgaagccagggaactgaagggtgagctctactgtctgccatgtcatgataaaatgggtgtgccaatttgcggtgcgtgtcggaggccaatagagggacgcgtggttaatgctctcgggaaacagtggcatgtggaacacttcgtgtgcgcgaagtgcgagaagccattcctgggacaccgccattacgaaaaaaaaggtctggcttactgcgagactcactacaaccagctcttcggggacgtttgctataactgcagccacgttatagagggggacgtggtgtccgcactgaataaggcttggtgcgtcagctgcttttcctgctccacatgtaactcaaaactaacactgaagaataagtttgttgagtttgatatgaagcccgtgtgtaagagatgctacgagaaatttccactggagcttaagaaaaggctgaaaaagctcagcgaattaacatctaggaaagcgcaacctaaagctactgatctcaatagcgcctag

SEQ ID NO: 51785 - DNA, 1092 bp, Artificial Sequence
  derived and/or modified sequence
atgacagggcgaaaaagaaagtggggagaaacaggcactggatccggcgcagcccctgccgctgctctaaggtggagcaacatgagtgatgccctggctaacgcagtgtgccagaggtgccaagccaggttctctccggctgaacgaatagtcaatagtaatggtgaactgtatcacgagcattgcttcgtgtgtgcccagtgcttccgaccgtttcctgagggcctgttttacgagttcgaaggtcgcaaatactgcgagcacgacttccagatgctgttcgcgccatgctgtggctcgtgtggagagtttatcatcgggagagtaatcaaggccatgaataacaactggcaccccggatgtttccggtgcgagctctgcgacgtggagctggccgacctcggatttgtgaaaaatgcaggtcggcatctgtgccgaccatgccacaatcgcgaaaaagcaaaaggcctcggaaaatatatatgccagcggtgtcacctagtcatagatgagcagcctctcatgttcaggtctgatgcctaccatcccgaccacttcaactgcactcactgtggaaaagaattgaccgccgaggctagggaactcaagggcgagctctactgcttgccctgtcacgacaagatgggtgtgcctatttgcggtgcctgcagaagacccattgagggtcgggtggttaacgcgctcggcaaacagtggcacgttgagcacttcgtgtgcgcgaaatgcgagaagccctttctgggacacagacattacgagaagaagggccttgcctactgtgaaacccactataaccaactattcggcgacgtatgttataattgcagtcatgtgattgagggggacgttgtgtctgcactgaacaaggcctggtgcgttagttgcttctcctgctctacatgcaactccaagctaacactgaaaaataagtttgtggagttcgatatgaagcccgtctgtaagcggtgctacgagaagtttccattggagttaaagaaacggctgaagaagctgagtgagctcacttctaggaaagcccagcccaaggccacagacttgaatagtgcttag

SEQ ID NO: 51786 - protein, 555 aa, Artificial Sequence
  derived and/or modified sequence
MDGDGLTFRDVAIEFSQDEWKCLNSTQRTLYRDVMLENYRNLVSLDLSRNCVIKELAPQQEGNPGEVFHTVTLEQHEKHDIEEFCFREIKKKIHDFDCQWRDDERNCNKVTTAPKENLTCRRDQRDRRGIGNKSIKHQLGLSFLPHPHELQQFQAEGKIYECNHVEKSVNHGSSVSPPQIISSTIKTHVSNKYGTDFICSSLLTQEQKSCIREKPYRYIECDKALNHGSHMTVRQVSHSGEKGYKCDLCGKVFSQKSNLARHWRVHTGEKPYKCNECDRSFSRNSCLALHRRVHTGEKPYKCYECDKVFSRNSCLALHQKTHIGEKPYTCKECGKAFSVRSTLTNHQVIHSGKKPYKCNECGKVFSQTSSLATHQRIHTGEKPYKCNECGKVFSQTSSLARHWRIHTGEKPYKCNECGKVFSYNSHLASHRRVHTGEKPYKCNECGKAFSVHSNLTTHQVIHTGEKPYKCNQCGKGFSVHSSLTTHQVIHTGEKPYKCNECGKSFSVRPNLTRHQIIHTGKKPYKCSDCGKSFSVRPNLFRHQIIHTKEKPYKRN

SEQ ID NO: 51787 - DNA, 1668 bp, Artificial Sequence
  derived and/or modified sequence
atggacggcgacggcctgaccttcagagacgtggccatcgagttcagccaggacgagtggaagtgcctgaacagcacccagagaaccctgtacagagacgtgatgctggagaactacagaaacctggtgagcctggacctgagcagaaactgcgtgatcaaggagctggccccccagcaggagggcaaccccggcgaggtgttccacaccgtgaccctggagcagcacgagaagcacgacatcgaggagttctgcttcagagagatcaagaagaagatccacgacttcgactgccagtggagagacgacgagagaaactgcaacaaggtgaccaccgcccccaaggagaacctgacctgcagaagagaccagagagacagaagaggcatcggcaacaagagcatcaagcaccagctgggcctgagcttcctgccccacccccacgagctgcagcagttccaggccgagggcaagatctacgagtgcaaccacgtggagaagagcgtgaaccacggcagcagcgtgagccccccccagatcatcagcagcaccatcaagacccacgtgagcaacaagtacggcaccgacttcatctgcagcagcctgctgacccaggagcagaagagctgcatcagagagaagccctacagatacatcgagtgcgacaaggccctgaaccacggcagccacatgaccgtgagacaggtgagccacagcggcgagaagggctacaagtgcgacctgtgcggcaaggtgttcagccagaagagcaacctggccagacactggagagtgcacaccggcgagaagccctacaagtgcaacgagtgcgacagaagcttcagcagaaacagctgcctggccctgcacagaagagtgcacaccggcgagaagccctacaagtgctacgagtgcgacaaggtgttcagcagaaacagctgcctggccctgcaccagaagacccacatcggcgagaagccctacacctgcaaggagtgcggcaaggccttcagcgtgagaagcaccctgaccaaccaccaggtgatccacagcggcaagaagccctacaagtgcaacgagtgcggcaaggtgttcagccagaccagcagcctggccacccaccagagaatccacaccggcgagaagccctacaagtgcaacgagtgcggcaaggtgttcagccagaccagcagcctggccagacactggagaatccacaccggcgagaagccctacaagtgcaacgagtgcggcaaggtgttcagctacaacagccacctggccagccacagaagagtgcacaccggcgagaagccctacaagtgcaacgagtgcggcaaggccttcagcgtgcacagcaacctgaccacccaccaggtgatccacaccggcgagaagccctacaagtgcaaccagtgcggcaagggcttcagcgtgcacagcagcctgaccacccaccaggtgatccacaccggcgagaagccctacaagtgcaacgagtgcggcaagagcttcagcgtgagacccaacctgaccagacaccagatcatccacaccggcaagaagccctacaagtgcagcgactgcggcaagagcttcagcgtgagacccaacctgttcagacaccagatcatccacaccaaggagaagccctacaagagaaactag

SEQ ID NO: 51788 - DNA, 1668 bp, Artificial Sequence
  derived and/or modified sequence
atggacggcgacggactcacctttagagacgtggcaattgagtttagccaagatgagtggaagtgcttgaacagcactcagcgcaccttgtaccgagatgtgatgctggagaactatcggaatctcgtctcacttgatttgagcagaaattgcgttataaaggagctggcccctcagcaggaaggaaatcccggtgaggtgtttcacactgtgacacttgagcagcatgaaaaacacgacatcgaagagttttgttttagggaaataaagaaaaagattcacgactttgattgtcagtggcgtgatgatgaacgaaactgcaacaaagtgaccacagcgccgaaggagaacttgacttgtcgaagagaccaaagggatcggagaggaattgggaataaatccatcaagcaccagctgggattgtcttttctgccacacccccacgagcttcagcagtttcaggcagagggtaagatctacgagtgtaaccacgtcgagaaatccgtgaaccatggttcctcagtgagtccgcctcaaattatcagctccaccatcaaaactcacgtgtcaaataaatacggcaccgactttatttgttcaagtctcctaacccaggaacagaaatcctgcatcagagagaaaccgtatagatatatcgaatgcgacaaggcgctgaaccacggaagtcacatgacagtgcgtcaggtgagtcactccggcgagaaggggtacaagtgtgatctttgtggcaaggtctttagccaaaaatctaatctggcacgacattggcgggtgcacacgggagagaagccctacaaatgtaatgaatgcgaccggtcctttagccgtaattcatgcctggctttgcaccggagagtgcacaccggcgagaaaccatacaaatgttatgagtgcgacaaagtgttctctcgcaatagctgtctggctctccatcagaaaactcacatcggtgagaagccgtacacttgtaaagagtgtggcaaggccttttcggtccgctccacactaactaatcatcaggtgatccactccggtaagaagccatacaagtgtaatgagtgcggaaaggtgttctcccaaacttcttccctagcaacccaccagcgcatccataccggtgaaaaaccttacaagtgtaatgagtgtggcaaggtgttttctcaaacgagctcgcttgcgaggcattggaggatccatactggcgagaagccctacaaatgcaacgagtgcggcaaggttttttcatataactcacatttggccagccacagacgagttcataccggggagaagccttacaaatgcaatgagtgtggtaaggctttctcagtccactcaaacttaaccacgcaccaggttatacacactggcgaaaagccttacaagtgcaatcaatgcggaaaggggttcagtgtacattcatcactcaccacgcatcaggtcatccacacaggggagaagccatacaaatgtaatgaatgtggcaagagcttctccgtgcggcctaacctgaccagacatcaaatcattcacaccggtaagaaaccatataaatgtagtgattgcggtaagtcatttagcgtgcgtcccaatttgtttaggcaccagatcatccatacgaaggagaaaccctacaaaagaaactag

SEQ ID NO: 51789 - DNA, 1668 bp, Artificial Sequence
  derived and/or modified sequence
atggatggagatggcctgaccttcagagatgtggccatcgagttcagccaggatgagtggaagtgcctgaacagcacccagaggaccctgtacagagatgtgatgctggagaactacagaaacctggtgtccctggacctgagcaggaactgtgtgatcaaggagctggccccccagcaggagggcaaccctggagaggtgttccacacagtgaccctggagcagcacgagaagcatgacatcgaggagttctgcttccgggagatcaagaagaagatccatgactttgactgccagtggagagatgatgaaagaaactgcaacaaggtgaccacagcccccaaggagaacctgacctgcagaagagaccagagggacagaagaggcatcggcaacaagagcatcaagcaccagctgggcctgtccttcctgccccacccccatgagctgcagcagttccaggccgagggcaagatctatgagtgcaaccacgtggagaagtctgtgaaccacggcagctctgtgtccccaccccagatcatcagcagcaccatcaagacccacgtgagcaacaagtatggaacagacttcatctgcagcagcctgctgacccaggagcagaagagctgcatccgggagaagccctaccgctacattgaatgtgacaaggccctgaaccacggcagccacatgacagtgcggcaggtgagccacagcggggagaagggctacaagtgtgacctgtgtgggaaggtgttcagccagaagagcaacctggcccggcactggagggtgcacactggagagaagccctacaagtgcaatgaatgtgacaggagcttcagcaggaacagctgcctggccctgcacagaagagtgcacactggagagaagccctacaagtgctatgaatgtgacaaggtgttcagcaggaacagctgcctggccctgcaccagaagacccacatcggggagaagccctacacctgcaaggaatgtgggaaggccttctctgtgcgcagcaccctgaccaaccaccaggtgatccacagcggcaagaagccctacaagtgcaatgaatgtgggaaggtgttcagccagaccagcagcctggccacccaccagaggatccacactggagagaagccctacaagtgcaatgaatgtgggaaggtgttcagccagaccagcagcctggcccggcactggaggatccacactggagagaagccctacaagtgcaatgaatgtgggaaggtgttctcctacaacagccacctggccagccacagaagagtgcacactggagagaagccctacaagtgcaatgaatgtgggaaggccttctctgtgcacagcaacctgaccacccaccaggtgatccacactggagagaagccctacaagtgcaaccagtgtgggaagggcttctctgtgcacagcagcctgaccacccaccaggtgatccacactggagagaagccctacaagtgcaatgaatgtgggaagagcttctctgtgcggcccaacctgaccaggcaccagatcatccacacaggcaagaagccctacaagtgcagcgactgtgggaagagcttctctgtgcggcccaacctcttccgccaccagatcatccacaccaaggagaagccctacaagaggaactag

SEQ ID NO: 51790 - DNA, 1668 bp, Artificial Sequence
  derived and/or modified sequence
atggacggcgacggcctgaccttccgggacgtggccatcgagttctcacaggacgagtggaagtgcctcaatagtacgcagcggactctgtatagggatgtcatgcttgagaattaccggaacctggtatctttagacctgtcaagaaactgcgtgattaaagagttggcacctcagcaagaaggcaacccgggcgaggtgtttcacaccgtcacgctcgaacagcacgaaaagcatgacattgaggagttctgttttcgggaaattaaaaaaaaaatccatgattttgactgtcagtggcgagacgatgaacggaattgtaataaagtgacaacagcccccaaggaaaacctaacatgcagacgcgaccagagggatcggagaggaatcggaaacaaatcgattaagcaccagctgggtctgtccttccttccccatccgcatgagctgcagcagtttcaagccgagggcaaaatttacgagtgcaaccatgtggaaaagtcagtcaatcacggaagctctgtttcacctccacagatcatctcatctacgatcaaaacccatgtgagcaacaagtatggtacagactttatttgtagtagcttactcacacaggaacagaagtcatgcataagggagaagccttataggtatattgaatgtgataaggctcttaaccatgggtcgcatatgactgtgaggcaggtgtctcattccggagagaaaggctacaaatgtgacctgtgcggcaaggtctttagccaaaaatctaacttggcccgccattggcgtgtgcacacaggtgagaagccatataagtgcaacgagtgtgacagatcgttttctagaaatagttgtttggccctgcataggcgcgtgcacactggcgagaagccctacaaatgttatgagtgcgataaagtcttttcccggaactcctgtctcgcccttcaccagaaaactcacatcggagaaaagccctatacatgtaaagagtgtggtaaagcttttagcgtgagatccacccttactaaccaccaggtgatccactcaggaaaaaagccctacaagtgtaatgagtgtggcaaggttttcagccagacctccagcctagccacccaccagcgcatccacaccggcgagaagccctacaaatgtaacgagtgcgggaaggtcttttcccaaaccagctccctggcccgtcactggaggattcacacaggtgaaaaaccatacaaatgcaatgagtgcgggaaggtcttctcttataatagccacctggcttctcatcgtagggtgcacaccggagagaagccatataagtgcaatgaatgcggaaaggccttttctgttcatagcaatctgactacccatcaggtaattcacacaggtgaaaaaccatacaagtgcaatcaatgtggcaaggggttttcagtacattcttcacttacaacacaccaggtgattcacaccggcgaaaagccctataaatgcaatgagtgcgggaaaagtttttctgtccgtccaaacctgactaggcaccaaataatccataccggcaagaagccatataaatgcagcgactgtggtaagtcttttagtgtgcgccccaacttgtttcgacatcaaataatccacaccaaggaaaagccctataaacgcaactag

SEQ ID NO: 51791 - DNA, 1668 bp, Artificial Sequence
  derived and/or modified sequence
atggacggtgacggactgaccttcagagacgtggccatcgaattctcccaagacgagtggaagtgcctgaactccacccaacgtactctgtatcgcgatgtgatgctcgaaaattaccgcaacttggtttctttggacctaagccgcaactgcgtcatcaaagagctcgcccctcagcaggaggggaatcccggagaagtgtttcatacggtcaccttagagcagcatgaaaaacatgatatcgaggagttctgttttcgcgagatcaagaagaagatccatgacttcgactgccagtggcgcgacgacgaaagaaactgcaacaaagtaacaactgctcccaaggagaatctgacctgccggcgagaccagcgcgacagacggggaatcggaaacaagagcattaaacaccagttgggtctctcttttctccctcacccccacgagctccagcaattccaggcagaaggaaagatatatgagtgtaatcatgtcgagaaatccgtgaatcacggcagctctgtaagtcctccccagatcatcagttccactatcaagacccatgtgtctaataaatatggaaccgacttcatatgtagttctctattgacgcaagaacagaaaagctgcattagagagaagccatatcggtacatcgagtgcgataaagccctgaatcacggcagtcatatgacggtgagacaggtaagtcattcaggcgagaagggttataagtgcgatctatgtggcaaggtgttctcacagaaatcgaacctggccaggcattggagagtgcacaccggggagaagccgtataaatgtaacgaatgtgaccgcagcttttcacgtaactcttgtctcgctctccacagaagggtgcacacaggagagaaaccctacaagtgttatgagtgtgacaaggtgttcagcaggaactcgtgcctagccctccaccaaaagacgcatatcggagaaaagccttacacttgcaaagagtgcgggaaggccttttccgtgcgcagcactcttaccaaccatcaggtcattcatagtggcaaaaaaccctacaagtgcaatgagtgcggcaaagtgttcagtcagacaagcagcctggctacccatcagcgaatacacacaggagaaaaaccatacaagtgtaacgagtgcggaaaggtatttagccagacctcatcacttgcgagacactggaggatccatacaggagaaaaaccgtataagtgcaacgaatgcgggaaagttttctcttacaactctcacctggcttcacaccgaagggtccacaccggcgaaaaaccttataagtgcaatgagtgcggcaaggccttctctgtgcactctaacctgaccacccatcaggtcatccacactggcgagaaaccatataaatgcaaccagtgtgggaagggattctcagtccactcatcattgactactcaccaggtcatccatacgggcgagaagccatacaagtgcaatgaatgtggcaaaagcttttccgtgagacctaatctcactcgccaccagatcattcacaccggcaaaaaaccgtataagtgtagtgactgcggcaaatcattttcagtccgccctaatcttttcagacaccagatcattcatacgaaggagaaaccgtacaaacggaattag

SEQ ID NO: 51792 - DNA, 2529 bp, Artificial Sequence
  derived and/or modified sequence
gcatgcgcagtttcctacaggcccggaaacggatcgcgttgggtgaaggtgacggcgtcgagcgtgagtgaccctctgtgtagattaaacctgcgctccctgtttcccatttccacagccgatgtccagggtcgatacggcccttaaaatccccgtacactccaccccaggtgggagacaatgccttggagctgcaaatcttctctgagtctgaagcatcctgcctgacgcgtttgctcacattgacccgtgccttccctcagtccttctcatctctactgagattccgtctcaccctgaccctgtgacatgaacttctgaagagtccactgggcatggtcctgggaagggctcacacccagacatggatggagacgggttgacattcagggacgtggccatcgaattctctcaagatgagtggaaatgcctgaactctacacagaggactttatacagggatgtgatgttggagaactacaggaacctggtctccctggatctgtctcgtaactgtgtaatcaaggaactagcaccacaacaggaaggtaacccaggagaagtattccacacagtgacattggaacaacatgaaaaacatgacattgaagagttttgcttcagggaaatcaagaaaaaaatacacgactttgactgtcagtggagagatgatgaaagaaattgcaacaaagtgactacggccccaaaagaaaatcttacttgtaggagagaccaacgcgatagaagaggtataggaaacaagtctattaaacatcagcttggattaagctttctaccacatccccatgaactgcagcagtttcaagctgaagggaaaatttatgaatgtaaccatgttgagaagtctgtcaaccatggttcctcagtttcaccaccccaaataatttcttctaccatcaaaacccatgtttctaataaatatgggactgatttcatctgttcttcattactcacacaagaacagaaatcatgcattagggaaaaaccttacagatatattgagtgcgacaaagccttgaatcatggctcacacatgactgtacgtcaggtaagtcattctggagagaaaggatataaatgtgatctgtgtggcaaggtctttagtcaaaaatcaaaccttgcgcgtcattggagagttcatactggagagaaaccatacaaatgtaatgaatgtgacagaagtttcagtcgcaactcatgccttgcactacatcggagagttcacactggagagaaaccttacaaatgttatgagtgtgacaaggtcttcagtcgaaattcatgccttgcactacatcagaaaactcatattggagagaaaccttacacatgtaaagagtgtggcaaagcctttagtgtgaggtcaacacttaccaaccatcaggtaattcatagtggcaagaaaccttacaaatgcaatgaatgtggcaaggtgttcagtcagacttcaagccttgcaactcatcagagaattcacactggggagaaaccatacaagtgtaatgaatgtggtaaagtcttcagtcagacttcaagccttgcaaggcattggagaattcatactggagagaaaccttacaaatgcaatgaatgtggtaaggttttcagttacaattcacaccttgcgagtcatcggagagttcatactggagagaaaccttacaagtgtaatgagtgtgggaaagcctttagtgtgcattcgaacttaactacccatcaggtcatccatactggagagaagccttacaaatgtaatcaatgtggcaaaggcttcagtgtgcattcaagcctaactacccatcaggtcatccatactggagaaaaaccttacaaatgtaatgagtgtggcaaatcctttagtgtgcgcccaaacctcactagacatcagataatccatactggaaagaaaccttacaaatgtagtgattgtgggaagtcctttagtgtgcgcccaaacctcttcagacatcaaattatccatactaaggagaaaccttataaaagaaattaatatggcaaggtcttcagtcaaagtttaaatcctgtgagtcatcaaagaatttatatcagagagaaaccatacaagtataataaatgtggcaaggttttcagtcacaattcactcctacacagcatcagagaatttcattcttgagagaatccttacgagtacagcaaacccttcatcacaagttcaagcattcattgacatcagagtccatgctaaagagaaatcatatacacctaactgtgtggcagaggcttcatttaggtctcacaactcactagacatcaaaatgtgtaaacatctttgtatattttgtgcatgttgaagctattaaccaaggatcaaaactgtaacacatccaaggatttatgtgaggaataattcagtctagttgtgctgataaacttttcatattacacattgtagaacaaatgcaagcccaaatatgttaaaactcacacaacatgatatatattaaaggttgcaggatgtttgaagtc

SEQ ID NO: 51793 - protein, 350 aa, Artificial Sequence
  derived and/or modified sequence
MDLKALLSSLNDFASLSFAESWDNVGLLVEPSPPHTVNTLFLTNDLTEEVMEEVLQKKADLILSYHPPIFRPMKRITWNTWKERLVIRALENRVGIYSPHTAYDAAPQGVNNWLAKGLGACTSRPIHPSKAPNYPTEGNHRVEFNVNYTQDLDKVMSAVKGIDGVSVTSFSARTGNEEQTRINLNCTQKALMQVVDFLSRNKQLYQKTEILSLEKPLLLHTGMGRLCTLDESVSLATMIDRIKRHLKLSHIRLALGVGRTLESQVKVVALCAGSGSSVLQGVEADLYLTGEMSHHDTLDAASQGINVILCEHSNTERGFLSDLRDMLDSHLENKINIILSETDRDPLQVV

SEQ ID NO: 51794 - protein, 252 aa, Artificial Sequence
  derived and/or modified sequence
MLSSCVRPVPTTVRFVDSLICNSSRSFMDLKALLSSLNDFASLSFAESWDNVGLLVEPSPPHTVNTLFLTNDLTEEVMEEVLQKKADLILSYHPPIFRPMKRITWNTWKERLVIRALENRVGIYSPHTAYDAAPQGVNNWLAKGLGACTSRPIHPSKAPNYPTEGNHRVEFNVNYTQDLDKVMSAVKGIDGVSVTSFSARTGNEEQTRINLNCTQKALMQVVDFLSRNKQLYQKHQDNTFYKSAGCQLKFVT

SEQ ID NO: 51795 - protein, 377 aa, Artificial Sequence
  derived and/or modified sequence
MLSSCVRPVPTTVRFVDSLICNSSRSFMDLKALLSSLNDFASLSFAESWDNVGLLVEPSPPHTVNTLFLTNDLTEEVMEEVLQKKADLILSYHPPIFRPMKRITWNTWKERLVIRALENRVGIYSPHTAYDAAPQGVNNWLAKGLGACTSRPIHPSKAPNYPTEGNHRVEFNVNYTQDLDKVMSAVKGIDGVSVTSFSARTGNEEQTRINLNCTQKALMQVVDFLSRNKQLYQKTEILSLEKPLLLHTGMGRLCTLDESVSLATMIDRIKRHLKLSHIRLALGVGRTLESQVKVVALCAGSGSSVLQGVEADLYLTGEMSHHDTLDAASQGINVILCEHSNTERGFLSDLRDMLDSHLENKINIILSETDRDPLQVV

SEQ ID NO: 51796 - protein, 162 aa, Artificial Sequence
  derived and/or modified sequence
MDLKALLSSLNDFASLSFAESWDNVGLLVEPSPPHTVNTLFLTNDLTEEVMEEVLQKKADLILSYHPPIFRPMKRITWNTWKERLVIRALENRVGIYSPHTAYDAAPQGVNNWLAKGLGACTSRPIHPSKAPNYPTEGNHRVEFNVNYTQDLDKVMSAVKGI

SEQ ID NO: 51797 - protein, 163 aa, Artificial Sequence
  derived and/or modified sequence
MLSSCVRPVPTTVRFVDSLICNSSRSFMDLKALLSSLNDFASLSFAESWDNVGLLVEPSPPHTVNTLFLTNDLTEEVMEEVLQKKADLILSYHPPIFRPMKRITWNTWKERLVIRALENRVGIYSPHTAYDAAPQGVNNWLAKGLGACTSRPIHPSKAPNYPT

SEQ ID NO: 51798 - DNA, 1134 bp, Artificial Sequence
  derived and/or modified sequence
atgctctcatcatgtgtgaggccagtacctacaacggtgcgatttgtggattcactcatctgtaattcgtctcgcagcttcatggatttgaaagcacttctgtccagcctgaatgatttcgccagcctgagttttgcggagagctgggataatgtcggactactagtggagccctccccccctcacactgttaacactctctttctcaccaacgatctgacagaagaggtcatggaggaggtgctccagaagaaagctgacctgatcctgagctaccacccacctatcttccgtcccatgaagaggatcacatggaacacctggaaggagagactggtgattcgtgccctggagaatcgagtgggaatctatagtccacataccgcatacgatgcagcgcctcagggggtgaacaattggttggccaaaggacttggggcatgtacttcccggcctatccacccgtccaaggctccaaactacccgacggagggaaaccatagggtcgaattcaatgtgaactacactcaagacttggacaaggttatgtccgctgtaaagggcatcgacggcgtcagcgtgacctccttctctgcaagaacaggcaacgaagagcaaaccaggatcaacttgaactgcacacagaaagctcttatgcaggtagtcgatttcttgtctagaaataagcaattgtatcagaaaaccgaaatcctttctctggagaagccgcttttgctgcacaccggtatgggtcggctgtgcacccttgacgaaagcgtctcgctggcaacaatgatcgaccggatcaaaaggcatctcaaactgagtcacataaggctggcactgggtgtcggtagaacactggaatcccaggtgaaggtcgtggctctctgtgctggctcagggagtagtgttctacaaggcgtcgaggcagatctttacctcaccggagaaatgagccaccacgacaccctggatgccgcctcccagggtataaatgtcattctgtgtgagcactctaatacagaacgtgggtttctgagcgatctcagggatatgttggactctcacttggaaaacaagattaatatcattctgagtgaaaccgatcgagatccattgcaggtggtgtag

SEQ ID NO: 51799 - DNA, 1134 bp, Artificial Sequence
  derived and/or modified sequence
atgcttagcagttgcgtacggcccgtcccgaccacagtgagattcgttgactcccttatttgcaactcctcacggtcctttatggacctgaaagccctactgtcctcactgaatgacttcgccagcctctcctttgccgagtcctgggacaatgtcggtctgctggtggaacccagtcctcctcacaccgtcaacactttgtttttgaccaacgacttgacagaggaggttatggaggaggtgctccagaaaaaagcagatcttatcctgagctaccacccccccatcttcagacctatgaaacggataacctggaatacgtggaaggagcgcctggtgattagagccctggagaatcgagttgggatttatagcccccataccgcgtacgatgcagctccccagggtgtcaataattggttggcaaaagggctgggcgcgtgcacctcacgccctattcacccctctaaggctcctaattaccctactgaaggtaaccatagggtggagttcaacgtgaattacacacaggacctggataaggtgatgtcggcggtgaaagggattgacggggtttccgtcaccagcttttctgctcgtaccggcaatgaggaacagacacggatcaaccttaattgcactcagaaggcgttgatgcaagtcgtggactttttatctcgcaataagcagctgtaccagaagacagagatcctctcactcgaaaagcctctgctactgcacacaggcatggggcgactgtgcacacttgatgagtccgtgtcgctggcaacgatgatcgaccgcattaaacgtcatcttaagctctctcatattagactggcactgggggtgggtagaacgctggaatctcaggtcaaagtcgtcgccctttgcgctggctcggggtcctcagtgctgcagggcgtggaggccgacttgtatttaacaggagagatgagccatcacgacacgttggacgccgcatcccaaggcataaatgtgattctctgtgaacacagtaacacagagcgggggttcctaagcgatctgagggacatgttagactcccatctggagaacaagatcaatatcattctaagtgagacagaccgggatccattacaagtagtgtag

SEQ ID NO: 51800 - DNA, 1134 bp, Artificial Sequence
  derived and/or modified sequence
atgcttagctcctgcgtgcgtcctgtcccaactacagtcagattcgtcgactccctgatttgtaacagtagtcgttcctttatggacttgaaagctctcttatctagcctgaatgacttcgctagcctctctttcgctgaatcctgggacaatgtaggcctccttgtggaaccgtcccccccccatacagtcaatactctatttctgaccaacgacctgaccgaagaggtcatggaagaggtcttgcagaagaaagccgatctcatactgagttaccatccgccaatattccgacccatgaaaagaatcacctggaatacttggaaggaaagactggtgattcgcgctctggaaaatcgggtggggatatacagtccccacaccgcttatgatgccgctcctcagggggtgaataactggctagcaaagggtctcggggcctgcaccagcagaccaattcatccctcaaaggcccccaactatcctaccgaggggaatcatcgtgtcgaattcaacgtgaactatacccaggatttggacaaagtgatgtccgcagtcaaggggatcgacggagtttcagtgaccagcttctctgctcgcactgggaatgaagagcagacccgcatcaacctgaattgcactcagaaggctctgatgcaagttgtggacttcctgagccggaataagcagctctaccaaaaaaccgaaattctctccctggaaaaaccactcctcctccacactggaatgggtaggctttgtacactggatgagagtgtgagcctggcgaccatgatcgacaggattaagcgacacttaaaactgagccatattagactcgccctaggtgttgggaggactctcgaaagtcaggtcaaagtagtggcattgtgtgccgggtcaggctcgagcgttttgcagggagtagaggctgacctgtaccttactggggaaatgagccatcacgacaccctcgatgcagctagtcagggcatcaatgttatcttgtgcgaacactcaaacactgagcgcggatttctcagcgatcttagggacatgcttgactcgcacctggagaataaaatcaatatcatcctgagtgaaaccgaccgcgacccgttgcaagtggtttag

SEQ ID NO: 51801 - DNA, 1134 bp, Artificial Sequence
  derived and/or modified sequence
atgctgagcagctgtgtgcggcctgtgcccaccaccgtgcgctttgtggacagcctcatctgcaacagcagccgctccttcatggacctgaaggccctgctgagcagcctgaatgactttgccagcctgagctttgctgagagctgggacaacgtgggcctgctggtggagcccagccccccccacacagtgaacaccctcttcctgaccaatgacctgacagaggaggtgatggaggaggtgctgcagaagaaggctgacctgatcctgagctaccacccccccatcttccggcccatgaagaggatcacctggaacacctggaaggagcggctggtgatccgggccctggagaacagagtgggcatctacagcccccacacagcctatgatgctgccccccagggcgtgaacaactggctggccaagggcctgggcgcctgcaccagccggcccatccaccccagcaaggcccccaactaccccacagagggcaaccaccgggtggagttcaacgtgaactacacccaggacctggacaaggtgatgtctgctgtgaagggcattgatggagtgtctgtgaccagcttcagcgccaggactggaaatgaggagcagacccgcatcaacctgaactgcacccagaaggccctgatgcaggtggtggacttcctgagcaggaacaagcagctgtaccagaagacagagatcctgagcctggagaagcccctgctgctgcacacaggcatgggccgcctgtgcaccctggatgaatctgtgtccctggccaccatgattgaccgcatcaagaggcacctgaagctgagccacatccggctggccctgggcgtgggccgcaccctggagagccaggtgaaggtggtggccctgtgtgccggcagcggcagctctgtgctgcagggcgtggaggccgacctgtacctgaccggggagatgagccaccacgacaccctggatgctgccagccagggcatcaacgtcatcctgtgtgagcacagcaacacagagcggggcttcctgagtgacctgcgggacatgctggacagccacctggagaacaagatcaacatcatcctgtctgaaacagaccgggaccccctgcaggtggtgtag

SEQ ID NO: 51802 - DNA, 1134 bp, Artificial Sequence
  derived and/or modified sequence
atgctgagcagctgcgtgcggcccgtgcccaccaccgtgcggttcgttgactctttaatttgtaactcgagtaggtcgttcatggatctaaaggccctgctaagtagcttgaatgattttgcctctctgtcttttgccgaatcttgggacaatgtgggccttctggtggagccaagcccaccccacacagttaacacactgtttctcactaatgacctgactgaggaagtcatggaggaagtcttacagaaaaaggcagatctaatcttatcctaccatccacctatttttcgacccatgaaacgaattacctggaatacctggaaagagagattggtgattcgggccctcgagaatcgcgttgggatttattcgcctcacacagcttacgatgctgccccccagggtgtgaataattggctcgccaagggactaggcgcctgcactagcaggcccattcatccttcaaaagcacctaactacccaactgaaggaaatcatcgggtggagtttaacgttaattatacgcaggacctggataaggtaatgagcgctgtcaaagggattgacggtgtatcagtgacctcttttagtgcccggaccggaaacgaggagcagacccgcatcaatttgaattgtacccagaaagcgcttatgcaggtcgttgatttcctttcgagaaacaagcaactatatcaaaagacagagatcctcagtctggagaagccactactgctgcacaccgggatgggaaggctttgtacactagacgagtcggtatcactggccaccatgattgaccggatcaagcgacatctcaagttgtctcacattaggctggctctcggcgtcggacgtaccttagagagtcaggtgaaggttgtggctctctgcgccggcagcggaagctctgtcttgcagggagtagaggcagatctgtacctgactggggagatgtcccaccatgacaccctggacgccgcatcacagggcataaacgtgattctgtgcgaacattccaacacggagcggggattcttgtccgacctgcgcgacatgttggattcacatctcgaaaacaagataaatattatactctcagaaacagatagagatcccctgcaagttgtttag

SEQ ID NO: 51803 - DNA, 1134 bp, Artificial Sequence
  derived and/or modified sequence
atgctgagcagctgcgtgcggcccgtgcccaccaccgtgcggttcgttgacagcctcatctgcaacagtagtcgatcctttatggacctcaaagctttactgagctctctgaacgattttgcatcactctcgtttgctgaaagttgggataacgttggcctgctggttgagccctcgccaccacataccgtaaacaccctgttcctgaccaacgatcttactgaagaggtcatggaggaagttctgcagaaaaaggctgaccttatcctgtcgtatcatccaccaatatttcgtcctatgaagcggatcacgtggaacacctggaaggagcgactggttattagagctctcgagaaccgtgtcggcatttacagtccgcatactgcttatgatgccgctcctcaaggcgtgaataattggttagcaaagggactgggcgcctgcacttcccggcccatacatccatccaaagctcctaattatcccaccgagggtaaccatcgagttgaattcaacgtgaactacacacaggatttggataaggttatgtccgccgtgaaaggtatcgatggggtgtctgtaacttcattctctgccagaaccgggaacgaagagcagacccgtattaatctaaattgtactcagaaggctcttatgcaggtggtagacttcctttctcgcaacaagcaactctaccagaagacagagatactgtcccttgaaaaacccctgttactgcacaccggtatggggagactctgcaccttagatgaatccgtctcactcgccacaatgatcgatcgtatcaagagacatttaaagctcagtcatatcagattggctctgggtgtaggtagaaccttggaaagtcaggtgaaagtggtcgccctatgcgctggtagtggctcttccgttctgcagggagtggaggctgatctgtacttgacaggcgagatgtcccaccatgacaccctggatgccgcttcccagggcattaatgtaatcttatgcgagcatagcaatacagaaaggggttttcttagtgatcttcgagacatgctggattcccaccttgaaaataagataaacattattctgagcgaaactgatagggatcctctccaagtcgtctag

SEQ ID NO: 51804 - DNA, 1134 bp, Artificial Sequence
  derived and/or modified sequence
atgctgagcagctgcgtgcggcccgtgcccaccaccgtgcggttcgtggactcactgatttgtaacagttctagatccttcatggacctgaaagctctcctcagtagcttgaacgatttcgccagcctgagctttgccgagtcttgggacaacgtcgggttgctggtagaaccatctcctccccatacagtgaacaccctctttctcactaatgacctcaccgaagaggtcatggaggaagttctgcagaaaaaggccgacctcatactgagctaccatccacccatcttcagacccatgaaacgaatcacatggaatacctggaaggagcgactcgtgattagagcactggaaaacagagttgggatatactctccacacactgcatatgatgcagctccgcagggagttaacaactggctcgcaaagggactaggggcctgcacaagtagaccaatccatccctctaaggcgcccaattatccaaccgaagggaaccatagagtggaattcaatgtgaactacactcaggatctggacaaagtgatgtccgccgtgaaaggcattgacggtgtttctgtcaccagtttctccgcccgaaccggcaacgaggaacaaacccgtataaacttgaactgtacacagaaggcactgatgcaggtagtggactttctgagccggaataagcaactgtatcaaaagaccgagattctgtccctggaaaagccactacttcttcatacaggaatggggcgcctctgcacgttagacgaatcagtgagtctggctactatgattgatcgaattaagcgtcatctgaagctgagccacatacgcctagcccttggcgtgggtagaaccctcgaatcccaggtgaaggttgttgccctgtgcgcaggttctggcagctctgttctgcagggggtagaggctgatctttatctgactggagaaatgagtcaccacgataccctggacgctgcgagtcaggggatcaacgtaatcctctgtgagcattctaacactgagcgcggcttcttgtcagatttgagagacatgctcgatagtcacttagaaaacaaaatcaacattattttgagtgagacagacagagacccattgcaggtggtgtag

SEQ ID NO: 51805 - DNA, 1626 bp, Artificial Sequence
  derived and/or modified sequence
actggtgagtagtgggcgatttaaaaacccgcgagtgtagttgtgaccttcgcggtaggtgccggttggggccggctgtgattgttatcttggtgctgcagaggacagcagaagaggagattgggtcagaaaactgccctgccgcaccagagcacagcgcactagtgggacaggggtcctgactcagacttaactggctgtgtctcgtggtttttcactgtcctggaaaaggcctgaagtggcactgaaatgaggcatagatgagtccccacgacagtccggtttgtagattccctgatctgcaattcttcccgttccttcatggatttgaaggctctcctttcttccttgaatgactttgcatccctctcgtttgctgagagttgggacaatgttggattactggtggaaccaagcccaccacatactgtaaatacactcttcctgaccaatgacctgactgaggaagtgatggaggaggtgctgcaaaagaaggcagacctcattctctcctaccatccgcctatcttccgacccatgaagcgcataacctggaacacatggaaggagcgcctggtgatccgggctctggagaacagagtcggtatctactctcctcatacagcctatgatgctgcgccccagggcgtcaacaactggttggctaaagggcttggagcttgtacctccaggcccatacatccttccaaagctcccaactaccctacagagggaaaccaccgagtagaattcaacgttaactacacccaagacctggacaaagtcatgtctgcagtgaaaggaattgacggtgtttctgtcacttctttttctgctaggactggtaatgaggaacaaacacggattaatctgaattgtactcagaaggctttgatgcaggtggtagattttctttcccggaacaaacaactttatcagaagacggaaattctgtcactggagaagcctttgcttctacatactggaatgggacggttatgcacactggatgaatctgtctccctggcaaccatgattgatcgaataaaaagacacctaaaactatctcatattcgcttagcccttggggtggggagaaccttagagtctcaagtcaaagtcgtggccctgtgtgctggttctgggagcagcgttctgcagggtgttgaggctgacctttacctcacaggtgagatgtcccatcatgatactttggatgctgcttcccaaggaataaatgtcatcctctgtgaacacagcaacactgaacgaggctttctttctgaccttcgagatatgctggattctcacttggagaataagataaatattatcctatcagagactgacagggaccctcttcaggtggtataattgcagaaacatcaggataacacattctacaaatcagctggatgccaacttaaatttgtaacatgagtcagtgggactggtgtgcttccagagagtgtcttcgagggtatcatcatttccggtttgttaatcttattcaccaaatgttctatcgctcgtaaggtaaaactgtaatataactaccatattaaataacaaatgttcattataaactctaggaaagattgaataaaatctgtttacttaacattc

SEQ ID NO: 51806 - DNA, 1680 bp, Artificial Sequence
  derived and/or modified sequence
gggactggtgagtagtgggcgatttaaaaacccgcgagtgtagttgtgaccttcgcggtaggtgccggttggggccggctgtgattgttatcttggtgctgcagaggacagcagaagaggagattgggtcagaaaactgccctgccgcaccagagcacagcgcactagtgggacaggggtcctgactcagacttaactggctgtgtctcgtggtttttcactgtcctggaaaaggcctgaagtggcactgaaatgaggcatagatgagaaacttgaactttacctgatttctgtatgttgtcatcttgcgtacgcccagtccccacgacagtccggtttgtagattccctgatctgcaattcttcccgttccttcatggatttgaaggctctcctttcttccttgaatgactttgcatccctctcgtttgctgagagttgggacaatgttggattactggtggaaccaagcccaccacatactgtaaatacactcttcctgaccaatgacctgactgaggaagtgatggaggaggtgctgcaaaagaaggcagacctcattctctcctaccatccgcctatcttccgacccatgaagcgcataacctggaacacatggaaggagcgcctggtgatccgggctctggagaacagagtcggtatctactctcctcatacagcctatgatgctgcgccccagggcgtcaacaactggttggctaaagggcttggagcttgtacctccaggcccatacatccttccaaagctcccaactaccctacagagggaaaccaccgagtagaattcaacgttaactacacccaagacctggacaaagtcatgtctgcagtgaaaggaattgacggtgtttctgtcacttctttttctgctaggactggtaatgaggaacaaacacggattaatctgaattgtactcagaaggctttgatgcaggtggtagattttctttcccggaacaaacaactttatcagaagacggaaattctgtcactggagaagcctttgcttctacatactggaatgggacggttatgcacactggatgaatctgtctccctggcaaccatgattgatcgaataaaaagacacctaaaactatctcatattcgcttagcccttggggtggggagaaccttagagtctcaagtcaaagtcgtggccctgtgtgctggttctgggagcagcgttctgcagggtgttgaggctgacctttacctcacaggtgagatgtcccatcatgatactttggatgctgcttcccaaggaataaatgtcatcctctgtgaacacagcaacactgaacgaggctttctttctgaccttcgagatatgctggattctcacttggagaataagataaatattatcctatcagagactgacagggaccctcttcaggtggtataattgcagaaacatcaggataacacattctacaaatcagctggatgccaacttaaatttgtaacatgagtcagtgggactggtgtgcttccagagagtgtcttcgagggtatcatcatttccggtttgttaatcttattcaccaaatgttctatcgctcgtaaggtaaaactgtaatataactaccatattaaataacaaatgttcattataaactctaggaaagattgaataaaatctgtttacttaacattc

SEQ ID NO: 51807 - DNA, 1679 bp, Artificial Sequence
  derived and/or modified sequence
cccgcgagtgtagttgtgaccttcgcggtaggtgccggttggggccggctgtgattgttatcttggtgctgcagaggacagcagaagaggagattgggtcagaaaactgccctgccgcaccagagcacagcgcactagtgggacaggggtcctgactcagacttaactggctgtgtctcgtggtttttcactgtcctggaaaaggcctgaagtggcactgaaatgaggcatagatgagttggctatgctttcttattgtgcatactatgaaatgtttttcttcaaaaagtgtttataagtgaaacttgaactttacctgatttctgtatgttgtcatcttgcgtacgcccagtccccacgacagtccggtttgtagattccctgatctgcaattcttcccgttccttcatggatttgaaggctctcctttcttccttgaatgactttgcatccctctcgtttgctgagagttgggacaatgttggattactggtggaaccaagcccaccacatactgtaaatacactcttcctgaccaatgacctgactgaggaagtgatggaggaggtgctgcaaaagaaggcagacctcattctctcctaccatccgcctatcttccgacccatgaagcgcataacctggaacacatggaaggagcgcctggtgatccgggctctggagaacagagtcggtatctactctcctcatacagcctatgatgctgcgccccagggcgtcaacaactggttggctaaagggcttggagcttgtacctccaggcccatacatccttccaaagctcccaactaccctacagagggaaaccaccgagtagaattcaacgttaactacacccaagacctggacaaagtcatgtctgcagtgaaaggaattgacggtgtttctgtcacttctttttctgctaggactggtaatgaggaacaaacacggattaatctgaattgtactcagaaggctttgatgcaggtggtagattttctttcccggaacaaacaactttatcagaagacggaaattctgtcactggagaagcctttgcttctacatactggaatgggacggttatgcacactggatgaatctgtctccctggcaaccatgattgatcgaataaaaagacacctaaaactatctcatattcgcttagcccttggggtggggagaaccttagagtctcaagtcaaagtcgtggccctgtgtgctggttctgggagcagcgttctgcagggtgttgaggctgacctttacctcacaggtgagatgtcccatcatgatactttggatgctgcttcccaaggaataaatgtcatcctctgtgaacacagcaacactgaacgaggctttctttctgaccttcgagatatgctggattctcacttggagaataagataaatattatcctatcagagactgacagggaccctcttcaggtggtataattgcagaaacatcaggataacacattctacaaatcagctggatgccaacttaaatttgtaacatgagtcagtgggactggtgtgcttccagagagtgtcttcgagggtatcatcatttccggtttgttaatcttattcaccaaatgttctatcgctcgtaaggtaaaactgtaatataactaccatattaaataacaaatgttcattataaactctag

SEQ ID NO: 51808 - DNA, 1479 bp, Artificial Sequence
  derived and/or modified sequence
aagtgccacagcatccggagcgccgacgcgggaccggaagtgacgcagagaagtttccgggactgaaacttgaactttacctgatttctgtatgttgtcatcttgcgtacgcccagtccccacgacagtccggtttgtagattccctgatctgcaattcttcccgttccttcatggatttgaaggctctcctttcttccttgaatgactttgcatccctctcgtttgctgagagttgggacaatgttggattactggtggaaccaagcccaccacatactgtaaatacactcttcctgaccaatgacctgactgaggaagtgatggaggaggtgctgcaaaagaaggcagacctcattctctcctaccatccgcctatcttccgacccatgaagcgcataacctggaacacatggaaggagcgcctggtgatccgggctctggagaacagagtcggtatctactctcctcatacagcctatgatgctgcgccccagggcgtcaacaactggttggctaaagggcttggagcttgtacctccaggcccatacatccttccaaagctcccaactaccctacagagggaaaccaccgagtagaattcaacgttaactacacccaagacctggacaaagtcatgtctgcagtgaaaggaattgacggtgtttctgtcacttctttttctgctaggactggtaatgaggaacaaacacggattaatctgaattgtactcagaaggctttgatgcaggtggtagattttctttcccggaacaaacaactttatcagaagacggaaattctgtcactggagaagcctttgcttctacatactggaatgggacggttatgcacactggatgaatctgtctccctggcaaccatgattgatcgaataaaaagacacctaaaactatctcatattcgcttagcccttggggtggggagaaccttagagtctcaagtcaaagtcgtggccctgtgtgctggttctgggagcagcgttctgcagggtgttgaggctgacctttacctcacaggtgagatgtcccatcatgatactttggatgctgcttcccaaggaataaatgtcatcctctgtgaacacagcaacactgaacgaggctttctttctgaccttcgagatatgctggattctcacttggagaataagataaatattatcctatcagagactgacagggaccctcttcaggtggtataattgcagaaacatcaggataacacattctacaaatcagctggatgccaacttaaatttgtaacatgagtcagtgggactggtgtgcttccagagagtgtcttcgagggtatcatcatttccggtttgttaatcttattcaccaaatgttctatcgctcgtaaggtaaaactgtaatataactaccatattaaataacaaatgttcattataaactctaggaaagattgaataaaatctgtttacttaacattctt

SEQ ID NO: 51809 - DNA, 1134 bp, Artificial Sequence
  derived and/or modified sequence
atgctctcgtcatgtgttaggcctgtgcccacaaccgtgcggttcgttgacagcctgatctgcaattcatcccgctctttcatggatttgaaagcgctgctatcttccctgaacgatttcgcatctttatcatttgcagaatcttgggataacgtgggattactggtggagcctagccctcctcacacagttaacaccctcttcctgaccaacgacctgactgaggaggtcatggaagaggttttgcagaaaaaggccgatcttatcctatcttaccatcctcctatctttagacctatgaagagaatcacctggaacacttggaaggagcgacttgtcatccgggctcttgagaatagggtgggcatttactccccacatacagcctacgatgcggcacctcagggggtgaataattggctggccaaagggctgggggcttgtacatcgcggcctattcatccgagcaaggccccaaattatccaaccgagggcaaccaccgtgtggaatttaacgtaaattatacacaggacttggacaaagtgatgtcggccgtgaaggggatcgacggggtaagtgtcacctctttttcggcccgaacggggaatgaggagcaaacaaggatcaacctaaattgtacgcagaaggcactgatgcaggtggtcgactttctgagtcgaaataaacagctctaccagaaaaccgaaattctctccctagaaaaacctctcctactccacactgggatggggcgattatgcactctcgacgagagcgtgtccctggcaaccatgattgatcgcatcaagaggcacctaaaacttagtcatattagactagcactcggcgtgggacgtacgctcgagtcccaagtaaaggtcgttgccctgtgtgccggaagtgggtcttctgtgctccagggcgtcgaagccgacctgtacctgacaggcgagatgtcgcatcatgacacccttgatgcagcatcccaaggcattaatgttatcctctgcgagcattcgaacaccgagcgagggttcttaagcgatctgagggacatgctggactcacatctggagaacaaaatcaacatcatcctctctgagacggaccgggaccctcttcaggtagtgtag

SEQ ID NO: 51810 - DNA, 1134 bp, Artificial Sequence
  derived and/or modified sequence
atgctgtctagttgcgtgcgtcccgtccctaccactgtcaggttcgtggatagtctcatatgtaatagctcgaggtcatttatggatctcaaggccctgctttctagtctgaacgatttcgcctcgcttagcttcgccgagtcctgggacaacgtaggcctgcttgtggaacccagcccgccacatactgtgaacaccctgttcttaacaaatgatttgaccgaagaagttatggaagaagtactgcagaagaaggctgaccttatcctgtcgtaccacccgccaatctttaggccaatgaagcgcattacttggaacacctggaaggagaggcttgtgattcgggctctggagaaccgtgtgggtatttacagcccccacaccgcttatgacgccgcaccccaaggagtgaacaactggctggcaaagggactaggagcctgtacctcccgtcctattcacccatcaaaagctccaaattaccctaccgaaggtaatcaccgagttgaatttaatgtgaattacacacaggatttggacaaggttatgtccgccgtcaagggaatagacggcgtgagcgtaacttccttttcggccaggaccggtaacgaggaacagaccagaattaacctaaattgtacccagaaagctttaatgcaggtggtagacttcctctccagaaataagcagctgtaccagaaaactgagattctctccctggagaaacctttactcctgcacacaggcatgggcaggctttgtaccctggacgagtccgtttccttagccaccatgattgataggatcaagcgccatctgaagctgagtcatataaggctcgctttgggagtgggtcgaactttagaaagtcaggtcaaggtggtggcgctgtgtgctggctccggctcctcggttttacaaggtgtcgaagcagacctgtatctcaccggagaaatgtcacatcacgatacactggatgcagccagtcagggcattaatgtaattctgtgcgagcacagcaatacagaacggggttttctgagcgatctgagagacatgcttgactcacacctggagaacaaaatcaatataatactatctgaaactgacagagacccactccaagtcgtgtag

SEQ ID NO: 51811 - DNA, 1134 bp, Artificial Sequence
  derived and/or modified sequence
atgctctcatcatgcgtgaggcctgttcctacaacagttagattcgtcgatagcctcatatgtaattcgtcccgcagcttcatggacctgaaagctctgctgagttccctaaacgattttgcctcactctcattcgctgagtcctgggacaacgtgggcctcctggtcgaaccctccccaccccatacagtgaataccctcttcctgacaaatgatctgaccgaagaggtgatggaagaggtcctgcagaagaaggccgaccttatcctgtcgtatcatcctccaatctttagaccgatgaagaggataacttggaatacctggaaggagagactcgtgattagggccttagaaaatagggttggcatctacagtcctcacaccgcatatgatgcagctccacagggggtaaacaactggctcgccaagggcctgggagcctgtacaagcagacccatccatccatctaaagcaccaaattaccctactgagggcaaccaccgggtggaattcaatgtgaattacacacaggatctggataaggtgatgagcgctgtgaaggggatcgatggcgtgagcgtaacctcattttcggccaggactggtaatgaggagcaaactaggattaatctcaattgtacacaaaaggcccttatgcaagtagtagatttcctaagccgaaacaagcagctatatcagaaaactgagatcctttccttagagaaaccactgttgctgcataccggcatgggcaggttgtgtacgctggatgagtcagtgtctctagctaccatgattgatcgaataaaacgccacctgaaactcagccacatccggctcgctctgggagttggtcggaccctcgagtctcaagttaaggtggtggccctttgtgctgggtctgggtccagcgttctccaaggcgttgaagcagatctgtatctcacaggcgagatgtctcaccacgacactctcgatgccgcatcccagggaatcaatgttatcctctgtgaacactctaacaccgagcggggttttttgagtgaccttcgagatatgctagattcccatctggaaaacaagattaatatcatcctttctgaaaccgaccgtgatcctctccaggtagtgtag

SEQ ID NO: 51812 - DNA, 1134 bp, Artificial Sequence
  derived and/or modified sequence
atgctgagcagctgcgtgagacccgtgcccaccaccgtgagattcgtggacagcctgatctgcaacagcagcagaagcttcatggacctgaaggccctgctgagcagcctgaacgacttcgccagcctgagcttcgccgagagctgggacaacgtgggcctgctggtggagcccagccccccccacaccgtgaacaccctgttcctgaccaacgacctgaccgaggaggtgatggaggaggtgctgcagaagaaggccgacctgatcctgagctaccacccccccatcttcagacccatgaagagaatcacctggaacacctggaaggagagactggtgatcagagccctggagaacagagtgggcatctacagcccccacaccgcctacgacgccgccccccagggcgtgaacaactggctggccaagggcctgggcgcctgcaccagcagacccatccaccccagcaaggcccccaactaccccaccgagggcaaccacagagtggagttcaacgtgaactacacccaggacctggacaaggtgatgagcgccgtgaagggcatcgacggcgtgagcgtgaccagcttcagcgccagaaccggcaacgaggagcagaccagaatcaacctgaactgcacccagaaggccctgatgcaggtggtggacttcctgagcagaaacaagcagctgtaccagaagaccgagatcctgagcctggagaagcccctgctgctgcacaccggcatgggcagactgtgcaccctggacgagagcgtgagcctggccaccatgatcgacagaatcaagagacacctgaagctgagccacatcagactggccctgggcgtgggcagaaccctggagagccaggtgaaggtggtggccctgtgcgccggcagcggcagcagcgtgctgcagggcgtggaggccgacctgtacctgaccggcgagatgagccaccacgacaccctggacgccgccagccagggcatcaacgtgatcctgtgcgagcacagcaacaccgagagaggcttcctgagcgacctgagagacatgctggacagccacctggagaacaagatcaacatcatcctgagcgagaccgacagagaccccctgcaggtggtgtag

SEQ ID NO: 51813 - DNA, 1416 bp, Artificial Sequence
  derived and/or modified sequence
atgtctgaaggcgtggacctcatcgatatctacgcagatgaggaattcaaccaagaccctgaattcaacaacactgatcagattgacctgtacgatgatgtactaaccgcgactagtcagcccagtgatgatcggtcatcatcaactgagcccccgcccccagtcaggcaggagcctagcccaaagcctaataataaaacacccgccatactctacacctatagcggtctgcgtaatagaagagcggcggtgtacgtagggtcattctcatggtggaccacagatcaacagttgatacaggtcattcggtccattggagtctatgatgtcgttgagctcaagtttgcggaaaatagagctaacggacagtccaaaggctacgccgaggtggtggtggcctccgaaaattcagtccacaagctgttggagctcctgcccggaaaggttcttaacggcgagaaggtagacgtccggccggccacacggcagaatctcagtcagttcgaggcacaggccagaaaaagagagtgcgttagggtaccgagggggggtataccacctcgagcccactccagggactcgtctgatagcgctgacgggcgggcgacaccaagcgaaaatctggtgcctagcagcgcacgggtggacaaaccgccttcagtgctgccttactttaaccggccgcccagcgcccttcctctaatgggtctgccaccacctcctatcccccctccaccccccctctcaagttcatttggagtgcctcctcccccaccagggattcactatcagcatctcatgccccccccaccaaggctgcctccccatctagctgtgcctccacctggcgcgatccccccagctctccatttgaacccggccttcttcccccctcccaacgccacagtcggtccgcctcccgacacctatatgaaggcttcagctccctacaatcaccacggcagtagagattcgggacctcctccatcaactgttagtgaagctgaattcgaggatattatgaagagaaatagagccattagctctagcgcaatcagcaaagctgtctctggggcgagcgccggggactatagcgatgccatcgaaactcttctgactgctatagcagtgatcaaacagagtcgagttgcgaatgatgaacgctgtcgagttcttatcagctccctgaaagactgtctgcacgggattgaagccaagagttattcggtcggtgcctctgggagtagctccaggaaacgccatcgcagccgggaacggtccccttctcggtccagggaaagctcccgcaggcatagagatttattacataacgaggaccgccacgatgactattttcaggagcgtaatcgagaacatgagaggcacagagatcgggaacgcgaccggcaccattag

SEQ ID NO: 51814 - DNA, 1416 bp, Artificial Sequence
  derived and/or modified sequence
atgtctgagggcgtggacctgattgacatctatgcagatgaggagttcaaccaggaccctgagttcaacaacacagaccagattgacctgtatgatgatgtgctgacagccaccagccagcccagtgatgacaggagcagcagcacagagcccccacctcctgtgcggcaggagcccagccccaagcccaacaacaagaccccagccatcctgtacacctacagcggcctgaggaacagaagagctgctgtgtatgtgggcagcttctcctggtggaccacagaccagcagctgatccaggtgatccgcagcattggagtgtatgatgtggtggagctgaagtttgctgaaaatagagccaacggccagagcaagggctacgccgaggtggtggtggcctctgaaaattctgtgcacaagctgctggagctgctgcccgggaaggtgctgaatggagagaaggtggatgtgcggcctgccacccggcagaacctgagccagtttgaggcccaggccaggaagcgggagtgtgtgcgggtgccccggggcggcatccccccccgggcccacagccgggacagcagtgacagcgcagatggccgggccaccccatctgagaacctggtgcccagcagcgcccgggtggacaagccacccagcgtgctgccctacttcaaccggccccccagcgccctgcccctgatgggcctgcccccaccacccatccccccacctccacccctgagcagcagctttggagtgcccccacctcctcctggcatccactaccagcacctgatgcctcctccaccccggctgcccccccacctggccgtgcccccacctggggccatccccccagccctgcacctgaacccagccttcttccccccaccaaatgccaccgtgggccccccaccagacacctacatgaaggccagcgccccctacaaccaccacggcagccgggacagcggccccccacccagcacagtgtctgaggccgagtttgaggacatcatgaagaggaacagagccatcagcagcagcgccatcagcaaggctgtgtctggggccagcgctggggactacagtgatgccatcgagaccctgctgacagccatcgccgtcatcaagcagagccgggtggccaatgatgagcgctgccgggtgctgatcagcagcctgaaggactgcctgcatggaattgaggccaagagctacagcgtgggcgccagcggcagcagcagcaggaagaggcacaggagccgggagaggagccccagccgcagccgggagagcagccgccgccaccgggacctgctgcacaatgaagatagacatgatgactacttccaggagaggaaccgggagcacgagcggcaccgggaccgggagcgggacagacaccactag

SEQ ID NO: 51815 - DNA, 1416 bp, Artificial Sequence
  derived and/or modified sequence
atgagcgagggcgtggacctgatcgacatctacgccgacgaggagttcaaccaagatcctgagttcaacaacactgaccagattgacttatacgacgatgttctcactgcaacttcccagccatctgatgatcgtagcagcagtactgagccccccccccctgtgaggcaggagccctcacctaagcccaataacaagacacctgccatcctatatacatattccggtttacgcaacagaagagctgctgtgtacgtagggagttttagctggtggacgacagaccagcaactgattcaggtcataagatccatcggcgtctatgatgtggttgagctcaagtttgctgaaaacagagcaaacggccaatctaaggggtatgccgaggtagtagtggcaagcgagaactctgtacataagctcttggaactcctacccggcaaggtgctgaatggtgagaaagtggatgtccgtcccgctaccaggcagaacctctcccaattcgaagcacaggctagaaaacgcgagtgcgtgcgcgtgcctaggggaggcattcctccacgtgcccacagtcgcgacagcagcgattccgccgatggccgcgctactcccagcgagaatctcgtgcctagtagcgcaagggttgacaaaccaccctcagtgctgccatatttcaaccgtccccccagcgcactccccttaatgggcctcccacctcctcccatacccccacctcctcccctttctagtagtttcggtgtgccccctcccccgcctggcatccattaccagcacctaatgccaccacctccccggctgccaccacacttggccgtgcccccccctggggcaattcccccagcactacatctgaatcccgccttttttccccccccaaacgcaacagtgggaccaccaccggatacctacatgaaagcttcagccccgtataaccaccacggctcaagggacagcggacctccccctagcacggtgagtgaagccgagttcgaagacatcatgaagcggaaccgcgccataagttccagtgccatctccaaggcagtgagcggcgcgtctgcaggggattattctgatgccatcgaaactctactcactgcaatcgcagttatcaaacagtcacgtgtggcaaacgatgagagatgccgagttctgatttcttccttaaaggactgtctccacggaattgaggctaagtcctactctgtgggagcctccggctctagctctagaaagagacaccgtagccgggaaagaagcccatcccgatctagagaaagcagccggagacacagggaccttctgcacaatgaggatcgccatgacgattactttcaggagcggaaccgggagcacgaacgccacagagatcgagagagggatagacatcactag

SEQ ID NO: 51816 - DNA, 1416 bp, Artificial Sequence
  derived and/or modified sequence
atgagcgaaggggtcgatcttatcgacatctatgcagatgaagaatttaaccaggacccggaattcaataacaccgatcagatcgacctttacgatgacgtactgactgctacaagccagccatcagatgatagaagctcgtcaacagagccccctcccccagtacgtcaggaacccagccctaaaccaaacaataagacacccgctattctgtatacttatagtggccttaggaatcggcgtgccgctgtttacgtcggatccttcagctggtggactacagatcagcagctgattcaggttatccgatccatcggtgtgtatgacgtagttgagctgaagtttgccgagaatcgggcaaacggccaatcaaaagggtacgctgaggtagtggtggcctcagagaattccgttcataaattactggaattgctgccagggaaagtgcttaacggggaaaaagtagatgtgcggccagctacccgccagaatctgtcccagttcgaagcccaagcccgtaaaagagaatgcgtgcgtgtacctcgcggaggcataccgccaagggcacactcacgagactcctcggactccgccgacggcagagccactccaagtgagaatctggtaccatccagcgcgcgtgtcgacaagcctccgtctgtgcttccctacttcaatcggccaccatccgctcttcctctaatgggcctgccgcctcctcctatccctcctccccctcctttatcctcctctttcggtgtgcccccacctcctccgggtatccactaccaacatctgatgcctccgccaccgcgtttaccgccacacctggcggtgcctcctcccggtgccattcctcctgctctgcacctgaaccccgctttttttccccctcccaatgccacggtcggaccgccacccgacacatatatgaaggcgtccgcaccctataaccaccatggctctcgcgatagcggaccacccccttctaccgtgagcgaggccgaattcgaggatatcatgaaacggaaccgagcaatttctagctctgcaatctccaaagctgtgagtggtgcttccgcaggtgactattccgatgcaatcgagaccttattgacagccatagccgtaataaagcaatcccgcgtggctaatgacgaaagatgccgtgtcctcatcagcagccttaaggattgcttgcacggcatcgaagccaaaagctactccgttggcgcttcaggttcttccagtaggaaacgccaccgaagtcgggaacgcagcccgtctcgctccagagagtcctctcgccgacaccgcgacctcttacataatgaggataggcatgatgactattttcaggaacgcaaccgcgaacacgagaggcaccgagatcgcgagagggatcgccatcactag

SEQ ID NO: 51817 - DNA, 1416 bp, Artificial Sequence
  derived and/or modified sequence
atgagcgagggcgtggacctgatcgacatctacgccgacgaggagttcaaccaggaccccgagttcaacaacaccgaccagatcgacctgtacgacgacgtgctgaccgccaccagccagcccagcgacgacagaagcagcagcaccgagccccccccccccgtgagacaggagcccagccccaagcccaacaacaagacccccgccatcctgtacacctacagcggcctgagaaacagaagagccgccgtgtacgtgggcagcttcagctggtggaccaccgaccagcagctgatccaggtgatcagaagcatcggcgtgtacgacgtggtggagctgaagttcgccgagaacagagccaacggccagagcaagggctacgccgaggtggtggtggccagcgagaacagcgtgcacaagctgctggagctgctgcccggcaaggtgctgaacggcgagaaggtggacgtgagacccgccaccagacagaacctgagccagttcgaggcccaggccagaaagagagagtgcgtgagagtgcccagaggcggcatcccccccagagcccacagcagagacagcagcgacagcgccgacggcagagccacccccagcgagaacctggtgcccagcagcgccagagtggacaagccccccagcgtgctgccctacttcaacagaccccccagcgccctgcccctgatgggcctgccccccccccccatccccccccccccccccctgagcagcagcttcggcgtgcccccccccccccccggcatccactaccagcacctgatgccccccccccccagactgcccccccacctggccgtgcccccccccggcgccatcccccccgccctgcacctgaaccccgccttcttccccccccccaacgccaccgtgggccccccccccgacacctacatgaaggccagcgccccctacaaccaccacggcagcagagacagcggccccccccccagcaccgtgagcgaggccgagttcgaggacatcatgaagagaaacagagccatcagcagcagcgccatcagcaaggccgtgagcggcgccagcgccggcgactacagcgacgccatcgagaccctgctgaccgccatcgccgtgatcaagcagagcagagtggccaacgacgagagatgcagagtgctgatcagcagcctgaaggactgcctgcacggcatcgaggccaagagctacagcgtgggcgccagcggcagcagcagcagaaagagacacagaagcagagagagaagccccagcagaagcagagagagcagcagaagacacagagacctgctgcacaacgaggacagacacgacgactacttccaggagagaaacagagagcacgagagacacagagacagagagagagacagacaccactag

SEQ ID NO: 51818 - protein, 155 aa, Artificial Sequence [sequence omitted]

SEQ ID NO: 51819 - protein, 296 aa, Artificial Sequence
  derived and/or modified sequence
MGLEKLHPFDAGKWGKVINFLKEEKLLSDSMLVEAREASEEDLLVVHTRRYLNELKRKVLRPLRTQTGGTIMAGKLAVERGWAINVGGGFHHCSSDRGGGFCAYADITLAIKFLFERVEGISRATIIDLDAHQGNGHERDFMDDKRVYIMDVYNRHIYPGDRFAKQAIRRKVELEWGTEDDEYLDKVERNIKKSLQEHLPDVVVYNAGTDILEGDRLGGLSISPAGIVKRDELVFRMVRGRRVPILMVTSGGYQKRTARIIADSILNLFGLGLIGPESPSVSAQNSDTPLLPPAVP

SEQ ID NO: 51820 - DNA, 891 bp, Artificial Sequence
  derived and/or modified sequence
atgggcctggagaagctgcaccccttcgacgccggcaagtggggcaaggtgatcaacttcctgaaggaggagaagctgctgagcgacagcatgctggtggaggccagagaggccagcgaggaggacctgctggtggtgcacaccagaagatacctgaacgagctgaagagaaaggtgctgagacccctgagaacccagaccggcggcaccatcatggccggcaagctggccgtggagagaggctgggccatcaacgtgggcggcggcttccaccactgcagcagcgacagaggcggcggcttctgcgcctacgccgacatcaccctggccatcaagttcctgttcgagagagtggagggcatcagcagagccaccatcatcgacctggacgcccaccagggcaacggccacgagagagacttcatggacgacaagagagtgtacatcatggacgtgtacaacagacacatctaccccggcgacagattcgccaagcaggccatcagaagaaaggtggagctggagtggggcaccgaggacgacgagtacctggacaaggtggagagaaacatcaagaagagcctgcaggagcacctgcccgacgtggtggtgtacaacgccggcaccgacatcctggagggcgacagactgggcggcctgagcatcagccccgccggcatcgtgaagagagacgagctggtgttcagaatggtgagaggcagaagagtgcccatcctgatggtgaccagcggcggctaccagaagagaaccgccagaatcatcgccgacagcatcctgaacctgttcggcctgggcctgatcggccccgagagccccagcgtgagcgcccagaacagcgacacccccctgctgccccccgccgtgccctag

SEQ ID NO: 51821 - DNA, 891 bp, Artificial Sequence
  derived and/or modified sequence
atgggtcttgaaaagcttcatcctttcgacgctggcaaatggggtaaggttatcaatttcctgaaggaggaaaaattactgtccgattctatgctagtggaggccagagaggcttctgaagaagacctgctcgtcgtgcacacgcgacggtacctgaacgaactcaagcggaaggtgttgaggcctcttaggactcagaccgggggtacaatcatggcagggaagttggccgtggagcggggatgggcaattaatgttggcgggggcttccatcattgctcgtccgaccggggtggggggttttgcgcctacgctgatattaccctcgccattaaattcctctttgagagagttgaagggatctccagagccacaataattgacctagatgcacatcaggggaatggccacgagagagattttatggacgacaagcgggtgtatatcatggacgtgtataatcgacatatatatcctggggaccgctttgccaaacaggccatcaggcgcaaagtggaattggaatggggaacagaggacgacgagtacctggacaaggtggagcggaacataaagaagagcctccaggaacatttacccgacgtagttgtctacaacgccggcaccgatatactggaaggagatcgcttaggaggtctgtctatcagtcctgcgggaatcgtaaagagggacgagctcgtctttagaatggtccggggcaggagggtgcccatcctcatggtgacatcgggcggatatcagaagagaaccgcacgcattatcgctgattccattctgaacctattcggacttgggcttatcgggccagagtcaccctctgtgagtgcccagaatagcgacaccccccttttgccccctgccgtgccgtag

SEQ ID NO: 51822 - DNA, 891 bp, Artificial Sequence
  derived and/or modified sequence
atgggcctggagaagctgcacccctttgatgctgggaagtggggcaaggtgatcaacttcctgaaggaggagaagctgctgagtgacagcatgctggtggaggcccgggaggccagcgaggaggacctgctggtggtgcacacccggcgctacctgaatgagctgaagaggaaggtgctgcggcccctgcggacccagacaggaggcaccatcatggccggcaagctggccgtggagcggggctgggccatcaacgtgggcggcggcttccaccactgcagcagtgaccggggcggcggcttctgtgcctatgctgacatcaccctggccatcaagttcctgtttgagcgggtggagggcatcagccgggccaccatcatcgacctggatgcccaccagggcaatggacatgagcgggacttcatggatgacaagagggtgtacatcatggatgtgtacaacagacacatctacccaggggacagatttgccaagcaggccatccggaggaaggtggagctggagtggggcacagaagatgatgagtacctggacaaggtggagaggaacatcaagaagagcctgcaggagcacctgcctgatgtggtggtgtacaatgccggcacagacatcctggagggggaccggctgggcggcctgagcatcagccctgctggcatcgtgaagagagatgagctggtgttcaggatggtgcggggcagaagagtgcccatcctgatggtgaccagcggcggctaccagaagaggacagcccgcatcatcgctgacagcatcctgaacctgtttggcctgggcctcatcggccctgagagccccagcgtgtctgcccagaacagcgacacccccctgctgcccccagctgtgccctag

SEQ ID NO: 51823 - DNA, 891 bp, Artificial Sequence
  derived and/or modified sequence
atgggcctggagaagctgcaccccttcgacgccggcaagtggggcaaagtgatcaattttctgaaagaggaaaagctcctgtcggactcaatgctggtggaggccagggaggcgtctgaggaagatttgctcgttgtgcacaccaggaggtacctgaacgagcttaaacggaaggtactgagacctctcagaacacagactgggggaacgattatggccggcaagttagccgtggaacggggctgggcaatcaacgttgggggcggcttccaccattgctcctctgaccggggcggtggattctgtgcctacgcagatattactctcgctattaagtttttattcgagcgcgttgagggcatcagtcgcgctacaataatcgacttagatgcccatcagggtaatggtcacgagagagacttcatggatgataaaagggtctatatcatggacgtctataatagacatatttatcctggcgatcgcttcgccaaacaggcaatcaggcgaaaggtagaattagaatggggcaccgaagacgatgaatacctggacaaagtggagcgcaatattaaaaagtctctccaagaacatctccccgatgtagtagtctacaacgctggaactgacatactcgagggcgaccgtctaggtggattgagcatctcacctgccggaatcgtgaagagagatgagctcgtttttaggatggtgcggggccggcgggtgcccattctgatggttacctctggcgggtaccagaagcggacggccagaataatcgccgactccatattaaacctattcgggcttggactgatcggtcctgaatctccttccgtgtcagcccaaaactccgacactccgctgctccctccagcggtgccctag

SEQ ID NO: 51824 - DNA, 891 bp, Artificial Sequence
  derived and/or modified sequence
atggggcttgagaagctgcacccttttgatgctggtaaatggggaaaggtgatcaatttccttaaagaggaaaaattgctatcagattcaatgctcgtggaagcccgtgaagcaagcgaagaagacctgctggtggtgcacacgcgtcggtatctgaatgagcttaagcgaaaggttctacgaccgctgaggacacagaccggaggtacaattatggctggaaaacttgccgttgagcgtggctgggcgattaacgtcggcggaggcttccaccactgctcgtcagaccgtggcggaggtttctgcgcgtatgctgatataacgctcgccattaaattcctattcgaacgggttgaaggaattagccgcgctacgatcattgatctcgacgctcatcagggcaacgggcatgaacgagacttcatggatgacaaacgagtatatatcatggatgtgtacaaccggcatatttatccgggagataggttcgccaagcaggccattcgcagaaaagtagaactggaatggggcacggaagacgacgaatatttggacaaggtcgaaaggaacatcaaaaagagtctccaggaacacctaccggacgttgtggtgtacaatgcgggtactgacattcttgaaggcgatcgcttaggagggttgagtataagtcccgcaggcatcgtgaagcgcgacgagctggtttttagaatggttaggggaagacgcgtcccaatacttatggtgacatcgggaggttatcagaagcgaacagcacgcattattgccgattcgattttaaacctgtttgggctggggctgattgggcctgagtccccttccgtctctgctcagaatagcgacaccccccttctgccgccagcggttccctag

SEQ ID NO: 51825 - protein, 692 aa, Artificial Sequence
  derived and/or modified sequence
MVTTLGPKMAAEWGGGVGYSGSGPGRSRWRWSGSVWVRSVLLLLGGLRASATSTPVSLGSSPPCRHHVPSDTEVINKVHLKANHVVKRDVDEHLRIKTVYDKSVEELLPEKKNLVKNKLFPQAISYLEKTFQVRRPAGTILLSRQCATNQYLRKENDPHRYCTGECAAHTKCGPVIVPEEHLQQCRVYRGGKWPHGAVGVPDQEGISDADFVLYVGALATERCSHENIISYAAYCQQEANMDRPIAGYANLCPNMISTQPQEFVGMLSTVKHEVIHALGFSAGLFAFYHDKDGNPLTSRFADGLPPFNYSLGLYQWSDKVVRKVERLWDVRDNKIVRHTVYLLVTPRVVEEARKHFDCPVLEGMELENQGGVGTELNHWEKRLLENEAMTGSHTQNRVLSRITLALMEDTGWYKANYSMAEKLDWGRGMGCDFVRKSCKFWIDQQRQKRQMLSPYCDTLRSNPLQLTCRQDQRAVAVCNLQKFPKPLPQEYQYFDELSGIPAEDLPYYGGSVEIADYCPFSQEFSWHLSGEYQRSSDCRILENQPEIFKNYGAEKYGPHSVCLIQKSAFVMEKCERKLSYPDWGSGCYQVSCSPQGLKVWVQDTSYLCSRAGQVLPVSIQMNGWIHDGNLLCPSCWDFCELCPPETDPPATNLTRALPLDLCSCSSSLVVTLWLLLGNLFPLLAGFLLCIWH

SEQ ID NO: 51826 - protein, 640 aa, Artificial Sequence
  derived and/or modified sequence
MGRRSGLLGLRPGPEPVALERVINKVHLKANHVVKRDVDEHLRIKTVYDKSVEELLPEKKNLVKNKLFPQAISYLEKTFQVRRPAGTILLSRQCATNQYLRKENDPHRYCTGECAAHTKCGPVIVPEEHLQQCRVYRGGKWPHGAVGVPDQEGISDADFVLYVGALATERCSHENIISYAAYCQQEANMDRPIAGYANLCPNMISTQPQEFVGMLSTVKHEVIHALGFSAGLFAFYHDKDGNPLTSRFADGLPPFNYSLGLYQWSDKVVRKVERLWDVRDNKIVRHTVYLLVTPRVVEEARKHFDCPVLEGMELENQGGVGTELNHWEKRLLENEAMTGSHTQNRVLSRITLALMEDTGWYKANYSMAEKLDWGRGMGCDFVRKSCKFWIDQQRQKRQMLSPYCDTLRSNPLQLTCRQDQRAVAVCNLQKFPKPLPQEYQYFDELSGIPAEDLPYYGGSVEIADYCPFSQEFSWHLSGEYQRSSDCRILENQPEIFKNYGAEKYGPHSVCLIQKSAFVMEKCERKLSYPDWGSGCYQVSCSPQGLKVWVQDTSYLCSRAGQVLPVSIQMNGWIHDGNLLCPSCWDFCELCPPETDPPATNLTRALPLDLCSCSSSLVVTLWLLLGNLFPLLAGFLLCIWH

SEQ ID NO: 51827 - DNA, 2079 bp, Artificial Sequence
  derived and/or modified sequence
atggtgaccaccctgggccccaagatggccgccgagtggggcggcggcgtgggctacagcggcagcggccccggcagaagcagatggagatggagcggcagcgtgtgggtgagaagcgtgctgctgctgctgggcggcctgagagccagcgccaccagcacccccgtgagcctgggcagcagccccccctgcagacaccacgtgcccagcgacaccgaggtgatcaacaaggtgcacctgaaggccaaccacgtggtgaagagagacgtggacgagcacctgagaatcaagaccgtgtacgacaagagcgtggaggagctgctgcccgagaagaagaacctggtgaagaacaagctgttcccccaggccatcagctacctggagaagaccttccaggtgagaagacccgccggcaccatcctgctgagcagacagtgcgccaccaaccagtacctgagaaaggagaacgacccccacagatactgcaccggcgagtgcgccgcccacaccaagtgcggccccgtgatcgtgcccgaggagcacctgcagcagtgcagagtgtacagaggcggcaagtggccccacggcgccgtgggcgtgcccgaccaggagggcatcagcgacgccgacttcgtgctgtacgtgggcgccctggccaccgagagatgcagccacgagaacatcatcagctacgccgcctactgccagcaggaggccaacatggacagacccatcgccggctacgccaacctgtgccccaacatgatcagcacccagccccaggagttcgtgggcatgctgagcaccgtgaagcacgaggtgatccacgccctgggcttcagcgccggcctgttcgccttctaccacgacaaggacggcaaccccctgaccagcagattcgccgacggcctgccccccttcaactacagcctgggcctgtaccagtggagcgacaaggtggtgagaaaggtggagagactgtgggacgtgagagacaacaagatcgtgagacacaccgtgtacctgctggtgacccccagagtggtggaggaggccagaaagcacttcgactgccccgtgctggagggcatggagctggagaaccagggcggcgtgggcaccgagctgaaccactgggagaagagactgctggagaacgaggccatgaccggcagccacacccagaacagagtgctgagcagaatcaccctggccctgatggaggacaccggctggtacaaggccaactacagcatggccgagaagctggactggggcagaggcatgggctgcgacttcgtgagaaagagctgcaagttctggatcgaccagcagagacagaagagacagatgctgagcccctactgcgacaccctgagaagcaaccccctgcagctgacctgcagacaggaccagagagccgtggccgtgtgcaacctgcagaagttccccaagcccctgccccaggagtaccagtacttcgacgagctgagcggcatccccgccgaggacctgccctactacggcggcagcgtggagatcgccgactactgccccttcagccaggagttcagctggcacctgagcggcgagtaccagagaagcagcgactgcagaatcctggagaaccagcccgagatcttcaagaactacggcgccgagaagtacggcccccacagcgtgtgcctgatccagaagagcgccttcgtgatggagaagtgcgagagaaagctgagctaccccgactggggcagcggctgctaccaggtgagctgcagcccccagggcctgaaggtgtgggtgcaggacaccagctacctgtgcagcagagccggccaggtgctgcccgtgagcatccagatgaacggctggatccacgacggcaacctgctgtgccccagctgctgggacttctgcgagctgtgcccccccgagaccgacccccccgccaccaacctgaccagagccctgcccctggacctgtgcagctgcagcagcagcctggtggtgaccctgtggctgctgctgggcaacctgttccccctgctggccggcttcctgctgtgcatctggcactag

SEQ ID NO: 51828 - DNA, 1923 bp, Artificial Sequence
  derived and/or modified sequence
atgggcagaagaagcggcctgctgggcctgagacccggccccgagcccgtggccctggagagagtgatcaacaaggtgcacctgaaggccaaccacgtggtgaagagagacgtggacgagcacctgagaatcaagaccgtgtacgacaagagcgtggaggagctgctgcccgagaagaagaacctggtgaagaacaagctgttcccccaggccatcagctacctggagaagaccttccaggtgagaagacccgccggcaccatcctgctgagcagacagtgcgccaccaaccagtacctgagaaaggagaacgacccccacagatactgcaccggcgagtgcgccgcccacaccaagtgcggccccgtgatcgtgcccgaggagcacctgcagcagtgcagagtgtacagaggcggcaagtggccccacggcgccgtgggcgtgcccgaccaggagggcatcagcgacgccgacttcgtgctgtacgtgggcgccctggccaccgagagatgcagccacgagaacatcatcagctacgccgcctactgccagcaggaggccaacatggacagacccatcgccggctacgccaacctgtgccccaacatgatcagcacccagccccaggagttcgtgggcatgctgagcaccgtgaagcacgaggtgatccacgccctgggcttcagcgccggcctgttcgccttctaccacgacaaggacggcaaccccctgaccagcagattcgccgacggcctgccccccttcaactacagcctgggcctgtaccagtggagcgacaaggtggtgagaaaggtggagagactgtgggacgtgagagacaacaagatcgtgagacacaccgtgtacctgctggtgacccccagagtggtggaggaggccagaaagcacttcgactgccccgtgctggagggcatggagctggagaaccagggcggcgtgggcaccgagctgaaccactgggagaagagactgctggagaacgaggccatgaccggcagccacacccagaacagagtgctgagcagaatcaccctggccctgatggaggacaccggctggtacaaggccaactacagcatggccgagaagctggactggggcagaggcatgggctgcgacttcgtgagaaagagctgcaagttctggatcgaccagcagagacagaagagacagatgctgagcccctactgcgacaccctgagaagcaaccccctgcagctgacctgcagacaggaccagagagccgtggccgtgtgcaacctgcagaagttccccaagcccctgccccaggagtaccagtacttcgacgagctgagcggcatccccgccgaggacctgccctactacggcggcagcgtggagatcgccgactactgccccttcagccaggagttcagctggcacctgagcggcgagtaccagagaagcagcgactgcagaatcctggagaaccagcccgagatcttcaagaactacggcgccgagaagtacggcccccacagcgtgtgcctgatccagaagagcgccttcgtgatggagaagtgcgagagaaagctgagctaccccgactggggcagcggctgctaccaggtgagctgcagcccccagggcctgaaggtgtgggtgcaggacaccagctacctgtgcagcagagccggccaggtgctgcccgtgagcatccagatgaacggctggatccacgacggcaacctgctgtgccccagctgctgggacttctgcgagctgtgcccccccgagaccgacccccccgccaccaacctgaccagagccctgcccctggacctgtgcagctgcagcagcagcctggtggtgaccctgtggctgctgctgggcaacctgttccccctgctggccggcttcctgctgtgcatctggcactag

SEQ ID NO: 51829 - DNA, 2079 bp, Artificial Sequence
  derived and/or modified sequence
atggtgaccacccttggacccaagatggccgcagagtgggggggcggtgtgggctactccggatccggccctgggcgcagccggtggaggtggagcgggagtgtctgggttcgctctgtgctcctgttactgggcggactcagagcgtctgcaacatccacccctgtgtctctcggcagtagcccaccctgcagacaccacgtgccaagtgacactgaggtgatcaataaggtgcatttgaaagccaatcacgtcgtgaagagggacgtggacgagcatctgcgcataaaaacagtttacgataagagtgtcgaagaactgttaccagagaaaaagaacctggttaagaataaactgttcccccaggccatctcatatctggagaagacattccaggtgaggcgccccgccggcacaatcttactctctcgccagtgtgccacaaatcaatatctaagaaaggagaatgatccccaccggtactgcactggtgaatgcgccgctcacactaagtgtggtccagtcatcgtgcctgaggagcacctgcagcagtgtcgcgtgtatagaggtggtaagtggccacacggcgccgtaggcgttcctgatcaggaaggtatctcagatgccgacttcgtgctgtacgtgggcgcgctcgccaccgagcggtgctcgcatgaaaacatcatctcatatgctgcatactgtcagcaagaagccaacatggataggccaattgctgggtatgctaatttatgtcccaatatgatttcaactcagccacaagagttcgtgggcatgctgtccaccgtgaagcatgaggtgattcatgcactgggatttagcgccggactcttcgcattctaccatgacaaggacggcaacccactcacctcccgctttgccgacggtctgcctccctttaattactcactcggactctaccagtggtctgacaaggtggtgagaaaagtggagcggctctgggatgtgcgtgataataagattgtgagacacacggtctatctgctggtaacccctcgcgtggtcgaggaggcgcgcaagcactttgactgtcctgtgttagaaggcatggagttggagaatcagggcggggtggggactgagctgaatcattgggaaaagcgcttacttgagaacgaagccatgactggcagtcatacacagaaccgggtattgtctaggatcacacttgccctgatggaagatacaggctggtataaagcaaactacagcatggctgagaaacttgattggggtcggggtatgggctgcgacttcgtgcgcaaaagctgcaagttttggattgaccagcagagacagaagcgacagatgctatccccctattgcgacactctgcgcagcaaccctctacaattaacctgcaggcaggaccagagagctgtggcggtgtgcaatcttcaaaagtttcccaagccattaccacaggagtatcagtacttcgacgagctgtcaggaattcctgccgaagacctgccctactacggcggaagcgttgaaatagcagattactgcccgttctcccaggagttcagctggcacctgagcggcgagtaccagcgaagtagcgattgccggatactagagaaccagcccgaaatttttaagaactatggggcggagaagtatggtcctcactcagtttgtcttatccagaagagtgccttcgttatggagaaatgtgaacgaaaactgagctaccctgactgggggtctgggtgttatcaggtctcctgctcaccgcagggtctgaaagtgtgggtgcaagatacttcatacctgtgcagtcgggccggacaagtgttacccgttagtatccagatgaatggctggatccacgacgggaacttattgtgtccatcttgctgggatttctgtgaactttgtcccccagaaaccgacccacctgcaaccaacctgactcgcgctctgcccctagatctgtgctcatgcagttcatctctcgtcgtaactctgtggctgctgttaggcaatctcttccctctgttggccggattcctcctctgcatttggcattag

SEQ ID NO: 51830 - DNA, 1923 bp, Artificial Sequence
  derived and/or modified sequence
atggggaggagatccggcctgctgggactgaggccaggaccggaacccgtggctctggagagagttataaacaaggtccatctgaaggcaaaccacgtggtgaagcgagacgtggatgaacacctcagaattaagacagtttatgacaagagtgtagaggaactgctgcccgaaaaaaaaaatttggtcaagaacaagcttttccctcaagcaatctcatacttggaaaagaccttccaggtcagaagacccgctggaaccattctgctgagtcgtcagtgcgccactaaccaatatctgcgcaaggagaacgacccccaccgttactgtaccggcgagtgcgccgctcatacaaagtgcgggcccgtgatcgtgcctgaagagcatctgcagcaatgtcgggtctacagggggggtaagtggcctcatggcgccgttggtgtaccggaccaggagggtatctccgacgccgatttcgtactatacgtgggagctctggcaaccgaacgatgttctcacgaaaacatcatctcctacgcggcttattgccagcaggaggcaaacatggatcggcctatcgccggctacgccaacttgtgccctaatatgatctccacccaaccacaagaattcgtagggatgctctctaccgtgaaacacgaggtgattcatgctctgggattttctgccggtctgttcgctttttaccatgataaagatggaaatccgctcacatctagattcgccgatggtctgcccccattcaattacagcttaggcctctaccagtggagcgataaggtcgtgcggaaagtggaacgcttgtgggacgtgagagataacaagatcgttaggcacaccgtgtatctgctggtcacaccaagagtcgtcgaagaggcgcgcaagcattttgactgccctgtcctggagggtatggaattggaaaaccaaggcggggtgggcaccgaactgaatcactgggaaaagcgactgttggaaaacgaggcaatgaccggatcccacacccaaaatcgcgtgctctccaggattactctggctctcatggaagataccgggtggtataaggccaactattccatggctgaaaagctggattggggccggggcatgggatgcgactttgtgaggaaaagttgtaaattctggatcgaccagcagaggcaaaagcgccagatgctatccccttactgcgacacactgcgatcaaacccactgcaactgacctgtcggcaagaccagcgggccgtggctgtctgtaacctacaaaaatttcctaaaccactgccgcaggaatatcagtattttgatgagctgtctggcattcctgcggaggacctcccttattatggaggcagcgttgagattgctgattactgcccattctcccaggagttctcatggcatctgtcaggcgaataccagcgctcatccgactgcagaattctggaaaaccagccagaaatctttaaaaactacggtgctgagaaatatggacctcactctgtgtgcttaatacagaagtccgcttttgtgatggagaagtgtgagagaaaactctcataccctgattggggctccggatgttatcaggtatcgtgctcaccgcaaggcctcaaggtctgggtgcaggacacgagttatctgtgctccagggctggacaggttctgccagtgagcatccagatgaacgggtggattcatgatggcaacctgctctgtccgtcctgctgggacttttgtgaattatgtcctccggagacggatcctcctgcgacaaacctgactcgggccctccctttagacctgtgttcctgttctagttccctggtggtgactttatggctgcttcttggaaacttattccccctgctggccggtttcttactctgcatatggcattag

SEQ ID NO: 51831 - DNA, 2079 bp, Artificial Sequence
  derived and/or modified sequence
atggtgaccaccctgggccccaagatggctgctgagtggggcggcggcgtgggctacagcggcagcggccctggccgcagccgctggcgctggagcggctctgtgtgggtgcgctctgtgctgctgctgctgggcggcctgcgggccagcgccaccagcacccctgtgtccctgggcagcagccccccctgccgccaccacgtgcccagcgacacagaggtgatcaacaaggtgcacctgaaggccaaccacgtggtgaagagagatgtggatgagcacctgcgcatcaagacagtgtatgacaagtctgtggaggagctgctgcctgagaagaagaacctggtgaagaacaagctgttcccccaggccatctcctacctggagaagaccttccaggtgcggcggcctgctggcaccatcctgctgagccggcagtgtgccaccaaccagtacctgaggaaagaaaatgacccccaccgctactgcacaggagaatgtgccgcccacaccaagtgtggccctgtgattgtgcctgaggagcacctgcagcagtgccgggtgtaccggggcggcaagtggccccatggagctgtgggcgtgcctgaccaggagggcatcagtgatgctgactttgtgctgtatgtgggcgccctggccacagagcgctgcagccatgagaacatcatctcctatgctgcctactgccagcaggaggccaacatggaccggcccatcgccggctacgccaacctgtgccccaacatgatcagcacccagccccaggagtttgtgggcatgctgagcacagtgaagcatgaggtgatccacgccctgggcttctctgctggcctgtttgccttctaccatgacaaggatggcaaccccctgaccagcagatttgctgatggcctgccccccttcaactacagcctgggcctgtaccagtggagcgacaaggtggtgaggaaggtggagcggctgtgggatgtgcgggacaacaagatcgtgcgccacacagtgtacctgctggtgaccccccgggtggtggaggaggccaggaagcactttgactgccctgtgctggagggcatggagctggagaaccagggcggcgtgggcacagagctgaaccactgggagaagaggctgctggagaatgaggccatgacaggcagccacacccagaacagagtgctgagccgcatcaccctggccctgatggaggacaccggctggtacaaggccaactacagcatggccgagaagctggactggggccggggcatgggctgtgactttgtgaggaagagctgcaagttctggattgaccagcagaggcagaagaggcagatgctgagcccctactgtgacaccctgcggagcaaccccctgcagctgacctgccggcaggaccagagagctgtggccgtgtgcaacctgcagaagttccccaagcccctgccccaggagtaccagtactttgatgagctgagcggcatcccagctgaggacctgccctactacggcggctctgtggagattgctgactactgccccttcagccaggagttctcctggcacctgtctggagagtaccagaggagcagtgactgccgcatcctggagaaccagcctgagatcttcaagaactatggagctgagaagtatggcccccacagcgtgtgcctgatccagaagagcgcctttgtgatggagaagtgtgagaggaagctgagctacccagactggggcagcggctgctaccaggtgtcctgcagcccccagggcctgaaggtgtgggtgcaggacaccagctacctgtgcagcagagctggccaggtgctgcctgtgtccatccagatgaatggctggattcatgatggcaacctgctgtgccccagctgctgggacttctgtgagctgtgccccccagagacagaccccccagccaccaacctgacccgggccctgcccctggacctgtgcagctgcagcagcagcctggtggtgaccctgtggctgctgctgggcaacctcttccccctgctggccggcttcctgctgtgcatctggcactag

SEQ ID NO: 51832 - DNA, 1923 bp, Artificial Sequence
  derived and/or modified sequence
atgggcagaagaagtggcctgctgggcctgcggcccggccctgagcctgtggccctggagagggtcatcaacaaggtgcacctgaaggccaaccacgtggtgaagagagatgtggatgagcacctgcgcatcaagacagtgtatgacaagtctgtggaggagctgctgcctgagaagaagaacctggtgaagaacaagctgttcccccaggccatctcctacctggagaagaccttccaggtgcggcggcctgctggcaccatcctgctgagccggcagtgtgccaccaaccagtacctgaggaaagaaaatgacccccaccgctactgcacaggagaatgtgccgcccacaccaagtgtggccctgtgattgtgcctgaggagcacctgcagcagtgccgggtgtaccggggcggcaagtggccccatggagctgtgggcgtgcctgaccaggagggcatcagtgatgctgactttgtgctgtatgtgggcgccctggccacagagcgctgcagccatgagaacatcatctcctatgctgcctactgccagcaggaggccaacatggaccggcccatcgccggctacgccaacctgtgccccaacatgatcagcacccagccccaggagtttgtgggcatgctgagcacagtgaagcatgaggtgatccacgccctgggcttctctgctggcctgtttgccttctaccatgacaaggatggcaaccccctgaccagcagatttgctgatggcctgccccccttcaactacagcctgggcctgtaccagtggagcgacaaggtggtgaggaaggtggagcggctgtgggatgtgcgggacaacaagatcgtgcgccacacagtgtacctgctggtgaccccccgggtggtggaggaggccaggaagcactttgactgccctgtgctggagggcatggagctggagaaccagggcggcgtgggcacagagctgaaccactgggagaagaggctgctggagaatgaggccatgacaggcagccacacccagaacagagtgctgagccgcatcaccctggccctgatggaggacaccggctggtacaaggccaactacagcatggccgagaagctggactggggccggggcatgggctgtgactttgtgaggaagagctgcaagttctggattgaccagcagaggcagaagaggcagatgctgagcccctactgtgacaccctgcggagcaaccccctgcagctgacctgccggcaggaccagagagctgtggccgtgtgcaacctgcagaagttccccaagcccctgccccaggagtaccagtactttgatgagctgagcggcatcccagctgaggacctgccctactacggcggctctgtggagattgctgactactgccccttcagccaggagttctcctggcacctgtctggagagtaccagaggagcagtgactgccgcatcctggagaaccagcctgagatcttcaagaactatggagctgagaagtatggcccccacagcgtgtgcctgatccagaagagcgcctttgtgatggagaagtgtgagaggaagctgagctacccagactggggcagcggctgctaccaggtgtcctgcagcccccagggcctgaaggtgtgggtgcaggacaccagctacctgtgcagcagagctggccaggtgctgcctgtgtccatccagatgaatggctggattcatgatggcaacctgctgtgccccagctgctgggacttctgtgagctgtgccccccagagacagaccccccagccaccaacctgacccgggccctgcccctggacctgtgcagctgcagcagcagcctggtggtgaccctgtggctgctgctgggcaacctcttccccctgctggccggcttcctgctgtgcatctggcactag

SEQ ID NO: 51833 - DNA, 2079 bp, Artificial Sequence
  derived and/or modified sequence
atggtgaccaccctgggccccaagatggccgccgagtggggcggcggggtgggttatagcggctcaggccctggccggtccagatggagatggagcggaagcgtatgggttaggtctgttctgctgttgttagggggactccgagcttccgctacatctaccccagtttctctgggaagctctccgccctgtaggcatcacgtgccatctgatacggaagtcatcaacaaggttcacctgaaggccaaccacgtggtgaagagggacgtggacgagcacctgaggatcaaaaccgtgtacgataagagtgtggaagaacttctgccagaaaagaaaaaccttgtaaagaacaaactctttccccaggctatctcttacttggaaaagaccttccaggtcagacggccagccggtaccatcctgctctcccggcaatgtgccacgaaccagtatttaaggaaagaaaatgatccacaccggtattgcaccggcgagtgtgcagctcataccaagtgcggacccgtcatcgtgcccgaggaacacttgcagcagtgtagagtatacaggggaggcaagtggccacacggcgcagtgggagttccagaccaggaaggcatttccgacgcagattttgtcctatatgtgggcgctctggctactgagagatgtagtcacgagaatatcatctcatatgcggcctattgccagcaggaggcaaacatggatcgcccgatcgcaggttacgccaatttatgccctaacatgatatcaacacaacctcaggaattcgtcggaatgctttcgacagtaaagcatgaggtgatccatgccttgggcttcagcgctggtttatttgcgttttaccatgataaagacggcaatcccctgacgagtaggtttgccgatggtctgccacctttcaactactctttgggcctttaccagtggagtgataaggtggtgagaaaagtggagagactgtgggatgtacgggacaataaaatagtgcgacacactgtgtacctcctcgtgaccccaagggtagttgaggaggctcgcaagcacttcgactgtcctgtgcttgagggaatggaactcgagaaccagggcggtgtgggcacagaacttaaccattgggaaaaacggctgcttgaaaatgaagcaatgactggatcacatactcagaatcgcgtcctgtctagaatcacccttgcactcatggaagacaccggatggtataaggcaaattattcgatggctgaaaagctggattggggccgtggcatggggtgcgatttcgtccgtaagtcttgtaagttttggatcgaccaacaaagacagaagaggcagatgttgtctccatactgtgatacacttaggtccaatcctttacagctgacctgtagacaggatcagcgagcagtcgccgtatgcaacctgcagaagtttccaaagccgctaccacaggagtaccagtactttgacgaattgtctggaattcctgcagaggatcttccttattacggaggttctgtggagatcgcagactactgcccattcagccaggaattctcatggcatctatctggcgagtaccagcgctcatctgactgccggatactggaaaaccagcctgaaattttcaagaattacggagctgagaaatatggccctcattctgtgtgtttaatacagaagtcagccttcgtgatggagaagtgtgagcgcaagctcagttatcctgattggggaagtgggtgttaccaggtgtcatgctccccccaaggactgaaagtgtgggtgcaggatacaagctacctctgttcccgggctggacaggtcctgcctgtgtctattcagatgaatggttggatccacgacggaaatctcctctgccccagctgctgggacttttgtgaactttgcccgccagaaacagatccacctgcaaccaacctgacacgcgctctccctcttgacctatgttcatgcagcagctcccttgttgtcaccctgtggctgcttctgggcaatctgttcccattactggccggattcctgttgtgcatctggcactag

SEQ ID NO: 51834 - DNA, 1923 bp, Artificial Sequence
  derived and/or modified sequence
atgggccggcggagcggcctgctgggcctgcggcccggccccgagccggtagccttggagagggtgatcaacaaggtacacctgaaggccaaccacgtggttaaacgtgatgttgatgaacatttacgcatcaaaactgtctacgacaaaagcgtcgaggagttactccccgaaaagaagaacctggtgaaaaataaactctttcctcaggctatctcctatcttgagaaaacttttcaggttcgccgaccagcaggcaccattctactctcgaggcaatgcgctaccaatcagtatttaaggaaggagaatgacccgcaccgatactgcacaggggaatgtgctgcacatactaagtgcgggcccgttattgtgccagaggagcacctgcagcaatgccgcgtatacaggggagggaagtggccccacggcgccgtgggggtgcctgatcaggaagggatctctgatgctgatttcgtcttgtacgtgggcgcgttggccaccgaacgctgttcccacgagaacatcattagctatgccgcttattgccagcaggaggccaacatggaccgcccaattgccggctatgctaatctttgccctaacatgatcagtacccagccccaggaattcgtcggtatgttaagtaccgtgaagcatgaggttattcatgctctcgggttctcagctgggttatttgcgttctatcacgataaggatggaaatcctttgacttccagattcgcagatggtcttccacccttcaactacagcctgggcttgtatcagtggagtgacaaagtggttcgaaaagtcgagaggctctgggacgtaagggataataaaatcgttcgccataccgtgtatctgttggttacaccaagggtcgtggaagaggcaaggaagcacttcgactgcccggtcctcgaaggaatggaactagagaatcagggtggagtgggcaccgagttaaatcattgggagaagcggctgctggaaaatgaggccatgacggggtcacatacgcagaacagggttctgagcaggattacccttgctctgatggaggataccggatggtacaaagccaactattccatggctgagaaactcgactgggggcgcggcatgggatgtgatttcgttaggaagtcctgcaaattttggatagatcaacagcggcaaaagaggcagatgttatctccctactgtgatacattacgaagcaaccccctgcagcttacctgtaggcaggaccagcgggcagtggccgtctgtaatctccagaagttcccgaaacccctgccccaagaatatcagtacttcgacgagttgagtggtatcccagcggaggatctaccatactacggcggatctgttgagatagccgactactgccccttctctcaagagttcagttggcatctgtcaggagaataccaaagaagctcggattgcagaattctggaaaatcagccagaaatcttcaagaattatggcgcggaaaaatatggcccacattctgtgtgcctgatccagaagtcggcatttgtaatggaaaaatgcgagaggaagttaagctaccccgactggggctctggatgctaccaagttagttgctccccacagggactaaaagtgtgggtgcaggacaccagctacctttgttcacgcgcaggtcaggtgctgcccgtctctatccagatgaatggttggatccatgacggtaacctcctgtgccccagctgctgggatttttgcgagttatgcccccctgaaaccgaccctcctgctacaaatctgacccgggccctcccactggatctctgtagctgttcatcatctctggtggtgacactctggctgctcctgggtaacctctttcccctgctggctggctttttactgtgcatatggcattag

SEQ ID NO: 51835 - DNA, 2423 bp, Artificial Sequence
  derived and/or modified sequence
atggtaacgacgctcggcccgaagatggcggccgaatggggcggaggagtgggttactcgggctcaggcccgggccggagccggtggcgctggagcgggtctgtgtgggtccgaagcgttttactcctgttgggcgggctccgggccagcgccacatctactcccgtctccttgggcagttcccctccctgccggcaccacgtcccctctgacactgaggtcataaataaagttcatcttaaggcaaatcatgtggtcaagagagatgttgatgagcatttaagaatcaagactgtctatgataaaagtgttgaagagttgctccctgagaaaaagaatcttgtaaagaacaagcttttcccacaagcgatttcttatttagagaagacttttcaggtccgtcgacctgcgggcactatcttacttagcagacaatgtgcaacaaaccaatacctccggaaggaaaacgatcctcacaggtactgcaccggggagtgtgccgcacacacaaagtgcggccccgttattgttcctgaggaacatctccagcaatgccgggtctaccgtgggggtaagtggcctcatggagcagtgggtgtgccagaccaagaaggcatctcagatgcagactttgttctttacgttggtgctctggccaccgagagatgcagccatgaaaacatcatctcttatgcagcctattgtcagcaggaagcaaacatggacaggccaatagcaggatatgctaacctgtgtccaaatatgatctctacccagcctcaggagtttgttgggatgctgtccacagtgaaacatgaggttattcatgccctgggtttctctgctgggctgtttgcattctaccatgataaagatggaaatcctctcacttcaagatttgcagatggcctcccaccttttaattatagtctgggattatatcaatggagtgataaagtagttcgaaaagtggagagattatgggatgttcgagataataagatagttcgtcacactgtgtatctcctggtaacgcctcgtgttgttgaggaagcacgaaaacattttgattgtccagttctagagggaatggaacttgaaaatcaaggtggtgtgggcactgagctcaaccattgggaaaaaaggttattagagaatgaagcgatgactggttctcacactcagaatcgagtactctctcgaatcactctggcattaatggaggacactggctggtataaagcaaattacagcatggctgagaagttagactggggccgaggaatgggctgtgactttgtcaggaagagctgtaaattctggattgatcagcagagacaaaagagacagatgctgagcccttactgtgacacgctcagaagtaacccactgcagctaacttgcagacaggaccagagagcagttgccgtgtgtaatttgcagaagttccctaagcctttaccacaggaataccagtactttgatgaactcagtggaatacctgcagaagatttgccttattatggtggctccgtggaaattgctgactactgccctttcagtcaggaattcagttggcatttaagtggtgaatatcagcgcagctcagattgtagaatattggaaaatcaaccagaaatttttaagaactatggcgctgaaaagtatggacctcattccgtttgtctaattcagaaatcagcattcgttatggagaagtgtgagaggaagctgagttacccagactggggaagcggatgctatcaggtttcttgttctcctcaaggtctgaaagtttgggtccaagatacttcatatttgtgtagtcgggctgggcaggtcctccctgtcagtatccagatgaatggctggattcacgatggaaacctgctctgcccatcatgttgggacttctgtgagctctgtcctccagaaacagatcctccagccactaacctgacccgagctctgccacttgatctttgttcctgttcctcgagcctggtggtcaccctctggcttctgctaggcaatctgtttcctctgctggctggatttcttctgtgtatatggcactaggaatggaaaagtggatcttcaagatattcttttatgttatgttcttgtgaacaaagcacaaagtttgagtgagtgccaacctatgcagatggtagaagtggcattcctggctttggcttggaagaattgacgaccatcagaccttgaagcagaacttcacagcagcctgtcctcatcagcaacccaaccaccttcatcagcaacccaaccaccttcatcagcaacccaaccacctcgtcagcaacccaaccacctcgtcagcaacccaaccacctcgtcagcaacccagccaccttcatcagcaacccaaccacctcatcagcaacccagccaccttcatcagc

SEQ ID NO: 51836 - DNA, 2079 bp, Artificial Sequence
  derived and/or modified sequence
atggtgacaaccctcgggcctaaaatggccgctgagtggggtggcggagtcgggtactccggcagtggcccagggagatcacgctggcggtggtctgggtccgtctgggtgaggagcgtgctgctccttctgggaggactgcgggcatctgctacctctactcctgtctccttgggatcatcacccccttgccggcatcatgtccctagcgatactgaagtgataaataaagtgcacttgaaagcaaaccacgtcgttaaacgggacgtggatgagcatttgagaattaagacggtgtacgacaagtcagtggaagaactgctccccgaaaaaaagaacttagtcaaaaataaactgttcccacaagcgatatcctacctggagaaaacttttcaggtgcgaagacctgccggtacaatcttattgagtcgccagtgtgcaacaaatcagtacttaagaaaagagaacgatccgcaccggtattgcactggggagtgcgccgctcacaccaaatgcggaccggtcattgtgcccgaagagcacctgcagcagtgtcgggtataccggggtggaaaatggccacacggggctgtgggcgtgcccgaccaggagggcatcagcgatgcagactttgtgctctatgttggcgcactggcaacagagcgatgctcccatgaaaacattatatcttacgccgcatactgtcagcaagaagctaacatggatcggccaattgcagggtacgctaatttatgcccaaacatgatctccactcagccacaggaatttgtaggcatgctgtctaccgtcaagcacgaggtcatccatgcccttggattcagtgcgggtttatttgccttctaccatgacaaagatggcaaccccctgacttcccgctttgctgacggactgcctcccttcaattacagcctcggactttatcaatggtcagataaggtggttcggaaggttgaaaggctgtgggacgtgcgagataataaaatcgttcgacacactgtctacctgctcgtgaccccgagggtggtcgaagaagcacggaaacattttgattgccccgtgctcgaggggatggaattggagaatcagggtggcgtgggaaccgagctgaatcattgggaaaagcgtctgctcgagaacgaagccatgacaggttcgcacacccagaacagggttctgagcaggatcacactggcactcatggaagataccggatggtataaagcaaactactccatggcggaaaagctggactggggtagggggatgggctgcgatttcgttaggaagtcatgcaagttctggattgaccagcagcggcaaaagagacagatgctgtccccttactgtgacacgctgcggtctaatcccctccagctgacgtgtcggcaggatcaaagagctgtggcggtttgtaacctccagaagtttcccaagcctctgccgcaagagtatcagtactttgacgaactgtctggcatccctgccgaggatttaccctattacggcggtagcgtagagatcgcagattactgtcccttcagccaggagtttagctggcacctctccggcgagtatcagagaagtagtgactgtcgcatcctcgagaaccagccagagattttcaagaactatggagccgaaaaatacggtccgcattccgtttgtctgatccagaagtcagcctttgtcatggagaagtgcgaacgcaaattgagctatcccgactgggggagcgggtgctaccaagtctcctgcagcccgcaggggttgaaggtgtgggtgcaagacacgagctatctatgctccagggcgggacaagttctgcctgtgagcattcagatgaatggctggatccacgatggtaatctcctgtgtccctcctgttgggatttttgcgagctctgtccaccagagacggatcctcccgcaacaaatctcaccagagcactgccattggatctatgttcttgctcatcaagtcttgtagtaaccctttggctactactgggcaacctgtttccattgctagccggatttttactgtgcatttggcactag

SEQ ID NO: 51837 - DNA, 1923 bp, Artificial Sequence
  derived and/or modified sequence
atgggcaggagaagcggcctcctgggattgagacccggtccggaaccagttgctctggagcgtgtgataaataaggtgcacctgaaagcaaatcatgtggtgaagagagatgtcgacgagcatttgcgcatcaagactgtttacgataaatccgtcgaagaacttctgcccgagaaaaagaatctagtgaaaaacaaattattcccacaggctatctcctacctggagaaaaccttccaggttaggcgtccagccggtaccattctcctttcgcgacagtgcgcaaccaaccaatacctcaggaaggagaacgatccgcataggtactgtacaggcgaatgcgcggcacacaccaagtgtgggccagtgattgtgcccgaggaacatctccagcagtgcagagtgtatcggggagggaagtggccccacggagctgtgggagtgccagatcaggaggggatttccgatgctgatttcgtgctgtatgtcggggcactcgctaccgagagatgcagccatgagaatattatcagttacgccgcttactgtcagcaagaggcaaatatggataggccaatcgctggctacgcaaacctgtgtcctaatatgatttcgacacaaccccaggagttcgtcgggatgttgagcactgtcaaacacgaggtgattcacgctctcggtttttcagccggtctcttcgccttctaccacgacaaagacggcaatcccctgacctcaaggtttgccgacggattgccccctttcaattactccctggggctgtatcagtggtccgacaaggtcgtgcggaaggtagaaagattatgggatgtgagggacaataagattgtgaggcacacagtctaccttctagtgacacccagagtcgtcgaagaggccagaaaacactttgactgtccggtccttgaaggaatggaacttgagaaccaaggaggggttggcacagaactgaaccactgggagaaaagactgcttgaaaatgaagcgatgacgggttctcatacacaaaacagggtgctcagcagaataactctagcactcatggaagacaccggatggtataaagccaactactcgatggcagagaagttggattggggcaggggaatgggctgcgatttcgtgagaaagtcctgcaaattttggatagatcaacaacgacagaagcgtcaaatgttatcgccctactgtgatacacttcggtctaatcccctccagctgacatgtagacaagaccagagggctgtggcagtgtgcaatctgcagaagttcccgaagccactgccacaggagtaccaatacttcgacgagttgagcggcatccctgcagaagatcttccgtattacggagggagcgtagagattgcagattattgtcctttcagccaggagttttcttggcacctgtccggtgagtatcagcgcagttccgactgtcgaatcctcgaaaaccagccggaaatctttaagaactacggcgctgagaagtacggccctcactccgtctgtttaatccagaagagtgcctttgtcatggagaaatgcgaacggaagctcagctaccccgactggggctctgggtgttaccaggtgagctgttcccctcagggcctgaaggtttgggtccaggatactagttacttgtgtagccgcgctgggcaggtgctgcccgtttccattcagatgaatgggtggatccatgacggcaatctgttgtgtccttcctgctgggacttctgtgagctgtgtcccccagagacagacccgcctgcaaccaacctgactcgggctctgcccctggacctgtgttcctgcagctcctctctcgtggtaacattgtggctgctcttggggaacctgttcccactgctagctggctttctgttgtgtatctggcactag

SEQ ID NO: 51838 - DNA, 2010 bp, Artificial Sequence
  derived and/or modified sequence
gcgcagaggcgtcacgcactccatggtaacgacgctcggcccgaagatggcggccgaatggggcggaggagtgggttactcgggctcaggcccgggccggagccggtggcgctggagcgggtcataaataaagttcatcttaaggcaaatcatgtggtcaagagagatgttgatgagcatttaagaatcaagactgtctatgataaaagtgttgaagagttgctccctgagaaaaagaatcttgtaaagaacaagcttttcccacaagcgatttcttatttagagaagacttttcaggtccgtcgacctgcgggcactatcttacttagcagacaatgtgcaacaaaccaatacctccggaaggaaaacgatcctcacaggtactgcaccggggagtgtgccgcacacacaaagtgcggccccgttattgttcctgaggaacatctccagcaatgccgggtctaccgtgggggtaagtggcctcatggagcagtgggtgtgccagaccaagaaggcatctcagatgcagactttgttctttacgttggtgctctggccaccgagagatgcagccatgaaaacatcatctcttatgcagcctattgtcagcaggaagcaaacatggacaggccaatagcaggatatgctaacctgtgtccaaatatgatctctacccagcctcaggagtttgttgggatgctgtccacagtgaaacatgaggttattcatgccctgggtttctctgctgggctgtttgcattctaccatgataaagatggaaatcctctcacttcaagatttgcagatggcctcccaccttttaattatagtctgggattatatcaatggagtgataaagtagttcgaaaagtggagagattatgggatgttcgagataataagatagttcgtcacactgtgtatctcctggtaacgcctcgtgttgttgaggaagcacgaaaacattttgattgtccagttctagagggaatggaacttgaaaatcaaggtggtgtgggcactgagctcaaccattgggaaaaaaggttattagagaatgaagcgatgactggttctcacactcagaatcgagtactctctcgaatcactctggcattaatggaggacactggctggtataaagcaaattacagcatggctgagaagttagactggggccgaggaatgggctgtgactttgtcaggaagagctgtaaattctggattgatcagcagagacaaaagagacagatgctgagcccttactgtgacacgctcagaagtaacccactgcagctaacttgcagacaggaccagagagcagttgccgtgtgtaatttgcagaagttccctaagcctttaccacaggaataccagtactttgatgaactcagtggaatacctgcagaagatttgccttattatggtggctccgtggaaattgctgactactgccctttcagtcaggaattcagttggcatttaagtggtgaatatcagcgcagctcagattgtagaatattggaaaatcaaccagaaatttttaagaactatggcgctgaaaagtatggacctcattccgtttgtctaattcagaaatcagcattcgttatggagaagtgtgagaggaagctgagttacccagactggggaagcggatgctatcaggtttcttgttctcctcaaggtctgaaagtttgggtccaagatacttcatatttgtgtagtcgggctgggcaggtcctccctgtcagtatccagatgaatggctggattcacgatggaaacctgctctgcccatcatgttgggacttctgtgagctctgtcctccagaaacagatcctccagccactaacctgacccgagctctgccacttgatctttgttcctgttcctcgagcctggtggtcaccctctggcttctgctaggcaatctgtttcctctgctggctggatttcttctgtgtatatggcactaggaatggaaaagtggatcttcaagatattct

SEQ ID NO: 51839 - protein, 1059 aa, Artificial Sequence
  derived and/or modified sequence
MVDVLLLFSLCLLFHISRPDLSHNRLSFIKASSMSHLQSLREVKLNNNELETIPNLGPVSANITLLSLAGNRIVEILPEHLKEFQSLETLDLSSNNISELQTAFPALQLKYLYLNSNRVTSMEPGYFDNLANTLLVLKLNRNRISAIPPKMFKLPQLQHLELNRNKIKNVDGLTFQGLGALKSLKMQRNGVTKLMDGAFWGLSNMEILQLDHNNLTEITKGWLYGLLMLQELHLSQNAINRISPDAWEFCQKLSELDLTFNHLSRLDDSSFLGLSLLNTLHIGNNRVSYIADCAFRGLSSLKTLDLKNNEISWTIEDMNGAFSGLDKLRRLILQGNRIRSITKKAFTGLDALEHLDLSDNAIMSLQGNAFSQMKKLQQLHLNTSSLLCDCQLKWLPQWVAENNFQSFVNASCAHPQLLKGRSIFAVSPDGFVCDDFPKPQITVQPETQSAIKGSNLSFICSAASSSDSPMTFAWKKDNELLHDAEMENYAHLRAQGGEVMEYTTILRLREVEFASEGKYQCVISNHFGSSYSVKAKLTVNMLPSFTKTPMDLTIRAGAMARLECAAVGHPAPQIAWQKDGGTDFPAARERRMHVMPEDDVFFIVDVKIEDIGVYSCTAQNSAGSISANATLTVLETPSFLRPLLDRTVTKGETAVLQCIAGGSPPPKLNWTKDDSPLVVTERHFFAAGNQLLIIVDSDVSDAGKYTCEMSNTLGTERGNVRLSVIPTPTCDSPQMTAPSLDDDGWATVGVVIIAVVCCVVGTSLVWVVIIYHTRRRNEDCSITNTDETNLPADIPSYLSSQGTLADRQDGYVSSESGSHHQFVTSSGAGFFLPQHDSSGTCHIDNSSEADVEAATDLFLCPFLGSTGPMYLKGNVYGSDPFETYHTGCSPDPRTVLMDHYEPSYIKKKECYPCSHPSEESCERSFSNISWPSHVRKLLNTSYSHNEGPGMKNLCLNKSSLDFSANPEPASVASSNSFMGTFGKALRRPHLDAYSSFGQPSDCQPRAFYLKAHSSPDLDSGSEEDGKERTDFQEENHICTFKQTLENYRTPNFQSYDLDT

SEQ ID NO: 51840 - DNA, 3180 bp, Artificial Sequence
  derived and/or modified sequence
atggtggacgtgctgctgctgttcagcctgtgcctgctgttccacatcagcagacccgacctgagccacaacagactgagcttcatcaaggccagcagcatgagccacctgcagagcctgagagaggtgaagctgaacaacaacgagctggagaccatccccaacctgggccccgtgagcgccaacatcaccctgctgagcctggccggcaacagaatcgtggagatcctgcccgagcacctgaaggagttccagagcctggagaccctggacctgagcagcaacaacatcagcgagctgcagaccgccttccccgccctgcagctgaagtacctgtacctgaacagcaacagagtgaccagcatggagcccggctacttcgacaacctggccaacaccctgctggtgctgaagctgaacagaaacagaatcagcgccatcccccccaagatgttcaagctgccccagctgcagcacctggagctgaacagaaacaagatcaagaacgtggacggcctgaccttccagggcctgggcgccctgaagagcctgaagatgcagagaaacggcgtgaccaagctgatggacggcgccttctggggcctgagcaacatggagatcctgcagctggaccacaacaacctgaccgagatcaccaagggctggctgtacggcctgctgatgctgcaggagctgcacctgagccagaacgccatcaacagaatcagccccgacgcctgggagttctgccagaagctgagcgagctggacctgaccttcaaccacctgagcagactggacgacagcagcttcctgggcctgagcctgctgaacaccctgcacatcggcaacaacagagtgagctacatcgccgactgcgccttcagaggcctgagcagcctgaagaccctggacctgaagaacaacgagatcagctggaccatcgaggacatgaacggcgccttcagcggcctggacaagctgagaagactgatcctgcagggcaacagaatcagaagcatcaccaagaaggccttcaccggcctggacgccctggagcacctggacctgagcgacaacgccatcatgagcctgcagggcaacgccttcagccagatgaagaagctgcagcagctgcacctgaacaccagcagcctgctgtgcgactgccagctgaagtggctgccccagtgggtggccgagaacaacttccagagcttcgtgaacgccagctgcgcccacccccagctgctgaagggcagaagcatcttcgccgtgagccccgacggcttcgtgtgcgacgacttccccaagccccagatcaccgtgcagcccgagacccagagcgccatcaagggcagcaacctgagcttcatctgcagcgccgccagcagcagcgacagccccatgaccttcgcctggaagaaggacaacgagctgctgcacgacgccgagatggagaactacgcccacctgagagcccagggcggcgaggtgatggagtacaccaccatcctgagactgagagaggtggagttcgccagcgagggcaagtaccagtgcgtgatcagcaaccacttcggcagcagctacagcgtgaaggccaagctgaccgtgaacatgctgcccagcttcaccaagacccccatggacctgaccatcagagccggcgccatggccagactggagtgcgccgccgtgggccaccccgccccccagatcgcctggcagaaggacggcggcaccgacttccccgccgccagagagagaagaatgcacgtgatgcccgaggacgacgtgttcttcatcgtggacgtgaagatcgaggacatcggcgtgtacagctgcaccgcccagaacagcgccggcagcatcagcgccaacgccaccctgaccgtgctggagacccccagcttcctgagacccctgctggacagaaccgtgaccaagggcgagaccgccgtgctgcagtgcatcgccggcggcagccccccccccaagctgaactggaccaaggacgacagccccctggtggtgaccgagagacacttcttcgccgccggcaaccagctgctgatcatcgtggacagcgacgtgagcgacgccggcaagtacacctgcgagatgagcaacaccctgggcaccgagagaggcaacgtgagactgagcgtgatccccacccccacctgcgacagcccccagatgaccgcccccagcctggacgacgacggctgggccaccgtgggcgtggtgatcatcgccgtggtgtgctgcgtggtgggcaccagcctggtgtgggtggtgatcatctaccacaccagaagaagaaacgaggactgcagcatcaccaacaccgacgagaccaacctgcccgccgacatccccagctacctgagcagccagggcaccctggccgacagacaggacggctacgtgagcagcgagagcggcagccaccaccagttcgtgaccagcagcggcgccggcttcttcctgccccagcacgacagcagcggcacctgccacatcgacaacagcagcgaggccgacgtggaggccgccaccgacctgttcctgtgccccttcctgggcagcaccggccccatgtacctgaagggcaacgtgtacggcagcgaccccttcgagacctaccacaccggctgcagccccgaccccagaaccgtgctgatggaccactacgagcccagctacatcaagaagaaggagtgctacccctgcagccaccccagcgaggagagctgcgagagaagcttcagcaacatcagctggcccagccacgtgagaaagctgctgaacaccagctacagccacaacgagggccccggcatgaagaacctgtgcctgaacaagagcagcctggacttcagcgccaaccccgagcccgccagcgtggccagcagcaacagcttcatgggcaccttcggcaaggccctgagaagaccccacctggacgcctacagcagcttcggccagcccagcgactgccagcccagagccttctacctgaaggcccacagcagccccgacctggacagcggcagcgaggaggacggcaaggagagaaccgacttccaggaggagaaccacatctgcaccttcaagcagaccctggagaactacagaacccccaacttccagagctacgacctggacacctag

SEQ ID NO: 51841 - DNA, 3180 bp, Artificial Sequence
  derived and/or modified sequence
atggtggatgtgttactgctgttttctttgtgcctgctctttcatataagcaggccagatctcagccacaatagactgagcttcattaaggcctcctctatgagtcatcttcagtcacttagagaggtgaaactcaataataacgagctggagaccatacccaacctgggacctgtctctgccaacattacacttctgagtctggccggcaatcgaatcgtggagatcctcccagaacacctcaaggagttccagagcctcgagacccttgacctgagctccaacaacataagtgagctccagacagcattcccagcacttcaacttaagtacctttatctgaattcaaatagggtcacatcgatggaacctggctatttcgacaaccttgctaatacgctgctggtgctcaagcttaatcggaatcgcataagcgcaattccgcccaaaatgtttaaactcccacagctccaacatttggaactaaatcgtaacaagataaagaatgtggatggtctcacattccaaggtcttggagctctgaagtcgcttaaaatgcaacgtaacggggtcacaaagcttatggacggggccttctggggcttgtctaacatggagatcttacagcttgaccacaataatttaacagagataacaaaaggctggttatatggcctccttatgctacaagaactgcacctgtcacagaacgcaattaacaggatttctcccgatgcctgggaattttgccaaaagctgagcgagctggatctgactttcaaccacctgtcccggcttgacgacagctccttcttgggacttagccttctgaatactttacatatcggcaacaaccgagtttcttacatcgccgactgcgctttccgtggcctgtcttctctgaaaaccctggatcttaaaaataatgagattagctggacaatcgaggacatgaacggcgcgttttctggactggacaaactccgaagactcattctacagggaaacagaatccgcagcattacaaagaaagcttttaccgggctcgatgccttggaacatctagacctcagcgacaacgccataatgtcgctccagggcaatgctttctcgcagatgaagaagttgcagcagctccaccttaacaccagcagcctcttgtgcgattgtcagttgaagtggctcccacaatgggtcgcagaaaataatttccagtctttcgtgaatgcaagctgcgcccaccctcagctgttaaaaggacgcagtatattcgccgtttccccagatggattcgtctgcgacgacttccctaagccacagatcacagtgcaacccgagacacagagtgcaatcaaagggagtaacctttcattcatttgcagtgcagcctcttcatctgacagccctatgacattcgcatggaaaaaggacaacgagctgctgcatgacgccgagatggagaattatgcgcacttgagggctcaaggaggcgaggtgatggagtacacaaccattcttagactgagggaggtcgagttcgcaagcgagggcaagtaccaatgcgtgattagtaaccacttcggtagcagctattcggtgaaagccaaattgaccgtcaacatgctgcccagttttacgaaaacacctatggatctgacaattcgagccggggcaatggcacgcctagagtgcgccgccgtggggcatcccgcgcctcagatagcctggcagaaagacgggggtacagatttccctgctgctagagagcgaagaatgcatgttatgcctgaggatgacgtgttcttcattgtggatgtgaaaattgaggatataggggtttattcttgcaccgctcagaattcggccggtagcatctccgctaacgcgaccctgaccgtgttagagacaccctccttcctgcggcctctgctcgatcgtacggtgaccaaaggagagaccgcggtgctccagtgcatcgcaggcgggtcaccacctcctaagctgaattggaccaaggacgactctcctctggtagtgacagaaagacatttctttgcagctgggaaccagcttttgatcattgtcgacagcgatgtgagcgacgctggaaagtacacttgcgaaatgtcaaatacactcggtacagaacgcgggaatgtgcgacttagtgtcatcccaacgccaacatgtgactccccccagatgacggctccatcattggacgacgatggatgggccactgttggtgtcgtgattatagccgtcgtctgttgcgtggtgggcacttctctggtgtgggtcgtcatcatataccacacacggcggagaaatgaagactgttccattacaaatactgacgagaccaacctgccagctgatatacctagctatctgagctctcaggggaccctggccgatcgccaggatggctatgtgtcatccgaaagtgggtctcaccatcagtttgtcacctccagtggggccgggttcttcctgcctcagcacgactccagcgggacatgtcacattgataatagctccgaggctgatgtagaggccgctacagacttgttcttgtgcccattcctgggctccaccggacccatgtatttgaagggcaatgtctacggctccgacccctttgaaacttaccataccgggtgttctcccgatcccaggacagtgctgatggaccactacgagccatcatacataaagaaaaaggagtgttacccatgttcccacccatcggaggagagttgcgagcgtagcttctccaacattagctggccctcacacgtgaggaagctgctcaatacttcttactcccacaatgaggggccggggatgaagaacctgtgtctcaacaagtccagcctggatttctctgccaacccagagccagcgagtgtggcatctagcaactcttttatgggaacttttggcaaggcactgcggaggccacatttagacgcctattcttccttcggacagccatcagattgccagcctagagctttttatcttaaggcccactcctcccctgaccttgactcagggtcggaagaggacggcaaggagagaacggatttccaggaggaaaatcacatatgcacattcaagcaaacgctggaaaattatcggacgcccaattttcagtcctacgatttggatacctag

SEQ ID NO: 51842 - DNA, 3667 bp, Artificial Sequence
  derived and/or modified sequence
gtaactgaagtcaggcttttcatttgggaagccccctcaacagaattcggtcattctccaagttatggtggacgtacttctgttgttctccctctgcttgctttttcacattagcagaccggacttaagtcacaacagattatctttcatcaaggcaagttccatgagccaccttcaaagccttcgagaagtgaaactgaacaacaatgaattggagaccattccaaatctgggaccagtctcggcaaatattacacttctctccttggctggaaacaggattgttgaaatactccctgaacatctgaaagagtttcagtcccttgaaactttggaccttagcagcaacaatatttcagagctccaaactgcatttccagccctacagctcaaatatctgtatctcaacagcaaccgagtcacatcaatggaacctgggtattttgacaatttggccaacacactccttgtgttaaagctgaacaggaaccgaatctcagctatcccacccaagatgtttaaactgccccaactgcaacatctcgaattgaaccgaaacaagattaaaaatgtagatggactgacattccaaggccttggtgctctgaagtctctgaaaatgcaaagaaatggagtaacgaaacttatggatggagctttttgggggctgagcaacatggaaattttgcagctggaccataacaacctaacagagattaccaaaggctggctttacggcttgctgatgctgcaggaacttcatctcagccaaaatgccatcaacaggatcagccctgatgcctgggagttctgccagaagctcagtgagctggacctaactttcaatcacttatcaaggttagatgattcaagcttccttggcctaagcttactaaatacactgcacattgggaacaacagagtcagctacattgctgattgtgccttccgggggctttccagtttaaagactttggatctgaagaacaatgaaatttcctggactattgaagacatgaatggtgctttctctgggcttgacaaactgaggcgactgatactccaaggaaatcggatccgttctattactaaaaaagccttcactggtttggatgcattggagcatctagacctgagtgacaacgcaatcatgtctttacaaggcaatgcattttcacaaatgaagaaactgcaacaattgcatttaaatacatcaagccttttgtgcgattgccagctaaaatggctcccacagtgggtggcggaaaacaactttcagagctttgtaaatgccagttgtgcccatcctcagctgctaaaaggaagaagcatttttgctgttagcccagatggctttgtgtgtgatgattttcccaaaccccagatcacggttcagccagaaacacagtcggcaataaaaggttccaatttgagtttcatctgctcagctgccagcagcagtgattccccaatgacttttgcttggaaaaaagacaatgaactactgcatgatgctgaaatggaaaattatgcacacctccgggcccaaggtggcgaggtgatggagtataccaccatccttcggctgcgcgaggtggaatttgccagtgaggggaaatatcagtgtgtcatctccaatcactttggttcatcctactctgtcaaagccaagcttacagtaaatatgcttccctcattcaccaagacccccatggatctcaccatccgagctggggccatggcacgcttggagtgtgctgctgtggggcacccagccccccagatagcctggcagaaggatgggggcacagacttcccagctgcacgggagagacgcatgcatgtgatgcccgaggatgacgtgttctttatcgtggatgtgaagatagaggacattggggtatacagctgcacagctcagaacagtgcaggaagtatttcagcaaatgcaactctgactgtcctagaaacaccatcatttttgcggccactgttggaccgaactgtaaccaagggagaaacagccgtcctacagtgcattgctggaggaagccctccccctaaactgaactggaccaaagatgatagcccattggtggtaaccgagaggcacttttttgcagcaggcaatcagcttctgattattgtggactcagatgtcagtgatgctgggaaatacacatgtgagatgtctaacacccttggcactgagagaggaaacgtgcgcctcagtgtgatccccactccaacctgcgactcccctcagatgacagccccatcgttagacgatgacggatgggccactgtgggtgtcgtgatcatagccgtggtttgctgtgtggtgggcacgtcactcgtgtgggtggtcatcatataccacacaaggcggaggaatgaagattgcagcattaccaacacagatgagaccaacttgccagcagatattcctagttatttgtcatctcagggaacgttagctgacaggcaggatgggtacgtgtcttcagaaagtggaagccaccaccagtttgtcacatcttcaggtgctggatttttcttaccacaacatgacagtagtgggacctgccatattgacaatagcagtgaagctgatgtggaagctgccacagatctgttcctttgtccgtttttgggatccacaggccctatgtatttgaagggaaatgtgtatggctcagatccttttgaaacatatcatacaggttgcagtcctgacccaagaacagttttaatggaccactatgagcccagttacataaagaaaaaggagtgctacccatgttctcatccttcagaagaatcctgcgaacggagcttcagtaatatatcgtggccttcacatgtgaggaagctacttaacactagttactctcacaatgaaggacctggaatgaaaaatctgtgtctaaacaagtcctctttagattttagtgcaaatccagagccagcgtcggttgcctcgagtaattctttcatgggtacctttggaaaagctctcaggagacctcacctagatgcctattcaagctttggacagccatcagattgtcagccaagagccttttatttgaaagctcattcttccccagacttggactctgggtcagaggaagatgggaaagaaaggacagattttcaggaagaaaatcacatttgtacctttaaacagactttagaaaactacaggactccaaattttcagtcttatgacttggacacatagactgaatgagaccaaaggaaaagcttaacatactacctcaagtgaacttttatttaaaagagagagaatcttatgttttttaaatggagttatgaattttaaaaggataaaaatgctttatttatacagatgaaccaaaattacaaaaagttatgaaaatttttatactgggaatgatgctcatataagaatacctttttaaactattttttaactttgttttatgcaaaaaagtatcttacgtaaattaatgatataaatcatgattattttatgtatttttataatgccagatttctttttatggaaaatgagttactaaagcattttaaataatacctgccttgtaccattttttaaatagaagttacttcattatattttgcacattatatttaataaaatgtgtcaatttgatgccaa

SEQ ID NO: 51843 - DNA, 3180 bp, Artificial Sequence
  derived and/or modified sequence
atggtggatgtgctgctgctcttcagcctgtgcctgctcttccacatcagcaggccagacctgagccacaaccggctgtccttcatcaaggccagctccatgagccacctgcagagcctgcgggaggtgaagctgaacaacaatgagctggagaccatccccaacctgggccctgtgtctgccaacatcaccctgctgagcctggccggcaacagaattgtggagatcctgcctgagcacctgaaggagttccagagcctggagaccctggacctgagcagcaacaacatcagcgagctgcagacagccttccctgccctgcagctgaagtacctgtacctgaacagcaacagagtgacctccatggagcccggctactttgacaacctggccaacaccctgctggtgctgaagctgaacagaaaccgcatcagcgccatcccccccaagatgttcaagctgccccagctgcagcacctggagctgaacagaaacaagatcaagaatgtggatggcctgaccttccagggcctgggcgccctgaagagcctgaagatgcagagaaatggagtgaccaagctgatggatggagccttctggggcctgagcaacatggagatcctgcagctggaccacaacaacctgacagagatcaccaagggctggctgtatggcctgctgatgctgcaggagctgcacctgagccagaatgccatcaaccgcatcagcccagatgcctgggagttctgccagaagctgtctgagctggacctgaccttcaaccacctgagccggctggatgacagcagcttcctgggcctgagcctgctgaacaccctgcacatcggcaacaacagagtgtcctacatcgctgactgtgccttccggggcctgagcagcctgaagaccctggacctgaagaacaatgagatctcctggaccatcgaggacatgaatggagccttcagcggcctggacaagctgcggcggctcatcctgcagggcaaccgcatccgcagcatcaccaagaaggccttcaccggcctggatgccctggagcacctggacctgagtgacaatgccatcatgagcctgcagggcaatgccttcagccagatgaagaagctgcagcagctgcacctgaacaccagcagcctgctgtgtgactgccagctgaagtggctgccccagtgggtggccgagaacaacttccagagctttgtgaatgccagctgtgcccacccccagctgctgaagggccgcagcatctttgctgtgtccccagatggctttgtgtgtgatgacttccccaagccccagatcaccgtgcagcctgagacccagagcgccatcaagggcagcaacctgtccttcatctgcagcgctgccagcagcagtgacagccccatgacctttgcctggaagaaggacaatgagctgctgcatgatgctgagatggagaactatgcccacctgcgggcccagggcggggaggtgatggagtacaccaccatcctgcggctgcgggaggtggagtttgccagcgagggcaagtaccagtgtgtgatcagcaaccacttcggcagcagctacagcgtgaaggccaagctgactgtgaacatgctgcccagcttcaccaagacccccatggacctgaccatccgggccggggccatggcccggctggagtgtgccgctgtgggccacccagccccccagatcgcctggcagaaggatggcggcacagacttccctgctgcccgggagaggaggatgcacgtgatgccagaagatgatgtgttcttcatcgtggatgtgaagattgaagatattggagtgtacagctgcacagcccagaacagcgctggcagcatcagcgccaatgccaccctgactgtgctggagacccccagcttcctgcggcccctgctggacagaacagtgaccaagggggagacagctgtgctgcagtgcatcgccggcggcagccccccacccaagctgaactggaccaaggatgacagccccctggtggtgacagagcggcacttctttgctgctggcaaccagctgctgatcatcgtggacagtgatgtgtctgatgctgggaagtacacctgtgagatgagcaacaccctgggcacagaaagaggaaatgtgcggctgagcgtcatccccacccccacctgtgacagcccccagatgacagcccccagcctggatgatgatggctgggccaccgtgggcgtggtgatcatcgctgtggtgtgctgcgtggtgggcaccagcctggtgtgggtggtgatcatctaccacaccaggagaagaaatgaagactgcagcatcaccaacacagatgagaccaacctgcctgctgacatccccagctacctgagcagccagggcaccctggccgaccggcaggacggctacgtgagcagcgagagcggcagccaccaccagtttgtgaccagcagcggggccggcttcttcctgccccagcacgacagcagcggcacctgccacatcgacaacagcagcgaggctgatgtggaggccgccacagacctcttcctgtgccccttcctgggcagcacaggccccatgtacctgaagggaaatgtgtatggcagtgacccctttgagacctaccacacaggctgcagcccagaccccaggacagtgctgatggaccactatgagcccagctacatcaagaagaaggagtgctacccctgcagccaccccagcgaggagagctgtgagaggagcttcagcaacatctcctggcccagccacgtgaggaagctgctgaacaccagctacagccacaatgaaggacctggcatgaagaacctgtgcctgaacaagagcagcctggacttcagcgccaaccctgagcccgcctctgtggccagcagcaacagcttcatgggcaccttcggcaaggccctgcggcggccccacctggatgcctacagcagctttggccagcccagcgactgccagccccgggccttctacctgaaggcccacagcagcccagacctggacagcggctctgaagaagatggcaaggagaggacagacttccaggaggagaaccacatctgcaccttcaagcagaccctggagaactaccgcacccccaacttccagagctatgacctggacacctag

SEQ ID NO: 51844 - DNA, 3180 bp, Artificial Sequence
  derived and/or modified sequence
atggtggacgtgctgctgctgttcagcctgtgcctgctgttccacatttcaagacccgatctgtctcacaaccgactcagctttatcaaagcctcgtcgatgtctcatcttcagagcctcagggaagttaagctcaataacaatgaattggagactattccaaacttgggacctgtttctgcgaacatcaccttgctcagcctcgccggaaataggattgtcgagattctccctgaacacctcaaggagttccagagcctcgaaacgctggacttgtcgagtaataacatatctgaactgcagactgcattcccagctctgcagttgaaatacctgtatcttaatagtaatcgtgtcacttccatggagcccggatacttcgataacctggctaacactttgcttgttctcaagttgaataggaaccggatcagcgcaattcctccaaagatgtttaaactccctcaattacaacatctggaactgaataggaacaagattaaaaatgtcgatggtctcacctttcagggccttggcgccttgaagtccttgaagatgcagcggaacggggtgacaaagctgatggacggggccttctgggggctttccaacatggaaattctgcaactcgaccacaataatttgacagagataactaaaggttggctgtatggactgttaatgttacaggagctccacctgagtcaaaatgctattaaccggatctctccggatgcctgggaattctgccagaagctatccgaactcgatctaacttttaaccatctctcccgtctcgacgactcttcctttctaggactcagcctgcttaacactctacacatcggcaacaatcgcgtgagctacattgctgattgtgcgttccgaggcctctccagcctgaaaactctggatctgaagaataacgagatcagttggaccatcgaagatatgaatggagccttcagtggcctcgacaagttgcggagactgattctgcagggaaaccggattcgcagtattaccaaaaaagccttcaccgggcttgatgctttagagcacctggatttaagcgataatgccatcatgagtttgcaaggaaatgcttttagccagatgaagaaacttcagcagctgcaccttaacactagtagtctcctgtgtgactgccagctgaagtggctgccacagtgggtggctgaaaacaatttccaaagctttgttaatgcctcctgcgctcatccccaactgttaaagggccggagcattttcgcagtctctccagatggattcgtatgcgacgattttccaaagccacagatcactgtccagccagaaacgcaatctgctattaagggatcgaatctatcatttatttgctcagccgcgtcctctagcgacagtccaatgacttttgcttggaaaaaggacaatgagctgctgcatgacgctgagatggaaaattatgcccacttgcgggcgcaggggggtgaggtcatggagtatactaccatcttgaggctgcgtgaagtcgagttcgcatctgaaggcaaatatcagtgtgtgatctccaaccactttggaagctcctattctgtgaaagcgaaactgacagtgaacatgctacccagtttcacaaagaccccaatggacttgactatcagagcaggggctatggcccgtctggaatgcgctgcagtgggtcacccggccccccagattgcctggcagaaggacggcggaacagattttcccgccgccagggagcgccggatgcacgtaatgcccgaggacgacgtgttttttatcgtcgatgtgaagatcgaagacataggcgtgtactcttgcaccgcgcagaatagcgcaggtagtatatctgcgaatgctaccctaaccgtattggaaactcccagcttcctgcgccctctgctggaccggacagtgactaaaggggaaacagctgtcctgcagtgcattgctggcgggtcacccccccccaaattaaattggacaaaggatgatagtccgctggttgtgactgaaagacactttttcgccgcaggcaatcagttactgataattgtcgactcggatgtcagtgacgccggcaaatatacttgcgaaatgtcaaatacgctggggactgagcgcggcaacgtccgcttgagtgtcattcctactcccacttgcgattctccacagatgacggcacctagcctggacgacgacgggtgggcaaccgtgggagttgtgatcattgcagtggtgtgttgcgtggtaggtacatcactggtgtgggtagtgattatttatcatacccggagacgcaacgaggactgctccatcacaaatacagatgaaaccaacctccctgccgacataccctcatatttatcaagtcaggggaccttggcagatcgccaggatggctacgtgtcaagcgaatctggttctcaccatcagtttgtaaccagtagtggcgcaggatttttccttcctcagcatgactctagcggaacttgtcatatcgataactccagtgaggctgatgtagaggcagccacagacctgtttctttgcccattcctgggctccaccggtccgatgtatttgaagggtaacgtgtacgggtcagatcccttcgagacttaccacaccggatgtagtcctgatccacgcactgtgctgatggaccactacgaaccttcatacatcaaaaagaaggaatgttacccctgctcgcacccaagtgaggagtcctgtgagaggtcctttagtaacatttcttggccatcccatgtgcggaagctcctgaacacgagctactctcacaacgaggggcccggcatgaaaaacctctgcctgaacaagagcagtctggatttctcagctaaccctgagcccgcttccgtcgcctcatctaacagcttcatgggcactttcgggaaggccctccgcagaccgcatctagatgcatatagctcatttgggcagccttctgactgccagccgcgtgccttctacttaaaagctcattcatcacctgatctcgactcgggctccgaagaagatggcaaagaacgcacggactttcaggaggagaatcacatttgcacctttaagcagactcttgaaaactatcgaaccccaaatttccagtcatacgacctggatacttag

SEQ ID NO: 51845 - DNA, 3180 bp, Artificial Sequence
  derived and/or modified sequence
atggtggacgtgttgctgctcttcagcctttgtctgctgtttcacatttcacgcccagacctgtcccacaatcgcctctcatttattaaagctagctcaatgtcccacttacagagccttcgggaggtgaagttgaacaacaatgagctggagaccatacccaatctcggtccagtgtctgctaatatcacccttttgtccctcgctggaaaccggatcgtcgagattcttcccgagcaccttaaagagttccagagtcttgagactttagacctgtcttcaaacaatatttccgaattacagaccgcattccccgctctccagctcaaatacttgtacctgaacagtaaccgggtgacaagcatggagccgggttacttcgataatctggccaacactctgctggtgttgaagttgaataggaatcgtatcagcgccattccccctaagatgttcaagctgccacagctgcaacacctcgaactgaataggaataagatcaaaaatgtcgatggacttacatttcagggactgggcgctctgaaatcactaaaaatgcagaggaacggagtgaccaaattgatggatggcgctttctggggtctgtctaatatggagattctccaactggaccataacaacctcaccgagatcaccaaaggttggctgtatgggctgctcatgctccaggagcttcacctcagccaaaacgcgataaacaggatatcccccgatgcctgggaattctgtcagaagctgtcagaactagatctgaccttcaaccatttgagtcgattggatgacagctcattcctgggtctgagcctactcaatactctgcacattggcaataatcgggtgtcatacatcgcggactgcgccttccggggactgtccagcctaaagacccttgatctgaagaataatgagatctcttggaccatcgaagacatgaacggcgcttttagtggcctcgacaaactcagaagactgatactgcagggaaataggatccgctccataacgaagaaggcctttactggcttggacgccctggaacacttggatttgtcagacaatgctatcatgtcccttcagggcaatgcctttagccagatgaaaaagctgcagcagctccacctcaatacatcgagcctgctatgcgattgtcaactgaaatggctacctcagtgggtcgcagagaacaacttccagagcttcgtgaacgcttcttgtgctcaccctcaacttctgaaaggccgaagcatcttcgccgtgtcaccagacgggtttgtgtgcgacgactttccgaagcctcaaattaccgtgcagcccgagacccagagcgctatcaagggcagtaacctttccttcatttgtagcgccgctagcagcagcgattcaccaatgacctttgcttggaagaaggataacgaactgctgcatgacgcagagatggaaaattatgcccacctgcgcgcacagggcggagaagtgatggagtacacaacaattctgcgcctaagagaagtggagtttgcatccgaaggaaagtaccagtgtgtgataagcaaccacttcggatcctcatacagcgtcaaggccaaactgactgtcaacatgctaccctcgttcaccaagaccccaatggatctcactatccgggctggtgcaatggccagactggaatgcgcggctgtgggccaccctgccccacagatcgcttggcagaaggacgggggaaccgattttccagcggcaagggagcggagaatgcatgttatgcccgaagacgacgtgttcttcattgtggacgttaaaattgaggacatcggagtgtatagctgtaccgctcagaattctgctggaagtatctccgccaacgctacactaaccgttctcgaaactccatctttcctgcgacctctgttggaccgtaccgtgaccaaaggcgaaacggctgtgctgcagtgcatcgcgggaggcagcccacctcctaagcttaactggactaaggacgactcaccacttgtcgttacagagagacacttcttcgccgcagggaaccagttactgattatcgttgactccgacgtgagcgatgccggaaagtacacttgtgaaatgtcaaatacactgggaacggagagaggaaatgtgcggctgagtgtgatccctaccccaacgtgtgattccccacaaatgacagctccctccttggatgacgacgggtgggctaccgttggcgttgtgataatcgcagtggtgtgttgcgtggtgggtactagcttggtctgggtggtcatcatctaccacactcggaggcgcaatgaggattgttctattacgaataccgacgagactaaccttcctgcggacattccgagctatctatccagtcagggcacgctggctgaccgccaggacggatacgtgagttctgagagcggcagccatcatcaattcgtgacctctagcggagctggtttcttcctcccccagcacgacagctcgggtacatgccatatcgacaactcctcagaagccgatgtggaggccgctacagacctcttcctgtgtcccttccttggttcgaccggtcccatgtacttaaaagggaatgtctacggtagcgacccctttgagacctatcataccggctgctcgcccgaccccaggaccgtgttgatggaccattacgaaccctcttatatcaagaaaaaggagtgctatccctgttctcatcctagtgaagagtcgtgtgagagaagtttctcaaatatctcctggcccagccatgtacgaaagttactcaatacctcctacagtcacaacgaagggccaggaatgaaaaacctgtgcctgaacaagtcctccctggattttagtgccaacccagagcccgcatcagtggcatcttctaattcctttatgggaacttttggaaaagcactccggagaccccacttggatgcttattcgtcctttggccagccatccgattgtcagcctcgcgctttctatctgaaggcgcattcctcccccgatcttgactcgggctccgaagaggatggaaaggagaggacagatttccaagaggagaatcacatctgtacattcaagcagaccctcgagaattatagaacccccaactttcagtcctacgacctcgacacatag

SEQ ID NO: 51846 - protein, 792 aa, Artificial Sequence
  derived and/or modified sequence
MAEAHQAVGFRPSLTSDGAEVELSAPVLQEIYLSGLRSWKRHLSRFWNDFLTGVFPASPLSWLFLFSAIQLAWFLQLDPSLGLMEKIKELLPDWGGQHHGLRGVLAAALFASCLWGALIFTLHVALRLLLSYHGWLLEPHGAMSSPTKTWLALVRIFSGRHPMLFSYQRSLPRQPVPSVQDTVRKYLESVRPILSDEDFDWTAVLAQEFLRLQASLLQWYLRLKSWWASNYVSDWWEEFVYLRSRNPLMVNSNYYMMAARAGNAVHALLLYRHRLNRQEIPPTLLMGMRPLCSAQYEKIFNTTRIPGVQKDYIRHLHDSQHVAVFHRGRFFRMGTHSRNSLLSPRALEQQFQRILDDPSPACPHEEHLAALTAAPRGTWAQVRTSLKTQAAEALEAVEGAAFFVSLDAEPAGLTREDPAASLDAYAHALLAGRGHDRWFDKSFTLIVFSNGKLGLSVEHSWADCPISGHMWEFTLATECFQLGYSTDGHCKGHPDPTLPQPQRLQWDLPDQIHSSISLALRGAKILSENVDCHVVPFSLFGKSFIRRCHLSSDSFIQIALQLAHFRDRGQFCLTYESAMTRLFLEGRTETVRSCTREACNFVRAMEDKEKTDPQCLALFRVAVDKHQALLKAAMSGQGVDRHLFALYIVSRFLHLQSPFLTQVHSEQWQLSTSQIPVQQMHLFDVHNYPDYVSSGGGFGPADDHGYGVSYIFMGDGMITFHISSKKSSTKTDSHRLGQHIEDALLDVASLFQAGQHFKRRFRGSGKENSRHRCGFLSRQTGASKASMTSTDF

SEQ ID NO: 51847 - DNA, 2379 bp, Artificial Sequence
  derived and/or modified sequence
atggccgaagcccaccaagctgtaggctttcgcccttcccttacatctgacggggccgaagtggaattgagtgcaccagttctccaggagatttatctgtctggtcttaggtcctggaagcgccatctctcaaggttctggaatgacttcctgactggagtctttcctgcttctccgctctcatggctgttcctgttttccgccatccagttggcatggttcttgcagcttgacccatcgctgggcctcatggaaaaaatcaaagaactgctccccgactggggggggcagcaccacggcctccgcggcgttctcgcagctgcactattcgcctcctgcctgtggggcgccctcatttttacccttcacgttgccctgcgtttactccttagctaccatggctggttgttagaacctcatggagccatgtcctcaccgaccaagacctggctggcattggtccgaattttctctgggcgccatcctatgcttttttcctatcagcgctccctaccccgtcaaccagtgccttcagttcaggatactgtccgtaaatatctggagtctgtgcggccaatactgagcgatgaggatttcgattggacggccgtcttggctcaagagttccttcgactgcaggcatccctgctccagtggtacctcagacttaagtcctggtgggcctcgaattatgtttcggattggtgggaggaatttgtctacctccgctcccgcaaccctctgatggtaaatagtaattattatatgatggctgcccgggcgggtaacgccgttcatgccctgctgctgtaccgccatagattaaaccgtcaggagatccctccaacgctgcttatgggaatgcgcccactgtgcagtgcccaatacgaaaagatatttaacactaccaggatcccgggagtacagaaggattacatacgacacctccatgatagtcagcatgtagccgtctttcacagaggcagattctttcggatggggacccactctaggaactccctcttgagtcccagagccttggagcagcagttccagcggattcttgacgatccgtcaccagcatgtcctcacgaggagcatctagccgcgttaacggccgctcccaggggcacctgggcgcaagtgcgaacgagcctgaagacccaggccgccgaagcgctggaggccgtcgagggggctgccttctttgtatctttggatgccgagcccgctggacttacaagagaagaccccgccgccagccttgacgcgtacgcccatgccctgctcgcaggtcgggggcacgaccggtggtttgataaatcttttaccttaatcgtgttcagcaacggaaaactgggactctccgtggaacacagttgggccgactgccccatcagtgggcacatgtgggaattcactctggctaccgagtgctttcaattaggatacagcacagacgggcactgtaaagggcacccggacccaacgttgcctcaacctcagagactccaatgggacctgcctgaccagatccatagcagtatttctctcgccctcaggggtgcaaaaattctgtcggagaacgttgattgtcacgtggtcccgttttccctgtttggcaagagcttcataaggcgctgccatttatcgtccgatagctttatccagattgccctacagctcgctcactttagggatcgcggtcaattctgtttgacttacgaaagcgccatgacaaggctctttctcgagggcaggacagagactgtccggagctgcacacgggaggcttgcaacttcgtgagagctatggaggataaggagaagacagaccctcagtgcctcgcactctttagggtggccgtcgataagcaccaggcactcttgaaggccgcaatgtccggccagggtgtggatcgacatttgttcgccctctacatcgtgtcccggtttttgcatctgcaatccccatttctgactcaagttcactccgagcagtggcagctctcaactagccaaatcccagtacagcaaatgcacctctttgacgtgcataattacccagactatgtttcttctgggggaggctttggtcccgcagatgaccatggctatggagtgagctacatcttcatgggtgatggaatgatcacattccacatatccagcaaaaaatcatctactaaaaccgatagccatagactgggccagcacatcgaagatgcactgctagatgtggctagtttatttcaggccggacaacacttcaagaggcggtttcggggatctgggaaggaaaactccaggcacaggtgtgggtttctgtctagacaaacaggggctagcaaagctagcatgacctccaccgatttttag

SEQ ID NO: 51848 - DNA, 2379 bp, Artificial Sequence
  derived and/or modified sequence
atggccgaggcccaccaggccgtgggcttccggcccagcctgaccagtgatggagctgaggtggagctgagcgcccctgtgctgcaggagatctacctgagcggcctgcgctcctggaagaggcacctgagccgcttctggaatgacttcctgactggagtcttccctgccagccccctgtcctggctgttcctgttcagcgccatccagctggcctggttcctgcagctggaccccagcctgggcctgatggagaagatcaaggagctgctgcctgactggggcggccagcaccacggcctgcggggcgtgctggccgccgccctgtttgccagctgcctgtggggcgccctgatcttcaccctgcacgtggccctgcggctgctgctgagctaccacggctggctgctggagccccacggggccatgagcagccccaccaagacctggctggccctggtgcgcatcttcagcggccgccaccccatgctgttctcctaccagaggagcctgccccggcagcctgtgcccagcgtgcaggacacagtgaggaagtacctggagagcgtgcggcccatcctgagtgatgaagattttgactggacagctgtgctggcccaggagttcctgcggctgcaggccagcctgctgcagtggtacctgcggctgaagtcctggtgggccagcaactacgtgtctgactggtgggaggagtttgtgtacctgcggagcaggaaccccctgatggtgaacagcaactactacatgatggccgcccgggctggaaatgctgtgcacgccctgctgctgtaccgccaccggctgaaccggcaggagatcccccccaccctgctgatgggcatgaggcccctgtgcagcgcccagtatgagaagatcttcaacaccacccgcatccctggggtgcagaaggactacatccgccacctgcatgacagccagcacgtggccgtgttccaccggggccgcttcttcaggatgggcacccacagcaggaacagcctgctgagcccccgggccctggagcagcagttccagaggatcctggatgaccccagccctgcctgcccccatgaggagcacctggccgccctgacagctgccccccggggcacctgggcccaggtgaggaccagcctgaagacccaggccgctgaggccctggaggccgtggagggcgccgccttctttgtgtccctggatgctgagcctgctggcctgacccgggaggaccctgctgccagcctggatgcctatgcccacgccctgctggccggccggggccatgaccgctggtttgacaagagcttcaccctcatcgtgttcagcaatggcaagctgggcctgtctgtggagcacagctgggccgactgccccatcagcggccacatgtgggagttcaccctggccacagagtgcttccagctgggctacagcacagatggccactgcaagggccacccagaccccaccctgccccagccccagaggctgcagtgggacctgcctgaccagatccacagcagcatcagcctggccctgcggggggccaagatcctgtctgaaaatgtggactgccacgtggtgcccttcagcctgtttgggaagagcttcatccgccgctgccacctgagcagtgacagcttcatccagatcgccctgcagctggcccacttccgggaccggggccagttctgcctgacctatgaaagtgccatgaccaggctcttcctggagggccgcacagagaccgtgcgcagctgcacccgggaggcctgcaactttgtgcgggccatggaggacaaggagaagacagacccccagtgcctggccctcttccgggtggccgtggacaagcaccaggccctgctgaaggccgccatgagcggccagggcgtggacagacacctgtttgccctgtacatcgtgagccgcttcctgcacctgcagagccccttcctgacccaggtgcacagcgagcagtggcagctgagcaccagccagatccctgtgcagcagatgcacctgtttgatgtgcacaactacccagactatgtgagcagcggcggcggcttcggccctgcagatgaccacggctacggcgtgtcctacatcttcatgggagatggcatgatcaccttccacatcagcagcaagaagagcagcaccaagacagacagccaccggctgggccagcacattgaagatgccctgctggatgtggccagcctcttccaggccggccagcacttcaagaggcgcttccggggcagcggcaaggagaacagccgccaccgctgtggcttcctgagccggcagacaggagccagcaaggcctccatgaccagcacagacttctag

SEQ ID NO: 51849 - DNA, 2379 bp, Artificial Sequence
  derived and/or modified sequence
atggccgaggcccaccaggccgtgggcttccggcccagcctgacctccgatggcgcagaggtcgaactgagcgcgcccgttcttcaggagatatatctgagcggactgcggtcttggaagagacacttgtcccggttctggaatgacttccttactggcgtttttcccgcttcaccgctcagctggctctttctgttttctgccattcagctcgcctggttcctgcaactagatccatcattgggccttatggaaaagataaaggaacttctgcctgactggggagggcagcatcatggcctccgtggagtactggcggccgcgctgtttgcctcctgcctgtggggcgctctcattttcaccctgcacgttgccctgaggctactgctgtcttatcacggctggttgctggagccgcacggagcaatgtcttcccctaccaaaacctggctggctttagttcgcatctttagtggccgccacccaatgctcttctcctaccaacgctcactgccgaggcagccggttccatccgtacaagatactgtgaggaagtacctggaaagtgttcgccccatcctgagcgatgaagatttcgactggacggcagtactcgcgcaagaattcttgaggctgcaagcctcactgctccagtggtacctgcggttaaagagctggtgggctagcaattatgtcagcgattggtgggaggagttcgtgtaccttcgctccagaaacccgcttatggttaattcaaattactacatgatggccgccagagctggcaacgcagttcatgccctgctactatacagacataggctgaacagacaggagatccctcctacattacttatgggcatgagaccgttgtgttccgcccaatacgagaagatcttcaacaccactaggataccaggtgtccagaaagattacatcaggcacttgcacgattcacagcacgtggccgtctttcatcgcgggaggttctttagaatgggcacacacagtcgaaacagccttttgtcccccagggcgctggaacagcagtttcaacgaattctggacgaccctagccccgcctgcccgcacgaggagcacctcgcagccttgacagccgcccctcgaggcacctgggcgcaggtcagaacatctttaaagacccaggcggccgaggcgctggaagccgtcgagggcgcagcattctttgtctccctggatgccgagcccgccggtctcactcgcgaagaccctgccgccagtctggatgcttatgctcacgcactgctggccggccggggccacgaccgctggttcgataaatcctttacactgatcgtttttagtaacggcaagctcggcctgagcgtcgaacactcatgggcagattgccccattagtgggcacatgtgggagttcactctggccaccgaatgtttccaactggggtactccactgacggacattgtaagggacaccctgatcccaccttgccccaaccgcagcgcctccagtgggacctgcccgaccagattcactcttctatctccctggcccttaggggcgccaaaattctgtccgaaaatgtggattgccatgtagtccctttctcattgtttggcaagtcctttattagacgatgccacctatcctccgacagcttcatccaaattgctctccagctcgcccattttagagatcgtgggcagttttgcctgacgtatgaatccgccatgacgcgcctcttcctcgaaggacggaccgaaaccgtcaggagttgtaccagggaagcatgcaatttcgtgagagcaatggaggacaaagaaaagaccgatccccagtgtctggcactcttccgtgttgcagtggataaacaccaggcgttactgaaggctgctatgtccggccagggtgtagaccggcacctatttgcactgtacatagtgagcaggttcttgcatctgcagtccccctttcttacacaagtgcatagcgagcaatggcagctgagcacctcccaaattcccgtgcagcagatgcacctgtttgacgtgcacaactacccagattacgtgagctccggcggcgggtttggccctgcggacgatcacggttatggagtttcttatattttcatgggcgatgggatgatcacgttccacatttcctctaaaaagagttctactaagacggatagtcatagacttggacagcacatagaggacgctctcctggacgtggcctccctatttcaggctggtcagcacttcaagcgccgcttccgcggttccggcaaggagaattctcgtcatcggtgcggtttcctttcacgtcagacaggagcatctaaggcttcgatgaccagcacagacttctag

SEQ ID NO: 51850 - DNA, 2379 bp, Artificial Sequence
  derived and/or modified sequence
atggccgaagctcatcaggccgtggggttccgccctagtcttacctccgatggggcagaggttgaactgagcgcacccgtcttacaagagatttatctgtccggactgcgctcctggaaacggcatctgagtcggttctggaacgactttcttaccggcgtttttcccgcaagtcccttgtcttggctgtttctcttttcagcaattcagctggcctggtttttacaattagacccgagccttgggctgatggaaaaaattaaagagctgctccccgattggggcggacagcaccacggactgcggggagttctggcggctgcactgtttgcctcttgcctctggggagccctgattttcacactgcacgttgcccttcgcctcctgttgtcttatcatggctggctcctagagccgcacggagccatgagttctcccactaaaacttggcttgcgctcgttaggatattctccggtcgccacccaatgctattcagctaccagcgcagtcttcccagacagcccgtaccatctgtgcaggataccgtgagaaagtacctggaatctgtgcgacccattctctcagatgaggacttcgactggaccgccgtgctggctcaagaattcctgagacttcaagcctctttgcttcagtggtacctgcggctgaagtcctggtgggcaagtaactatgtgtctgattggtgggaagaattcgtgtacctccgtagccggaaccccctcatggtcaactcgaattactatatgatggctgctcgagcaggtaacgcggtgcacgccctcctcctgtatcggcatcgtctaaatcgccaagagatcccgccaacactcctaatgggtatgagacctctttgcagcgctcagtacgagaagattttcaataccacaaggatccctggcgtccaaaaggattatattcgccacctgcacgattctcagcacgttgcggtgttccatagaggccgattcttccgcatggggacccattctcggaactctctgcttagtcccagggcactcgaacagcagttccaacgcattctcgatgacccctctccggcttgcccacatgaagagcatctcgccgcactaacagctgctcccagaggtacctgggcccaggtgaggacgtctctgaagacgcaggccgcagaagctctggaagctgtggagggagctgcgtttttcgtgtctctcgacgctgaacctgccggtcttacaagggaggatcccgcagcaagcctcgatgcctacgcacatgccctgctggctggcaggggccacgacagatggttcgataaaagctttactctgatcgtgttttccaacggcaagttgggtctcagtgtggaacacagctgggctgattgcccaataagcgggcacatgtgggagttcacccttgccacagaatgttttcagctcggatatagcactgacggtcattgtaaggggcatcccgatcccactctgcctcaacctcagcggctgcagtgggatcttcctgatcagatccattcctctatctcactggccctcagaggcgctaagatcctctccgaaaacgtggactgccacgtggtgcctttcagcctgtttggaaaatcttttatcagaaggtgccatcttagtagcgactcttttatccagatagccttacaactggcgcactttagagatcggggacaattctgccttacatacgaaagcgcaatgacccgattatttctcgagggcaggaccgaaaccgttagatcgtgtacccgagaagcctgcaattttgttagggcaatggaggacaaagagaaaacagaccctcagtgcctggccttgtttagagttgctgtagataagcatcaggctctccttaaggccgctatgtccgggcagggcgtcgatcggcacttgtttgccctttacatagtctcccggtttcttcacctgcagtctccttttctgacccaggttcattccgaacagtggcagttgtcaacttctcaaatcccagtccagcagatgcacctcttcgacgtacacaattaccctgactatgtgtcaagcggcggaggttttgggccagcagacgatcacggctacggagtgtcctacatttttatgggcgacgggatgattactttccacatttcttccaaaaaatcaagtacaaagaccgactctcatcgtctcggacaacatatagaggacgctttactagatgtggcctctctcttccaagcaggccagcactttaagcgccgtttcaggggtagtggcaaggagaactctcggcaccggtgcgggttcctttcccgtcagacgggggcttcaaaagcttctatgaccagcacggacttctag

SEQ ID NO: 51851 - DNA, 2785 bp, Artificial Sequence
  derived and/or modified sequence
ggaatcggggtttctgggtgacggtgatctcggggtgggcaggactccaaaggcccgtcgacccggtggtggactccttgcactgggattggacatatgcaagcgggagatttggggccggcgctcaaaatcggggggcgggggtggactcgggtttggaccccaggatccgatcagcggacccttgattcaacgtgaggtcccgaattgacgtccttccctcaaaacctccgggtctacaaaccaggaccctcaagacccttcagggctccagcgtgacatggctgaagcgcaccaggccgtgggcttccgaccctcgctgacctcggacggggctgaagtggaactcagtgcccctgtgctgcaggagatctacctctctggcctgcgctcctggaaaaggcatctctcacgtttctggaatgactttctcaccggtgtgtttcctgccagccccctcagttggcttttcctcttcagtgccatccagcttgcctggttcctccagctggatccttccttaggactgatggagaagatcaaagagttgctgcctgactggggtggacaacaccacgggctccggggggtcctggcagccgcgctgtttgcctcgtgtttgtggggagccctgatcttcacactgcacgtggccctgaggctgcttctgtcctaccacggctggcttcttgagccccacggagccatgtcctcccccaccaagacctggctggccctggtccgcatcttctctggccgccacccgatgctgttcagttaccagcgctccctgccacgccagcccgtgccctctgtgcaggacaccgtgcgcaagtacctggagtcggtccggcccatcctctccgacgaggacttcgactggaccgcggtcctggcgcaggaattcctgaggctgcaggcgtcgctgctgcagtggtacctgcggctcaagtcctggtgggcgtccaattatgtcagtgactggtgggaggaatttgtgtacctgcgctcccgaaatccgctgatggtgaacagcaactattacatgatggcagctcgcgctgggaatgccgtccatgccctcctcctgtaccgccaccgcctgaaccgccaggagatacccccgactttgctgatgggaatgcgccccttatgctctgcccagtacgagaagatcttcaacaccacgcggattccaggggtccaaaaagactacatccgccacctccatgacagccaacacgtggctgtcttccaccggggccgattcttccgcatggggacccactcccgaaacagcctgctttccccgagagccctggagcagcagtttcagagaatcctggatgatccctcaccggcctgcccccacgaggaacatctggcagctctgacagctgctcccaggggcacgtgggcccaggtgcggacatccctgaagacccaggcagcggaggccctggaggcggtggaaggggccgctttctttgtgtcactggatgctgagcccgcggggctcaccagggaggacccggcagcgtcgttggatgcctacgcccatgctctgctggccggccggggccatgatcgctggtttgacaaatccttcaccctaatcgtcttctctaacgggaagctgggcctcagcgtggagcactcctgggccgactgccccatctcaggacacatgtgggagttcactctggctacagaatgctttcagctgggctactcaacagacggccactgcaaggggcacccggaccccacactaccccagccccagcggctgcaatgggaccttccagaccagatccactcctccatctctctagccctgaggggagccaagatcttgtctgaaaatgtcgactgccatgtcgttccattctccctatttggcaagagcttcatccgacgctgccacctctcttcagacagcttcatccagatcgccttgcaactggcccacttccgggacaggggtcaattctgcctgacttatgagtcggccatgactcgcttattcctggaaggccggacggagacggtgcggtcttgcacgagggaggcctgcaactttgtcagggccatggaggacaaagagaagacggacccacagtgcctcgccctgttccgcgtggcagtggacaagcaccaggctctgctgaaggcagccatgagcgggcagggagttgaccgccacctgtttgcgctgtacatcgtgtcccgattcctccacctgcagtcgcccttcctgacccaggtccattcggagcagtggcagctgtccaccagccagatccctgttcagcaaatgcatctgtttgacgtccacaattacccggactatgtttcctcaggcggtggattcgggcctgctgatgaccatggttatggtgtttcttatatcttcatgggggatggcatgatcaccttccacatctccagcaaaaaatcaagcacaaaaacggattcccacaggctggggcagcacattgaggacgcactgctggatgtggcctccctgttccaggcgggacagcattttaagcgccggttcagagggtcagggaaggagaactccaggcacaggtgtggatttctctcccgccagactggggcctccaaggcctcaatgacatccaccgacttctgactccttccagcaggcagctggcctctccaaggaataagggtgaaattgccacagctggctgacacaggacaggggcaactggtttggcaaccccacatccaggccaataaagatgtgtgagctggg

SEQ ID NO: 51852 - DNA, 2379 bp, Artificial Sequence
  derived and/or modified sequence
atggccgaggcccaccaggccgtgggcttcagacccagcctgaccagcgacggcgccgaggtggagctgagcgcccccgtgctgcaggagatctacctgagcggcctgagaagctggaagagacacctgagcagattctggaacgacttcctgaccggcgtgttccccgccagccccctgagctggctgttcctgttcagcgccatccagctggcctggttcctgcagctggaccccagcctgggcctgatggagaagatcaaggagctgctgcccgactggggcggccagcaccacggcctgagaggcgtgctggccgccgccctgttcgccagctgcctgtggggcgccctgatcttcaccctgcacgtggccctgagactgctgctgagctaccacggctggctgctggagccccacggcgccatgagcagccccaccaagacctggctggccctggtgagaatcttcagcggcagacaccccatgctgttcagctaccagagaagcctgcccagacagcccgtgcccagcgtgcaggacaccgtgagaaagtacctggagagcgtgagacccatcctgagcgacgaggacttcgactggaccgccgtgctggcccaggagttcctgagactgcaggccagcctgctgcagtggtacctgagactgaagagctggtgggccagcaactacgtgagcgactggtgggaggagttcgtgtacctgagaagcagaaaccccctgatggtgaacagcaactactacatgatggccgccagagccggcaacgccgtgcacgccctgctgctgtacagacacagactgaacagacaggagatcccccccaccctgctgatgggcatgagacccctgtgcagcgcccagtacgagaagatcttcaacaccaccagaatccccggcgtgcagaaggactacatcagacacctgcacgacagccagcacgtggccgtgttccacagaggcagattcttcagaatgggcacccacagcagaaacagcctgctgagccccagagccctggagcagcagttccagagaatcctggacgaccccagccccgcctgcccccacgaggagcacctggccgccctgaccgccgcccccagaggcacctgggcccaggtgagaaccagcctgaagacccaggccgccgaggccctggaggccgtggagggcgccgccttcttcgtgagcctggacgccgagcccgccggcctgaccagagaggaccccgccgccagcctggacgcctacgcccacgccctgctggccggcagaggccacgacagatggttcgacaagagcttcaccctgatcgtgttcagcaacggcaagctgggcctgagcgtggagcacagctgggccgactgccccatcagcggccacatgtgggagttcaccctggccaccgagtgcttccagctgggctacagcaccgacggccactgcaagggccaccccgaccccaccctgccccagccccagagactgcagtgggacctgcccgaccagatccacagcagcatcagcctggccctgagaggcgccaagatcctgagcgagaacgtggactgccacgtggtgcccttcagcctgttcggcaagagcttcatcagaagatgccacctgagcagcgacagcttcatccagatcgccctgcagctggcccacttcagagacagaggccagttctgcctgacctacgagagcgccatgaccagactgttcctggagggcagaaccgagaccgtgagaagctgcaccagagaggcctgcaacttcgtgagagccatggaggacaaggagaagaccgacccccagtgcctggccctgttcagagtggccgtggacaagcaccaggccctgctgaaggccgccatgagcggccagggcgtggacagacacctgttcgccctgtacatcgtgagcagattcctgcacctgcagagccccttcctgacccaggtgcacagcgagcagtggcagctgagcaccagccagatccccgtgcagcagatgcacctgttcgacgtgcacaactaccccgactacgtgagcagcggcggcggcttcggccccgccgacgaccacggctacggcgtgagctacatcttcatgggcgacggcatgatcaccttccacatcagcagcaagaagagcagcaccaagaccgacagccacagactgggccagcacatcgaggacgccctgctggacgtggccagcctgttccaggccggccagcacttcaagagaagattcagaggcagcggcaaggagaacagcagacacagatgcggcttcctgagcagacagaccggcgccagcaaggccagcatgaccagcaccgacttctag

SEQ ID NO: 51853 - protein, 1108 aa, Artificial Sequence
  derived and/or modified sequence
MRSEGAAPGPAAPLCGALSLLLGALLGKVIEGHGVTDNIQRFSSLPPYLPVSYHILRAETSFFLKEANQDLLRNSSLQARVESFFTYKTRQPPVLNASYGPFSVEKVVPLDLMLTSNFLGPTNKFSFDWKLKAHILRDKVYLSRPKVQVLFHIMGRDWDDHGAGEKLPCLRVFAFRETREVRGSCRLKGDLGLCVAELELLSSWFSAPTVGAGRKKSMDQPEGTPVELYYTVHPGNERGDCAGGDFRKGNAIRPGKDGLEETTSHLQRIGTVGLYRAQDSAQLSELRLDGNVVIWLPSRPVKQGEVVTAYVTISSNSSVDLFILRAKVKKGVNILSAQTREPRQWGVKQEVGSGGKHVTATVACQRLGPSPRNRSSSLFNEVVQMNFEIASFSSLSGTQPITWQVEYPRKGTTDIAVSEIFVSQKDLVGIVPLAMDTEILNTAVLTGKTVAMPIKVVSVEENSAVMDISESVECKSTDEDVIKVSERCDYIFVNGKEIKGKMDAVVNFTYQYLSAPLCVTVWVPRLPLQIEVSDTELSQIKGWRVPIVTNKRPTRESEDEDEEERRGRGCALQYQHATVRVLTQFVSEGAGPWGQPNYLLSPNWQFDITHLVADFMKLEEPHVATLQDSRVLVGREVGMTTIQVLSPLSDSILAEKTITVLDDKVSVTDLAIQLVAGLSVALYPNAENSKAVTAVVTAEEVLRTPKQEAVFSTWLQFSDGSVTPLDIYDTKDFSLAATSQDEAVVSVPQPRSPRWPVVVAEGEGQGPLIRVDMTIAEACQKSKRKSILAVGVGNVRVKFGQNDADSSPGGDYEEDEIKNHASDRRQKGQHHERTGQDGHLYGSSPVEREEGALRRATTTARSLLDNKVVKNSRADGGRLAGEGQLQNIPIDFTNFPAHVDLPKAGSGLEENDLVQTPRGLSDLEIGMYALLGVFCLAILVFLINCATFALKYRHKQVPLEGQASMTHSHDWVWLGNEAELLESMGDAPPPQDEHTTIIDRGPGACEESNHLLLNGGSHKHVQSQIHRSADSGGRQGREQKQDPLHSPTSKRKKVKFTTFTTIPPDDSCPTVNSIVSSNDEDIKWVCQDVAVGAPKELRNYLEKLKDKA

SEQ ID NO: 51854 - DNA, 3327 bp, Artificial Sequence
  derived and/or modified sequence
atgagaagcgagggcgccgcccccggccccgccgcccccctgtgcggcgccctgagcctgctgctgggcgccctgctgggcaaggtgatcgagggccacggcgtgaccgacaacatccagagattcagcagcctgcccccctacctgcccgtgagctaccacatcctgagagccgagaccagcttcttcctgaaggaggccaaccaggacctgctgagaaacagcagcctgcaggccagagtggagagcttcttcacctacaagaccagacagccccccgtgctgaacgccagctacggccccttcagcgtggagaaggtggtgcccctggacctgatgctgaccagcaacttcctgggccccaccaacaagttcagcttcgactggaagctgaaggcccacatcctgagagacaaggtgtacctgagcagacccaaggtgcaggtgctgttccacatcatgggcagagactgggacgaccacggcgccggcgagaagctgccctgcctgagagtgttcgccttcagagagaccagagaggtgagaggcagctgcagactgaagggcgacctgggcctgtgcgtggccgagctggagctgctgagcagctggttcagcgcccccaccgtgggcgccggcagaaagaagagcatggaccagcccgagggcacccccgtggagctgtactacaccgtgcaccccggcaacgagagaggcgactgcgccggcggcgacttcagaaagggcaacgccatcagacccggcaaggacggcctggaggagaccaccagccacctgcagagaatcggcaccgtgggcctgtacagagcccaggacagcgcccagctgagcgagctgagactggacggcaacgtggtgatctggctgcccagcagacccgtgaagcagggcgaggtggtgaccgcctacgtgaccatcagcagcaacagcagcgtggacctgttcatcctgagagccaaggtgaagaagggcgtgaacatcctgagcgcccagaccagagagcccagacagtggggcgtgaagcaggaggtgggcagcggcggcaagcacgtgaccgccaccgtggcctgccagagactgggccccagccccagaaacagaagcagcagcctgttcaacgaggtggtgcagatgaacttcgagatcgccagcttcagcagcctgagcggcacccagcccatcacctggcaggtggagtaccccagaaagggcaccaccgacatcgccgtgagcgagatcttcgtgagccagaaggacctggtgggcatcgtgcccctggccatggacaccgagatcctgaacaccgccgtgctgaccggcaagaccgtggccatgcccatcaaggtggtgagcgtggaggagaacagcgccgtgatggacatcagcgagagcgtggagtgcaagagcaccgacgaggacgtgatcaaggtgagcgagagatgcgactacatcttcgtgaacggcaaggagatcaagggcaagatggacgccgtggtgaacttcacctaccagtacctgagcgcccccctgtgcgtgaccgtgtgggtgcccagactgcccctgcagatcgaggtgagcgacaccgagctgagccagatcaagggctggagagtgcccatcgtgaccaacaagagacccaccagagagagcgaggacgaggacgaggaggagagaagaggcagaggctgcgccctgcagtaccagcacgccaccgtgagagtgctgacccagttcgtgagcgagggcgccggcccctggggccagcccaactacctgctgagccccaactggcagttcgacatcacccacctggtggccgacttcatgaagctggaggagccccacgtggccaccctgcaggacagcagagtgctggtgggcagagaggtgggcatgaccaccatccaggtgctgagccccctgagcgacagcatcctggccgagaagaccatcaccgtgctggacgacaaggtgagcgtgaccgacctggccatccagctggtggccggcctgagcgtggccctgtaccccaacgccgagaacagcaaggccgtgaccgccgtggtgaccgccgaggaggtgctgagaacccccaagcaggaggccgtgttcagcacctggctgcagttcagcgacggcagcgtgacccccctggacatctacgacaccaaggacttcagcctggccgccaccagccaggacgaggccgtggtgagcgtgccccagcccagaagccccagatggcccgtggtggtggccgagggcgagggccagggccccctgatcagagtggacatgaccatcgccgaggcctgccagaagagcaagagaaagagcatcctggccgtgggcgtgggcaacgtgagagtgaagttcggccagaacgacgccgacagcagccccggcggcgactacgaggaggacgagatcaagaaccacgccagcgacagaagacagaagggccagcaccacgagagaaccggccaggacggccacctgtacggcagcagccccgtggagagagaggagggcgccctgagaagagccaccaccaccgccagaagcctgctggacaacaaggtggtgaagaacagcagagccgacggcggcagactggccggcgagggccagctgcagaacatccccatcgacttcaccaacttccccgcccacgtggacctgcccaaggccggcagcggcctggaggagaacgacctggtgcagacccccagaggcctgagcgacctggagatcggcatgtacgccctgctgggcgtgttctgcctggccatcctggtgttcctgatcaactgcgccaccttcgccctgaagtacagacacaagcaggtgcccctggagggccaggccagcatgacccacagccacgactgggtgtggctgggcaacgaggccgagctgctggagagcatgggcgacgccccccccccccaggacgagcacaccaccatcatcgacagaggccccggcgcctgcgaggagagcaaccacctgctgctgaacggcggcagccacaagcacgtgcagagccagatccacagaagcgccgacagcggcggcagacagggcagagagcagaagcaggaccccctgcacagccccaccagcaagagaaagaaggtgaagttcaccaccttcaccaccatcccccccgacgacagctgccccaccgtgaacagcatcgtgagcagcaacgacgaggacatcaagtgggtgtgccaggacgtggccgtgggcgcccccaaggagctgagaaactacctggagaagctgaaggacaaggcctag

SEQ ID NO: 51855 - DNA, 3327 bp, Artificial Sequence
  derived and/or modified sequence
atgcgaagcgagggggctgcccccgggcccgccgcccccctttgtggcgcgctttccctgctgttgggcgcgttactggggaaggttatcgaaggccatggcgtgaccgataatatccagcggtttagtagcctgccaccctacttaccagtgagctaccacatccttagggctgagaccagttttttcctgaaagaggctaaccaggacctgttgcgcaattcatcattacaggccagagtggaaagctttttcacatacaagacaagacagcctccggtcttaaacgcaagttatggtcctttttctgttgagaaagttgtgccattggatctgatgttgacctcaaatttcctgggcccaacgaacaagttttcctttgactggaagttgaaggcccatattcttcgagacaaggtgtacctgagccggcctaaggtacaggtgttgttccacataatgggtagggactgggatgatcatggcgctggtgaaaaactgccatgcttaagggtattcgcttttcgggaaacacgcgaggtgcgtggcagttgcagattaaaaggcgatttgggactttgcgtggccgagttagaactgctgtcatcctggttctcagcacccacagtgggcgcgggacgaaaaaaaagcatggatcagccagagggtacaccagtggaattgtactacaccgtccatccagggaacgaacggggagattgcgccggcggagattttcggaaaggaaatgccatccgccctggaaaagacggactcgaggaaacaacttcacatttacagcgaatcgggacagttggcctgtatagggcccaggattctgcccagctgagtgaacttcgattggacgggaacgtggtcatatggctgcccagccgaccagtgaagcaaggagaggtggttaccgcatatgtgactatctcatctaactctagcgtggatttattcatcctccgggccaaagtaaagaaaggagtgaacattctcagtgcccaaaccagggagccccgtcaatggggtgtgaaacaagaagttggaagtggcggcaagcatgtaacagccacagtagcctgccagaggctgggcccaagtccccggaacaggtccagtagtctcttcaacgaggttgtgcaaatgaacttcgagatcgcctccttctcaagtctatcagggacccagcctatcacatggcaggttgagtaccctcgaaagggaaccacggacattgctgtatcagagatatttgtgtctcagaaagatctggtcggcatcgtgcctctcgccatggacacagaaatcttgaatacagctgttctgactgggaaaactgtggcgatgccaatcaaagtcgtctcggttgaggaaaatagtgctgttatggacatttctgagagcgtggaatgcaagagcactgacgaggatgtcattaaggtctccgaaaggtgcgactacatatttgtcaatggcaaggagataaagggcaaaatggacgccgtggtaaattttacttatcagtacttaagcgcacctttgtgcgtgaccgtgtgggtgcctaggctgccactgcagattgaagtttctgatacagaactctcacagattaaagggtggcgagttcctattgtgaccaataaacggcctacccgggagagtgaggatgaggacgaagaggagaggcggggtagggggtgtgcactgcaataccagcacgccaccgtcagggtcttaactcagttcgtctccgagggcgccggaccatggggccagccgaactatctgctttccccaaattggcagttcgatatcacccatctggtggctgactttatgaagcttgaggagccccacgtagcaaccctgcaggatagcagggttctggtggggcgcgaagttgggatgaccacaattcaggttttgtctcctctgtctgacagtattctggcagagaaaacgattaccgtgctggacgacaaggtcagtgtgacggaccttgccatacagttggtggccggcctgagcgtggcactgtatcctaacgctgaaaattctaaggccgtcaccgcagtggtgaccgcagaagaagtcctaagaactccgaaacaggaggcggtgttcagcacctggttacagttctccgatggttccgtcactcctttagatatctatgacaccaaggatttcagcctggcagctacatcacaggacgaggccgtcgtgtcggtgccgcagcccaggagcccacggtggcctgtagtcgtcgctgaaggtgagggccagggtcctcttatacgcgtggacatgaccatcgcggaggcctgtcaaaaatcaaaacgtaagtccattctggcggtgggcgttgggaatgttcgcgttaagttcggacagaacgacgcagattcaagtcccgggggagattacgaggaagatgagataaaaaaccatgccagcgatcggcggcaaaaggggcagcaccatgaaagaacagggcaggacggacacctctatggatcaagcccggtggaacgcgaggagggtgcgctcagacgtgctaccacaactgcaaggagtctcctggacaacaaagtcgtcaagaactcccgagctgatggagggcggttggctggcgaagggcagctgcaaaacatacccattgactttaccaattttcccgctcacgtcgaccttccaaaggctggctctggactcgaagagaatgatctcgtgcagactccacgaggccttagcgatttagagatcggaatgtacgccctgctcggcgtattctgtctagccatattggtgtttctgatcaactgcgccactttcgcgcttaaataccgacacaaacaggtcccactcgagggccaggcctcgatgactcattctcacgactgggtctggctaggtaacgaggccgaactgctggagtctatgggcgatgcccctccaccgcaggatgaacataccactatcatcgaccggggacccggtgcctgtgaggaatccaatcacctgctcctcaatggtggctctcataaacacgtccagagccaaatacatcgctcagctgactccgggggcagacaagggcgcgagcaaaaacaggacccgctacacagtcctacgagcaagcggaagaaagtgaagttcaccacattcactaccatacctcccgacgactcctgccctaccgtcaactctattgtgagtagcaacgatgaggacataaaatgggtatgccaggatgtggctgtgggcgcaccaaaagaactccggaattacctggaaaagcttaaggataaagcatag

SEQ ID NO: 51856 - DNA, 3327 bp, Artificial Sequence
  derived and/or modified sequence
atgaggtctgagggcgccgcccctggccctgctgcccccctgtgtggggccctgagcctgctgctgggcgccctgctgggcaaggtgattgagggccatggagtgacagacaacatccagcgcttcagcagcctgcccccctacctgcctgtgtcctaccacatcctgcgggcagagaccagcttcttcctgaaggaggccaaccaggacctgctgaggaacagcagcctgcaggcccgggtggagagcttcttcacctacaagacccggcagccccctgtgctgaatgccagctatggccccttctctgtggagaaggtggtgcccctggacctgatgctgaccagcaacttcctgggccccaccaacaagttctcctttgactggaagctgaaggcccacatcctgcgggacaaggtgtacctgagccggcccaaggtgcaggtgctcttccacatcatgggccgggactgggatgaccatggagctggggagaagctgccctgcctgcgggtgtttgccttccgggagacccgggaggtgcggggcagctgccgcctgaagggggacctgggcctgtgtgtggccgagctggagctgctgagctcctggttcagcgcccccaccgtgggcgccggcaggaagaagtccatggaccagcctgagggcacccctgtggagctgtactacacagtgcaccctggaaatgaaagaggagactgtgccggcggggacttcagaaaaggaaatgccatccggcctgggaaggatggcctggaggagaccaccagccacctgcagagaattggaacagtgggcctgtaccgggcccaggacagcgcccagctgtctgagctgcggctggatggaaatgtggtgatctggctgcccagcaggcctgtgaagcagggcgaggtggtgacagcctacgtgaccatcagcagcaacagctctgtggacctcttcatcctgcgggccaaggtgaagaagggcgtgaacatcctgagcgcccagacccgggagccccggcagtggggcgtgaagcaggaggtgggcagcggcggcaagcacgtgacagccaccgtggcctgccagaggctgggccccagccccaggaacagaagcagcagcctcttcaatgaggtggtgcagatgaactttgaaattgccagcttcagcagcctgagcggcacccagcccatcacctggcaggtggagtaccccaggaagggcaccacagacattgctgtgtctgagatctttgtgtcccagaaggacctggtgggcatcgtgcccctggccatggacacagagatcctgaacacagctgtgctgaccgggaagacagtggccatgcccatcaaggtggtgtctgtggaggagaacagcgctgtgatggacatcagcgagagcgtggagtgcaagagcacagatgaagatgtgatcaaggtgtctgagcgctgtgactacatctttgtgaatggcaaggagatcaagggcaagatggatgctgtggtgaacttcacctaccagtacctgagcgcccccctgtgtgtgacagtgtgggtgccccggctgcccctgcagatcgaggtgtctgacacagagctgagccagatcaagggctggagggtgcccatcgtgaccaacaagaggcccacccgggagagtgaagatgaagatgaggaggagcggcggggccggggctgtgccctgcagtaccagcacgccaccgtgcgggtgctgacccagtttgtgtctgagggcgccggcccctggggccagcccaactacctgctgagccccaactggcagtttgacatcacccacctggtggccgacttcatgaagctggaggagccccacgtggccaccctgcaggacagccgggtgctggtgggccgggaggtgggcatgaccaccatccaggtgctgagccccctgagtgacagcatcctggccgagaagaccatcaccgtgctggatgacaaggtgtctgtgacagacctggccatccagctggtggccggcctgtctgtggccctgtacccaaatgctgagaacagcaaggctgtgacagctgtggtgacagctgaggaggtgctgcggacccccaagcaggaggccgtgttcagcacctggctgcagttcagtgatggctctgtgacccccctggacatctatgacaccaaggacttcagcctggccgccaccagccaggatgaagctgtggtgtctgtgccccagcccaggagcccccgctggcctgtggtggtggccgagggggagggccagggccccctcatccgggtggacatgaccatcgccgaggcctgccagaagagcaagaggaagagcatcctggccgtgggcgtgggcaatgtgcgggtgaagtttggccagaatgatgctgacagcagccctggaggagactatgaggaggatgagatcaagaaccacgccagtgaccggcggcagaagggccagcaccacgagaggacaggccaggacggccacctgtatggcagcagccctgtggagcgggaggagggcgccctgcggcgggccaccaccacagcccggagcctgctggacaacaaggtggtgaagaacagcagagcagatggcggccgcctggccggggagggccagctgcagaacatccccatcgacttcaccaacttccctgcccacgtggacctgcccaaggccggcagcggcctggaggagaatgacctggtgcagaccccccggggcctgagtgacctggagatcggcatgtatgccctgctgggcgtcttctgcctggccatcctggtgttcctgatcaactgtgccacctttgccctgaagtaccgccacaagcaggtgcccctggagggccaggcctccatgacccacagccatgactgggtgtggctgggcaatgaggccgagctgctggagagcatgggagatgcccccccaccccaggatgagcacaccaccatcatcgaccggggccctggggcctgtgaggagagcaaccacctgctgctgaatggaggcagccacaagcacgtgcagagccagatccacaggtctgctgacagcggcggccggcagggccgggagcagaagcaggaccccctgcacagccccaccagcaagaggaagaaggtgaagttcaccaccttcaccaccatccccccagatgacagctgccccaccgtgaacagcatcgtgagcagcaatgatgaggacatcaagtgggtgtgccaggatgtggccgtgggcgcccccaaggagctgaggaactacctggagaagctgaaggacaaggcctag

SEQ ID NO: 51857 - DNA, 3327 bp, Artificial Sequence
  derived and/or modified sequence
atgcggagcgagggcgccgcccccggccccgccgcccccctgtgcggcgcacttagcctcctgctgggcgccctgctgggcaaagtaattgaaggacacggggtaactgacaatatccagcgctttagctctctaccaccgtacctcccggtgtcctatcacattctccgggccgagactagtttttttctgaaagaggcgaatcaggatttgctgcgcaattcttcccttcaagcacgagtcgaaagcttctttacctataaaacccgacagcctcctgttctgaatgcctcatatggccctttctcagtggagaaggtggtgcctttggatctaatgctcacctctaattttttgggccccactaataagttctccttcgactggaagctcaaggcccacatcctgagggacaaggtgtacctcagcaggcccaaggtgcaagtactgtttcacatcatggggcgtgattgggacgaccacggagcaggggagaaactgccctgtcttcgggtcttcgccttcagagagactagagaagtcaggggctcttgtcgactaaagggagatctgggtctgtgtgttgccgagctcgagctcctgtcgagttggttcagtgctccaacagtcggggcaggcaggaaaaagtctatggaccagcctgagggtacaccggtggagctgtactataccgtgcatcccggaaatgaacgaggggattgcgctggaggtgatttccgaaaaggaaacgccatcaggcccggaaaggatgggctggaagagacaacttcacacttgcaacgcatcgggacagtcggactgtacagagcccaggactctgcacagctgtctgagttgaggctggacggaaacgtggtaatatggctaccatcccggcccgtgaagcaaggagaggtcgtaacagcctacgtcacaatcagctcaaactcttcagtagacttgtttatcttaagggcaaaagtgaagaagggtgttaatatactgagtgcccagacgcgggagccacgacagtggggggttaagcaggaggtgggaagtgggggcaaacatgtgaccgccactgttgcttgccaacgtctggggccttcacctaggaaccgatcaagcagcctgttcaacgaagtagtccaaatgaacttcgaaatcgcctcattttcttctctttccggcacacaaccaataacctggcaggtggagtacccgaggaagggcacaaccgacatagctgtgtctgagattttcgtatcccagaaggacctcgtgggtatcgtgccactggcaatggataccgaaatcctcaataccgctgtgctgacaggcaagaccgtggcgatgccaattaaggtcgtgtccgtggaggaaaattctgctgtcatggatattagcgaatctgtcgagtgcaagtcaactgacgaggatgtcatcaaagtatctgagcggtgcgactacatctttgtcaatggaaaggagataaagggtaaaatggacgctgtcgtgaacttcacatatcagtatctgtcagcgccgctgtgcgtgacagtgtgggtgcctaggctgccactgcagatagaggtctcggatacagaactgagtcagatcaagggttggcgggtccctattgtaaccaacaaaaggcccactagggaaagcgaagatgaagacgaggaggagcgccgcggtcgtggttgcgccctgcagtatcagcatgcaaccgtcagagttcttacacagttcgtctccgagggcgctgggccctggggccagccaaattacctcctgtctccgaactggcaatttgacatcacccacctggttgctgacttcatgaagctagaggaaccccatgttgctacgttgcaagattcacgagtgctcgtgggccgtgaggtaggcatgacaactatccaagtgctatccccactttctgatagtatccttgccgagaagacaatcaccgtcttagatgataaagtgtcggtcacagatctggccatccagctagtagccggcctctccgtcgcactctatccgaatgcagagaatagcaaggctgtcaccgctgtggtgacagccgaagaggtcttacgtactcccaaacaggaggctgtctttagcacctggctgcaattcagtgatggcagcgtcaccccactcgacatttacgacacaaaagatttctctctagctgccacttcacaagacgaagccgtggtgagcgtaccccagccaagaagtccaagatggcccgtggtagtggctgagggggaaggacagggtcctctgatcagagttgatatgacaattgccgaagcatgccaaaagagcaagcgcaaaagcattctggctgtcggcgtcggcaacgtgcgcgtcaaattcgggcagaacgacgctgatagtagcccggggggggactacgaagaggatgagattaagaatcatgcttctgaccggaggcagaagggccaacatcatgaaagaaccggacaggacggacatctgtacggctcatcccccgtcgagcgcgaagagggcgcattaagacgcgcaactaccacagcacgttcgctcctcgacaacaaagtcgtgaagaattcacgcgctgacggcggccgcctggctggcgagggccagctccagaacatccccatcgatttcacaaatttccccgcacatgttgatctgcccaaggcaggctctggtctcgaagaaaacgatcttgtgcagacgccccgtgggctgtcagatttggaaatcggtatgtacgcgttgctaggcgttttttgcctggcaatcctggtcttcctgattaactgtgccaccttcgctctaaagtaccggcacaaacaggtccctctggagggccaggcgtctatgacacacagccacgactgggtatggctcggtaacgaagctgagcttttggagtctatgggcgatgcccccccacctcaggacgaacacacaactatcatagaccgtggtccaggggcatgcgaagaatcaaatcacctcctgttaaacggtgggtctcacaagcacgtgcaaagccagatccaccggagcgccgactccggaggacgtcaagggcgtgagcagaaacaagaccccttgcatagcccgacttctaaacgcaagaaggtcaaatttacgaccttcactaccattccccccgacgacagttgccccactgttaattcaatcgtgtccagcaatgacgaggacataaagtgggtgtgtcaggacgttgctgttggtgccccgaaggaactccggaattacctcgaaaaactgaaggataaggcatag

SEQ ID NO: 51858 - DNA, 3327 bp, Artificial Sequence
  derived and/or modified sequence
atgcgatctgaaggcgctgccccaggtcccgctgcacccctctgcggtgctttatctctgctgctgggcgctctgcttggaaaagtcattgagggccatggggtaactgacaatattcagaggttcagcagtctgccaccctatctgcccgtgagctaccacatcttgcgcgctgaaacgtcattcttcctgaaagaggccaaccaggatttactgcgaaattcctctttacaggccagagtggagtccttctttacctataaaacacgtcaaccacccgtgctaaacgcttcatacggtccattttccgtcgaaaaggtcgtgccgctggatcttatgctgactagcaacttcttgggacccacaaataaattctctttcgactggaaactgaaggctcacatcttgcgagataaggtttacctctcaagacctaaggtgcaagtactctttcatatcatgggaagagactgggacgatcatggggctggtgaaaagctcccctgtttgcgcgtgttcgccttccgcgagacccgcgaggtgcgcggaagctgcagactgaagggcgacctgggattgtgcgttgctgaactggagctgctcagctcctggttttccgcaccaacggtgggagccggtaggaagaagagcatggaccagccagaagggactcccgtggagctctattacacagtgcaccctgggaacgagcgtggggattgcgccggaggagactttcggaaggggaacgcaattagaccaggcaaggatggactagaagagaccacctctcacctgcagaggatcggcacagtgggcctttatagagcgcaggattcagcacagctcagtgaactcaggctagacggcaacgtggtgatctggcttccaagtcggcctgtaaaacagggtgaggtcgtaaccgcgtatgtaaccatctcatccaacagtagcgtggacctattcattctgagagctaaggtgaagaaaggggtgaacatcctaagtgcacaaactagagaacctcgccagtggggagtgaagcaggaggtgggttcaggtggaaagcatgtcactgctaccgtggcctgccagcgcttgggacccagccctcgcaaccgcagttcctcactttttaacgaagtggtacagatgaacttcgagatagcatccttcagctcactctcaggtacgcagccaatcacatggcaggtcgaataccccaggaaaggtaccacagatattgccgtatcggaaattttcgtgagccagaaggacctggtgggaatcgtgcccctggcaatggatacggaaatcttgaacaccgccgtcctgacgggcaagactgtggcaatgcccataaaggtcgttagcgtagaagagaactcggcggtgatggacattagtgagagcgtagaatgcaaatctaccgacgaagatgtgattaaagttagtgagcgttgcgattacatattcgtaaatggaaaagagattaaaggcaagatggacgccgtggtgaacttcacttatcagtatctctccgctcctctctgtgtgaccgtgtgggtgccacgtttgcccttgcagatcgaggtttctgacaccgaacttagccaaattaaggggtggcgggtgcctattgtgacaaataagcgtcccacaagggagtccgaggacgaagacgaagaggagaggaggggacgtggatgtgccttgcaataccagcatgccaccgttcgggtgttgacccagttcgtctccgagggggctgggccatggggtcaaccgaactacctcctctcgcctaattggcagttcgatatcactcacttggtggccgactttatgaaactcgaggagccccatgtggcaaccctgcaagatagccgggtgcttgtgggcagagaggtcggcatgactacaatccaggtgctcagccctctgagtgattcaatcctcgccgagaagaccatcaccgtgctggatgataaggtttcagtgacggatttggctattcagctcgtagcaggcctgagcgtcgccttgtaccccaatgccgaaaactcgaaagcggttacagctgtggtgacagcggaagaggtgctgagaaccccaaaacaagaggccgtattctctacctggctgcagtttagtgacgggagtgtgaccccactggacatctatgataccaaggacttctcccttgctgccaccagccaggatgaggctgtcgtgtccgtcccgcagccgaggtcacctcgatggccggttgtcgtggcggagggagagggtcaggggcctctgattcgcgtggacatgacaatcgcagaagcctgtcagaagtcaaagcgtaaaagcattctggctgtgggggttggaaacgtgcgggtcaagtttggccagaatgatgctgatagctcccctggcggagactatgaggaagacgaaataaaaaatcacgcttccgatcgtaggcagaagggacaacatcatgagcgcacaggacaagacggccacttatatgggtcgtccccagtcgagagggaagaaggcgctctacgacgagcaacgaccaccgctcgctcgttactcgataataaagtggtgaaaaactccagggcagacgggggacgcctggccggagaggggcagctgcaaaacattccaattgatttcacaaatttcccggctcacgtagatctccccaaggccggttccggcctcgaagagaatgatctagttcaaacaccacgcggattgtccgacctggagatcggtatgtatgccctcctgggagtattctgtctggcaatactagtctttctcattaattgtgctacatttgcactgaaataccgccacaagcaggtgcctttggagggccaggcaagtatgacgcattctcatgattgggtttggcttggaaacgaagcagagctccttgaaagcatgggggacgcacctccccctcaagacgagcatactacgatcattgatagagggccaggtgcatgtgaggaaagtaatcatctcctactgaatggagggagccacaagcacgtccagagccagatccatagatccgcagattctgggggtagacagggcagagagcagaaacaggaccccctgcattccccaacttcaaagagaaagaaggtcaagttcaccacctttacaactatacctccggacgatagttgtcccactgtcaactccatagtgagttccaacgacgaggacattaaatgggtgtgtcaagacgttgcggtgggagcgccaaaggaactcaggaattaccttgaaaagcttaaggacaaggcctag

SEQ ID NO: 51859 - DNA, 4947 bp, Artificial Sequence
  derived and/or modified sequence
atgcgctccgagggtgcggcccccgggccggcggcgccgctgtgcggggcgctgagcctgctgctgggcgcgctgctgggcaaagtgatagagggtcacggggtcacagacaacatacagagattctcctcactgccaccttacctacctgtgagctaccacatcctcagagcagagacctccttcttcctcaaggaagccaaccaggacctgctgcggaactccagcctgcaggcgagggtggagtccttctttacctacaaaaccaggcagcccccagtgctcaatgccagctatggacccttttctgtggagaaggttgtgcctctggacttgatgttgacttcaaactttttaggtccaaccaataagtttagttttgattggaaactaaaagcccacatcctgcgggacaaagtctacctgagccggcccaaagtgcaggttcttttccacatcatgggcagagactgggatgaccacggcgccggggagaagctgccatgcctgagggtctttgctttccgagaaaccagagaggtgcggggcagctgccggctgaagggggacctggggctgtgtgtggctgagctggagctcctgtccagctggttcagtgccccgacggtgggtgccgggaggaagaagtccatggaccagccggaggggacccctgtggagctctactacaccgtgcacccaggaaacgagcgaggggactgtgccgggggtgacttcaggaagggcaacgccatccgtccaggaaaggatgggctggaggaaaccacgtcccacctgcagaggatcggcaccgtcggcctttaccgggcccaggacagcgcccagctcagcgagctgcgtttggatggtaacgtggtcatctggctgccttccaggccagtcaagcagggagaggtggtcacggcctatgtcaccatctcgagcaattcctctgtggacctcttcatcttgagagccaaggtgaagaagggggtgaacatcctgagtgctcagacccgtgagccccggcagtggggcgtcaagcaggaggtgggcagcggcggaaagcacgtgacggccaccgtggcctgccagcgcctggggcccagcccacgcaacaggagcagcagtttattcaatgaggttgtgcagatgaactttgaaatagccagtttcagcagcctttcagggactcagcccatcacgtggcaggtggagtacccacggaaggggaccacagacatcgccgtgtccgagatctttgtcagccagaaggacctggtgggcatcgttcccttggctatggacactgaaattctgaacaccgccgtactcacaggaaagacagttgccatgcctatcaaggtggtctctgtggaggagaacagtgccgtgatggacatctcagagtcggtggagtgcaagtccacagacgaggacgttatcaaagtgtctgagcgctgtgactacatctttgtcaatggcaaagagatcaaaggaaagatggatgcggtggtgaacttcacataccagtacctgagcgcccccctgtgtgtcaccgtgtgggtgccccggctgcccctgcagatcgaggtctctgacacggagctcagccagataaagggctggagggtccccattgtgaccaataagaggcccactcgtgagagcgaggatgaggacgaggaggagcggcggggccggggctgcgcactgcaataccagcacgccaccgtgcgggtcctcacccagtttgtgtctgagggcgccggtccatggggccagccgaactacctgcttagtcctaactggcagttcgacatcactcacctggtggcagacttcatgaagctggaggaacctcacgtggccaccctccaggacagccgggtcctggttgggcgagaggttgggatgacgaccatccaggtgttgtctccactgtctgactccatcctggcagagaagacaataaccgtgctagatgacaaagtatcggtgacagacttggccatccagctcgtggctgggctgtctgtcgccctttaccccaacgcagaaaacagcaaggccgtaacagctgtggtcacagctgaggaggtgctgcggacccccaaacaggaggctgtattcagcacgtggctgcagttcagtgatggctctgtgacgcccctggacatctacgacaccaaggacttctccctggcagccacctcccaggacgaggctgtcgtgtcagtcccccagccccgctctcccaggtggcccgttgtggtggccgaaggggaaggccagggcccactgatccgagtggacatgacgatcgccgaggcctgccagaaatctaaacgcaagagcatcctggctgtgggcgtcggcaacgtcagggtcaagttcggacagaacgatgctgactccagccccggcggggactatgaggaagatgagatcaagaaccacgccagcgaccgccggcagaagggccagcaccatgagcgcacaggccaagatgggcacctctatggcagctctcccgtggagcgtgaggaaggggctctccgaagagccactaccacggccaggtccctgctggacaacaaagtggtgaagaacagtcgggcagacgggggcaggctggcaggagaggggcagctgcagaacatccccattgacttcaccaacttccctgcccacgtggacctccccaaggccgggagtgggctggaggaaaacgacctggtgcagactccgcggggcctgagtgatctggagatagggatgtacgccctcctgggggtgttctgcctggccatcctcgtcttcctgatcaactgcgccacctttgccctgaagtacaggcacaagcaagtgcccctggaaggtcaggcctccatgacccactctcacgactgggtgtggcttggcaatgaggccgaactcctggagagcatgggggatgcgccgccgccccaggacgagcacaccaccatcatagaccgcggaccgggggcctgcgaggagagcaaccatctcctgctcaatggtggctcccacaagcacgtgcagagccagattcacaggtcagccgactccggggggcggcagggcagagaacagaagcaggaccccctgcactcgcccacctccaagaggaagaaggtgaaatttaccacctttaccaccatccccccggacgacagctgccccacggtgaactccatcgtcagcagcaatgatgaggacatcaaatgggtgtgtcaagacgtggctgtgggtgcccccaaggaacttagaaactatctggagaaactcaaagataaggcttaggcccctctagccaaagggccctgcccagatgccttccttgtactggaaactggcccaagtggggcagaaggcgttgtcagtggggttaagaagggacggtcccagggtccatgctagaccagttggaaagttttgaagtcaggaaaagacgtttttgtatcaagggatttttagcagttaatggtggtggatttttaaaggtcaggggaataaagtctggggcatggggagtgcagaccaagttactgaactgcacaggcaaaattaggaaggttattttatgagtcaaaacatactacagacaagctaccaaaaattatttgttaaaaaatgcaacaagacaaataaaaagagaaataatcatctgtttatatttctaataaaggagcaaaatataaaaataggacctgctaagagacattttccattctaattcacgattcacttttccaaggacagccttcaactgtcaccacacagctgggggggagtcatttcttaacaagggatgcctcttgggatagaactagggagttttaaatctttacttgatcatcttttattttcttttccactttttccttttttctctctctctgtgtcctagacttccattgcatttatatttaatgtttatttctgagaatcaagcagtatatttttcctaaatgaaacataaattatattcctattcattagataggttcctaggaacaatgccaattaatccattgtttaagtagtaacttgaatgtttttctatatccctccagctttgttgatagtggcgggttttgtacaattggagggagccctcagagccttctgggggaggagaggaactgtccttaatccatcaccactaccatagggcaaagccagcaggtgtggccctgtgaggggctgtacagacgggatgtggccaggagaacagagccccacctggaccacctgacccctcgggattccacccctgtcatcgtggggatgttcctatatgggagaaagttgggttaaatcaaaaaagaggccacgcccaggtgtaatcagagccaacctggtgggcttggtctatcacaagacataactgatgctgaacatgaacaaagataaaaactgtttggagggtttttgagttgtttttcttatgttgttgggtggggtataccagcataaactctaaagataaaatctatgttagattgtcaatcaactgtgtttttgaacagcataattgtgtagcagcacattgcaaaaatgcattcatccaaagcgacacatgtggcaacgtagaccacgccagtgaaataagccccttcgtgatcacctgactccagttctccgtgtgctccattggctgcggctgcaggaggaagatgcctgacagccctcatgctctccgcaggggggcgctcacaaagatgccaggggtgtttattgtgtttatttttttaattactaaaatcagtagctaagaaagggtccttgaagcctcctaacctgggttggacctttgaaaaatatatttgtagcacatattatagatggaaagaagaagatatttatttatacctgtgatgccaattgtcattaaaaggcttttcatggcttgacaagtca

SEQ ID NO: 51860 - protein, 480 aa, Artificial Sequence
  derived and/or modified sequence
MNMKASRVTLGEAGARARWPLGTPRAAATRREAAALPPVTLALLCLDGVFLSSAENDFVHRIQEELDRFLLQKQLSKVLLFPPLSSRLRYLIHRTAENFDLLSSFSVGEGWKRRTVICHQDIRVPSSDGLSGPCRAPASCPSRYHGPRPISNQGAAAVPRGARAGRWYRGRKPDQPLYVPRVLRRQEEWGLTSTSVLKREAPAGRDPEEPGDVGAGDPNSDQGLPVLMTQGTEDLKGPGQRCENEPLLDPVGPEPLGPESQSGKGDMVEMATRFGSTLQLDLEKGKESLLEKRLVAEEEEDEEEVEEDGPSSCSEDDYSELLQEITDNLTKKEIQIEKIHLDTSSFVEELPGEKDLAHVVEIYDFEPALKTEDLLATFSEFQEKGFRIQWVDDTHALGIFPCLASAAEALTREFSVLKIRPLTQGTKQSKLKALQRPKLLRLVKERPQTNATVARRLVARALGLQHKKKERPAVRGPLPP

SEQ ID NO: 51861 - protein, 133 aa, Artificial Sequence
  derived and/or modified sequence
MTQGTEDLKGPGQRCENEPLLDPVGPEPLGPESQSGKGDMVEMATRFGSTLQLDLEKGKESLLEKRLVAEEEEDEEEVEEDGPSSCSEDDYSELLQEITDNLTKKEIQIEKIHLDTSSFVEELPGEKDLAHVV

SEQ ID NO: 51862 - DNA, 1443 bp, Artificial Sequence
  derived and/or modified sequence
atgaacatgaaggccagcagagtgaccctgggcgaggccggcgccagagccagatggcccctgggcacccccagagccgccgccaccagaagagaggccgccgccctgccccccgtgaccctggccctgctgtgcctggacggcgtgttcctgagcagcgccgagaacgacttcgtgcacagaatccaggaggagctggacagattcctgctgcagaagcagctgagcaaggtgctgctgttcccccccctgagcagcagactgagatacctgatccacagaaccgccgagaacttcgacctgctgagcagcttcagcgtgggcgagggctggaagagaagaaccgtgatctgccaccaggacatcagagtgcccagcagcgacggcctgagcggcccctgcagagcccccgccagctgccccagcagataccacggccccagacccatcagcaaccagggcgccgccgccgtgcccagaggcgccagagccggcagatggtacagaggcagaaagcccgaccagcccctgtacgtgcccagagtgctgagaagacaggaggagtggggcctgaccagcaccagcgtgctgaagagagaggcccccgccggcagagaccccgaggagcccggcgacgtgggcgccggcgaccccaacagcgaccagggcctgcccgtgctgatgacccagggcaccgaggacctgaagggccccggccagagatgcgagaacgagcccctgctggaccccgtgggccccgagcccctgggccccgagagccagagcggcaagggcgacatggtggagatggccaccagattcggcagcaccctgcagctggacctggagaagggcaaggagagcctgctggagaagagactggtggccgaggaggaggaggacgaggaggaggtggaggaggacggccccagcagctgcagcgaggacgactacagcgagctgctgcaggagatcaccgacaacctgaccaagaaggagatccagatcgagaagatccacctggacaccagcagcttcgtggaggagctgcccggcgagaaggacctggcccacgtggtggagatctacgacttcgagcccgccctgaagaccgaggacctgctggccaccttcagcgagttccaggagaagggcttcagaatccagtgggtggacgacacccacgccctgggcatcttcccctgcctggccagcgccgccgaggccctgaccagagagttcagcgtgctgaagatcagacccctgacccagggcaccaagcagagcaagctgaaggccctgcagagacccaagctgctgagactggtgaaggagagaccccagaccaacgccaccgtggccagaagactggtggccagagccctgggcctgcagcacaagaagaaggagagacccgccgtgagaggccccctgcccccctag

SEQ ID NO: 51863 - DNA, 1443 bp, Artificial Sequence
  derived and/or modified sequence
atgaacatgaaggcaagtagagtaactttgggcgaggcgggtgcaagagcccgctggcccttaggcactcccagagctgcagctaccagacgcgaggcagcggccctgcctcctgtgactctggcccttctttgcttagatggagtattcctgtcctccgcagaaaacgatttcgtgcaccgaattcaggaggagttagaccggtttctgcttcagaaacagttaagcaaagtgctgctgttccccccactctcgtccagactgcgctatctgatccataggactgcagagaactttgatctgctgtcgagtttttctgtcggagaaggctggaaaaggcgtactgtgatctgccaccaggacatcagagtcccttctagcgatggattgagcgggccctgtcgcgccccagcttcctgcccgagccgctaccatggtccccgcccaatcagtaaccagggtgccgcagcggtgccgcgaggcgcacgagcaggtcgatggtacagaggacgaaaacccgaccagccactttatgttccaagagtcctacgtcgccaggaagaatggggcctcacatccacctccgttttaaaacgagaagcccccgctggtagagatccagaggaacccggagacgtaggggccggggacccgaacagcgatcagggccttcctgtgctgatgacccaagggaccgaagacttgaagggaccagggcagaggtgtgagaacgagccactcctcgaccccgtgggacccgaacctcttgggcccgaatctcagagcggaaagggcgacatggtagaaatggccactagattcgggtcaaccctgcaactcgacttggagaagggcaaggagagtctgcttgaaaagcgcttagtagcggaagaagaggaggacgaagaggaggtagaagaggacggaccgagcagctgtagcgaagatgactactccgaactcctgcaagaaattacagacaacctcacaaagaaagagattcaaattgagaagattcatttggatacctcctcttttgtggaggaactgcccggcgagaaggatctagcccacgtcgtcgagatctacgatttcgaaccggctctcaaaacagaagatttgttggcaacattctcagagttccaagaaaaggggtttcggatacaatgggtggatgacacacatgcgctgggcatttttccatgcctggcctcagctgcggaggctttgactcgggaatttagcgttttaaaaatccgtccgctcacgcagggtaccaagcagagtaagttgaaagccttgcagaggccaaaactgttgagactagtaaaagagcgaccacagaccaatgccaccgtggctaggagactggtcgcccgagcactgggactgcaacacaagaagaaagagcggcctgcagtgcggggtcctctccctccatag

SEQ ID NO: 51864 - DNA, 1443 bp, Artificial Sequence
  derived and/or modified sequence
atgaacatgaaggccagccgggtgaccctgggggaggccggggcccgggcccgctggcccctgggcacccccagggctgctgccacccggcgggaggccgccgccctgccccctgtgaccctggccctgctgtgcctggatggagtcttcctgagcagcgcagaaaatgactttgtgcaccgcatccaggaggagctggaccgcttcctgctgcagaagcagctgagcaaggtgctgctcttcccccccctgagcagccggctgcgctacctgatccacaggacagcagaaaattttgacctgctgagcagcttctctgtgggggagggctggaagagaagaactgtcatctgccaccaggacatccgggtgcccagcagtgatggcctgagcggcccctgccgggccccagccagctgccccagccgctaccacggcccccggcccatcagcaaccagggcgctgctgctgtgcccaggggggcccgggccggccgctggtaccggggcaggaagccagaccagcccctgtatgtgccccgggtgctgcggcggcaggaggagtggggcctgaccagcacctctgtgctgaagcgggaggccccagctggccgggaccctgaggagcctggagatgtgggcgctggggaccccaacagcgaccagggcctgcctgtgctgatgacccagggcacagaggacctgaagggccctggccagagatgtgaaaatgagcccctgctggaccctgtgggccctgagcccctgggccctgagagccagagcggcaagggggacatggtggagatggccacccgcttcggcagcaccctgcagctggacctggagaagggcaaggagagcctgctggagaagaggctggtggccgaggaggaggaggatgaggaggaggtggaggaggatggccccagcagctgcagtgaagatgactacagcgagctgctgcaggagatcacagacaacctgaccaagaaggagatccagatcgagaagatccacctggacaccagcagctttgtggaggagctgcctggagagaaggacctggcccacgtggtggagatctatgactttgagcccgccctgaagacagaggacctgctggccaccttcagcgagttccaggagaagggcttccgcatccagtgggtggatgacacccacgccctgggcatcttcccctgcctggccagcgctgctgaggccctgacccgggagttctctgtgctgaagatccggcccctgacccagggcaccaagcagagcaagctgaaggccctgcagaggcccaagctgctgcggctggtgaaggagcggccccagaccaatgccaccgtggcccggcggctggtggcccgggccctgggcctgcagcacaagaagaaggagaggcctgctgtgcggggccccctgcccccatag

SEQ ID NO: 51865 - DNA, 1443 bp, Artificial Sequence
  derived and/or modified sequence
atgaacatgaaggccagccgggtgaccctgggcgaggccggcgcccgggcccggtggcctcttggaactccaagggccgctgcaacaaggcgggaggcagcagcgcttccacctgtgacactggcactgctttgtttggacggtgttttcttgtcctccgctgagaatgattttgttcatcgcatacaggaagaactggacaggttcttgctccagaagcagctgtccaaggtgctcttgttcccaccgttgtcttcccgcctgcgctaccttattcaccgaactgccgagaacttcgatttactctcctcattcagcgtgggcgagggatggaaacgcaggactgtaatctgtcaccaggacatacgagtgccctcaagcgatggactgtcaggcccatgcagagccccagcttcctgtccatctcggtaccacggcccacgacctatttccaatcagggagccgctgctgtgcctcggggcgctagagcaggcaggtggtatcgggggcgtaaacccgaccaacccctttatgttccccgggtgttgcgtaggcaggaagaatgggggctgacctcgacctccgtacttaagagagaagcccctgctggccgggaccctgaggaacccggtgacgtgggagctggcgatcccaacagcgatcaaggtttacctgtcctgatgacacagggcactgaggatttaaaaggaccaggacagcgatgcgagaacgagccactgctggatccagtgggcccagagcccctaggaccagaatcccagtccggaaaaggtgatatggtggaaatggccacacgtttcggatccacacttcagctggaccttgagaagggtaaagagagccttctagaaaaacgcctcgtggccgaagaagaagaggatgaggaagaggtggaggaagatgggccttcttcttgctcagaggatgactactctgaactgctgcaagaaattacagataatttaaccaagaaggagattcagattgaaaagatccacctggacacttcaagttttgtggaggaactgcctggagaaaaagatctcgcccatgttgtcgaaatttatgactttgaacccgcgctcaagaccgaggaccttctcgctacattttccgagttccaggaaaagggttttcgtatacagtgggtcgatgacacacacgccctcggcattttcccatgcctggcttcagctgcggaagcgctcacacgagagttttctgtcctgaaaatccggcctctgacgcagggaaccaagcagagcaaactcaaagccctgcaacggcccaaactcctgcgactcgtgaaagagaggccgcagactaacgcgacggtcgcaaggagactggtggcacgcgctctcggtctgcagcacaaaaaaaaggaaagacccgcagttagaggcccgttacctccatag

SEQ ID NO: 51866 - DNA, 1443 bp, Artificial Sequence
  derived and/or modified sequence
atgaatatgaaggccagccgcgtcactcttggggaggcgggagcccgagccaggtggcctctcggaacgcccagagcagctgccacacggagagaagctgcagctcttccaccggtcaccctcgctctgttgtgcctggacggcgtttttttaagttctgcagagaacgacttcgtgcaccggatacaagaggagctggaccggttcttgctacaaaagcagctaagtaaagtcctgctctttccacccctgtcgtcccgtctgcgatacttgatccaccgtaccgcagagaattttgatttattgtcatcattctccgtaggcgaaggatggaaacgaaggaccgtgatttgccatcaggacatccgcgtgccaagtagtgacggactcagtgggccatgtcgcgcacctgcaagctgccccagtcggtatcacggccctagaccaatatcaaaccagggtgctgcggctgtccctcggggagccagagccggaagatggtacagaggcaggaagcccgatcagcccctttacgttccacgggtgctgcgacggcaggaggagtgggggctgacaagcacatctgttcttaagagagaagcccctgctggcagggatcctgaagagccaggtgatgtgggggctggggatcccaatagtgaccagggtctgccagtcctcatgacgcaggggaccgaggatttgaagggacccggtcagagatgcgaaaatgaacctttactagacccggtgggccctgagccactggggccagagagtcaaagcgggaagggtgatatggtcgagatggccacaagattcggctctaccctgcagctagatttggagaaaggtaaggaatccctgctagagaaaagacttgtcgcagaagaagaggaggacgaggaggaggtggaagaggacggtccaagctcttgcagtgaggatgattactctgagctgctccaggagatcaccgacaatctgaccaagaaggaaattcagattgagaaaatccacctagacacatcctcctttgttgaggagctgccaggtgagaaagacctcgcacatgtcgtagaaatctatgactttgagccagccttaaaaactgaggatctgctcgctacctttagtgagttccaggaaaaaggcttccgaattcagtgggtagacgacacccacgccctggggattttcccgtgtcttgctagcgccgcagaggccctgaccagggagtttagtgtgctgaagattcgacccctgactcaagggactaagcaaagcaagctgaaagccctgcagcggcctaaacttctccgacttgttaaggagcgacctcaaaccaacgctaccgtggccaggcgactggttgcaagggctctgggactgcagcacaaaaagaaggagcggcctgctgtgagaggtcccctccccccttag

SEQ ID NO: 51867 - DNA, 1773 bp, Artificial Sequence
  derived and/or modified sequence
tgtctgggtctcggttttgccatgaatatgaaagctagtcgtgtcactctaggagaagcggtttgtgttggtggcaggtgcgccccctcccaataggtgacaagaacacgcactctcccgttcctgcgttacctcccccaggccgcgcggtggcgctgcgtctctgcagcggcccgggtctctctagggcgctcgggcgcgctggcccctggggacgccgagggcggctgcgacgcgccgagaggccgcggctctcccacctgtcaccctggcccttctctgcttggatggtgtcttcctctcctcagccgagaatgacttcgtccaccggatccaggaggaactggaccgctttctgctgcagaagcagctgtcaaaggttcttcttttccccccactctccagtcgcctccggtacctgatccatagaacagcagagaattttgatctcttgagcagcttctccgttggggagggctggaagaggaggacggtcatctgtcaccaggacatcagggtacccagttcggatggcctctctggcccctgccgcgctcctgcctcctgccccagcaggtaccacggtcctcggcccatctccaaccaaggagcagctgcggttccccgaggtgcccgggctggccggtggtatcgtggacgcaagcctgaccagcctttgtatgtgccccgggtgctgcgcaggcaggaagaatgggggctgacctctacctcggtgctcaagagagaggccccagctggcagggacccagaagagcctggagatgttggtgctggagaccccaactctgatcagggactccctgtgctgatgactcagggaacagaggacctaaagggcccaggacaaaggtgtgagaatgagccactgctggaccctgttggccctgagcctctggggcctgagagtcagtcagggaagggagacatggtggagatggccacacggtttgggtccaccctgcagctagacctggaaaaggggaaggagagtctgttggagaagaggctggtggcagaggaggaagaggacgaagaggaggtggaagaggatggccccagcagctgctcggaggacgattacagtgagctgctgcaggagatcacagacaacctgacgaagaaggagattcagatagagaagatccatttggacacatcctccttcgtggaggagctgcctggagagaaggaccttgcccacgtggtagagatctatgactttgaaccagcgctcaagacggaggacctgctggcaacgttttctgagttccaagagaaggggttcaggattcagtgggtggatgatactcacgcactcggcatctttccctgcctggcctcagctgcggaagccctgacccgggagttctcggtgctcaagatccggcccctcacacagggaaccaagcagtcaaagctcaaagccttgcagaggccaaaactcctgcgtctggtgaaggagaggccacagacaaatgcgactgtggcccggcggctggtggcccgggccctgggactccaacacaaaaagaaagagcggcctgctgtccggggtccgctgccgccctgaggcctggagacccaactggcctggatctgcgtcccgacgtagctggcgcccccaacaccataagccttcacagacgccagagcagccccgcaccaccctcgagcttcaccatggggtgtggtgggctttagtttagtcccagaaatggagaaaaaataaaaactcacgttgttctaatgtga

SEQ ID NO: 51868 - DNA, 1624 bp, Artificial Sequence
  derived and/or modified sequence
atgaatatgaaagctagtcgtgtcactctaggagaagcgggcgctcgggcgcgctggcccctggggacgccgagggcggctgcgacgcgccgagaggccgcggctctcccacctgtcaccctggcccttctctgcttggatggtgtcttcctctcctcagccgagaatgacttcgtccaccggatccaggaggaactggaccgctttctgctgcagaagcagctgtcaaaggttcttcttttccccccactctccagtcgcctccggtacctgatccatagaacagcagagaattttgatctcttgagcagcttctccgttggggagggctggaagaggaggacggtcatctgtcaccaggacatcagggtacccagttcggatggcctctctggcccctgccgcgctcctgcctcctgccccagcaggtaccacggtcctcggcccatctccaaccaaggagcagctgcggttccccgaggtgcccgggctggccggtggtatcgtggacgcaagcctgaccagcctttgtatgtgccccgggtgctgcgcaggcaggaagaatgggggctgacctctacctcggtgctcaagagagaggccccagctggcagggacccagaagagcctggagatgttggtgctggagaccccaactctgatcagggactccctgtgctgatgactcagggaacagaggacctaaagggcccaggacaaaggtgtgagaatgagccactgctggaccctgttggccctgagcctctggggcctgagagtcagtcagggaagggagacatggtggagatggccacacggtttgggtccaccctgcagctagacctggaaaaggggaaggagagtctgttggagaagaggctggtggcagaggaggaagaggacgaagaggaggtggaagaggatggccccagcagctgctcggaggacgattacagtgagctgctgcaggagatcacagacaacctgacgaagaaggagattcagatagagaagatccatttggacacatcctccttcgtggaggagctgcctggagagaaggaccttgcccacgtggtagagatctatgactttgaaccagcgctcaagacggaggacctgctggcaacgttttctgagttccaagagaaggggttcaggattcagtgggtggatgatactcacgcactcggcatctttccctgcctggcctcagctgcggaagccctgacccgggagttctcggtgctcaagatccggcccctcacacagggaaccaagcagtcaaagctcaaagccttgcagaggccaaaactcctgcgtctggtgaaggagaggccacagacaaatgcgactgtggcccggcggctggtggcccgggccctgggactccaacacaaaaagaaagagcggcctgctgtccggggtccgctgccgccctgaggcctggagacccaactggcctggatctgcgtcccgacgtagctggcgcccccaacaccataagccttcacagacgccagagcagccccgcaccaccctcgagcttcaccatggggtgtggtgggctttagtttagtcccagaaatggagaaaaaataaaaactcacgttgttctaatgtg

SEQ ID NO: 51869 - DNA, 781 bp, Artificial Sequence
  derived and/or modified sequence
gtcgtcccgacccccgggctcccgggtgggaaggagcagctgggctgcgcggagcaggcccccgtgagccccgggaaggagcgcagcgcagggctctcccacctgtcaccctggcccttctctgcttggatggtgtcttcctctcctcagccgagaatgacttcgtccaccggatccaggaggaactggaccgctttctgctgcagaagcagctgtcaaaggttcttcttttccccccactctccagtcgcctccggtacctgatccatagaacagcagagaattttgatctcttgagcagcttctccgttggggagggctggaagaggaggacggtcatctgtcaccaggacatcagggtacccagttcggatggcctctctggcccctgccgcgctcctgcctcctgccccagcaggtaccacggtcctcggcccatctccaaccaaggagcagctgcggttccccgaggtgcccgggctggccggtggtatcgtggacgcaagcctgaccagcctttgtatgtgccccgggtgctgcgcaggcaggaagaatgggggctgacctctacctcggtgctcaagagagaggccccagctggcagggacccagaagagcctggagatgttggtgctggagaccccaactctgatcagggactccctgtgctgatgactcagggaacagaggacctaaagggcccaggacaaaggtgtgagaatgagccactgctggaccctgttggccctgagcctctggggcctgagagtcagtcagggaa

SEQ ID NO: 51870 - DNA, 985 bp, Artificial Sequence
  derived and/or modified sequence
gccgagggcggctgcgacgcgccgagaggccgcggctctcccacctgtcaccctggcccttctctgcttggatggtgtcttcctctcctcagccgagaatgacttcgtccaccggatccaggaggaactggaccgctttctgctgcagaagcagctgtcaaatcgcctccggtacctgatccatagaacagcagagaattttgatctcttgagcagcttctccgttggggagggctggaagaggaggacggtcatctgtcaccaggacatcagggtacccagttcggatggcctctctggcccctgccgcgctcctgcctcctgccccagcaggtaccacggtcctcggcccatctccaaccaaggagcagctgcggttccccgaggtgcccgggctggccggtggtatcgtggacgcaagcctgaccagcctttgtatgtgccccgggtgctgcgcaggcaggaagaatgggggctgacctctacctcggtgctcaagagagaggccccagctggcagggacccagaagagcctggagatgttggtgctggagaccccaactctgatcagggactccctgtgctgatgactcagggaacagaggacctaaagggcccaggacaaaggtgtgagaatgagccactgctggaccctgttggccctgagcctctggggcctgagagtcagtcagggaagggagacatggtggagatggccacacggtttgggtccaccctgcagctagacctggaaaaggggaaggagagtctgttggagaagaggctggtggcagaggaggaagaggacgaagaggaggtggaagaggatggccccagcagctgctcggaggacgattacagtgagctgctgcaggagatcacagacaacctgacgaagaaggagattcagatagagaagatccatttggacacatcctccttcgtggaggagctgcctggagagaaggaccttgcccacgtggta

SEQ ID NO: 51871 - DNA, 953 bp, Artificial Sequence
  derived and/or modified sequence
gccctttcggtgccggcgttgcggggtcgcgggagatccgggggtctgtgctctgattcccggccctgcccgtctctcttacaggctctcccacctgtcaccctggcccttctctgcttggatggtgtcttcctctcctcagccgagaatgacttcgtccaccggatccaggaggaactggaccgctttctgctgcagaagcagctgtcaaaggttcttcttttccccccactctccagtcgcctccggtacctgatccatagaacagcagagaattttgatctcttgagcagcttctccgttggggagggctggaagaggaggacggtcatctgtcaccaggacatcagggtacccagttcggatggcctctctggcccctgccgcgctcctgcctcctgccccagcaggtaccacggtcctcggcccatctccaaccaaggagcagctgcggttccccgaggtgcccgggctggccggtggtatcgtggacgcaagcctgaccagcctttgtatgtgccccgggtgctgcgcaggcaggaagaatgggggctgacctctacctcggtgctcaagagagaggccccagctggcagggacccagaagagcctggagatgttggtgctggagaccccaactctgatcagggactccctgtgctgatgactcagggaacagaggacctaaagggcccaggacaaaggtgtgagaatgagccactgctggaccctgttggccctgagcctctggggcctgagagtcagtcagggaagggagacatggtggagatggccacacggtttgggtccaccctgcagctagacctggaaaaggggaaggagagtctgttggagaagaggctggtggcagaggaggaagaggacgaagaggaggtggaagaggatggccccagcagctgctcggaggacgattacagtgagctgctgcagga

SEQ ID NO: 51872 - protein, 376 aa, Artificial Sequence
  derived and/or modified sequence
MAEDNHKKKTVKMLEYLGKDVLHGVFNYLAKHDVLTLKEEEKKKYYDTKIEDKALILVDSLRKNRVAHQMFTQTLLNMDQKITSVKPLLQIEAGPPESAESTNILKLCPREEFLRLCKKNHDEIYPIKKREDRRRLALIICNTKFDHLPARNGAHYDIVGMKRLLQGLGYTVVDEKNLTARDMESVLRAFAARPEHKSSDSTFLVLMSHGILEGICGTAHKKKKPDVLLYDTIFQIFNNRNCLSLKDKPKVIIVQACRGEKHGELWVRDSPASLALISSQSSENLEADSVCKIHEEKDFIAFCSSTPHNVSWRDRTRGSIFITELITCFQKYSCCCHLMEIFRKVQKSFEVPQAKAQMPTIERATLTRDFYLFPGN

SEQ ID NO: 51873 - DNA, 1131 bp, Artificial Sequence
  derived and/or modified sequence
atggcagaggataatcataaaaagaagaccgtgaaaatgttggagtacctcggaaaggacgtgctgcatggcgtgtttaactatctcgccaaacacgatgtgcttactttgaaggaggaggagaaaaagaagtactacgacaccaaaatcgaggataaggcactgatccttgtagactctcttcggaagaatcgcgtggcacaccagatgtttactcaaacgctgctcaacatggaccagaagatcacctccgtgaagccccttctccagattgaagctggccctcccgagagcgcggagtccacgaacattctcaagttgtgcccccgcgaagaattcttgcggctgtgtaagaagaatcatgacgagatatatcctatcaaaaagagggaagacaggcggcgactggccttgataatctgtaacacaaagtttgaccaccttcctgctagaaacggcgcccactacgatatagtggggatgaaacgtcttctgcaaggcttaggatacaccgtggtggacgagaagaatctgactgcccgggatatggagtctgttctgcgtgcctttgccgctcggcctgagcataaatctagtgactcaacattcctcgttctgatgtcccacggcatcctggagggcatctgcggaactgcacataagaaaaaaaagcccgacgtcctcctgtacgatacaatcttccaaatctttaataacagaaattgtctgtctctcaaggataaaccgaaggtcatcattgtgcaggcatgtagaggagagaaacatggagagctttgggtgcgcgacagcccggcgagcttggcactgataagctctcagtccagtgagaatctggaggccgactctgtttgcaagatccacgaagaaaaggactttattgcattttgcagctcaacgccacacaatgtgagctggagagatcggaccagaggaagtattttcattacggagcttatcacttgctttcagaagtatagctgctgctgccatctaatggagatctttagaaaagttcagaaatccttcgaggttcctcaggcaaaggcgcaaatgccaaccatcgagagagccacacttacccgggatttttatcttttccctggaaattag

SEQ ID NO: 51874 - DNA, 1131 bp, Artificial Sequence
  derived and/or modified sequence
atggccgaggacaaccacaagaagaagacagtgaagatgctggagtacctgggcaaggatgtgctgcatggagtcttcaactacctggccaagcatgatgtgctgaccctgaaggaggaggagaagaagaagtactatgacaccaagattgaggacaaggccctgatcctggtggacagcctgaggaagaacagagtggcccaccagatgttcacccagaccctgctgaacatggaccagaagatcacctctgtgaagcccctgctgcagattgaagctggccccccagagagcgctgagagcaccaacatcctgaagctgtgcccccgggaggagttcctgcggctgtgcaagaagaaccatgatgagatctaccccatcaagaagagagaagatagaagaaggctggccctgatcatctgcaacaccaagtttgaccacctgcctgccagaaatggagcccactatgacatcgtgggcatgaagaggctgctgcagggcctgggctacacagtggtggatgagaagaacctgacagcccgggacatggagagcgtgctgcgggcctttgctgcccggcctgagcacaagagcagtgacagcaccttcctggtgctgatgagccacggcatcctggagggcatctgtggcacagcccacaagaagaagaagccagatgtgctgctgtatgacaccatcttccagatcttcaacaacagaaactgcctgagcctgaaggacaagcccaaggtgatcatcgtgcaggcctgccgcggggagaagcacggggagctgtgggtgcgggacagccctgccagcctggccctgatcagcagccagagcagcgagaacctggaggccgacagcgtgtgcaagatccacgaggagaaggacttcatcgccttctgcagcagcaccccccacaacgtgtcctggagggacaggacccggggcagcatcttcatcacagagctgatcacctgcttccagaagtacagctgctgctgccacctgatggagatcttcaggaaggtgcagaagagctttgaggtgccccaggccaaggcccagatgcccaccatcgagcgggccaccctgacccgggacttctacctgtttcctggcaactag

SEQ ID NO: 51875 - DNA, 1131 bp, Artificial Sequence
  derived and/or modified sequence
atggccgaggacaaccacaagaagaagaccgtgaagatgctggagtacctgggaaaggatgtgctgcacggcgtatttaactatctggccaaacacgatgtgctcacccttaaggaagaggaaaaaaagaagtactacgacaccaaaatagaggataaggcactgattctggttgatagcctccgcaagaacagagttgcacatcagatgttcacccagacccttttaaacatggaccagaagattacatccgtcaagcccctgctccaaatagaagccgggcctcccgagtcagcagaaagcaccaacatattaaaactgtgccctagagaggagttccttagactgtgcaagaaaaatcacgacgagatttacccaatcaaaaagagggaagaccggcgccgactggccctgatcatttgcaacaccaaatttgaccacctgcctgcccggaacggggctcactacgatattgtgggcatgaagagactgcttcagggcctcggctacaccgtggttgacgagaagaacttgacagcgagggatatggaaagcgtactgcgggcattcgccgctcgaccagagcataagtcatccgattcaaccttcctggtcctgatgagtcacgggattttggagggcatctgcgggactgcacacaagaagaagaagcccgatgttttactctatgacactatctttcaaatatttaataataggaactgcctgtccttaaaggataagcccaaagtgattattgtgcaggcatgccgcggagagaagcacggcgagctctgggtgcgagattcacccgctagcctggcgctgattagctcccagagctctgagaatctggaagctgactccgtttgtaagattcacgaagagaaggattttattgccttctgtagcagcacaccacataacgtgtcctggcgggatagaacacgaggctccatctttatcaccgaactcatcacttgttttcagaaatattcttgttgttgccatcttatggaaatttttcgcaaggtacagaagtcttttgaggtgccccaagcgaaagcacagatgccaactatcgagcgcgccactcttacaagagacttctatctgtttcccggaaattag

SEQ ID NO: 51876 - DNA, 1131 bp, Artificial Sequence
  derived and/or modified sequence
atggcagaagacaaccataaaaagaagacagtgaagatgctagaatatctcggcaaagatgttctgcacggggtgtttaattaccttgcaaaacacgatgtgctgacccttaaagaggaggaaaaaaaaaagtattatgacaccaaaatcgaggataaagctctcatcctcgtggacagtttgcgtaaaaatcgggtggctcaccagatgtttacccagaccttactgaatatggatcagaaaattacctctgttaaacctctgctgcagatcgaagccggacccccagaatctgccgaaagtacaaacatactgaagctctgccccagggaggaattcctgagactctgcaagaaaaatcatgacgagatttaccccattaaaaagcgtgaggatagacggaggctcgcacttattatttgtaataccaagttcgatcacttacctgccaggaatggagctcactacgatatcgtgggcatgaagcggctgctgcaagggcttgggtacacagttgttgacgagaagaacctcactgctagggacatggaatcagttttgcgcgcattcgcagccaggcctgaacataaatctagcgactctacatttctggtcctaatgtcacatggcatattggaaggtatttgtgggacagctcacaagaagaaaaagcctgatgtacttttgtacgacactatctttcaaattttcaataaccggaattgtctgtctctcaaagataagcctaaagtcattatcgtgcaagcctgccgcggtgaaaagcatggcgaactgtgggtgagggactcgccggcatctttggccctaatctcgagccaaagttccgagaatctcgaggctgacagcgtttgcaaaattcatgaggagaaggatttcatcgctttctgctcttccacaccacacaacgtgtcctggcgggacagaacgagaggctctatctttatcactgagttaattacctgttttcaaaaatacagctgttgctgccatctgatggagatattccgtaaagtgcagaagagcttcgaagttccgcaggccaaggcacaaatgcctacaatcgaacgagcaactttgacccgggacttctaccttttcccaggcaattag

SEQ ID NO: 51877 - DNA, 1237 bp, Artificial Sequence
  derived and/or modified sequence
gtgctgtacaaagagacagaggctgttagctatggctgaagacaaccacaaaaaaaaaacagttaagatgttggaatacctgggcaaagatgttcttcatggtgtttttaattatttggcaaaacacgatgttctgacattgaaggaagaggaaaagaaaaaatattatgataccaaaattgaagacaaggccctgatcttggtagactctttgcgaaagaatcgcgtggctcatcaaatgtttacccaaacacttctcaatatggaccaaaagatcaccagtgtaaaacctcttctgcaaatcgaggctggaccacctgagtcagcagaatctacaaatatactcaaactttgtcctcgtgaagaattcctgagactgtgtaaaaaaaatcatgatgagatctatccaataaaaaagagagaggaccgcagacgcctggctctcatcatatgcaatacaaagtttgatcacctgcctgcaaggaatggggctcactatgacatcgtggggatgaaaaggctgcttcaaggcctgggctacactgtggttgacgaaaagaatctcacagccagggatatggagtcagtgctgagggcatttgctgccagaccagagcacaagtcctctgacagcacgttcttggtactcatgtctcatggcatcctagagggaatctgcggaactgcgcataaaaagaaaaaaccggatgtgctgctttatgacaccatcttccagatattcaacaaccgcaactgcctcagtctaaaggacaaacccaaggtcatcattgtccaggcctgcagaggtgaaaaacatggggaactctgggtcagagactctccagcatccttggcactcatctcttcacagtcatctgagaacctggaggcagattctgtttgcaagatccacgaggagaaggacttcattgctttctgttcttcaacaccacataacgtgtcctggagagaccgcacaaggggctccatcttcattacggaactcatcacatgcttccagaaatattcttgctgctgccacctaatggaaatatttcggaaggtacagaaatcatttgaagttccacaggctaaagcccagatgcccaccatagaacgagcaaccttgacaagagatttctacctctttcctggcaattgaaaatgaaaccacaggcagcccagccctcctctgtcaacatcaaagagcacatttaccagtatagcttgcatagtc

SEQ ID NO: 51878 - DNA, 1131 bp, Artificial Sequence
  derived and/or modified sequence
atggccgaggacaaccacaagaagaagaccgtgaagatgctggagtacctgggcaaggacgtgctgcacggcgtgttcaactacctggccaagcacgacgtgctgaccctgaaggaggaggagaagaagaagtactacgacaccaagatcgaggacaaggccctgatcctggtggacagcctgagaaagaacagagtggcccaccagatgttcacccagaccctgctgaacatggaccagaagatcaccagcgtgaagcccctgctgcagatcgaggccggcccccccgagagcgccgagagcaccaacatcctgaagctgtgccccagagaggagttcctgagactgtgcaagaagaaccacgacgagatctaccccatcaagaagagagaggacagaagaagactggccctgatcatctgcaacaccaagttcgaccacctgcccgccagaaacggcgcccactacgacatcgtgggcatgaagagactgctgcagggcctgggctacaccgtggtggacgagaagaacctgaccgccagagacatggagagcgtgctgagagccttcgccgccagacccgagcacaagagcagcgacagcaccttcctggtgctgatgagccacggcatcctggagggcatctgcggcaccgcccacaagaagaagaagcccgacgtgctgctgtacgacaccatcttccagatcttcaacaacagaaactgcctgagcctgaaggacaagcccaaggtgatcatcgtgcaggcctgcagaggcgagaagcacggcgagctgtgggtgagagacagccccgccagcctggccctgatcagcagccagagcagcgagaacctggaggccgacagcgtgtgcaagatccacgaggagaaggacttcatcgccttctgcagcagcaccccccacaacgtgagctggagagacagaaccagaggcagcatcttcatcaccgagctgatcacctgcttccagaagtacagctgctgctgccacctgatggagatcttcagaaaggtgcagaagagcttcgaggtgccccaggccaaggcccagatgcccaccatcgagagagccaccctgaccagagacttctacctgttccccggcaactag

SEQ ID NO: 51879 - DNA, 879 bp, Artificial Sequence
  derived and/or modified sequence
atggccgcgttgctccagatcgaagcgggcccccctgagtccgcggaaagcactaatatcctgaagctgtgccctagagaggagttcctgagattgtgtaaaaagaatcatgacgaaatatatccaattaagaaaagggaggatcgccgccgcctggctctgattatctgtaacaccaagttcgaccacctgcccgcccggaatggcgcacactatgacatcgtgggaatgaaacgactgctgcaggggcttgggtacaccgttgtggatgaaaagaaccttacagcccgagatatggaatccgtcctgcgggcttttgcagcacggccggagcataaatccagcgatagtacctttctcgtacttatgagtcacggcattctggagggaatctgcggcacagcacacaagaagaagaagccggacgtgctgttgtacgacaccatcttccagatatttaacaataggaattgtctgagcttgaaagataaaccaaaggtcattattgttcaggcctgtaggggagaaaagcatggcgaactttgggtccgtgactcgcctgcctccctggccctgatttcatctcaatcttctgaaaatctggaggccgacagcgtgtgtaagatccatgaagaaaaagactttatcgctttctgctcctctacgccccacaacgtctcgtggagggacaggacacgaggaagtatttttatcaccgaactgattacatgcttccagaagtactcgtgttgctgtcaccttatggaaattttccggaaggtgcaaaagtcctttgaagtgccacaggctaaagctcagatgcccaccatcgagcgtgccacactaacacgggatttttatctttttccaggaaactag

SEQ ID NO: 51880 - DNA, 879 bp, Artificial Sequence
  derived and/or modified sequence
atggccgccctgcttcaaatagaagcagggcctccagagtcagctgaatccacgaatattctaaaattgtgtcccagggaggagttcttgcggctgtgtaagaagaatcacgatgagatatatccaatcaaaaaaagagaagaccggcgccggctagccctaatcatttgtaatacaaagttcgaccaccttcctgctcgcaacggcgcacactacgatatcgtaggcatgaaaaggctgctgcagggcctgggctacacagtcgtagatgagaaaaatctgaccgcgcgggacatggagtctgtgctcagagcatttgccgcaagacccgagcataagtcatccgattctacattcctggtcctaatgtcccatggcatcttagaggggatatgcggcactgcccacaagaagaaaaagcccgatgtcttactgtatgacaccatttttcagatatttaataatcgaaattgtctatctttaaaggataaaccaaaggtcatcatcgtgcaggcctgccggggcgagaagcacggggagttatgggtaagggacagtcctgcttccctcgccctcatttcgagccaaagtagcgaaaatttagaggcggacagtgtctgcaagatccacgaggagaaggattttatcgctttctgtagtagtaccccacataatgtgtcctggcgcgacaggaccagaggtagcatattcattacagaactgattacatgctttcagaaatactcttgctgttgtcatctaatggagatctttcgcaaggttcaaaaaagcttcgaggtcccacaggccaaagcccagatgcccaccatagagcgggctactcttactagggatttttacctcttccccggtaattag

SEQ ID NO: 51881 - DNA, 879 bp, Artificial Sequence
  derived and/or modified sequence
atggccgccctgctgcagattgaagctggccccccagagagcgctgagagcaccaacatcctgaagctgtgcccccgggaggagttcctgcggctgtgcaagaagaaccatgatgagatctaccccatcaagaagagagaagatagaagaaggctggccctgatcatctgcaacaccaagtttgaccacctgcctgccagaaatggagcccactatgacatcgtgggcatgaagaggctgctgcagggcctgggctacacagtggtggatgagaagaacctgacagcccgggacatggagagcgtgctgcgggcctttgctgcccggcctgagcacaagagcagtgacagcaccttcctggtgctgatgagccacggcatcctggagggcatctgtggcacagcccacaagaagaagaagccagatgtgctgctgtatgacaccatcttccagatcttcaacaacagaaactgcctgagcctgaaggacaagcccaaggtgatcatcgtgcaggcctgccgcggggagaagcacggggagctgtgggtgcgggacagccctgccagcctggccctgatcagcagccagagcagcgagaacctggaggccgacagcgtgtgcaagatccacgaggagaaggacttcatcgccttctgcagcagcaccccccacaacgtgtcctggagggacaggacccggggcagcatcttcatcacagagctgatcacctgcttccagaagtacagctgctgctgccacctgatggagatcttcaggaaggtgcagaagagctttgaggtgccccaggccaaggcccagatgcccaccatcgagcgggccaccctgacccgggacttctacctgtttcctggcaactag

SEQ ID NO: 51882 - DNA, 879 bp, Artificial Sequence
  derived and/or modified sequence
atggccgccctgctgcagatcgaggccggcccccccgagagcgccgagagtacaaatatcctgaagctctgtccacgcgaggagttcttaagactgtgcaaaaagaatcacgacgagatctaccccattaagaagcgggaggatagacgacggctggcgttgattatttgcaataccaagtttgaccacctgccagcccgcaacggcgcccactacgatatcgtgggaatgaagaggctgctgcagggcttaggttacactgtggtcgacgaaaaaaatctgactgctcgcgatatggaaagcgttctgcgagccttcgccgcaagaccagaacacaagagtagtgactccaccttcttggtcctaatgtcccatggaatcttagagggaatatgcggcaccgctcacaaaaagaagaagccagacgtgttattgtatgatactatttttcaaattttcaataaccgaaattgcctgagcttgaaagataagccgaaagttatcatcgtgcaggcatgtcgtggcgagaagcacggagaactctgggtcagggactcccctgcttccctcgcactcatttcaagccagagttccgagaaccttgaggccgattccgtgtgtaagatccatgaagaaaaagattttattgctttctgcagtagcacaccccacaacgtgagctggcgcgaccggacaaggggttcgatattcataacagagttaatcacttgcttccagaagtattcctgctgttgccacctcatggaaatctttcgaaaggttcaaaaaagttttgaggtgccccaagccaaagctcaaatgcccacaattgaaagagccacactgactcgcgacttctacctgttcccaggtaactag

SEQ ID NO: 51883 - DNA, 879 bp, Artificial Sequence
  derived and/or modified sequence
atggccgccctgctgcagatcgaggccggcccccccgagagcgccgaatctaccaatatcctgaaattgtgcccaagggaagaattcctcagactttgtaagaagaaccacgacgaaatctatccaattaagaagcgagaggataggcggcggctggcacttatcatctgcaacacaaaatttgaccacctgccagcccgcaatggcgcccattatgatatcgtcggaatgaagcggctgctgcagggattgggatacacagtcgtcgatgagaaaaatctcaccgcaagggacatggaatccgttctgagggcgtttgctgccaggcctgaacacaaaagttctgactctacgtttctggtgctgatgagccatgggatattggaggggatttgcggaactgcccacaagaagaaaaagcctgatgtgctgctttatgacacaatatttcaaatcttcaacaaccgaaactgcctgtccttgaaggacaagccgaaggttataatcgtgcaggcttgtcgcggtgagaaacacggagaactgtgggtgagagattcacctgctagccttgccctgatatccagtcagtcaagcgaaaatcttgaagccgacagcgtgtgtaaaattcacgaggagaaggactttattgcattttgctcctctacacctcataacgtgtcctggcgagacaggactcgaggtagtatctttataactgagctgatcacatgtttccagaaatattcgtgttgctgtcacctgatggagatatttcgtaaggttcagaagtccttcgaggtgccccaagcaaaagcacagatgccgacgattgagagggctacactgactcgcgacttttatctgtttccaggtaattag

SEQ ID NO: 51884 - DNA, 879 bp, Artificial Sequence
  derived and/or modified sequence
atggcggctctcctgcaaattgaagctggacctccggagagtgcagagtctaccaatatcctaaaactttgccccagggaggagtttctcaggctgtgcaagaagaaccatgatgagatctatccaattaagaaaagggaagatagaaggcggctggcactcataatttgcaatacgaaatttgatcacctcccggcacgtaacggcgctcactacgacattgtgggaatgaagagactcctgcaagggcttggttatacagttgtagacgagaagaatctcaccgccagggatatggagagtgttctgcgggcatttgctgctcgtcccgaacataagtcctctgactctacattcctcgttctgatgagccatggcattcttgaggggatttgtgggaccgcacataaaaaaaaaaagccggatgtactcctctatgatacaatctttcaaatttttaacaaccgtaattgcctttcactgaaggacaagccaaaggtgatcatagttcaggcatgcagaggcgagaagcacggcgagctgtgggttcgagatagcccagccagtctggccctgataagctctcaatcttcagagaacctggaggctgactcagtttgtaaaattcacgaagagaaggacttcatcgcgttttgcagttctaccccgcataacgtgagttggagagaccggaccagaggatcaattttcatcactgagcttatcacatgtttccagaaatactcatgttgttgccatcttatggagattttcagaaaggtccagaagagtttcgaggtgccacaggccaaggcacaaatgcccacaatcgaacgcgcaacattaaccagagatttctatctgtttccaggcaactag

SEQ ID NO: 51885 - DNA, 879 bp, Artificial Sequence
  derived and/or modified sequence
atggccgcattactgcagattgaagctggcccaccagagagcgccgaatccaccaatattttaaagctgtgtcctagagaagagtttttgaggttgtgcaagaaaaaccacgatgaaatttacccaattaaaaagcgagaggatagacggcgactggctttgatcatttgcaataccaagtttgatcacctgccagcaaggaacggtgctcattacgacatcgtcggaatgaaacgcttactccagggcctgggttataccgttgtagacgaaaaaaatcttacggcacgcgacatggagtctgtcctgagagctttcgctgccagacccgagcacaaatctagtgatagcacattcctcgtgcttatgtcccatgggattctggaggggatctgtggcactgctcacaaaaaaaagaaacctgatgtcctactgtatgacacgattttccaaatcttcaataatcgaaactgtctttcgctcaaggacaagcctaaggttatcattgtgcaggcttgtagaggcgagaaacacggagagctgtgggtgcgggacagccccgctagcctggcactgatttcaagtcaaagctcagagaatttagaggccgattctgtttgcaaaatacatgaggagaaggatttcatagcattttgttcttcaacacctcataacgtctcatggagagaccgaactagagggtcaatttttataaccgaactaataacctgtttccaaaagtacagttgctgctgccacctgatggagatctttaggaaagtccagaagagttttgaggtaccacaggccaaggctcaaatgccaactattgagcgagctaccttaactcgggacttctacttatttcccggtaattag

SEQ ID NO: 51886 - DNA, 1378 bp, Artificial Sequence
  derived and/or modified sequence
agtgctgtacaaagagacagaggctgttagctatggctgctgtgcccagagttgaaggagtctttatatttctgatagaagacagtggcaaaaaaaaaaggcgtaagaattttgaagctatgttcaaaggtatccttcagagtggattggataacttcgtgataaaccacatgctaaagaacaacgtggctggacaaacatctatccagaccctagtacctaatacggatcaaaagtcgaccagtgtaaaaaaagacaaccacaaaaaaaaaacagttaagatgttggaatacctgggcaaagatgttcttcatggtgtttttaattatttggcaaaacacgatgttctgacattgaaggaagaggaaaagaaaaaatattatgataccaaaattgaagacaaggccctgatcttggtagactctttgcgaaagaatcgcgtggctcatcaaatgtttacccaaacacttctcaatatggaccaaaagatcaccagtgtaaaacatctatccaataaaaaagagagaggaccgcagacgcctggctctcatcatatgcaatacaaagtttgatcacctgcctgcaaggaatggggctcactatgacatcgtggggatgaaaaggctgcttcaaggcctgggctacactgtggttgacgaaaagaatctcacagccagggatatggagtcagtgctgagggcatttgctgccagaccagagcacaagtcctctgacagcacgttcttggtactcatgtctcatggcatcctagagggaatctgcggaactgcgcataaaaagaaaaaaccggatgtgctgctttatgacaccatcttccagatattcaacaaccgcaactgcctcagtctaaaggacaaacccaaggtcatcattgtccaggcctgcagaggtgaaaaacatggggaactctgggtcagagactctccagcatccttggcactcatctcttcacagtcatctgagaacctggaggcagattctgtttgcaagatccacgaggagaaggacttcattgctttctgttcttcaacaccacataacgtgtcctggagagaccgcacaaggggctccatcttcattacggaactcatcacatgcttccagaaatattcttgctgctgccacctaatggaaatatttcggaaggtacagaaatcatttgaagttccacaggctaaagcccagatgcccaccatagaacgagcaaccttgacaagagatttctacctctttcctggcaattgaaaatgaaaccacaggcagcccagccctcctctgtcaacatcaaagagcacatttaccagtatagcttgcatagtcaatatttggtatttcaataaaagtaaagactgtatct

SEQ ID NO: 51887 - DNA, 1023 bp, Artificial Sequence
  derived and/or modified sequence
agtgctgtacaaagagacagaggctgttagctatggctgctcttctgcaaatcgaggctggaccacctgagtcagcagaatctacaaatatactcaaactttgtcctcgtgaagaattcctgagactgtgtaaaaaaaatcatgatgagatctatccaataaaaaagagagaggaccgcagacgcctggctctcatcatatgcaatacaaagtttgatcacctgcctgcaaggaatggggctcactatgacatcgtggggatgaaaaggctgcttcaaggcctgggctacactgtggttgacgaaaagaatctcacagccagggatatggagtcagtgctgagggcatttgctgccagaccagagcacaagtcctctgacagcacgttcttggtactcatgtctcatggcatcctagagggaatctgcggaactgcgcataaaaagaaaaaaccggatgtgctgctttatgacaccatcttccagatattcaacaaccgcaactgcctcagtctaaaggacaaacccaaggtcatcattgtccaggcctgcagaggtgaaaaacatggggaactctgggtcagagactctccagcatccttggcactcatctcttcacagtcatctgagaacctggaggcagattctgtttgcaagatccacgaggagaaggacttcattgctttctgttcttcaacaccacataacgtgtcctggagagaccgcacaaggggctccatcttcattacggaactcatcacatgcttccagaaatattcttgctgctgccacctaatggaaatatttcggaaggtacagaaatcatttgaagttccacaggctaaagcccagatgcccaccatagaacgagcaaccttgacaagagatttctacctctttcctggcaattgaaaatgaaaccacaggcagcccagccctcctctgtcaacatcaaagagcacatttaccagtatagcttgcatagtcaatatttggtatttcaataaaagtaaagactgtatct

SEQ ID NO: 51888 - DNA, 879 bp, Artificial Sequence
  derived and/or modified sequence
atggctgctcttctgcaaatcgaggctggaccacctgagtcagcagaatctacaaatatactcaaactttgtcctcgtgaagaattcctgagactgtgtaaaaaaaatcatgatgagatctatccaataaaaaagagagaggaccgcagacgcctggctctcatcatatgcaatacaaagtttgatcacctgcctgcaaggaatggggctcactatgacatcgtggggatgaaaaggctgcttcaaggcctgggctacactgtggttgacgaaaagaatctcacagccagggatatggagtcagtgctgagggcatttgctgccagaccagagcacaagtcctctgacagcacgttcttggtactcatgtctcatggcatcctagagggaatctgcggaactgcgcataaaaagaaaaaaccggatgtgctgctttatgacaccatcttccagatattcaacaaccgcaactgcctcagtctaaaggacaaacccaaggtcatcattgtccaggcctgcagaggtgaaaaacatggggaactctgggtcagagactctccagcatccttggcactcatctcttcacagtcatctgagaacctggaggcagattctgtttgcaagatccacgaggagaaggacttcattgctttctgttcttcaacaccacataacgtgtcctggagagaccgcacaaggggctccatcttcattacggaactcatcacatgcttccagaaatattcttgctgctgccacctaatggaaatatttcggaaggtacagaaatcatttgaagttccacaggctaaagcccagatgcccaccatagaacgagcaaccttgacaagagatttctacctctttcctggcaattga

SEQ ID NO: 51889 - DNA, 879 bp, Artificial Sequence
  derived and/or modified sequence
atggccgccctgctgcagatcgaggccggcccccccgagagcgccgagagcaccaacatcctgaagctgtgccccagagaggagttcctgagactgtgcaagaagaaccacgacgagatctaccccatcaagaagagagaggacagaagaagactggccctgatcatctgcaacaccaagttcgaccacctgcccgccagaaacggcgcccactacgacatcgtgggcatgaagagactgctgcagggcctgggctacaccgtggtggacgagaagaacctgaccgccagagacatggagagcgtgctgagagccttcgccgccagacccgagcacaagagcagcgacagcaccttcctggtgctgatgagccacggcatcctggagggcatctgcggcaccgcccacaagaagaagaagcccgacgtgctgctgtacgacaccatcttccagatcttcaacaacagaaactgcctgagcctgaaggacaagcccaaggtgatcatcgtgcaggcctgcagaggcgagaagcacggcgagctgtgggtgagagacagccccgccagcctggccctgatcagcagccagagcagcgagaacctggaggccgacagcgtgtgcaagatccacgaggagaaggacttcatcgccttctgcagcagcaccccccacaacgtgagctggagagacagaaccagaggcagcatcttcatcaccgagctgatcacctgcttccagaagtacagctgctgctgccacctgatggagatcttcagaaaggtgcagaagagcttcgaggtgccccaggccaaggcccagatgcccaccatcgagagagccaccctgaccagagacttctacctgttccccggcaactag

SEQ ID NO: 51890 - protein, 133 aa, Artificial Sequence
  derived and/or modified sequence
MLKNNVAGQTSIQTLVPNTDQKSTSVKKDNHKKKTVKMLEYLGKDVLHGVFNYLAKHDVLTLKEEEKKKYYDTKIEDKALILVDSLRKNRVAHQMFTQTLLNMDQKITSVKHLSNKKERGPQTPGSHHMQYKV

SEQ ID NO: 51891 - protein, 447 aa, Artificial Sequence
  derived and/or modified sequence
MAAVPRVEGVFIFLIEDSGKKKRRKNFEAMFKGILQSGLDNFVINHMLKNNVAGQTSIQTLVPNTDQKSTSVKKDNHKKKTVKMLEYLGKDVLHGVFNYLAKHDVLTLKEEEKKKYYDTKIEDKALILVDSLRKNRVAHQMFTQTLLNMDQKITSVKPLLQIEAGPPESAESTNILKLCPREEFLRLCKKNHDEIYPIKKREDRRRLALIICNTKFDHLPARNGAHYDIVGMKRLLQGLGYTVVDEKNLTARDMESVLRAFAARPEHKSSDSTFLVLMSHGILEGICGTAHKKKKPDVLLYDTIFQIFNNRNCLSLKDKPKVIIVQACRGEKHGELWVRDSPASLALISSQSSENLEADSVCKIHEEKDFIAFCSSTPHNVSWRDRTRGSIFITELITCFQKYSCCCHLMEIFRKVQKSFEVPQAKAQMPTIERATLTRDFYLFPGN

SEQ ID NO: 51892 - DNA, 1344 bp, Artificial Sequence
  derived and/or modified sequence
atggcagcagtgccaagagtggaaggagtgttcattttcctgattgaagatagcggcaagaagaagaggagaaaaaattttgaagccatgttcaaggggattcttcagtctggcctggataatttcgtgattaatcacatgctcaaaaataacgtggccggccagacctctattcagacactcgtgccaaatacagaccagaagagtacaagcgtgaaaaaggataaccacaagaaaaaaacagtgaagatgctcgagtatctaggcaaggacgtgttacacggagtgttcaattacctcgcgaaacacgacgttctgacattaaaggaggaggagaaaaagaagtactacgatactaaaatagaagataaagctttgatcctggtggacagtttgcgcaaaaatcgggtggcacaccaaatgtttacacagacccttctgaatatggatcaaaagatcacttcggttaagcctctgctccagatcgaggccggaccacctgagtccgccgaatcaactaacattcttaagctctgccccagagaggaattcttaaggttgtgcaagaaaaaccacgatgagatatacccgatcaagaagcgagaggataggagacggctcgccctgatcatctgtaataccaaatttgaccaccttcccgcacggaacggcgcgcactacgatatcgtagggatgaagagactgcttcagggcttgggctacaccgtggtcgatgaaaagaatctgactgctagggacatggaatctgtgctgcgagccttcgctgcacgtcctgagcacaagtctagcgactcaacctttctggtgttaatgtcccacggtatcctcgagggaatctgtggaacagcccacaagaaaaaaaagccagatgtactgttgtacgacactatttttcagatcttcaataatcgcaattgtttaagtctcaaagacaaacctaaagtgatcatagtgcaggcctgtcgcggggaaaagcacggggagttgtgggtgcgcgattcgccagcgtctctggcactcattagttcacagtcctcggagaacctggaggccgatagcgtctgtaaaattcacgaagaaaaggatttcatcgccttctgttcttcgacaccacacaacgtgagctggcgggatcgaaccaggggatcgatcttcatcaccgagttaatcacatgctttcagaagtacagctgctgttgccacctgatggaaattttcaggaaagtgcagaaaagcttcgaagtgccgcaggcaaaagctcagatgcctacaattgagagagccaccctgaccagagacttctacctgtttcctggaaactag

SEQ ID NO: 51893 - DNA, 1344 bp, Artificial Sequence
  derived and/or modified sequence
atggcagcagttccccgggtggaaggggtctttatcttcctgattgaggactctggcaaaaagaaaaggaggaagaattttgaggcgatgttcaagggaatcctgcagagcggactggacaacttcgttattaatcatatgctaaaaaacaatgttgccggtcagacttctatccagactctagttccgaacaccgaccaaaagtcgactagcgtcaaaaaagacaaccataagaagaagaccgtgaagatgctggagtacttaggcaaagatgtactgcacggtgtgtttaattacctcgctaagcatgatgtgctaacccttaaggaggaggagaagaaaaagtattatgatacgaagatcgaagacaaggccctgattctggttgattccctgaggaaaaatcgcgtggcccatcagatgtttactcagactctcttaaatatggatcagaaaataacatcggttaagccacttttgcaaatcgaagccggacctcccgagagtgccgaaagtactaatattttaaagctgtgcccacgggaggagttcctgaggctgtgtaaaaagaatcacgacgaaatttacccaatcaagaaaagggaggaccggaggaggctagctctcattatttgcaataccaaatttgatcacctgccagcccgcaatggagctcattatgacattgtcgggatgaaacgcctgttgcagggactggggtatacagtcgttgacgaaaaaaatctaactgcacgggacatggaatctgtgttgagagcattcgctgcgaggcccgaacacaagtccagcgactcaactttccttgttttaatgtcacatggcatattggagggcatctgcggtactgcacataagaagaagaaaccagatgttctgctgtacgacacaatctttcaaatcttcaacaatagaaattgcttgtcgcttaaagataaacccaaggtgattattgtgcaggcttgtcgcggcgagaaacatggggagttatgggtgcgggactcccccgcatccctggctttgattagtagccagtccagtgaaaacctagaggccgatagtgtctgcaaaattcacgaagagaaagacttcattgcgttctgtagttcgactcctcataacgtatcttggagagatcgcactcggggctcaattttcatcactgagctaataacctgtttccaaaagtattcgtgctgctgtcacctgatggagattttcagaaaagtgcaaaagagtttcgaggtcccacaggccaaggctcaaatgcccaccatagagagagccaccctcactcgggacttttacctgttccctgggaattag

SEQ ID NO: 51894 - DNA, 1344 bp, Artificial Sequence
  derived and/or modified sequence
atggctgctgtgccccgggtggagggcgtcttcatcttcctgattgaggacagcggcaagaagaagaggaggaagaactttgaggccatgttcaagggcatcctgcagagcggcctggacaacttcgtcatcaaccacatgctgaagaacaacgtggccggccagaccagcatccagaccctggtgcccaacacagaccagaagagcacctctgtgaagaaggacaaccacaagaagaagacagtgaagatgctggagtacctgggcaaggatgtgctgcacggcgtcttcaactacctggccaagcatgatgtgctgaccctgaaggaggaggagaagaagaagtactatgacaccaagattgaggacaaggccctgatcctggtggacagcctgaggaagaacagagtggcccaccagatgttcacccagaccctgctgaacatggaccagaagatcacctctgtgaagcccctgctgcagatcgaggccggccccccagagagcgctgagagcaccaacatcctgaagctgtgcccccgggaggagttcctgcggctgtgcaagaagaaccatgatgagatctaccccatcaagaagcgggaggacagaagaaggctggccctgatcatctgcaacaccaagtttgaccacctgcctgccagaaatggagcccactatgacatcgtgggcatgaagaggctgctgcagggcctgggctacacagtggtggatgagaagaacctgacagcccgggacatggagagcgtgctgcgggcctttgctgcccggcctgagcacaagagcagtgacagcaccttcctggtgctgatgagccacggcatcctggagggcatctgtggcacagcccacaagaagaagaagccagatgtgctgctgtatgacaccatcttccagatcttcaacaacagaaactgcctgagcctgaaggacaagcccaaggtgatcatcgtgcaggcctgccgcggggagaagcatggagagctgtgggtgcgggacagccctgccagcctggccctgatcagcagccagagcagcgagaacctggaggccgacagcgtgtgcaagatccacgaggagaaggacttcatcgccttctgcagcagcaccccccacaacgtgtcctggagggacaggacccggggcagcatcttcatcacagagctgatcacctgcttccagaagtacagctgctgctgccacctgatggagatcttcaggaaggtgcagaagagctttgaggtgccccaggccaaggcccagatgcccaccatcgagcgggccaccctgacccgggacttctacctgtttcctggcaactag

SEQ ID NO: 51895 - DNA, 1344 bp, Artificial Sequence
  derived and/or modified sequence
atggccgccgtgccccgggtggagggcgtgttcatcttcctgatcgaagattctggtaaaaagaagcggaggaagaatttcgaggccatgtttaagggaatcctgcagtctgggctggacaacttcgtgattaaccacatgctgaaaaacaatgtggccgggcagacctctatacagacgctggtccctaacacagaccagaaatcgaccagtgttaaaaaagacaaccataaaaaaaaaaccgtcaaaatgctcgagtatttgggcaaggatgtccttcatggtgtattcaactatctcgccaagcatgacgttctcactctcaaagaagaagaaaaaaaaaagtattacgataccaagattgaggataaggcactgatattggttgactcactacgaaaaaatcgtgttgcccatcaaatgtttacacagacccttttgaacatggaccaaaagattaccagtgtgaaacctttactccagatagaagccgggccccccgagagtgctgaatcaaccaatattctgaaattatgtcctcgtgaggaatttctccggctgtgtaagaaaaaccatgacgaaatctaccccattaagaagcgggaggaccggagaaggctggcgcttatcatctgtaacaccaaattcgaccacctccctgcaagaaatggcgcccactatgatatcgtggggatgaaacgccttttacaggggttggggtacactgttgtggatgagaaaaaccttacggcccgcgacatggagagcgtccttagggcgtttgccgctcgacctgagcataagtccagtgactctaccttcctagtcctaatgtcccacgggatccttgaaggtatctgtggtaccgcccacaagaagaagaagcctgatgttctgctgtatgacacaatctttcaaatcttcaataatcgcaactgcctgagcttaaaggacaaaccgaaagtcattatcgtgcaggcctgtaggggagaaaagcacggcgagctctgggtgagggattccccagcttctctagccttgattagttcacagtccagcgagaatctcgaggctgattccgtctgcaagattcatgaagaaaaggacttcattgctttttgtagcagtaccccgcacaacgtgagctggcgggaccgtacaagagggagcatcttcataaccgagctcatcacctgctttcagaagtactcctgttgttgccacctgatggaaattttccgcaaagttcagaaatcttttgaggtacctcaagctaaagcacagatgccgactatcgaacgggccactttaacaagggatttctacctgttcccaggaaactag

SEQ ID NO: 51896 - DNA, 1344 bp, Artificial Sequence
  derived and/or modified sequence
atggccgccgtgccccgggtggagggcgtgttcatcttcctgatcgaagattccggaaaaaagaaacgacgcaagaatttcgaagccatgtttaagggtattctacagtcaggtctggacaattttgttattaatcacatgctgaaaaacaatgtcgctggccaaacatcaattcagaccctcgtccctaacacagatcaaaagtccacgtccgtgaagaaggacaaccataagaagaaaactgtgaagatgctggagtatctcggtaaagacgtgctgcacggcgtcttcaattatcttgctaagcatgatgttctgaccctgaaagaggaagaaaaaaaaaagtattacgatactaaaatcgaggataaagctctgatattagttgatagcctacggaagaaccgggtagcccatcagatgtttacgcaaaccctccttaacatggatcaaaaaataacatcagttaaacctctcctgcagattgaagccggaccaccagagagcgctgagtctacaaacattctgaagttatgtccaagagaggaattcctgaggctctgcaagaagaaccacgacgaaatctatcccattaagaagcgcgaagataggcggcgactggccctgattatctgtaataccaaatttgaccatttgcctgcgaggaacggagctcactatgacatcgtaggcatgaaaaggctgctacagggcctcggctacacagtcgtcgacgaaaagaacctgaccgcccgagatatggaaagcgtgctgagagcctttgccgcccggcctgaacataagtcaagcgactcgacctttttggtgctgatgagtcacgggatcctagaaggcatttgcgggactgctcacaaaaaaaagaaacccgatgtattgctgtacgacactatctttcaaatctttaacaacaggaattgcctgtctctgaaggataaaccgaaggtgattattgtgcaggcctgcaggggagagaaacacggcgaactgtgggttagagattcccccgcttcccttgctctgatttcctctcagtctagcgaaaatctggaagcagatagcgtgtgcaaaattcacgaagagaaagacttcatagccttctgttcgtccacccctcataatgtttcctggcgggatagaacacgaggatcaatctttatcaccgaactcattacttgctttcagaaatatagctgttgctgccacctcatggagattttccggaaagtgcaaaaatcctttgaggttccacaggctaaagcccagatgcccactatcgagagagcaaccctgactcgtgatttctaccttttcccaggtaactag

SEQ ID NO: 51897 - DNA, 1344 bp, Artificial Sequence
  derived and/or modified sequence
atggcagctgtgccgcgtgtggaaggtgtgttcatcttcctgatcgaggacagcggcaagaagaagcgcaggaaaaatttcgaagctatgttcaagggcattctccaatcaggattagacaacttcgtgatcaaccacatgttgaaaaataatgtggccggacagactagtattcagacgctagtccccaatactgaccagaaatctacctcggtgaaaaaagacaaccataagaagaagaccgttaagatgcttgagtatttgggcaaggatgtgctgcacggggtgttcaactacctggcgaaacatgacgttcttacgctaaaggaggaggaaaagaagaaatattacgacactaaaattgaagacaaagccctaattctcgtagactccctccgaaaaaaccgggttgcccatcagatgttcacacaaaccctcttaaatatggatcagaaaattacttcagtcaagcccctcctccagatcgaagcaggcccaccagagagtgctgaatcaaccaatattctaaaattatgcccacgggaggagtttcttcgactgtgtaagaaaaatcatgacgagatctatcctatcaagaaaagagaagatcgaaggcgtttagcgctgattatatgcaacaccaagttcgatcatctgcctgctcgtaatggtgcgcattatgatattgtggggatgaaacggcttctgcagggtcttggttataccgttgtggatgaaaaaaatcttaccgccagggatatggagagcgtgctgcgtgcgtttgcggcaaggcccgagcataagtcatctgatagcacttttttggttttaatgtcccacggcatacttgaagggatttgtggaaccgctcacaagaagaaaaagcccgatgtactgctgtatgatacaatattccagattttcaataaccgcaactgtcttagtctgaaagataaaccaaaggttatcatcgtgcaggcatgtcgcggtgagaaacacggcgaactgtgggttagggactcaccggctagtctggcattgatttccagccaatcgagtgagaatttggaagctgattccgtctgcaaaattcatgaagagaaggacttcatcgccttttgtagctctactccccacaacgtctcttggcgagatcgcaccagggggagcattttcatcaccgaactgatcacatgttttcagaagtactcatgctgttgccatctgatggaaattttccgtaaagtgcagaagtcctttgaggtgcctcaggcgaaggcccagatgcccactattgaacgggcaacactcacgcgtgacttctacctgtttccaggcaattag

SEQ ID NO: 51898 - DNA, 1344 bp, Artificial Sequence
  derived and/or modified sequence
atggccgctgtgccccgagtagagggcgtgtttatatttctgattgaagatagtggcaagaagaaaaggcgaaagaacttcgaggccatgtttaaaggaatactacagtccgggctcgacaacttcgttataaatcatatgcttaagaacaacgtcgccggacagacctctatccagaccttggtgccaaataccgatcaaaagtccacatctgtcaagaaggacaaccacaaaaagaagacggtcaagatgctggaatatctggggaaagatgtgcttcatggtgtgtttaactacctggccaaacacgatgttcttaccttgaaggaagaggaaaagaagaagtattatgatactaaaatcgaggacaaggcactgattttagtggatagcctgaggaaaaatcgcgtggcccaccagatgttcacccagacacttctcaatatggaccagaagatcaccagcgtgaaaccactcctccaaatcgaagcaggaccgcctgagtcagctgaaagtacaaacatactgaaactttgcccgagagaggaatttctgcgcctgtgtaaaaagaaccatgacgagatttatcctattaaaaagagagaggatagacgcagactcgccctaatcatctgtaacaccaaattcgatcacctgcccgctcgaaacggcgctcactatgatattgtgggaatgaagcgtctgctgcaggggctgggttacaccgtggtggacgaaaaaaatctaactgccagagatatggagtctgttctgcgggctttcgctgcgcgaccagagcataaaagttccgattctactttcctggtgctgatgagccatgggatcctggagggtatctgcgggaccgcacacaaaaaaaagaaacccgatgttcttttgtatgacaccatctttcagatctttaacaataggaactgcctatcccttaaggataagccgaaagtcatcatcgtgcaggcctgccggggtgagaaacacggagagctatgggtgagggacagccccgcttctttggctctgatctcatcccagtcatccgagaacttggaggcagactccgtgtgtaagattcatgaagaaaaggattttattgcgttctgttccagcacccctcacaacgttagttggagagaccgtacccgaggatccatttttattactgaactgattacctgtttccagaagtattcctgttgttgtcacctcatggaaatttttcgcaaggttcagaaatcctttgaggttccacaggccaaggctcagatgcccaccattgagagagctactttaaccagggatttttatctcttccctggtaattag

SEQ ID NO: 51899 - DNA, 1488 bp, Artificial Sequence
  derived and/or modified sequence
agtgctgtacaaagagacagaggctgttagctatggctgctgtgcccagagttgaaggagtctttatatttctgatagaagacagtggcaaaaaaaaaaggcgtaagaattttgaagctatgttcaaaggtatccttcagagtggattggataacttcgtgataaaccacatgctaaagaacaacgtggctggacaaacatctatccagaccctagtacctaatacggatcaaaagtcgaccagtgtaaaaaaagacaaccacaaaaaaaaaacagttaagatgttggaatacctgggcaaagatgttcttcatggtgtttttaattatttggcaaaacacgatgttctgacattgaaggaagaggaaaagaaaaaatattatgataccaaaattgaagacaaggccctgatcttggtagactctttgcgaaagaatcgcgtggctcatcaaatgtttacccaaacacttctcaatatggaccaaaagatcaccagtgtaaaacctcttctgcaaatcgaggctggaccacctgagtcagcagaatctacaaatatactcaaactttgtcctcgtgaagaattcctgagactgtgtaaaaaaaatcatgatgagatctatccaataaaaaagagagaggaccgcagacgcctggctctcatcatatgcaatacaaagtttgatcacctgcctgcaaggaatggggctcactatgacatcgtggggatgaaaaggctgcttcaaggcctgggctacactgtggttgacgaaaagaatctcacagccagggatatggagtcagtgctgagggcatttgctgccagaccagagcacaagtcctctgacagcacgttcttggtactcatgtctcatggcatcctagagggaatctgcggaactgcgcataaaaagaaaaaaccggatgtgctgctttatgacaccatcttccagatattcaacaaccgcaactgcctcagtctaaaggacaaacccaaggtcatcattgtccaggcctgcagaggtgaaaaacatggggaactctgggtcagagactctccagcatccttggcactcatctcttcacagtcatctgagaacctggaggcagattctgtttgcaagatccacgaggagaaggacttcattgctttctgttcttcaacaccacataacgtgtcctggagagaccgcacaaggggctccatcttcattacggaactcatcacatgcttccagaaatattcttgctgctgccacctaatggaaatatttcggaaggtacagaaatcatttgaagttccacaggctaaagcccagatgcccaccatagaacgagcaaccttgacaagagatttctacctctttcctggcaattgaaaatgaaaccacaggcagcccagccctcctctgtcaacatcaaagagcacatttaccagtatagcttgcatagtcaatatttggtatttcaataaaagtaaagactgtatct

SEQ ID NO: 51900 - DNA, 1344 bp, Artificial Sequence
  derived and/or modified sequence
atggctgctgtgcccagagttgaaggagtctttatatttctgatagaagacagtggcaaaaaaaaaaggcgtaagaattttgaagctatgttcaaaggtatccttcagagtggattggataacttcgtgataaaccacatgctaaagaacaacgtggctggacaaacatctatccagaccctagtacctaatacggatcaaaagtcgaccagtgtaaaaaaagacaaccacaaaaaaaaaacagttaagatgttggaatacctgggcaaagatgttcttcatggtgtttttaattatttggcaaaacacgatgttctgacattgaaggaagaggaaaagaaaaaatattatgataccaaaattgaagacaaggccctgatcttggtagactctttgcgaaagaatcgcgtggctcatcaaatgtttacccaaacacttctcaatatggaccaaaagatcaccagtgtaaaacctcttctgcaaatcgaggctggaccacctgagtcagcagaatctacaaatatactcaaactttgtcctcgtgaagaattcctgagactgtgtaaaaaaaatcatgatgagatctatccaataaaaaagagagaggaccgcagacgcctggctctcatcatatgcaatacaaagtttgatcacctgcctgcaaggaatggggctcactatgacatcgtggggatgaaaaggctgcttcaaggcctgggctacactgtggttgacgaaaagaatctcacagccagggatatggagtcagtgctgagggcatttgctgccagaccagagcacaagtcctctgacagcacgttcttggtactcatgtctcatggcatcctagagggaatctgcggaactgcgcataaaaagaaaaaaccggatgtgctgctttatgacaccatcttccagatattcaacaaccgcaactgcctcagtctaaaggacaaacccaaggtcatcattgtccaggcctgcagaggtgaaaaacatggggaactctgggtcagagactctccagcatccttggcactcatctcttcacagtcatctgagaacctggaggcagattctgtttgcaagatccacgaggagaaggacttcattgctttctgttcttcaacaccacataacgtgtcctggagagaccgcacaaggggctccatcttcattacggaactcatcacatgcttccagaaatattcttgctgctgccacctaatggaaatatttcggaaggtacagaaatcatttgaagttccacaggctaaagcccagatgcccaccatagaacgagcaaccttgacaagagatttctacctctttcctggcaattga

SEQ ID NO: 51901 - DNA, 1344 bp, Artificial Sequence
  derived and/or modified sequence
atggccgccgtgcccagagtggagggcgtgttcatcttcctgatcgaggacagcggcaagaagaagagaagaaagaacttcgaggccatgttcaagggcatcctgcagagcggcctggacaacttcgtgatcaaccacatgctgaagaacaacgtggccggccagaccagcatccagaccctggtgcccaacaccgaccagaagagcaccagcgtgaagaaggacaaccacaagaagaagaccgtgaagatgctggagtacctgggcaaggacgtgctgcacggcgtgttcaactacctggccaagcacgacgtgctgaccctgaaggaggaggagaagaagaagtactacgacaccaagatcgaggacaaggccctgatcctggtggacagcctgagaaagaacagagtggcccaccagatgttcacccagaccctgctgaacatggaccagaagatcaccagcgtgaagcccctgctgcagatcgaggccggcccccccgagagcgccgagagcaccaacatcctgaagctgtgccccagagaggagttcctgagactgtgcaagaagaaccacgacgagatctaccccatcaagaagagagaggacagaagaagactggccctgatcatctgcaacaccaagttcgaccacctgcccgccagaaacggcgcccactacgacatcgtgggcatgaagagactgctgcagggcctgggctacaccgtggtggacgagaagaacctgaccgccagagacatggagagcgtgctgagagccttcgccgccagacccgagcacaagagcagcgacagcaccttcctggtgctgatgagccacggcatcctggagggcatctgcggcaccgcccacaagaagaagaagcccgacgtgctgctgtacgacaccatcttccagatcttcaacaacagaaactgcctgagcctgaaggacaagcccaaggtgatcatcgtgcaggcctgcagaggcgagaagcacggcgagctgtgggtgagagacagccccgccagcctggccctgatcagcagccagagcagcgagaacctggaggccgacagcgtgtgcaagatccacgaggagaaggacttcatcgccttctgcagcagcaccccccacaacgtgagctggagagacagaaccagaggcagcatcttcatcaccgagctgatcacctgcttccagaagtacagctgctgctgccacctgatggagatcttcagaaaggtgcagaagagcttcgaggtgccccaggccaaggcccagatgcccaccatcgagagagccaccctgaccagagacttctacctgttccccggcaactag

SEQ ID NO: 51902 - protein, 671 aa, Artificial Sequence
  derived and/or modified sequence
MKQIFFLDDSGPPFGHMVLALGGYLGGFDGNFLWNRIGAEYSSNVPVWSLRLLPALAGALSVPMAYQIVLELHFSHCAAMGAALLMLIENALITQSRLMLLESVLIFFNLLAVLSYLKFFNCQKHSPFSLSWWFWLTLTGVACSCAVGIKYMGVFTYVLVLGVAAVHAWHLLGDQTLSNVCVFCHLLARAVALLVIPVVLYLLFFYVHLILVFRSGPHDQIMSSAFQASLEGGLARITQGQPLEVAFGSQVTLRNVFGKPVPCWLHSHQDTYPMIYENGRGSSHQQQVTCYPFKDVNNWWIVKDPRRHQLVVSSPPRPVRHGDMVQLVHGMTTRSLNTHDVAAPLSPHSQEVSCYIDYNISMPAQNLWRLEIVNRGSDTDVWKTILSEVRFVHVNTSAVLKLSGAHLPDWGYRQLEIVGEKLSRGYHGSTVWNVEEHRYGASQEQRERERELHSPAQVDVSRNLSFMARFSELQWRMLALRSDDSEHKYSSSPLEWVTLDTNIAYWLHPRTSAQIHLLGNIVIWVSGSLALAIYALLSLWYLLRRRRNVHDLPQDAWLRWVLAGALCAGGWAVNYLPFFLMEKTLFLYHYLPALTFQILLLPVVLQHISDHLCRSQLQRSIFSALVVAWYSSACHVSNTLRPLTYGDKSLSPHELKALRWKDSWDILIRKH

SEQ ID NO: 51903 - protein, 695 aa, Artificial Sequence
  derived and/or modified sequence
MWGFLKRPVVVTADINLSLVALTGMGLLSRLWRLTYPRAVVLFRRIRWQFFVEQNWSSVVAFPEYSSNVPVWSLRLLPALAGALSVPMAYQIVLELHFSHCAAMGAALLMLIENALITQSRLMLLESVLIFFNLLAVLSYLKFFNCQKHSPFSLSWWFWLTLTGVACSCAVGIKYMGVFTYVLVLGVAAVHAWHLLGDQTLSNVCVFCHLLARAVALLVIPVVLYLLFFYVHLILVFRSGPHDQIMSSAFQASLEGGLARITQGQPLEVAFGSQVTLRNVFGKPVPCWLHSHQDTYPMIYENGRGSSHQQQVTCYPFKDVNNWWIVKDPRRHQLVVSSPPRPVRHGDMVQLVHGMTTRSLNTHDVAAPLSPHSQEVSCYIDYNISMPAQNLWRLEIVNRGSDTDVWKTILSEVRFVHVNTSAVLKLSGAHLPDWGYRQLEIVGEKLSRGYHGSTVWNVEEHRYGASQEQRERERELHSPAQVDVSRNLSFMARFSELQWRMLALRSDDSEHKYSSSPLEWVTLDTNIAYWLHPRTSAQIHLLGNIVIWVSGSLALAIYALLSLWYLLRRRRNVHDLPQDAWLRWVLAGALCAGGWAVNYLPFFLMEKTLFLYHYLPALTFQILLLPVVLQHISDHLCRSQLQRSIFSALVVAWYSSACHVSNTLRPLTYGDKSLSPHELKALRWKDSWDILIRKH

SEQ ID NO: 51904 - protein, 725 aa, Artificial Sequence
  derived and/or modified sequence
MWGFLKRPVVVTADINLSLVALTGMGLLSRLWRLTYPRAVVFDEVYYGQYISFYMKQIFFLDDSGPPFGHMVLALGGYLGGFDGNFLWNRIGAEYSSNVPVWSLRLLPALAGALSVPMAYQIVLELHFSHCAAMGAALLMLIENALITQSRLMLLESVLIFFNLLAVLSYLKFFNCQKHSPFSLSWWFWLTLTGVACSCAVGIKYMGVFTYVLVLGVAAVHAWHLLGDQTLSNVCVFCHLLARAVALLVIPVVLYLLFFYVHLILVFRSGPHDQIMSSAFQASLEGGLARITQGQPLEVAFGSQVTLRNVFGKPVPCWLHSHQDTYPMIYENGRGSSHQQQVTCYPFKDVNNWWIVKDPRRHQLVVSSPPRPVRHGDMVQLVHGMTTRSLNTHDVAAPLSPHSQEVSCYIDYNISMPAQNLWRLEIVNRGSDTDVWKTILSEVRFVHVNTSAVLKLSGAHLPDWGYRQLEIVGEKLSRGYHGSTVWNVEEHRYGASQEQRERERELHSPAQVDVSRNLSFMARFSELQWRMLALRSDDSEHKYSSSPLEWVTLDTNIAYWLHPRTSAQIHLLGNIVIWVSGSLALAIYALLSLWYLLRRRRNVHDLPQDAWLRWVLAGALCAGGWAVNYLPFFLMEKTLFLYHYLPALTFQILLLPVVLQHISDHLCRSQLQRSIFSALVVAWYSSACHVSNTLRPLTYGDKSLSPHELKALRWKDSWDILIRKH

SEQ ID NO: 51905 - protein, 168 aa, Artificial Sequence
  derived and/or modified sequence
MAYQIVLELHFSHCAAMGAALLMLIENALITQSRLMLLESVLIFFNLLAVLSYLKFFNCQKHSPFSLSWWFWLTLTGVACSCAVGIKYMGVFTYVLVLGVAAVHAWHLLGDQTLSNVCVFCHLLARAVALLVIPVVLYLLFFYVHLILVFRSGPHDQIMSSAFQASLE

SEQ ID NO: 51906 - DNA, 2016 bp, Artificial Sequence
  derived and/or modified sequence
atgaaacaaattttctttctagatgatagcggcccccctttcggacacatggtcctggctctaggcggatatcttggtgggtttgatggtaattttctgtggaaccggatcggcgccgagtacagctcaaacgtgccagtgtggtccctgcggttgctccccgcactcgcaggtgcgctgtcggtccccatggcctatcagattgtgttagagctccacttctcacattgcgcagcgatgggcgcggctttactgatgctgatcgagaatgcactgatcactcaatctaggctgatgctgctcgaaagcgttctgatcttttttaaccttctggccgtgctgtcctacctgaaatttttcaactgtcaaaagcactcccctttctcactgagctggtggttctggctcaccctcactggtgtggcatgtagctgtgccgtcggcattaaatacatgggggtgttcacctatgtcttggtcctcggcgtggctgcagtccatgcctggcatcttttaggcgaccagacgctctccaacgtgtgtgtcttctgccacctgctagcacgcgccgtggcactgttggtgatccctgtggtgttgtacttactgttcttttacgtccacttgattctggtctttcgatcgggacctcacgatcagattatgagctctgcttttcaagcctccttagaaggcgggctggcacgaatcacccaaggccagcccctggaggtcgctttcggctcacaggttacactgcgcaacgtctttggaaaacccgttccatgctggctccattctcaccaggacacatatcctatgatatatgagaatggtcgcggttcttcccaccagcagcaggttacttgctacccatttaaggatgtgaacaattggtggattgtgaaggatccccgccgtcaccagctggtagttagctcccctccaaggccggtccgccacggagatatggtgcagctggtgcatggaatgacaacgagatcattaaacacacatgatgtggctgctcctctgtcaccccactcacaagaggtgtcatgttatatagattataacataagtatgcctgcgcaaaatctttggaggctggaaattgttaataggggaagtgacaccgatgtttggaagacgatcttgtcagaagtcaggttcgttcacgtcaacactagcgctgtgcttaaactctccggcgcccatctccccgattgggggtacagacagttggagattgtcggagaaaaacttagtcgcggctaccacgggtctacagtgtggaacgtggaagaacaccggtatggtgcatcccaggagcagagagaacgcgagagagaattacattctccagcccaggttgacgtcagccgcaatctatccttcatggcaagattctctgaattgcagtggcgtatgttagcattgagatctgatgactctgagcataagtacagcagctctccactggagtgggtaactcttgacaccaacatcgcatattggcttcatcctaggacaagtgctcagatccacttactcggtaacattgtgatttgggtgtccggatctctcgccctggctatctatgccctgctgagtctatggtacctgcttcgccgcaggcgcaatgtccacgacttgccccaggacgcctggcttagatgggttctggctggcgctctttgcgcaggggggtgggcagtcaactatctacccttttttctgatggagaagaccttgttcctctatcactacttacctgctctgacattccaaatcttgctcctgcctgtggttctccaacacatcagcgaccacttgtgtcgttcccagctgcagaggtccattttctccgccctcgtagtggcctggtactcctccgcctgccacgtctccaacaccctgcgacctctcacctatggggataaatccctgtcacctcacgagctgaaggctttgcgatggaaggacagttgggatatcctgatccggaaacattag

SEQ ID NO: 51907 - DNA, 2088 bp, Artificial Sequence
  derived and/or modified sequence
atgtggggtttcctgaaacgaccagtggtggtgactgccgatataaacttgtcgctggtggccctcactggcatggggttgctctccagactgtggagactgacgtacccccgagccgtggtgttgtttcgcaggatacggtggcagtttttcgtcgaacagaattggagttcagttgtcgcttttcctgaatacagttctaatgttccagtgtggtcactgcgccttctaccagccctggcaggagctctgagcgtgcctatggcttatcagatcgtgctcgaacttcattttagccactgcgcagcaatgggagccgccctgctgatgttgatcgagaatgcactgattacacagtctagattaatgttattagaaagcgttctgatttttttcaatttgctcgctgtgttgtcttatcttaagttttttaattgccagaaacactctccattctcccttagctggtggttctggctcacattaacgggcgtggcctgttcttgcgctgttgggattaagtacatgggagtttttacttacgtgctggtcctaggagtcgcagcagttcacgcgtggcacctgctcggcgaccagactctgtctaacgtttgtgtcttctgccacctcctcgcacgggccgtagcactgttggtcatcccagttgtgctctacctgctgttcttctacgtgcatttgattttggtcttccgcagcggaccccacgatcagatcatgtcatcagcttttcaggcctctttagagggcggtctggctcgtatcactcaggggcagcctctggaagtggccttcggatctcaggtgactttgcgaaatgtgtttggaaagccggtgccttgctggctacacagccaccaagacacctatccaatgatttacgaaaatggaaggggcagtagtcatcagcagcaggtgacctgctacccctttaaggacgttaataattggtggatagtgaaggatcccaggcgccaccagctcgtagtgtcgtccccaccccgcccggtgcgacatggagatatggtacaacttgtccacgggatgacaaccagaagcctgaatacccacgatgtagcagctcctctgagcccccactcacaggaagtctcttgctatattgactataatatctcaatgcctgctcagaatctctggcggctggaaatcgtcaatcgcggttccgataccgatgtctggaagaccattctgagtgaggtccgctttgtccacgttaatacctccgctgtcctgaaactgtccggtgcgcacctgcccgactgggggtacaggcagcttgagatcgtaggggagaagctgtcacggggatatcacggatccactgtgtggaacgtggaggagcatagatatggcgcctcccaggagcagcgagagagggagcgggaacttcatagccctgctcaagttgatgtgtctaggaacttatcatttatggccagattcagcgaactgcagtggcggatgttggcactccgcagtgacgatagcgaacacaagtacagcagctcccccctggaatgggtgaccctagataccaacattgcatattggctgcaccccaggacaagcgcccagattcacctgctgggcaacattgtgatttgggtgagcggctctctggctttagctatctacgccctgttgtcactgtggtacttgctccggcggaggcgtaacgtgcatgacctgccccaggatgcgtggttgcgttgggtgcttgcgggcgccctgtgtgcaggaggctgggccgtcaactacctcccgttctttctaatggagaaaacactctttctgtatcactacctgccagcacttactttccagatcctattgttaccggtcgtgctgcaacatatatccgaccatttgtgccggtcacaactgcagcggtcaattttctcagcattggtcgtcgcctggtacagttccgcatgtcacgtgagcaatacacttcgcccacttacttacggcgacaaatcattgtccccacatgagctgaaggcactccgatggaaagattcgtgggatattctcatccggaagcattag

SEQ ID NO: 51908 - DNA, 2178 bp, Artificial Sequence
  derived and/or modified sequence
atgtgggggttcctaaaaagacctgtcgttgtaacggctgacatcaatctgagtctagtcgctctgacaggaatgggactcctctcacgcctatggagacttacctatcctcgggctgttgtcttcgatgaggtttattacggacagtatatctcattctatatgaagcagattttttttttggatgatagtggtcctccatttggtcacatggtactggctctgggcggctatctgggcggattcgatgggaacttcctttggaaccgtatcggcgccgagtacagcagcaatgtgccagtgtggagcttgcgacttctccctgccttggctggagccctctctgtgccgatggcctatcaaatagtgttggagcttcacttttcacactgtgctgccatgggtgccgccttactgatgcttatcgagaatgcactcattacccagtctcggctgatgttgctagagagcgtgctcatctttttcaacctcttggctgtcctgagctacttgaagtttttcaactgtcagaagcactcccctttctctttgagctggtggttttggttgactttgacaggcgtcgcatgttcttgtgccgtgggcattaaatacatgggggttttcacatacgtcctggtgttgggcgtcgcggctgtccacgcatggcaccttctgggtgaccagaccctgtccaacgtttgtgttttctgccacctgctagcacgagccgtggctttgctggtgatcccagtcgtgctgtacctgctgttcttttacgtgcaccttatactcgtctttcgctctggcccgcatgaccaaatcatgagtagcgctttccaagcatctcttgagggggggctggcacggatcacccagggacagccacttgaagtggcctttggcagccaggtgactttgaggaatgtgtttggcaaacctgttccctgttggctgcactcccaccaggacacctacccgatgatttatgagaatgggcggggaagctcccaccaacaacaggtaacgtgttatcctttcaaggacgttaacaactggtggattgtgaaggatccgaggcggcaccaactcgtggtaagctcacctccacgtcccgtccgtcacggagacatggtgcagctggttcacgggatgactactaggagccttaacacccacgatgtggctgcacccctgtctcctcattcccaagaagttagttgctacatagattacaacatctccatgcccgcccaaaacctgtggcgccttgaaatcgtcaacagaggctccgataccgatgtgtggaagaccatattgtcagaagtgcggtttgtgcacgtcaacaccagcgccgtcctgaaactcagcggggcgcacctgcccgactgggggtaccgccaattggaaattgtaggcgagaagttgtctcggggctatcacggctccacagtgtggaacgtagaagagcacaggtatggtgcatctcaggagcagagagaaagagaacgcgaactgcattccccagcacaggttgacgtgtctcgaaatctgtccttcatggctagattctctgaactgcagtggcggatgcttgccttgcgtagtgatgactcagaacacaaatattctagcagtccactggaatgggtaacattggataccaatatagcttactggttgcaccctcgcacaagtgctcagattcacctgttggggaacatcgtcatctgggttagcggttctctggccttggcgatatacgccctcttatctttatggtacttgctgaggagaagacgcaatgttcacgaccttcctcaagacgcatggctgcggtgggtgttggctggcgccctgtgcgcaggaggttgggcagtgaactatcttccattctttttgatggaaaaaacgctctttctgtatcactatctccccgcactgacgttccagattttacttttgccagtggttcttcagcatatatccgaccacttatgcaggagtcaactgcagcgatctatatttagcgccttggtcgtggcctggtatagtagcgcctgtcacgttagcaacaccctccgccctttaacgtacggcgataaatcattaagcccgcatgaactcaaggccctgcggtggaaggatagctgggacatcctgattagaaagcattag

SEQ ID NO: 51909 - DNA, 2178 bp, Artificial Sequence
  derived and/or modified sequence
atgtggggttttctgaaaaggcccgtggtggtgactgcggatatcaatctttctctggtggctctcaccggaatgggactgctatcaagactttggagactgacatatccccgcgctgttgtgtttgatgaggtgtattatgggcagtatataagtttttacatgaagcagatcttcttcctcgacgactctggccctcctttcggacacatggttcttgcactcggtggctatctcggcggattcgatgggaactttctgtggaaccgaataggggccgaatactccagtaacgttccggtgtggtctttgcgactattgccagctctcgcaggggccttgagcgtccccatggcctatcagatcgtgctcgagctacacttttcccactgcgcagctatgggagcggcccttctgatgttgattgaaaacgctcttatcactcagagcaggctcatgctcttggagagcgtgttaattttcttcaatcttctcgctgtcctgtcctatctgaaattctttaactgccagaagcattccccattctcactgtcttggtggttttggctcaccctaacgggcgtggcttgcagctgtgcagtgggcatcaagtacatgggagtcttcacatatgtccttgtacttggcgtggctgctgtacatgcatggcacctgctaggcgaccagacgctatctaacgtgtgtgtgttctgtcatttactagccagggctgtggcactgctcgtcattccggtggtactgtatctgctgtttttctatgttcacctcattcttgttttccgaagcggtccccatgaccagatcatgagctcggcgtttcaggcttccctggagggaggtctcgctagaataacccaggggcagccgctggaagtggcattcggcagccaagtgaccctaagaaacgtctttgggaaaccggtgccatgttggcttcattcacatcaggacacctacccaatgatttacgaaaatggaagaggtagttcccaccagcagcaggtgacatgttatcccttcaaggatgtgaataactggtggatcgtaaaagaccctcggcggcatcagctggtcgtgtccagtcctccccgacccgtgcgccacggcgacatggtacagctggtacacggaatgaccacaaggtctcttaatacccacgatgtggccgcgcccctctctccgcactcacaggaggtttcatgctatattgactacaacatttctatgcccgcacagaacctttggcggctcgagattgtcaatagaggctcagacactgacgtatggaagactatcctttcggaggtcagatttgtacacgttaatacctccgcagttctcaagctgtccggagcacatttgcccgattggggctaccgacaattggaaatagtgggggagaaattaagccgggggtaccacggatccacagtatggaatgtcgaagaacacaggtatggagcgagtcaagagcaaagagaaagagagagggaactgcactccccagcgcaagtagatgttagcaggaatctgagttttatggcacgcttctccgagctccagtggcgtatgctagctctgcggagcgacgacagcgaacacaagtactccagcagtccacttgagtgggtcacgctggatacgaacatagcatactggctgcacccccggactagcgcccagatacacctgctcggtaatattgtgatctgggtgagtggaagtctcgccctggctatttacgctctactcagcctttggtacctactgcgcagaagaagaaatgtccacgatctaccacaagatgcttggttgcgatgggtcctggcaggtgctctgtgcgcaggcggatgggcagtcaactacctcccgtttttcctgatggagaaaacgctttttctgtatcactacttaccagccttaactttccagatcttgctgctacccgtggtcctccagcatatttctgaccacctgtgtaggagtcagcttcagcgctccatattctccgcgctcgtagtggcttggtattccagtgcatgtcatgtgtccaacaccctccgaccactcacttacggcgacaagtcactgtcaccgcacgagctgaaggctctgcgatggaaggacagctgggatattctaatccgcaaacattag

SEQ ID NO: 51910 - DNA, 2016 bp, Artificial Sequence
  derived and/or modified sequence
atgaagcagatcttcttcctggatgacagcggcccccccttcggccacatggtgctggccctgggcggctacctgggcggctttgatggcaacttcctgtggaacagaattggagctgagtacagcagcaatgtgcctgtgtggagcctgcggctgctgcctgccctggccggggccctgtctgtgcccatggcctaccagatcgtgctggagctgcacttcagccactgtgccgccatgggcgccgccctgctgatgctgattgaaaatgccctgatcacccagagccggctgatgctgctggagagcgtgctgatcttcttcaacctgctggccgtgctgagctacctgaagttcttcaactgccagaagcacagccccttcagcctgtcctggtggttctggctgaccctgactggagtggcctgcagctgtgctgtgggcatcaagtacatgggcgtcttcacctacgtgctggtgctgggcgtggccgctgtgcacgcctggcacctgctgggggaccagaccctgagcaatgtgtgtgtgttctgccacctgctggcccgggctgtggccctgctggtgattcctgtggtgctgtacctgctcttcttctacgtgcacctgatcctggtgttccgcagcggcccccatgaccagatcatgagcagcgccttccaggccagcctggagggcggcctggcccgcatcacccagggccagcccctggaggtggccttcggcagccaggtgaccctgagaaatgtgtttgggaagcctgtgccctgctggctgcacagccaccaggacacctaccccatgatctatgaaaatggccggggcagcagccaccagcagcaggtgacctgctaccccttcaaggatgtgaacaactggtggatcgtgaaggacccccggcggcaccagctggtggtgagcagcccccccaggcctgtgagacatggagacatggtgcagctggtgcacggcatgaccaccaggagcctgaacacccatgatgtggccgcccccctgagcccccacagccaggaggtgtcctgctacatcgactacaacatctccatgcctgcccagaacctgtggaggctggagatcgtgaacagaggaagtgacacagatgtgtggaagaccatcctgtctgaggtgcgctttgtgcacgtgaacaccagcgctgtgctgaagctgagcggggcccacctgcctgactggggctaccggcagctggagatcgtgggggagaagctgagccggggctaccacggcagcacagtgtggaatgtggaggagcacagatatggagccagccaggagcagcgggagcgggagcgggagctgcacagccctgcccaggtggatgtgtccaggaacctgtccttcatggcccgcttcagcgagctgcagtggaggatgctggccctgcggagtgatgattctgagcacaagtacagcagcagccccctggagtgggtgaccctggacaccaacatcgcctactggctgcaccccaggaccagcgcccagatccacctgctgggcaacatcgtcatctgggtgtctggcagcctggccctggccatctatgccctgctgagcctgtggtacctgctgcggaggagaagaaatgtgcatgacctgccccaggatgcctggctgcgctgggtgctggccggggccctgtgtgccggcggctgggccgtgaactacctgcccttcttcctgatggagaagaccctcttcctgtaccactacctgcctgccctgaccttccagatcctgctgctgcctgtggtgctgcagcacatcagtgaccacctgtgccgcagccagctgcagaggagcatcttcagcgccctggtggtggcctggtacagcagcgcctgccacgtgagcaacaccctgcggcccctgacctatggagacaagagcctgagcccccatgagctgaaggccctgcgctggaaggacagctgggacatcctgatcaggaagcactag

SEQ ID NO: 51911 - DNA, 2088 bp, Artificial Sequence
  derived and/or modified sequence
atgtggggcttcctgaagaggcctgtggtggtgacagctgacatcaacctgagcctggtggccctgaccggcatgggcctgctgagccggctgtggaggctgacctaccccagggctgtggtgctcttccgccgcatccgctggcagttctttgtggagcagaactggagctctgtggtggccttccctgagtacagcagcaatgtgcctgtgtggagcctgcggctgctgcctgccctggccggggccctgtctgtgcccatggcctaccagatcgtgctggagctgcacttcagccactgtgccgccatgggcgccgccctgctgatgctgattgaaaatgccctgatcacccagagccggctgatgctgctggagagcgtgctgatcttcttcaacctgctggccgtgctgagctacctgaagttcttcaactgccagaagcacagccccttcagcctgtcctggtggttctggctgaccctgactggagtggcctgcagctgtgctgtgggcatcaagtacatgggcgtcttcacctacgtgctggtgctgggcgtggccgctgtgcacgcctggcacctgctgggggaccagaccctgagcaatgtgtgtgtgttctgccacctgctggcccgggctgtggccctgctggtgattcctgtggtgctgtacctgctcttcttctacgtgcacctgatcctggtgttccgcagcggcccccatgaccagatcatgagcagcgccttccaggccagcctggagggcggcctggcccgcatcacccagggccagcccctggaggtggccttcggcagccaggtgaccctgagaaatgtgtttgggaagcctgtgccctgctggctgcacagccaccaggacacctaccccatgatctatgaaaatggccggggcagcagccaccagcagcaggtgacctgctaccccttcaaggatgtgaacaactggtggatcgtgaaggacccccggcggcaccagctggtggtgagcagcccccccaggcctgtgagacatggagacatggtgcagctggtgcacggcatgaccaccaggagcctgaacacccatgatgtggccgcccccctgagcccccacagccaggaggtgtcctgctacatcgactacaacatctccatgcctgcccagaacctgtggaggctggagatcgtgaacagaggaagtgacacagatgtgtggaagaccatcctgtctgaggtgcgctttgtgcacgtgaacaccagcgctgtgctgaagctgagcggggcccacctgcctgactggggctaccggcagctggagatcgtgggggagaagctgagccggggctaccacggcagcacagtgtggaatgtggaggagcacagatatggagccagccaggagcagcgggagcgggagcgggagctgcacagccctgcccaggtggatgtgtccaggaacctgtccttcatggcccgcttcagcgagctgcagtggaggatgctggccctgcggagtgatgattctgagcacaagtacagcagcagccccctggagtgggtgaccctggacaccaacatcgcctactggctgcaccccaggaccagcgcccagatccacctgctgggcaacatcgtcatctgggtgtctggcagcctggccctggccatctatgccctgctgagcctgtggtacctgctgcggaggagaagaaatgtgcatgacctgccccaggatgcctggctgcgctgggtgctggccggggccctgtgtgccggcggctgggccgtgaactacctgcccttcttcctgatggagaagaccctcttcctgtaccactacctgcctgccctgaccttccagatcctgctgctgcctgtggtgctgcagcacatcagtgaccacctgtgccgcagccagctgcagaggagcatcttcagcgccctggtggtggcctggtacagcagcgcctgccacgtgagcaacaccctgcggcccctgacctatggagacaagagcctgagcccccatgagctgaaggccctgcgctggaaggacagctgggacatcctgatcaggaagcactag

SEQ ID NO: 51912 - DNA, 2178 bp, Artificial Sequence
  derived and/or modified sequence
atgtggggcttcctgaagaggcctgtggtggtgacagctgacatcaacctgagcctggtggccctgaccggcatgggcctgctgagccggctgtggaggctgacctaccccagggctgtggtgtttgatgaggtgtactacggccagtacatctccttctacatgaagcagatcttcttcctggatgacagcggcccccccttcggccacatggtgctggccctgggcggctacctgggcggctttgatggcaacttcctgtggaacagaattggagctgagtacagcagcaatgtgcctgtgtggagcctgcggctgctgcctgccctggccggggccctgtctgtgcccatggcctaccagatcgtgctggagctgcacttcagccactgtgccgccatgggcgccgccctgctgatgctgattgaaaatgccctgatcacccagagccggctgatgctgctggagagcgtgctgatcttcttcaacctgctggccgtgctgagctacctgaagttcttcaactgccagaagcacagccccttcagcctgtcctggtggttctggctgaccctgactggagtggcctgcagctgtgctgtgggcatcaagtacatgggcgtcttcacctacgtgctggtgctgggcgtggccgctgtgcacgcctggcacctgctgggggaccagaccctgagcaatgtgtgtgtgttctgccacctgctggcccgggctgtggccctgctggtgattcctgtggtgctgtacctgctcttcttctacgtgcacctgatcctggtgttccgcagcggcccccatgaccagatcatgagcagcgccttccaggccagcctggagggcggcctggcccgcatcacccagggccagcccctggaggtggccttcggcagccaggtgaccctgagaaatgtgtttgggaagcctgtgccctgctggctgcacagccaccaggacacctaccccatgatctatgaaaatggccggggcagcagccaccagcagcaggtgacctgctaccccttcaaggatgtgaacaactggtggatcgtgaaggacccccggcggcaccagctggtggtgagcagcccccccaggcctgtgagacatggagacatggtgcagctggtgcacggcatgaccaccaggagcctgaacacccatgatgtggccgcccccctgagcccccacagccaggaggtgtcctgctacatcgactacaacatctccatgcctgcccagaacctgtggaggctggagatcgtgaacagaggaagtgacacagatgtgtggaagaccatcctgtctgaggtgcgctttgtgcacgtgaacaccagcgctgtgctgaagctgagcggggcccacctgcctgactggggctaccggcagctggagatcgtgggggagaagctgagccggggctaccacggcagcacagtgtggaatgtggaggagcacagatatggagccagccaggagcagcgggagcgggagcgggagctgcacagccctgcccaggtggatgtgtccaggaacctgtccttcatggcccgcttcagcgagctgcagtggaggatgctggccctgcggagtgatgattctgagcacaagtacagcagcagccccctggagtgggtgaccctggacaccaacatcgcctactggctgcaccccaggaccagcgcccagatccacctgctgggcaacatcgtcatctgggtgtctggcagcctggccctggccatctatgccctgctgagcctgtggtacctgctgcggaggagaagaaatgtgcatgacctgccccaggatgcctggctgcgctgggtgctggccggggccctgtgtgccggcggctgggccgtgaactacctgcccttcttcctgatggagaagaccctcttcctgtaccactacctgcctgccctgaccttccagatcctgctgctgcctgtggtgctgcagcacatcagtgaccacctgtgccgcagccagctgcagaggagcatcttcagcgccctggtggtggcctggtacagcagcgcctgccacgtgagcaacaccctgcggcccctgacctatggagacaagagcctgagcccccatgagctgaaggccctgcgctggaaggacagctgggacatcctgatcaggaagcactag

SEQ ID NO: 51913 - DNA, 2016 bp, Artificial Sequence
  derived and/or modified sequence
atgaagcagatcttcttcctggacgacagcggcccccccttcggccatatggtcctggccttgggcggatatttgggcggcttcgatggtaatttcctttggaatagaatcggggccgaatattcctctaatgttcccgtgtggtccttaagactccttccagccctggcaggagcgctgagcgtgcccatggcctaccagatcgtgttggagctacatttcagtcattgcgctgcaatgggcgcggccttgttgatgttgattgagaatgccctcatcactcagtcccgactcatgcttcttgaatcagtgctgatctttttcaatctcctggccgtgctgagctacctcaaattctttaattgccagaagcacagtccattttctttaagctggtggttttggctaactcttactggtgttgcttgttcgtgtgctgttgggatcaagtacatgggcgtattcacctatgtgctggtcctcggagtggcagcagtacacgcttggcatttgctgggagatcagaccctgagcaatgtctgtgtgttttgccacctgctggcgcgagctgtcgccctactggtgatccctgtagtcttgtacctcctgttcttctatgtacacttgattctcgtttttagaagcggaccgcacgaccaaatcatgagttccgctttccaggcctccctggagggcggacttgccaggattacgcagggccagccgctggaagtggcatttggatctcaggtaactctgcggaacgtttttggtaagcctgtaccctgttggcttcattctcatcaggacacataccctatgatctatgaaaatggcaggggctctagccaccagcagcaagtgacttgctaccccttcaaggacgtgaacaattggtggatagtgaaagacccccggcgacaccagctggtggtctcttcccctcctaggcctgtgaggcatggcgacatggtgcagctggtccacgggatgaccacgagatcgcttaacacccatgatgtggcggccccgttatctccacattcacaagaagtgagctgctatatcgactacaacatttcaatgcccgctcagaacctatggcgcctggagatcgtaaataggggatccgacaccgatgtctggaaaaccatcctttccgaggttcgctttgtccacgttaacacttctgccgtcctgaagctgagcggcgcacatctccctgattggggctatcggcaacttgaaattgtgggcgagaaattatctagaggataccacggttctaccgtgtggaatgtggaagagcatcgatatggggctagccaggagcagcgggaacgggagcgggagttgcattcgcctgctcaagttgatgtttcacgcaacctgtctttcatggccagatttagcgaattgcagtggcgaatgctagcactgcgtagcgacgactccgagcacaagtactcaagttcccctctggaatgggttaccctggataccaatattgcatactggctccacccacgcacttcagcccagatccacttactcgggaatattgtcatttgggtttccggatcactcgccctggccatctacgctttgctgtccttatggtatctgctcagaaggaggaggaatgtccacgacctgccccaagacgcttggctgaggtgggttttggctggtgctctctgtgccgggggatgggccgtgaattacctgccgttttttctcatggaaaaaaccctttttctttatcactatctcccagcgctcacattccaaattctactcctgccagttgttctacagcatatatcggatcatttgtgcagatcgcagttgcagaggtctattttctctgcactggtggtggcctggtacagcagtgcctgtcacgtgagcaacacgttgcgaccactgacctatggtgataaatccctttcaccacacgagttaaaggcgctgaggtggaaggatagttgggacatcctgatccgaaagcattag

SEQ ID NO: 51914 - DNA, 2088 bp, Artificial Sequence
  derived and/or modified sequence
atgtggggcttcctgaagcggcccgtggtggtgaccgccgacatcaatttgagcctggtggccctgactggtatgggcctgctctctcgtctgtggaggcttacctacccacgtgctgtcgtcttatttcggcgcatacgctggcagttcttcgtcgagcagaactggtcaagcgtcgtggcctttcccgaatactcatccaatgtgccagtgtggtcactccggcttctgcctgcactggcaggagctctgagtgtgcccatggcttatcagattgttctggaacttcacttctcccattgtgctgccatgggggctgctcttctcatgctgattgaaaatgctctcatcacacagtcgcggctgatgttgctcgagtccgtgcttattttcttcaacctcctggccgtgctgtcttaccttaagttttttaactgtcagaagcatagtccatttagtctatcttggtggttttggttaaccctgactggggttgcttgttcttgcgctgtcggcattaagtatatgggagtgttcacatacgtactcgtgctgggagtcgcagcagtccacgcatggcatctgctgggagatcagaccctgtccaacgtatgcgtcttctgccacctgctcgctagggctgttgcactactcgtcattccagtggtgctgtatttgctttttttctacgtgcacctgattctggtgttccggtctggccctcacgatcaaatcatgagctcggctttccaggcctccttggaaggggggctcgctagaatcacccagggccagcccttagaagtggccttcggcagccaggttaccctcagaaacgtgttcggaaagcctgtcccatgctggctgcattcccaccaggatacttacccaatgatctatgagaacggtcgaggcagtagtcaccagcagcaggttacatgctatcctttcaaagatgtgaataattggtggatagttaaagatccaagaaggcaccagctcgttgttagttcccctcctcgcccagttcgtcacggggacatggtccagctggtccacggtatgacaacccgttcgctaaacacgcacgacgtagcggctcctttgtctccacattcccaggaagtaagctgctacatcgactataatatctctatgccagcccagaacctgtggcggctggaaatcgtgaaccgtggctccgacacggatgtttggaaaaccatcctcagcgaagtgcgcttcgtccacgtgaatacctcggccgttcttaagttaagtggagcccaccttcccgactggggatacaggcagcttgagatagtcggggagaagctgtctaggggttaccatggttccacagtgtggaacgtcgaggaacatcgttatggagcctcacaagagcagagagaacgcgaacgggagctccatagtcctgctcaggttgatgtgagcaggaatctgagctttatggcccgattctctgaactccagtggcgcatgctcgctctacgctctgacgactcagagcataaatactcctctagcccgcttgagtgggtaactcttgatactaatatcgcatattggctgcatccgcgcacctcagcccagattcacctattgggcaatattgtcatatgggtgagcggaagtctcgcacttgccatctacgcccttctctctctctggtacctcctgcggcggaggcggaatgtccacgacctcccacaagatgcttggctccggtgggtattagctggcgcactgtgcgccggaggatgggcggtgaactacttgcccttcttcttaatggaaaaaactctcttcctttaccactatctacctgctctgaccttccagatccttctgttaccagttgtcctccagcatatttccgaccacctgtgccgcagccagcttcaacgatctatctttagtgccttggttgtagcgtggtactctagcgcctgccatgtttcaaataccctgaggcccttgacctatggtgataaaagtcttagtccccacgaattgaaggctttgcggtggaaagacagttgggacatcctgatacgaaaacattag

SEQ ID NO: 51915 - DNA, 2178 bp, Artificial Sequence
  derived and/or modified sequence
atgtggggcttcctgaagcggcccgtggtggtgaccgccgacatcaatctgtctctggtcgctctgacaggtatgggcctgctgagcaggctgtggaggttgacttacccgcgcgctgttgtatttgacgaggtgtactacgggcagtacatatcgttttacatgaagcagatctttttccttgacgattccggccctccatttgggcatatggtgctcgcccttggtggctacctgggaggctttgatggtaattttttatggaatcgtatcggcgcagaatattcaagtaatgttccggtttggtctctgagactgttaccggcactggcgggggccctatctgtcccaatggcctaccagatcgtcctcgaattacacttctcgcattgcgcggccatgggagccgctctccttatgctgatcgaaaatgcattaattacacagtctcggttgatgcttctggaatcggtgttgattttttttaatcttctagctgtcttaagctatctgaaattttttaattgtcagaagcatagccctttttctctgtcttggtggttctggctcacattgacaggtgtagcctgttcttgcgccgtagggatcaagtacatgggcgttttcacttacgtgctggttctgggagtggctgcagtgcatgcttggcatttactgggcgaccagacgctgagcaatgtgtgcgttttctgtcatctgctcgcacgggcggttgccctgctggtgatccctgtggtcctctatctgctgttcttttacgtccatctgatcttagtgtttcgcagtggtcctcacgaccagattatgagctccgccttccaagcatctctggagggcgggcttgcccgcattactcaaggccaacccctggaggttgcatttggatcccaggtgacactccgcaatgttttcggaaagccagtcccatgctggctacactcccatcaggacacttacccgatgatttacgaaaatggccgcgggtcgtctcaccagcagcaggtgacgtgctatccttttaaggatgtgaacaactggtggatcgtgaaagatcctagacgccatcagctggttgtgtcctctccacctcgtcctgtcaggcacggtgatatggtccaactcgttcatggcatgactacccgtagtctgaacacccatgatgttgccgcccccctgagtccgcactcccaggaagtgtcatgttatatcgattacaacatttcaatgcctgctcaaaatctgtggcgattagaaatcgtgaatagggggagtgacacagacgtgtggaaaactatcctgagcgaagtgcggttcgttcacgttaacacatctgcagtgctgaagttgagcggcgctcacctccctgactggggatatagacagttagagattgttggagagaagttgagtagagggtaccatggatccacagtgtggaatgtggaggagcatcgctatggggcgtcccaggaacagagagagagagaaagggaactacactcaccggcacaggtggatgtttcccggaatctatcctttatggcgcgatttagtgaacttcaatggcgaatgctggccctcagaagtgatgattccgagcataaatatagctctagtcccctggagtgggtgacactggatactaatattgcttactggctgcatccccggacatctgcgcagattcatctcttgggaaatatcgtcatttgggtgagcggctcactggccctcgccatttatgcactgctctcactctggtatctgttacgacgccggaggaacgtgcacgatttgccacaggacgcctggttgcgatgggtgcttgctggagcgctctgcgccggtggctgggcagtcaactatctgcccttcttccttatggaaaagacgttattcctgtatcattacctccccgcacttaccttccagatactcctgcttccagtggtgcttcaacatatcagcgaccatctctgtaggtcccagctgcagcggtcaatattctccgcactcgtggtggcctggtactcaagcgcctgtcatgtgtctaacacactgcgtccactaacgtatggcgataaatccctaagccctcatgaattaaaagcgcttagatggaaagatagttgggatatactgatacgtaagcactag

SEQ ID NO: 51916 - DNA, 2178 bp, Artificial Sequence
  derived and/or modified sequence
atgtggggcttcctgaagcggcccgtggtggtgaccgccgacatcaatctatccctggtggcacttacaggtatgggccttctgtctaggctgtggcgactcacatatccccgggccgtggtgttcgacgaagtctattacggacaatacatctcattctatatgaaacagattttttttctcgacgactctggacccccattcggacatatggtcctcgccctaggggggtatttgggggggtttgacggaaacttcctgtggaacagaattggtgctgaatacagcagcaacgtgccagtctggagcctcagattgcttccagccctggccggggctctgtctgtgccgatggcctaccagatcgtgctggaactgcatttcagccactgcgctgcaatgggcgcggcccttctcatgcttatcgagaacgctctgattactcagtcccgtctcatgctgctggaaagcgtgttgatcttcttcaatctgctggccgtgctgtcatacttgaaattcttcaattgtcagaagcattctcccttctccctgtcatggtggttttggttgacgctgacaggggtagcatgcagttgcgcagtcggcatcaaatacatgggtgtctttacctacgtgcttgtgctgggggtcgccgctgtccatgcgtggcatctgcttggcgaccagactctcagcaacgtgtgcgtattttgtcatctgctggcaagagccgtcgcactgttagtgatcccagtggttctgtatctgctgtttttttatgtgcaccttatactggtctttcggtcgggcccccatgatcagatcatgtcctccgcatttcaggcatccctagaaggcggacttgcaaggattactcaaggacagccgcttgaagttgcattcggatctcaggttacccttcggaatgtcttcggtaagcccgtaccttgctggctacacagccaccaggatacataccccatgatatacgagaatggccggggcagcagccaccaacaacaggtgacatgctatcctttcaaggacgttaacaattggtggattgtcaaagaccccaggaggcatcaattggttgtatcttctcccccccgacctgtcagacacggagatatggtgcagctggtgcatggcatgaccacacgctccctcaatacccacgacgttgctgcccccctgtctccccattcacaggaggtttcgtgctacatcgactacaatatctctatgcctgcacagaacctgtggcggcttgagatcgtaaaccgaggaagcgatacggatgtgtggaagacaattctaagcgaggtgaggtttgtccacgttaataccagcgccgtgcttaagctaagcggagcacacctgcctgactggggctacagacagctcgaaatcgtgggagagaaactctctaggggctatcatggcagcactgtgtggaatgtggaagaacatcggtacggtgcttctcaggaacagagggagagagagcgggaactacattcaccggctcaggtggatgtctcgcgaaatctgtctttcatggcgcgcttcagcgagttgcagtggcggatgctagccctgcggtccgacgacagcgaacataaatactctagttctcctttagagtgggtaaccctggacaccaatattgcatattggctgcatccacgcaccagcgcacaaatccatcttctcggaaacatagtgatatgggtgtccggtagtttagccctggcaatctatgcattgctgagcctgtggtacttgttaagaagacgcaggaacgttcacgacctgccccaggacgcttggctccgatgggtgctggctggcgctctctgtgccggaggctgggctgtcaattacctcccgttcttcctaatggagaagacccttttcctttatcattacttaccagcccttacgtttcaaattctactgctgcccgtggtgttgcagcacatctccgaccatctgtgcagaagtcagctccagaggtcaatattttccgcgctggtcgttgcctggtactcctcggcatgccacgtttccaacacactccgtcccctgacctacggagataaatctttatcgcctcacgagctaaaggccctcaggtggaaggactcgtgggatattctcatcaggaagcattag

SEQ ID NO: 51917 - DNA, 2016 bp, Artificial Sequence
  derived and/or modified sequence
atgaaacagattttcttcctcgatgacagcgggccaccatttggtcacatggtcctggcattgggaggctaccttggaggattcgatgggaatttcttgtggaatcgcatcggggcagagtacagcagcaatgtacctgtctggtctctgcgccttctgcccgctctagcgggtgccctgtccgtccccatggcctatcaaatcgtcctggagctgcacttcagtcactgcgctgcaatgggggcagcccttctgatgcttatcgaaaacgcactaatcactcagagccggctgatgctgctggaatctgttttgatattctttaatctgcttgctgtgctaagctacctcaagtttttcaattgtcaaaaacactcacccttttcgcttagctggtggttttggctgaccctaaccggtgtcgcctgtagttgcgcggtgggaatcaagtatatgggcgtctttacctacgtattggtgctgggcgttgcggctgtgcacgcatggcacctgttaggggatcagaccttaagcaatgtttgcgtcttttgtcacctccttgcgcgtgcagtggcactgctggtcatccccgtggttctgtacctcctgtttttttacgtgcatctcattctcgtgttccggtccggcccacacgatcagattatgtcaagcgctttccaggcgtcactggagggcggactggcaaggattacccaaggccagccactggaagtggccttcggcagccaagttacactcaggaacgtgtttggcaaacccgtgccttgctggctccacagtcaccaggacacatatcccatgatctatgaaaatggcagaggcagttcgcatcagcagcaggtgacatgctatccatttaaggatgtcaacaactggtggatcgtaaaagatccacggcgacatcaactggtcgtaagctcccctccgaggccagtgcggcacggcgacatggtccagctcgtccatggaatgactacccgctccctcaacacacacgatgtggcggcaccgctgtcgccccactcccaagaggtgagctgttacatagattacaatatctcaatgcccgctcaaaatttatggagattagaaatcgttaacagaggctcagatacggacgtgtggaagaccattttgtctgaggtgagattcgttcacgtgaatacatccgccgtcctcaagctgtctggtgctcacctaccagattggggctaccgacagctcgagatcgtgggcgagaagctgtctaggggctatcatggatcgaccgtctggaatgtcgaggagcatcgatatggggcatctcaggagcagcgcgaaagggagcgggagctgcacagcccggcacaggtcgatgtgtcacgcaatctgagcttcatggctagattctctgaacttcaatggcggatgttagccctgaggtcggacgatagcgagcacaagtactcttcctctcccctggagtgggtcacgctggataccaatatcgcctactggctgcacccacggacaagtgcgcaaatacatctcctgggcaatatcgtgatttgggtgagcgggtccctggccttggccatctacgctcttctgtccctgtggtatctgctgagaagacgccgtaacgtgcatgacctcccgcaggatgcgtggctgagatgggtattggccggtgctctgtgcgcaggcggatgggctgtgaattatttgcccttctttctgatggaaaaaacactgttcctgtatcactatctgcctgcgctgacttttcagatcctcttactgcccgtggtgctccagcatatatcagaccacttgtgtagaagccagcttcaacggtcaattttttcagctctagtggttgcgtggtactctagtgcctgtcatgttagcaacactctgaggcctctgacgtatggggataagagtctgagcccacacgagctcaaagccttgaggtggaaagactcctgggacatcctgatcagaaagcactag

SEQ ID NO: 51918 - DNA, 2088 bp, Artificial Sequence
  derived and/or modified sequence
atgtggggcttcctcaagcggccagttgtcgtgacagcggacatcaatctgtctctcgtggcactgacaggcatgggcttgctgtctcgactgtggagactgacctatcccagggcggtggtgctatttcgacggatacgatggcaattcttcgtagagcagaactggagcagcgtcgtcgctttccccgagtatagcagcaacgtgcctgtgtggagcctgcgcctgctccctgccctcgccggtgctctctcagtgccgatggcgtatcagatagtccttgagctgcatttttcccattgtgcagccatgggagccgcactgctgatgttaattgagaatgccctgattacccagtcacgccttatgctcctagagtccgtgctgattttcttcaatctcctggcagtgttgtcctatctcaagtttttcaactgtcagaagcattccccgtttagcctatcctggtggttctggctgacactgacgggagtcgcatgcagctgtgctgtgggaattaagtacatgggcgtgtttacgtatgtcctggtgcttggagtcgccgcagtacatgcatggcacctcctcggagaccaaaccctcagcaacgtctgtgttttttgtcacctgcttgcacgagccgtcgcactcctggtgattcccgtggtactctatctgctattcttctatgtgcacttaatattggtcttcagatcgggccctcatgaccagatcatgtcgagcgcttttcaggcctctctggaaggtgggctggccaggattacacaaggacagcccctggaagtagcttttggctcccaggtgaccttaagaaacgtgttcggtaaacccgtgccatgttggttgcacagccaccaagacacatatccgatgatttacgaaaacgggagaggctcttcacaccaacagcaggtgacatgctaccctttcaaggatgtaaataattggtggattgtgaaggaccccaggaggcaccaactggtcgtgagctctccaccccgacccgtccgacacggagacatggtacagctggttcacgggatgaccacccgtagcctcaacacccatgatgtcgccgctcccctgtccccccattcgcaggaagtgtcctgctatattgattataatatctcgatgccggcacagaacctttggaggctggagatcgtgaatcggggatccgatacagacgtctggaagacaattctcagcgaggtccggtttgtgcatgtcaacacttcagcagtacttaagctgtcaggggctcacctgccagactggggctaccggcagctggaaattgtgggtgagaaactgtccagagggtaccacggctccactgtctggaacgtggaagagcatcgctatggcgcttctcaggaacagagggaacgagaacgtgagctgcatagccctgcacaggtcgacgtaagcagaaacctttcttttatggccaggttctccgaattacagtggaggatgctcgccctcagatccgacgatagcgagcataagtacagttcaagcccgctggagtgggttaccctagacacaaatattgcttattggttacaccctcgcacatctgctcagattcaccttcttggcaacatcgtcatttgggtgtccgggagtctggctctggcaatctatgccctgctgtccttatggtatctgctgagacgcagacggaatgtgcacgacttgccacaagatgcctggctccggtgggtactggccggtgccctctgcgctggtgggtgggcagtgaattatcttcctttttttctcatggagaagaccttgttcctgtatcattacctgccagctctgacatttcaaattctgcttctacctgtggtcttgcagcacatatctgatcatttgtgtaggagtcaactgcagcgatccatattttccgcgctggtggtcgcgtggtactcctcagcctgccacgtgagtaatacattgagaccacttacttatggcgataaatcactgagtccacatgaattgaaggcactccgttggaaggattcatgggacatcctcattcgcaaacattag

SEQ ID NO: 51919 - DNA, 2178 bp, Artificial Sequence
  derived and/or modified sequence
atgtggggttttctgaagaggcccgtcgtcgtgaccgccgacatcaatctgtctctcgtggctctgactggcatgggacttttaagccggctatggcgcctgacctatccaagggcggtcgtctttgatgaggtgtactatggacaatatatcagtttctacatgaaacaaatttttttcttagacgatagcggtccccctttcgggcatatggttttagccctgggaggatacttgggcggtttcgatggcaattttctgtggaacaggatcggcgcagagtattcgagcaacgtccccgtctggagtctgagacttctgccagccctggccggagccttgtctgttcccatggcctaccaaatcgttttagagttgcattttagccactgcgctgccatgggtgcagcgctgctgatgctaatcgaaaatgcattgatcacacagtcaagacttatgcttctcgagagcgtgctcatcttcttcaatctgttggccgtgctcagttatctgaagtttttcaactgccagaaacattcccctttctccctcagttggtggttctggttgaccctcaccggtgtggcatgttcctgcgctgtcggaattaaatatatgggcgtgttcacttatgttctggtcctgggagtggcagcggtgcacgcgtggcatctgctgggggatcagactctcagtaacgtctgtgtgttttgtcatcttctggctcgggctgttgccctattggtcattcccgtggttttgtacctgttgttcttctacgtccacctgatcctggtattccgatctgggccacacgaccaaattatgagtagcgccttccaggcttctttagaggggggactggcccgtataacccaggggcagcccctggaagtggcttttgggtctcaggtgactctccgaaacgtattcggcaagcctgtaccatgctggttgcactcccaccaagacacttacccaatgatctatgaaaatggacgaggatcttcccaccagcagcaggtgacctgctatccttttaaggacgtgaacaactggtggatcgtcaaagacccccgaaggcatcaactggtcgttagtagcccacctaggcctgtccgccacggggatatggtgcagctagttcatggcatgaccacgcgctctttgaatactcacgacgtcgctgctccattgtctcctcactcacaggaggtgtcttgttacattgactacaatatcagcatgccagcccagaacctctggcggctggagatcgttaacagagggtctgataccgatgtatggaaaaccattctctccgaagttcgattcgtgcatgtaaacacttccgccgtgctgaaactctccggagcacatcttcccgattggggatacagacagctcgaaattgtgggtgagaaactgagtcggggttatcacggttctaccgtgtggaatgtcgaggaacatcggtacggcgcatctcaggagcagagagagagggaaagagagctccatagtcccgcacaggtggatgtgagtcgcaacctatcttttatggccaggttttccgagctccaatggaggatgctcgccctgcgcagcgatgacagcgagcataagtattcttcctcacccctggagtgggtgacactggataccaacattgcttattggctgcaccctcgcactagtgcacagattcatctgcttggcaatattgtaatttgggtatcagggagcctggccctcgccatttacgctttgcttagcctatggtatctgctaagacggaggaggaacgtgcacgatcttccacaggatgcgtggctgcggtgggtgttggcgggagcactttgcgccggtgggtgggccgtgaattaccttccattctttctgatggagaagacactgtttctgtatcattatctccctgccttgacctttcaaattctcttgttaccagttgtgctccagcacattagtgatcacctgtgccgatcccaactgcagaggtccattttcagtgcactcgtagttgcttggtattcatctgcatgccacgttagcaatacgctgcgcccactcacttacggtgataagtctctctctccccacgagctcaaggcactgaggtggaaagacagttgggatatccttattaggaagcactag

SEQ ID NO: 51920 - DNA, 2178 bp, Artificial Sequence
  derived and/or modified sequence
atgtggggatttttgaagaggcccgtcgtggtgactgccgacatcaatctgtccctcgtggctctcactggtatgggtctgctgagcagactgtggcggcttacttatcccagggccgtggtatttgacgaggtctactacggccagtacatctctttttatatgaagcagattttctttctggatgattctgggccaccgttcgggcacatggttctggcactcggagggtacctcggtgggtttgatggaaattttctctggaaccgaatcggagctgagtacagctccaacgtgccagtttggtccctgcgactgcttcccgcactggcaggggcactttctgtgcccatggcctaccagatcgtactagagttacatttttcccattgcgcagccatgggagccgctctgttaatgctgatcgagaatgctctgataactcaaagtcgcctcatgcttctggaaagcgtgctgattttttttaacctgctggccgtgctgagttatctcaaatttttcaactgccaaaagcactcccccttcagtctaagctggtggttttggctgactctgactggcgtggcctgctcctgcgctgtgggaattaagtatatgggagtattcacatacgttcttgtcttaggggtagcggctgtccatgcctggcacttactgggcgatcaaaccctgtcgaatgtctgtgtcttctgtcatttactggctagagccgtcgctctcctggtgatccctgtcgttttgtacctccttttcttctatgtgcatctcatccttgtttttcggtctgggccacacgatcagatcatgtcatcagcttttcaggccagtctcgagggtgggctggccagaattacacaaggacagcctctagaggtagcttttgggtctcaagtgacacttcgcaatgtctttggcaagcccgtcccctgttggcttcactcccaccaggatacttacccaatgatctacgagaacggcagaggctcaagtcatcagcagcaggtgacttgttacccgttcaaagacgtaaacaactggtggatcgtgaaagaccctaggaggcaccagcttgtggtcagctcacctccacgccctgtgcgacatggagacatggtgcagctggttcatgggatgaccacaaggtcgctcaacactcacgatgttgccgcaccactgtccccccacagccaggaagtaagctgctacatcgattataacatcagcatgcccgctcaaaacttatggagactagaaattgtgaaccggggatccgacaccgatgtgtggaagaccatcctctccgaggtccgattcgtccatgtaaacacctccgcagtactgaagctctctggggcacatctccccgattggggttacagacaactggagatcgtcggtgagaaactcagtagaggctatcacgggtcaactgtttggaatgtcgaggaacaccggtacggagcttcacaggaacaacgtgagcgagaaagagaactgcactctccagcacaggttgacgtgtcacgcaatctctcatttatggccaggttctctgaacttcagtggaggatgttggccctgaggagtgacgactccgagcacaaatacagcagcagtcctctcgagtgggtgacattagacaccaacattgcatactggttacatccacggactagtgctcaaatccatctgctgggaaatatagttatttgggtttcgggttcgctcgccttagccatctacgccttgttatcattgtggtaccttcttcgccgacgcagaaacgttcatgatttgccccaggacgcttggctccggtgggtgttggcgggagctctttgtgctgggggatgggcagtgaactacctgcccttcttcctaatggaaaagactctgttcctttaccattacctacctgccctgactttccagatactcttgttgccagtggtgcttcaacacataagcgaccacctgtgtagatcccagttgcagcgtagcatattcagcgccctggtcgttgcatggtacagctccgcgtgccacgtgtccaacaccctgcggcctttgacatacggggacaaatcgctctctcctcatgaattaaaagccttacgttggaaagacagctgggatatcctcattagaaagcactag

SEQ ID NO: 51921 - DNA, 2912 bp, Artificial Sequence
  derived and/or modified sequence
gtctggccccgcaggctcggtgaatcgaacgttgagcagggcggtgggtggtgcggagtgccgagcggcctcacccccaaccgtcggcccagtcggacggttccgaggcgttgccgggagccgggcgcggctctgtgtggactcggagaaacgcggttttgacgaagtatattatgggcagtacatctctttttacatgaaacaaatcttcttcttggatgacagtgggccgccatttggccacatggtgctggccttgggaggttatttaggaggattcgatggcaattttttgtggaacagaattggagcagaatacagtagcaacgtgcctgtgtggtccctgcgcctgctgccagcactcgcgggggccttgtcggtccccatggcctaccagatagtgttggagctccacttttctcattgtgccgccatgggagctgctctgttgatgcttatcgagaatgctctcatcactcagtcaaggctaatgcttttggaatcagtgttaatatttttcaatctattggccgtgttgtcctacctgaagttcttcaactgccaaaagcacagccctttttctctgagctggtggttctggctaacactgacaggggtcgcttgttcctgtgcagtgggcatcaagtacatgggtgtgttcacgtacgtgctcgtgctgggtgttgcagctgtccatgcctggcacctgcttggagaccagactttgtccaatgtctgtgtgttctgtcacttgctcgcccgagcagtggctttgctggtcatcccggtcgtcctgtacttactgttcttctacgtccacttgattctagtcttccgctctgggccccacgaccaaatcatgtccagtgccttccaggccagcttagagggaggactagctcggatcactcagggtcagccactggaggtggcctttgggtcccaggtcactctgaggaacgtctttgggaaacctgtgccctgctggcttcattcccaccaggacacctaccccatgatatatgagaacggccgaggcagctcccaccagcaacaggtgacctgttaccccttcaaagatgtcaataactggtggattgtaaaggatcccaggaggcaccagctggtggtgagcagccctccgagacctgtgaggcacggggacatggtgcagctggtccacggcatgaccacccgctccctgaacacgcatgatgttgcagcccccctgagcccccattcacaggaggtctcctgctacattgactataacatctccatgcccgcccagaacctctggagactggaaattgtgaacagaggatctgacacagacgtctggaagaccatcctctcagaggtccgctttgtgcacgtgaacacttccgctgtcttaaagctgagcggggctcacctccctgactgggggtatcggcaactggagatcgtcggggagaagctgtcccggggctaccacgggagcacggtgtggaacgtggaggagcaccgatacggcgcgagccaggagcagagggagcgggaacgggagctgcactcacctgcgcaggtggacgtcagcaggaacctcagcttcatggcgagattctcggagctgcagtggaggatgctggcgctgagaagtgatgactcggaacacaagtacagctccagcccactggagtgggtcaccctggacaccaatattgcctactggctgcaccccaggaccagcgctcagatccacctacttggaaacatagtgatctgggtttcgggcagcctcgctctggccatctacgccctgctgtccttgtggtacctgctccgacggcgaagaaatgtccatgacctccctcaggatgcctggctgcgctgggtgctggctggggcgctgtgtgccggtggctgggcagtgaactacctcccgttcttcctgatggagaagacactcttcctctaccactacctgcccgcactcaccttccaaatccttctgctccctgtggtcctgcagcacatcagcgaccacctgtgcaggtcccagctccagaggagcatcttcagcgccctggtggtggcctggtactcctccgcgtgccacgtgtccaacacgctgcgcccactcacctacggggacaagtcactctcgccacatgaactcaaggcccttcgctggaaagacagctgggacatcttgatccgaaaacactagaacaagagtgtggcaaagaacacccgtgctggggtcgggatgaggttgaagggtcttggtcaatgtacgtaatgagcagggtgggccccacgctgggaggacacgggctgggctgagcagggcctctagtggaacacatgggggtctcattgaaaagctctctgatgagcacctccttttgtgcaaagttaattttttctcgacaataaagatattccgtgtctttacccctgaactaagacacagggagtatttcagaggccagcgtaggagtcattgacaacaaaaagccgagaacccagggccagcagtggagcctcagcagaccagggcctggtccttgctaactgctgcagggtggagtttgatctggcagacccgatcctccttcatgaacacccagcaacctgagcaagtcccggccctgccctcagcgagcccggcaggcgtcctgggacagctcagtgttggagggccacctgaaccacgagccagggctggggcttgcatgtcattgtctatgacagcgtcaagactggcccttggcaccgtgctgtgtggaaaccctcccctctgagactccactgagacgtggctgagtgaaatcttcctcgtcagtggtcaaggtgtgtcatccatacagctccatgcctttgtcttttttaaatgtaattaaaaaaggaaccaactggcgtttgta

SEQ ID NO: 51922 - DNA, 2573 bp, Artificial Sequence
  derived and/or modified sequence
gttgagcagggcggtgggtggtgcggagtgccgagcggcctcacccccaaccgtcggcccagtcggacggttccgaggcgttgccgggagccgggcgcggctctgtgtggactcggagaaacgcggggcgtctgcctgagcccgcttttctacaagatgtggggatttttgaagcgccctgtagtggtgacggctgacatcaacttgagccttgtggccctgactgggatggggttactgagccggctgtggcgactcacctacccgcgggctgtggtgttatttaggaggattcgatggcaattttttgtggaacagaattggagcagtgtggttgcttttccagaatacagtagcaacgtgcctgtgtggtccctgcgcctgctgccagcactcgcgggggccttgtcggtccccatggcctaccagatagtgttggagctccacttttctcattgtgccgccatgggagctgctctgttgatgcttatcgagaatgctctcatcactcagtcaaggctaatgcttttggaatcagtgttaatatttttcaatctattggccgtgttgtcctacctgaagttcttcaactgccaaaagcacagccctttttctctgagctggtggttctggctaacactgacaggggtcgcttgttcctgtgcagtgggcatcaagtacatgggtgtgttcacgtacgtgctcgtgctgggtgttgcagctgtccatgcctggcacctgcttggagaccagactttgtccaatgtctgtgtgttctgtcacttgctcgcccgagcagtggctttgctggtcatcccggtcgtcctgtacttactgttcttctacgtccacttgattctagtcttccgctctgggccccacgaccaaatcatgtccagtgccttccaggccagcttagagggaggactagctcggatcactcagggtcagccactggaggtggcctttgggtcccaggtcactctgaggaacgtctttgggaaacctgtgccctgctggcttcattcccaccaggacacctaccccatgatatatgagaacggccgaggcagctcccaccagcaacaggtgacctgttaccccttcaaagatgtcaataactggtggattgtaaaggatcccaggaggcaccagctggtggtgagcagccctccgagacctgtgaggcacggggacatggtgcagctggtccacggcatgaccacccgctccctgaacacgcatgatgttgcagcccccctgagcccccattcacaggaggtctcctgctacattgactataacatctccatgcccgcccagaacctctggagactggaaattgtgaacagaggatctgacacagacgtctggaagaccatcctctcagaggtccgctttgtgcacgtgaacacttccgctgtcttaaagctgagcggggctcacctccctgactgggggtatcggcaactggagatcgtcggggagaagctgtcccggggctaccacgggagcacggtgtggaacgtggaggagcaccgatacggcgcgagccaggagcagagggagcgggaacgggagctgcactcacctgcgcaggtggacgtcagcaggaacctcagcttcatggcgagattctcggagctgcagtggaggatgctggcgctgagaagtgatgactcggaacacaagtacagctccagcccactggagtgggtcaccctggacaccaatattgcctactggctgcaccccaggaccagcgctcagatccacctacttggaaacatagtgatctgggtttcgggcagcctcgctctggccatctacgccctgctgtccttgtggtacctgctccgacggcgaagaaatgtccatgacctccctcaggatgcctggctgcgctgggtgctggctggggcgctgtgtgccggtggctgggcagtgaactacctcccgttcttcctgatggagaagacactcttcctctaccactacctgcccgcactcaccttccaaatccttctgctccctgtggtcctgcagcacatcagcgaccacctgtgcaggtcccagctccagaggagcatcttcagcgccctggtggtggcctggtactcctccgcgtgccacgtgtccaacacgctgcgcccactcacctacggggacaagtcactctcgccacatgaactcaaggcccttcgctggaaagacagctgggacatcttgatccgaaaacactagaacaagagtgtggcaaagaacacccgtgctggggtcgggatgaggttgaagggtcttggtcaatgtacgtaatgagcagggtgggccccacgctgggaggacacgggctgggctgagcagggcctctagtggaacacatgggggtctcattgaaaagctctctgatgagcacctccttttgtgcaaagttaattttttctcgacaataaagatattccgtgtctttacccctgaactaagacacagggagtatttcagaggccagcgtaggagtcattgacaacaaaaagccgagaacccagggccagcagtggagcctcagcagacca

SEQ ID NO: 51923 - DNA, 3038 bp, Artificial Sequence
  derived and/or modified sequence
gaacgttgagcagggcggtgggtggtgcggagtgccgagcggcctcacccccaaccgtcggcccagtcggacggttccgaggcgttgccgggagccgggcgcggctctgtgtggactcggagaaacgcggggcgtctgcctgagcccgcttttctacaagatgtggggatttttgaagcgccctgtagtggtgacggctgacatcaacttgagccttgtggccctgactgggatggggttactgagccggctgtggcgactcacctacccgcgggctgtggtttttgacgaagtatattatgggcagtacatctctttttacatgaaacaaatcttcttcttggatgacagtgggccgccatttggccacatggtgctggccttgggaggttatttaggaggattcgatggcaattttttgtggaacagaattggagcagaatacagtagcaacgtgcctgtgtggtccctgcgcctgctgccagcactcgcgggggccttgtcggtccccatggcctaccagatagtgttggagctccacttttctcattgtgccgccatgggagctgctctgttgatgcttatcgagaatgctctcatcactcagtcaaggctaatgcttttggaatcagtgttaatatttttcaatctattggccgtgttgtcctacctgaagttcttcaactgccaaaagcacagccctttttctctgagctggtggttctggctaacactgacaggggtcgcttgttcctgtgcagtgggcatcaagtacatgggtgtgttcacgtacgtgctcgtgctgggtgttgcagctgtccatgcctggcacctgcttggagaccagactttgtccaatgtctgtgtgttctgtcacttgctcgcccgagcagtggctttgctggtcatcccggtcgtcctgtacttactgttcttctacgtccacttgattctagtcttccgctctgggccccacgaccaaatcatgtccagtgccttccaggccagcttagagggaggactagctcggatcactcagggtcagccactggaggtggcctttgggtcccaggtcactctgaggaacgtctttgggaaacctgtgccctgctggcttcattcccaccaggacacctaccccatgatatatgagaacggccgaggcagctcccaccagcaacaggtgacctgttaccccttcaaagatgtcaataactggtggattgtaaaggatcccaggaggcaccagctggtggtgagcagccctccgagacctgtgaggcacggggacatggtgcagctggtccacggcatgaccacccgctccctgaacacgcatgatgttgcagcccccctgagcccccattcacaggaggtctcctgctacattgactataacatctccatgcccgcccagaacctctggagactggaaattgtgaacagaggatctgacacagacgtctggaagaccatcctctcagaggtccgctttgtgcacgtgaacacttccgctgtcttaaagctgagcggggctcacctccctgactgggggtatcggcaactggagatcgtcggggagaagctgtcccggggctaccacgggagcacggtgtggaacgtggaggagcaccgatacggcgcgagccaggagcagagggagcgggaacgggagctgcactcacctgcgcaggtggacgtcagcaggaacctcagcttcatggcgagattctcggagctgcagtggaggatgctggcgctgagaagtgatgactcggaacacaagtacagctccagcccactggagtgggtcaccctggacaccaatattgcctactggctgcaccccaggaccagcgctcagatccacctacttggaaacatagtgatctgggtttcgggcagcctcgctctggccatctacgccctgctgtccttgtggtacctgctccgacggcgaagaaatgtccatgacctccctcaggatgcctggctgcgctgggtgctggctggggcgctgtgtgccggtggctgggcagtgaactacctcccgttcttcctgatggagaagacactcttcctctaccactacctgcccgcactcaccttccaaatccttctgctccctgtggtcctgcagcacatcagcgaccacctgtgcaggtcccagctccagaggagcatcttcagcgccctggtggtggcctggtactcctccgcgtgccacgtgtccaacacgctgcgcccactcacctacggggacaagtcactctcgccacatgaactcaaggcccttcgctggaaagacagctgggacatcttgatccgaaaacactagaacaagagtgtggcaaagaacacccgtgctggggtcgggatgaggttgaagggtcttggtcaatgtacgtaatgagcagggtgggccccacgctgggaggacacgggctgggctgagcagggcctctagtggaacacatgggggtctcattgaaaagctctctgatgagcacctccttttgtgcaaagttaattttttctcgacaataaagatattccgtgtctttacccctgaactaagacacagggagtatttcagaggccagcgtaggagtcattgacaacaaaaagccgagaacccagggccagcagtggagcctcagcagaccagggcctggtccttgctaactgctgcagggtggagtttgatctggcagacccgatcctccttcatgaacacccagcaacctgagcaagtcccggccctgccctcagcgagcccggcaggcgtcctgggacagctcagtgttggagggccacctgaaccacgagccagggctggggcttgcatgtcattgtctatgacagcgtcaagactggcccttggcaccgtgctgtgtggaaaccctcccctctgagactccactgagacgtggctgagtgaaatcttcctcgtcagtggtcaaggtgtgtcatccatacagctccatgcctttgtcttttttaaatgtaattaaaaaaggaaccaactggcgtttgta

SEQ ID NO: 51924 - DNA, 2821 bp, Artificial Sequence
  derived and/or modified sequence
acgcgcgctgctgcccgtctggccccgcaggctcggtgaatcgaacgttgagcagggcggtgggtggtgcggagtgccgagcggcctcacccccaaccgtcggcccagtcggacggttccgaggcgttgccgggagccgggcgcggctctgtgtggactcggagaaacgcgggttatttaggaggattcgatggcaattttttgtggaacagaattggagcagaatacagtagcaacgtgcctgtgtggtccctgcgcctgctgccagcactcgcgggggccttgtcggtccccatggcctaccagatagtgttggagctccacttttctcattgtgccgccatgggagctgctctgttgatgcttatcgagaatgctctcatcactcagtcaaggctaatgcttttggaatcagtgttaatatttttcaatctattggccgtgttgtcctacctgaagttcttcaactgccaaaagcacagccctttttctctgagctggtggttctggctaacactgacaggggtcgcttgttcctgtgcagtgggcatcaagtacatgggtgtgttcacgtacgtgctcgtgctgggtgttgcagctgtccatgcctggcacctgcttggagaccagactttgtccaatgtctgtgtgttctgtcacttgctcgcccgagcagtggctttgctggtcatcccggtcgtcctgtacttactgttcttctacgtccacttgattctagtcttccgctctgggccccacgaccaaatcatgtccagtgccttccaggccagcttagagggaggactagctcggatcactcagggtcagccactggaggtggcctttgggtcccaggtcactctgaggaacgtctttgggaaacctgtgccctgctggcttcattcccaccaggacacctaccccatgatatatgagaacggccgaggcagctcccaccagcaacaggtgacctgttaccccttcaaagatgtcaataactggtggattgtaaaggatcccaggaggcaccagctggtggtgagcagccctccgagacctgtgaggcacggggacatggtgcagctggtccacggcatgaccacccgctccctgaacacgcatgatgttgcagcccccctgagcccccattcacaggaggtctcctgctacattgactataacatctccatgcccgcccagaacctctggagactggaaattgtgaacagaggatctgacacagacgtctggaagaccatcctctcagaggtccgctttgtgcacgtgaacacttccgctgtcttaaagctgagcggggctcacctccctgactgggggtatcggcaactggagatcgtcggggagaagctgtcccggggctaccacgggagcacggtgtggaacgtggaggagcaccgatacggcgcgagccaggagcagagggagcgggaacgggagctgcactcacctgcgcaggtggacgtcagcaggaacctcagcttcatggcgagattctcggagctgcagtggaggatgctggcgctgagaagtgatgactcggaacacaagtacagctccagcccactggagtgggtcaccctggacaccaatattgcctactggctgcaccccaggaccagcgctcagatccacctacttggaaacatagtgatctgggtttcgggcagcctcgctctggccatctacgccctgctgtccttgtggtacctgctccgacggcgaagaaatgtccatgacctccctcaggatgcctggctgcgctgggtgctggctggggcgctgtgtgccggtggctgggcagtgaactacctcccgttcttcctgatggagaagacactcttcctctaccactacctgcccgcactcaccttccaaatccttctgctccctgtggtcctgcagcacatcagcgaccacctgtgcaggtcccagctccagaggagcatcttcagcgccctggtggtggcctggtactcctccgcgtgccacgtgtccaacacgctgcgcccactcacctacggggacaagtcactctcgccacatgaactcaaggcccttcgctggaaagacagctgggacatcttgatccgaaaacactagaacaagagtgtggcaaagaacacccgtgctggggtcgggatgaggttgaagggtcttggtcaatgtacgtaatgagcagggtgggccccacgctgggaggacacgggctgggctgagcagggcctctagtggaacacatgggggtctcattgaaaagctctctgatgagcacctccttttgtgcaaagttaattttttctcgacaataaagatattccgtgtctttacccctgaactaagacacagggagtatttcagaggccagcgtaggagtcattgacaacaaaaagccgagaacccagggccagcagtggagcctcagcagaccagggcctggtccttgctaactgctgcagggtggagtttgatctggcagacccgatcctccttcatgaacacccagcaacctgagcaagtcccggccctgccctcagcgagcccggcaggcgtcctgggacagctcagtgttggagggccacctgaaccacgagccagggctggggcttgcatgtcattgtctatgacagcgtcaagactggcccttggcaccgtgctgtgtggaaaccctcccctctgagactccactgagacgtggctgagtgaaatcttcctcgtcagtggtcaaggtgtgtcatccatacagctccatgcctttgtcttttttaaatgtaattaaaaaaggaaccaactggcgtttgta

SEQ ID NO: 51925 - DNA, 3320 bp, Artificial Sequence
  derived and/or modified sequence
acgcgcgctgctgcccgtctggccccgcaggctcggtgaatcgaacgttgagcagggcggtgggtggtgcggagtgccgagcggcctcacccccaaccgtcggcccagtcggacggttccgaggcgttgccgggagccgggcgcggctctgtgtggactcggagaaacgcgggtacatttggggacaccggggacgagagcccagcccggacttgggggagtccgtcagtgccggacgcgggtccctggcttgcggacgggctggggccgggggcgtccccgtctttccggagctgggggcggggttcgggcccgggcagatgcggcgttcgggcggccgagccccgaagtaagaactccgtggcgcgtgcagccctagggaggaagggcgtgctgcgggtgcagtctcaggggcgtctgcctgagcccgcttttctacaagatgtggggatttttgaagcgccctgtagtggtgacggctgacatcaacttgagccttgtggccctgactgggatggggttactgagccggctgtggcgactcacctacccgcgggctgtggtttttgacgaagtatattatgggcagtacatctctttttacatgaaacaaatcttcttcttggatgacagtgggccgccatttggccacatggtgctggccttgggaggttatttaggaggattcgatggcaattttttgtggaacagaattggagcagaatacagtagcaacgtgcctgtgtggtccctgcgcctgctgccagcactcgcgggggccttgtcggtccccatggcctaccagatagtgttggagctccacttttctcattgtgccgccatgggagctgctctgttgatgcttatcgagaatgctctcatcactcagtcaaggctaatgcttttggaatcagtgttaatatttttcaatctattggccgtgttgtcctacctgaagttcttcaactgccaaaagcacagccctttttctctgagctggtggttctggctaacactgacaggggtcgcttgttcctgtgcagtgggcatcaagtacatgggtgtgttcacgtacgtgctcgtgctgggtgttgcagctgtccatgcctggcacctgcttggagaccagactttgtccaatgtctgtgtgttctgtcacttgctcgcccgagcagtggctttgctggtcatcccggtcgtcctgtacttactgttcttctacgtccacttgattctagtcttccgctctgggccccacgaccaaatcatgtccagtgccttccaggccagcttagagggaggactagctcggatcactcagggtcagccactggaggtggcctttgggtcccaggtcactctgaggaacgtctttgggaaacctgtgccctgctggcttcattcccaccaggacacctaccccatgatatatgagaacggccgaggcagctcccaccagcaacaggtgacctgttaccccttcaaagatgtcaataactggtggattgtaaaggatcccaggaggcaccagctggtggtgagcagccctccgagacctgtgaggcacggggacatggtgcagctggtccacggcatgaccacccgctccctgaacacgcatgatgttgcagcccccctgagcccccattcacaggaggtctcctgctacattgactataacatctccatgcccgcccagaacctctggagactggaaattgtgaacagaggatctgacacagacgtctggaagaccatcctctcagaggtccgctttgtgcacgtgaacacttccgctgtcttaaagctgagcggggctcacctccctgactgggggtatcggcaactggagatcgtcggggagaagctgtcccggggctaccacgggagcacggtgtggaacgtggaggagcaccgatacggcgcgagccaggagcagagggagcgggaacgggagctgcactcacctgcgcaggtggacgtcagcaggaacctcagcttcatggcgagattctcggagctgcagtggaggatgctggcgctgagaagtgatgactcggaacacaagtacagctccagcccactggagtgggtcaccctggacaccaatattgcctactggctgcaccccaggaccagcgctcagatccacctacttggaaacatagtgatctgggtttcgggcagcctcgctctggccatctacgccctgctgtccttgtggtacctgctccgacggcgaagaaatgtccatgacctccctcaggatgcctggctgcgctgggtgctggctggggcgctgtgtgccggtggctgggcagtgaactacctcccgttcttcctgatggagaagacactcttcctctaccactacctgcccgcactcaccttccaaatccttctgctccctgtggtcctgcagcacatcagcgaccacctgtgcaggtcccagctccagaggagcatcttcagcgccctggtggtggcctggtactcctccgcgtgccacgtgtccaacacgctgcgcccactcacctacggggacaagtcactctcgccacatgaactcaaggcccttcgctggaaagacagctgggacatcttgatccgaaaacactagaacaagagtgtggcaaagaacacccgtgctggggtcgggatgaggttgaagggtcttggtcaatgtacgtaatgagcagggtgggccccacgctgggaggacacgggctgggctgagcagggcctctagtggaacacatgggggtctcattgaaaagctctctgatgagcacctccttttgtgcaaagttaattttttctcgacaataaagatattccgtgtctttacccctgaactaagacacagggagtatttcagaggccagcgtaggagtcattgacaacaaaaagccgagaacccagggccagcagtggagcctcagcagaccagggcctggtccttgctaactgctgcagggtggagtttgatctggcagacccgatcctccttcatgaacacccagcaacctgagcaagtcccggccctgccctcagcgagcccggcaggcgtcctgggacagctcagtgttggagggccacctgaaccacgagccagggctggggcttgcatgtcattgtctatgacagcgtcaagactggcccttggcaccgtgctgtgtggaaaccctcccctctgagactccactgagacgtggctgagtgaaatcttcctcgtcagtggtcaaggtgtgtcatccatacagctccatgcctttgtcttttttaaatgtaattaaaaaaggaaccaactggcgtttgta

SEQ ID NO: 51926 - DNA, 2016 bp, Artificial Sequence
  derived and/or modified sequence
atgaagcagatcttcttcctggacgacagcggcccccccttcggccacatggtgctggccctgggcggctacctgggcggcttcgacggcaacttcctgtggaacagaatcggcgccgagtacagcagcaacgtgcccgtgtggagcctgagactgctgcccgccctggccggcgccctgagcgtgcccatggcctaccagatcgtgctggagctgcacttcagccactgcgccgccatgggcgccgccctgctgatgctgatcgagaacgccctgatcacccagagcagactgatgctgctggagagcgtgctgatcttcttcaacctgctggccgtgctgagctacctgaagttcttcaactgccagaagcacagccccttcagcctgagctggtggttctggctgaccctgaccggcgtggcctgcagctgcgccgtgggcatcaagtacatgggcgtgttcacctacgtgctggtgctgggcgtggccgccgtgcacgcctggcacctgctgggcgaccagaccctgagcaacgtgtgcgtgttctgccacctgctggccagagccgtggccctgctggtgatccccgtggtgctgtacctgctgttcttctacgtgcacctgatcctggtgttcagaagcggcccccacgaccagatcatgagcagcgccttccaggccagcctggagggcggcctggccagaatcacccagggccagcccctggaggtggccttcggcagccaggtgaccctgagaaacgtgttcggcaagcccgtgccctgctggctgcacagccaccaggacacctaccccatgatctacgagaacggcagaggcagcagccaccagcagcaggtgacctgctaccccttcaaggacgtgaacaactggtggatcgtgaaggaccccagaagacaccagctggtggtgagcagcccccccagacccgtgagacacggcgacatggtgcagctggtgcacggcatgaccaccagaagcctgaacacccacgacgtggccgcccccctgagcccccacagccaggaggtgagctgctacatcgactacaacatcagcatgcccgcccagaacctgtggagactggagatcgtgaacagaggcagcgacaccgacgtgtggaagaccatcctgagcgaggtgagattcgtgcacgtgaacaccagcgccgtgctgaagctgagcggcgcccacctgcccgactggggctacagacagctggagatcgtgggcgagaagctgagcagaggctaccacggcagcaccgtgtggaacgtggaggagcacagatacggcgccagccaggagcagagagagagagagagagagctgcacagccccgcccaggtggacgtgagcagaaacctgagcttcatggccagattcagcgagctgcagtggagaatgctggccctgagaagcgacgacagcgagcacaagtacagcagcagccccctggagtgggtgaccctggacaccaacatcgcctactggctgcaccccagaaccagcgcccagatccacctgctgggcaacatcgtgatctgggtgagcggcagcctggccctggccatctacgccctgctgagcctgtggtacctgctgagaagaagaagaaacgtgcacgacctgccccaggacgcctggctgagatgggtgctggccggcgccctgtgcgccggcggctgggccgtgaactacctgcccttcttcctgatggagaagaccctgttcctgtaccactacctgcccgccctgaccttccagatcctgctgctgcccgtggtgctgcagcacatcagcgaccacctgtgcagaagccagctgcagagaagcatcttcagcgccctggtggtggcctggtacagcagcgcctgccacgtgagcaacaccctgagacccctgacctacggcgacaagagcctgagcccccacgagctgaaggccctgagatggaaggacagctgggacatcctgatcagaaagcactag

SEQ ID NO: 51927 - DNA, 2088 bp, Artificial Sequence
  derived and/or modified sequence
atgtggggcttcctgaagagacccgtggtggtgaccgccgacatcaacctgagcctggtggccctgaccggcatgggcctgctgagcagactgtggagactgacctaccccagagccgtggtgctgttcagaagaatcagatggcagttcttcgtggagcagaactggagcagcgtggtggccttccccgagtacagcagcaacgtgcccgtgtggagcctgagactgctgcccgccctggccggcgccctgagcgtgcccatggcctaccagatcgtgctggagctgcacttcagccactgcgccgccatgggcgccgccctgctgatgctgatcgagaacgccctgatcacccagagcagactgatgctgctggagagcgtgctgatcttcttcaacctgctggccgtgctgagctacctgaagttcttcaactgccagaagcacagccccttcagcctgagctggtggttctggctgaccctgaccggcgtggcctgcagctgcgccgtgggcatcaagtacatgggcgtgttcacctacgtgctggtgctgggcgtggccgccgtgcacgcctggcacctgctgggcgaccagaccctgagcaacgtgtgcgtgttctgccacctgctggccagagccgtggccctgctggtgatccccgtggtgctgtacctgctgttcttctacgtgcacctgatcctggtgttcagaagcggcccccacgaccagatcatgagcagcgccttccaggccagcctggagggcggcctggccagaatcacccagggccagcccctggaggtggccttcggcagccaggtgaccctgagaaacgtgttcggcaagcccgtgccctgctggctgcacagccaccaggacacctaccccatgatctacgagaacggcagaggcagcagccaccagcagcaggtgacctgctaccccttcaaggacgtgaacaactggtggatcgtgaaggaccccagaagacaccagctggtggtgagcagcccccccagacccgtgagacacggcgacatggtgcagctggtgcacggcatgaccaccagaagcctgaacacccacgacgtggccgcccccctgagcccccacagccaggaggtgagctgctacatcgactacaacatcagcatgcccgcccagaacctgtggagactggagatcgtgaacagaggcagcgacaccgacgtgtggaagaccatcctgagcgaggtgagattcgtgcacgtgaacaccagcgccgtgctgaagctgagcggcgcccacctgcccgactggggctacagacagctggagatcgtgggcgagaagctgagcagaggctaccacggcagcaccgtgtggaacgtggaggagcacagatacggcgccagccaggagcagagagagagagagagagagctgcacagccccgcccaggtggacgtgagcagaaacctgagcttcatggccagattcagcgagctgcagtggagaatgctggccctgagaagcgacgacagcgagcacaagtacagcagcagccccctggagtgggtgaccctggacaccaacatcgcctactggctgcaccccagaaccagcgcccagatccacctgctgggcaacatcgtgatctgggtgagcggcagcctggccctggccatctacgccctgctgagcctgtggtacctgctgagaagaagaagaaacgtgcacgacctgccccaggacgcctggctgagatgggtgctggccggcgccctgtgcgccggcggctgggccgtgaactacctgcccttcttcctgatggagaagaccctgttcctgtaccactacctgcccgccctgaccttccagatcctgctgctgcccgtggtgctgcagcacatcagcgaccacctgtgcagaagccagctgcagagaagcatcttcagcgccctggtggtggcctggtacagcagcgcctgccacgtgagcaacaccctgagacccctgacctacggcgacaagagcctgagcccccacgagctgaaggccctgagatggaaggacagctgggacatcctgatcagaaagcactag

SEQ ID NO: 51928 - DNA, 2178 bp, Artificial Sequence
  derived and/or modified sequence
atgtggggcttcctgaagagacccgtggtggtgaccgccgacatcaacctgagcctggtggccctgaccggcatgggcctgctgagcagactgtggagactgacctaccccagagccgtggtgttcgacgaggtgtactacggccagtacatcagcttctacatgaagcagatcttcttcctggacgacagcggcccccccttcggccacatggtgctggccctgggcggctacctgggcggcttcgacggcaacttcctgtggaacagaatcggcgccgagtacagcagcaacgtgcccgtgtggagcctgagactgctgcccgccctggccggcgccctgagcgtgcccatggcctaccagatcgtgctggagctgcacttcagccactgcgccgccatgggcgccgccctgctgatgctgatcgagaacgccctgatcacccagagcagactgatgctgctggagagcgtgctgatcttcttcaacctgctggccgtgctgagctacctgaagttcttcaactgccagaagcacagccccttcagcctgagctggtggttctggctgaccctgaccggcgtggcctgcagctgcgccgtgggcatcaagtacatgggcgtgttcacctacgtgctggtgctgggcgtggccgccgtgcacgcctggcacctgctgggcgaccagaccctgagcaacgtgtgcgtgttctgccacctgctggccagagccgtggccctgctggtgatccccgtggtgctgtacctgctgttcttctacgtgcacctgatcctggtgttcagaagcggcccccacgaccagatcatgagcagcgccttccaggccagcctggagggcggcctggccagaatcacccagggccagcccctggaggtggccttcggcagccaggtgaccctgagaaacgtgttcggcaagcccgtgccctgctggctgcacagccaccaggacacctaccccatgatctacgagaacggcagaggcagcagccaccagcagcaggtgacctgctaccccttcaaggacgtgaacaactggtggatcgtgaaggaccccagaagacaccagctggtggtgagcagcccccccagacccgtgagacacggcgacatggtgcagctggtgcacggcatgaccaccagaagcctgaacacccacgacgtggccgcccccctgagcccccacagccaggaggtgagctgctacatcgactacaacatcagcatgcccgcccagaacctgtggagactggagatcgtgaacagaggcagcgacaccgacgtgtggaagaccatcctgagcgaggtgagattcgtgcacgtgaacaccagcgccgtgctgaagctgagcggcgcccacctgcccgactggggctacagacagctggagatcgtgggcgagaagctgagcagaggctaccacggcagcaccgtgtggaacgtggaggagcacagatacggcgccagccaggagcagagagagagagagagagagctgcacagccccgcccaggtggacgtgagcagaaacctgagcttcatggccagattcagcgagctgcagtggagaatgctggccctgagaagcgacgacagcgagcacaagtacagcagcagccccctggagtgggtgaccctggacaccaacatcgcctactggctgcaccccagaaccagcgcccagatccacctgctgggcaacatcgtgatctgggtgagcggcagcctggccctggccatctacgccctgctgagcctgtggtacctgctgagaagaagaagaaacgtgcacgacctgccccaggacgcctggctgagatgggtgctggccggcgccctgtgcgccggcggctgggccgtgaactacctgcccttcttcctgatggagaagaccctgttcctgtaccactacctgcccgccctgaccttccagatcctgctgctgcccgtggtgctgcagcacatcagcgaccacctgtgcagaagccagctgcagagaagcatcttcagcgccctggtggtggcctggtacagcagcgcctgccacgtgagcaacaccctgagacccctgacctacggcgacaagagcctgagcccccacgagctgaaggccctgagatggaaggacagctgggacatcctgatcagaaagcactag

SEQ ID NO: 51929 - protein, 608 aa, Artificial Sequence
  derived and/or modified sequence
MAYQIVLELHFSHCAAMGAALLMLIENALITQSRLMLLESVLIFFNLLAVLSYLKFFNCQKHSPFSLSWWFWLTLTGVACSCAVGIKYMGVFTYVLVLGVAAVHAWHLLGDQTLSNVCVFCHLLARAVALLVIPVVLYLLFFYVHLILVFRSGPHDQIMSSAFQASLEGGLARITQGQPLEVAFGSQVTLRNVFGKPVPCWLHSHQDTYPMIYENGRGSSHQQQVTCYPFKDVNNWWIVKDPRRHQLVVSSPPRPVRHGDMVQLVHGMTTRSLNTHDVAAPLSPHSQEVSCYIDYNISMPAQNLWRLEIVNRGSDTDVWKTILSEVRFVHVNTSAVLKLSGAHLPDWGYRQLEIVGEKLSRGYHGSTVWNVEEHRYGASQEQRERERELHSPAQVDVSRNLSFMARFSELQWRMLALRSDDSEHKYSSSPLEWVTLDTNIAYWLHPRTSAQIHLLGNIVIWVSGSLALAIYALLSLWYLLRRRRNVHDLPQDAWLRWVLAGALCAGGWAVNYLPFFLMEKTLFLYHYLPALTFQILLLPVVLQHISDHLCRSQLQRSIFSALVVAWYSSACHVSNTLRPLTYGDKSLSPHELKALRWKDSWDILIRKH

SEQ ID NO: 51930 - protein, 573 aa, Artificial Sequence
  derived and/or modified sequence
MLLESVLIFFNLLAVLSYLKFFNCQKHSPFSLSWWFWLTLTGVACSCAVGIKYMGVFTYVLVLGVAAVHAWHLLGDQTLSNVCVFCHLLARAVALLVIPVVLYLLFFYVHLILVFRSGPHDQIMSSAFQASLEGGLARITQGQPLEVAFGSQVTLRNVFGKPVPCWLHSHQDTYPMIYENGRGSSHQQQVTCYPFKDVNNWWIVKDPRRHQLVVSSPPRPVRHGDMVQLVHGMTTRSLNTHDVAAPLSPHSQEVSCYIDYNISMPAQNLWRLEIVNRGSDTDVWKTILSEVRFVHVNTSAVLKLSGAHLPDWGYRQLEIVGEKLSRGYHGSTVWNVEEHRYGASQEQRERERELHSPAQVDVSRNLSFMARFSELQWRMLALRSDDSEHKYSSSPLEWVTLDTNIAYWLHPRTSAQIHLLGNIVIWVSGSLALAIYALLSLWYLLRRRRNVHDLPQDAWLRWVLAGALCAGGWAVNYLPFFLMEKTLFLYHYLPALTFQILLLPVVLQHISDHLCRSQLQRSIFSALVVAWYSSACHVSNTLRPLTYGDKSLSPHELKALRWKDSWDILIRKH

SEQ ID NO: 51931 - protein, 465 aa, Artificial Sequence
  derived and/or modified sequence
MAIFCGTELEQVCVFCHLLARAVALLVIPVVLYLLFFYVHLILVFRSGPHDQIMSSAFQASLEGGLARITQGQPLEVAFGSQVTLRNVFGKPVPCWLHSHQDTYPMIYENGRGSSHQQQVTCYPFKDVNNWWIVKDPRRHQLVVSSPPRPVRHGDMVQLVHGMTTRSLNTHDVAAPLSPHSQEVSCYIDYNISMPAQNLWRLEIVNRGSDTDVWKTILSEVRFVHVNTSAVLKLSGAHLPDWGYRQLEIVGEKLSRGYHGSTVWNVEEHRYGASQEQRERERELHSPAQVDVSRNLSFMARFSELQAQIHLLGNIVIWVSGSLALAIYALLSLWYLLRRRRNVHDLPQDAWLRWVLAGALCAGGWAVNYLPFFLMEKTLFLYHYLPALTFQILLLPVVLQHISDHLCRSQLQRSIFSALVVAWYSSACHVSNTLRPLTYGDKSLSPHELKALRWKDSWDILIRKH

SEQ ID NO: 51932 - DNA, 1827 bp, Artificial Sequence
  derived and/or modified sequence
atggcttatcagatcgtgctggaactccatttcagccactgtgccgctatgggtgcggccctcctgatgctaatagagaatgccctgattacccagtcccggctgatgctgctcgaaagcgttctcatctttttcaatctgctggctgtgctatcttacctcaagtttttcaactgccagaaacactcccccttttctctctcttggtggttttggctcaccctaacaggggttgcatgctcatgcgctgtgggtattaagtacatgggggtgttcacgtacgtgttggtgctgggtgtagcagcagtgcacgcttggcacttgctgggggaccagactctgagtaatgtgtgcgtgttttgtcatctgcttgcccgagctgtggcattgctggtgattccagtggtactgtatcttcttttcttttacgtccatctcattctggtgtttagatcagggccccatgatcagatcatgtctagtgccttccaggccagcttggaaggggggttggcccggatcacccagggacagcctcttgaggtggcatttggcagtcaggtgactctgagaaacgtgttcgggaagcctgtgccctgttggttgcacagtcaccaggatacctaccccatgatttatgaaaacggacggggctccagtcatcagcagcaggtgacatgctatcccttcaaggatgtgaataactggtggattgtgaaggaccccaggagacaccaactagtagtttcatcaccccccaggcctgtgcgtcacggggacatggtgcagctagtacatggcatgactacccggagtttgaacactcatgacgtggccgcaccactgagcccccactcacaggaggtctcctgctatatcgactacaatatctccatgccagcccagaacttgtggagactggagattgtgaatcggggaagtgacaccgatgtgtggaaaaccatcttatctgaagttcgtttcgtgcacgtgaataccagtgctgtgctcaagctctcaggggcacacctcccagattgggggtaccggcagctcgagatcgtcggagaaaagctaagccgagggtaccatggctctactgtctggaacgtggaagaacaccggtacggtgctagtcaggagcaaagagaacgggagagagaactccactcacctgcccaggtggatgtctctcgaaatctgagctttatggcccgatttagcgaactccagtggaggatgctcgccctgcggagcgatgattcggagcacaaatattcgagctcaccactagaatgggtcaccctggacaccaatatagcctactggttacacccgcgtacaagtgcccagattcatctcctcggcaatattgtgatctgggtgtctgggagtctcgctctcgccatctatgcattattatctctgtggtacttactgaggcggcgtaggaatgtacacgacctgccccaggacgcctggttgcgatgggtgctggccggagcgttgtgcgccggtggttgggcagtaaattatctacctttcttcctcatggagaagactctgtttttatatcactatctccctgccttgacattccagatcctccttctgccagtggtgcttcaacatatctccgatcacctgtgcaggtctcagctccagagatctatcttctctgccctggtggttgcttggtactcaagtgcttgccacgtgtcgaataccctccgccccctcacctacggcgacaaatccctatctccccacgagctcaaggccctgaggtggaaggactcttgggacatacttatccgtaagcattag

SEQ ID NO: 51933 - DNA, 507 bp, Artificial Sequence
  derived and/or modified sequence
atggcctatcaaattgttctcgagcttcatttctctcattgcgccgctatgggggctgccctcctgatgcttattgaaaatgctttgataactcagagccggctcatgctgctggagagcgttctgatattttttaatctgttggctgtgctcagctatttgaagttctttaattgccaaaaacattcacccttttcactttcatggtggttttggttgacactgaccggcgtggcgtgctcctgtgccgtgggtataaagtatatgggggtgtttacatatgtcttagtactcggagtggctgccgtgcacgcatggcacctattgggagatcagacacttagtaacgtctgcgtgttttgccaccttctggccagagcagtggccctcttggtgattcctgtagtgctgtatttgctgtttttctatgttcacttaatattggtcttccgctctggtccccacgaccagattatgtcctccgcattccaggcatctttggaatag

SEQ ID NO: 51934 - DNA, 1398 bp, Artificial Sequence
  derived and/or modified sequence
atggcaatcttttgtggcaccgagctggagcaggtgtgcgtattttgtcacctgttagcaagggccgtggcgctgctggtgattccagtggtcctctacctattgtttttttatgttcatttgatcctagtcttccggagcggcccccacgaccaaatcatgagctccgcctttcaggcaagccttgaaggcggtctggcacgcatcacccaaggtcagcctctggaagtggcttttgggtcacaggtgaccctcaggaacgtgtttggaaaacccgtgccctgttggttgcatagtcaccaggatacctatcctatgatttacgagaacggccgcggatcttcacaccagcaacaggtgacttgctatcccttcaaagatgttaataattggtggatcgtaaaagaccctcgtcggcaccagttggttgtgtcctccccacctaggccagtcagacacggcgacatggtgcagttagtccatgggatgaccacaagatccctgaatacgcacgacgtggcagcgcccctaagcccacactcccaggaggtcagttgttacatagactataacatttccatgccagcccagaatttgtggcgtctagagatagtgaaccgaggctcagataccgacgtctggaaaactatactttcggaggtgagatttgtgcatgtgaatacgtctgctgtgctcaaacttagcggcgcccatctcccggactggggttaccgccagctggaaatcgtgggggaaaaactgtcacgcggctatcacgggtctactgtgtggaatgtggaggaacatagatacggagccagccaggagcagagagagcgcgagagagagctgcattcccccgcccaagtcgatgtcagccgtaatctttcttttatggccaggttcagcgaactgcaggcccagattcacctactgggcaacatcgtcatctgggtgtctggttcactggccctcgctatttatgccttgctgtccctctggtatcttctgcggagaagaagaaacgtgcacgacctgcctcaggacgcctggctcaggtgggttctcgccggcgctctctgtgctgggggatgggcggtaaactatttaccttttttcctgatggaaaagaccctatttctttatcattatctgccagcactcaccttccagatcttgctgctgcccgtggtcctgcagcacataagtgaccatctctgcagatcacagctccaaagaagcatcttctctgcactggtggtggcctggtactcatcggcatgccacgtgtcgaacaccctgaggcctctgacatacggagataagtcgctgtctccccatgaattaaaagctctccgatggaaagactcttgggatatcctcattaggaagcattag

SEQ ID NO: 51935 - DNA, 1827 bp, Artificial Sequence
  derived and/or modified sequence
atggcctaccagatcgtgctggagctgcacttcagccactgtgccgccatgggcgccgccctgctgatgctgattgaaaatgccctgatcacccagagccggctgatgctgctggagagcgtgctgatcttcttcaacctgctggccgtgctgagctacctgaagttcttcaactgccagaagcacagccccttcagcctgtcctggtggttctggctgaccctgactggagtggcctgcagctgtgctgtgggcatcaagtacatgggcgtcttcacctacgtgctggtgctgggcgtggccgctgtgcacgcctggcacctgctgggggaccagaccctgagcaatgtgtgtgtgttctgccacctgctggcccgggctgtggccctgctggtgattcctgtggtgctgtacctgctcttcttctacgtgcacctgatcctggtgttccgcagcggcccccatgaccagatcatgagcagcgccttccaggccagcctggagggcggcctggcccgcatcacccagggccagcccctggaggtggccttcggcagccaggtgaccctgagaaatgtgtttgggaagcctgtgccctgctggctgcacagccaccaggacacctaccccatgatctatgaaaatggccggggcagcagccaccagcagcaggtgacctgctaccccttcaaggatgtgaacaactggtggatcgtgaaggaccccaggaggcaccagctggtggtgagcagcccccccaggcctgtgcgccacggggacatggtgcagctggtgcacggcatgaccaccaggagcctgaacacccatgatgtggccgcccccctgagcccccacagccaggaggtgtcctgctacatcgactacaacatctccatgcctgcccagaacctgtggaggctggagatcgtgaacagaggaagtgacacagatgtgtggaagaccatcctgtctgaggtgcgctttgtgcacgtgaacaccagcgctgtgctgaagctgagcggggcccacctgcctgactggggctaccggcagctggagatcgtgggggagaagctgagccggggctaccacggcagcacagtgtggaatgtggaggagcaccgctacggggccagccaggagcagcgggagcgggagcgggagctgcacagccctgcccaggtggatgtgtccaggaacctgtccttcatggcccgcttcagcgagctgcagtggaggatgctggccctgcggagtgatgacagcgagcacaagtacagcagcagccccctggagtgggtgaccctggacaccaacatcgcctactggctgcaccccaggaccagcgcccagatccacctgctgggcaacatcgtcatctgggtgtctggcagcctggccctggccatctatgccctgctgagcctgtggtacctgctgcggaggagaagaaatgtgcatgacctgccccaggatgcctggctgcgctgggtgctggccggggccctgtgtgccggcggctgggccgtgaactacctgcccttcttcctgatggagaagaccctcttcctgtaccactacctgcctgccctgaccttccagatcctgctgctgcctgtggtgctgcagcacatcagtgaccacctgtgccgcagccagctgcagaggagcatcttcagcgccctggtggtggcctggtacagcagcgcctgccacgtgagcaacaccctgcggcccctgacctacggggacaagagcctgagcccccatgagctgaaggccctgcgctggaaggacagctgggacatcctgatcaggaagcactag

SEQ ID NO: 51936 - DNA, 507 bp, Artificial Sequence
  derived and/or modified sequence
atggcctaccagatcgtgctggagctgcacttcagccactgtgccgccatgggcgccgccctgctgatgctgattgaaaatgccctgatcacccagagccggctgatgctgctggagagcgtgctgatcttcttcaacctgctggccgtgctgagctacctgaagttcttcaactgccagaagcacagccccttcagcctgtcctggtggttctggctgaccctgactggagtggcctgcagctgtgctgtgggcatcaagtacatgggcgtcttcacctacgtgctggtgctgggcgtggccgctgtgcacgcctggcacctgctgggggaccagaccctgagcaatgtgtgtgtgttctgccacctgctggcccgggctgtggccctgctggtgattcctgtggtgctgtacctgctcttcttctacgtgcacctgatcctggtgttccgcagcggcccccatgaccagatcatgagcagcgccttccaggccagcctggagtag

SEQ ID NO: 51937 - DNA, 1398 bp, Artificial Sequence
  derived and/or modified sequence
atggccatcttctgtggcacagagctggagcaggtgtgtgtgttctgccacctgctggcccgggctgtggccctgctggtgattcctgtggtgctgtacctgctcttcttctacgtgcacctgatcctggtgttccgcagcggcccccatgaccagatcatgagcagcgccttccaggccagcctggagggcggcctggcccgcatcacccagggccagcccctggaggtggccttcggcagccaggtgaccctgagaaatgtgtttgggaagcctgtgccctgctggctgcacagccaccaggacacctaccccatgatctatgaaaatggccggggcagcagccaccagcagcaggtgacctgctaccccttcaaggatgtgaacaactggtggatcgtgaaggacccccggcggcaccagctggtggtgagcagcccccccaggcctgtgagacatggagacatggtgcagctggtgcacggcatgaccaccaggagcctgaacacccatgatgtggccgcccccctgagcccccacagccaggaggtgtcctgctacatcgactacaacatctccatgcctgcccagaacctgtggaggctggagatcgtgaacagaggaagtgacacagatgtgtggaagaccatcctgtctgaggtgcgctttgtgcacgtgaacaccagcgctgtgctgaagctgagcggggcccacctgcctgactggggctaccggcagctggagatcgtgggggagaagctgagccggggctaccacggcagcacagtgtggaatgtggaggagcacagatatggagccagccaggagcagcgggagcgggagcgggagctgcacagccctgcccaggtggatgtgtccaggaacctgtccttcatggcccgcttcagcgagctgcaggcccagatccacctgctgggcaacatcgtcatctgggtgtctggcagcctggccctggccatctatgccctgctgagcctgtggtacctgctgcggaggagaagaaatgtgcatgacctgccccaggatgcctggctgcgctgggtgctggccggggccctgtgtgccggcggctgggccgtgaactacctgcccttcttcctgatggagaagaccctcttcctgtaccactacctgcctgccctgaccttccagatcctgctgctgcctgtggtgctgcagcacatcagtgaccacctgtgccgcagccagctgcagaggagcatcttcagcgccctggtggtggcctggtacagcagcgcctgccacgtgagcaacaccctgcggcccctgacctatggagacaagagcctgagcccccatgagctgaaggccctgcgctggaaggacagctgggacatcctgatcaggaagcactag

SEQ ID NO: 51938 - DNA, 1827 bp, Artificial Sequence
  derived and/or modified sequence
atggcctaccagatcgtgctggagctgcacttcagccactgcgccgccatgggcgccgccctccttatgctgatagagaatgctctgattacccagtctaggctgatgcttctggaatctgtactaatcttcttcaacctgctggcagtgctgtcttacctaaagttttttaactgtcagaagcattccccattttcactgtcttggtggttctggttgactcttaccggcgttgcgtgcagctgtgcggttggaattaaatacatgggagtattcacgtacgtcctggttctgggcgttgctgccgttcacgcctggcacctgctgggcgatcagacactatctaacgtttgcgtgttctgccacttgctcgcaagagccgttgccctcctcgtgatccccgtggtgctttatctgctgttcttctatgtgcatctgatcctggtgttccgcagcggcccccacgaccagataatgtcgtcggctttccaggcctcgctcgagggaggactggcgcggattacccaggggcagcccctcgaagtagcctttgggtcccaagtcaccctgagaaatgtttttggaaaacctgtgccctgctggctgcactcacaccaggacacataccctatgatttatgagaatggcaggggctcgagccaccagcaacaggtgacatgctaccccttcaaagatgtgaacaactggtggatcgtgaaggatccccggcgtcatcaacttgtggttagctccccccccagaccagttcgacatggggatatggtacagctcgtccatgggatgaccacccgaagcctgaatacacacgatgtggcagcaccactttcacctcactctcaagaggtgtcgtgctacattgattacaacatcagcatgcccgcacagaatctctggcgcctggaaattgttaaccgagggtctgatactgacgtgtggaagacaatactcagcgaagttaggttcgtccacgttaacacctctgctgtgttgaagctgagcggggctcatctgcctgactgggggtaccggcaactcgagatcgtaggcgaaaaacttagcaggggctaccacggctctacagtgtggaatgtcgaggagcacagatatggtgccagccaagagcagcgcgaaagagagcgcgaattgcattcccccgcacaggtcgacgtcagtcgtaacctttcattcatggcccggttctccgagctgcaatggaggatgctggcgctgcgcagcgatgactctgaacacaaatattcaagctctcccttggagtgggtgactctggataccaacatcgcttactggttgcatcctcgcacaagcgcacagatccacttgctgggcaacatcgtcatatgggtatcaggctctcttgctctggccatttatgccctgctatccctgtggtatctgctgcggaggaggagaaatgtgcacgacttgccccaggatgcctggctgcgttgggtactggctggcgcactctgcgcaggaggctgggctgtcaattacctgcctttctttctgatggaaaaaaccctatttctgtatcattatttacctgctctcactttccagattctgctcctgcccgtagtgcttcaacatatctccgatcatttgtgtagaagccagttacagcgtagcattttctcagctttggtcgtagcttggtactcctctgcgtgccacgtgtctaatactctgagacccctcacatatggtgacaagtcgctaagcccccatgagctcaaggccttaaggtggaaggactcctgggatatcctgatcaggaagcactag

SEQ ID NO: 51939 - DNA, 507 bp, Artificial Sequence
  derived and/or modified sequence
atggcctaccagatcgtgctggagctgcacttcagccactgcgccgcaatgggagccgcgctgcttatgcttatcgagaatgctcttattactcagtccaggctgatgctgctcgagtccgtcctgatctttttcaacctactggcagtgctcagttatctaaagttttttaattgccagaaacattcacctttctccctgtcctggtggttttggctgacactaacaggtgtggcttgtagttgcgccgtcggtatcaaatatatgggagtcttcacctacgttctggtcctgggtgtggccgccgtgcatgcctggcacttgttgggcgatcaaacgttgtcaaacgtgtgtgtcttttgccatctgctggcccgcgcggtggcgctcttggtaattccggtcgtcctgtacttattgtttttctatgtacatctgattctcgtgttccggtccggcccccatgatcagattatgtcttctgcattccaggcctctctcgaatag

SEQ ID NO: 51940 - DNA, 1398 bp, Artificial Sequence
  derived and/or modified sequence
atggccatcttctgcggcaccgagctggagcaggtgtgcgtgttctgccacctgttagccagggctgtcgccctccttgtgatcccagtggtattgtacctcctgttcttctatgtccatttaatcctcgtgttcaggtctggcccccacgatcaaatcatgtcctctgcttttcaggcctcactcgagggtggtcttgcgagaatcacccagggccagcccttggaggtggcatttggcagccaagtgacactccgtaacgtgtttggaaaacccgtcccttgttggctacattcacaccaggacacctaccctatgatctacgaaaacggcagggggagcagccaccagcaacaagtcacctgttatccttttaaagacgttaataattggtggatcgtcaaagatccacggcggcatcagttggttgttagctcccctccccggcctgtgcgtcacggtgatatggtccagttggtccatggaatgacaactcgcagcttgaacacccacgacgtggcagcccccctgagtccccatagtcaagaagtctcatgctacattgactacaacatctccatgcctgctcagaacctgtggagacttgaaattgtgaatcgtggaagcgataccgatgtgtggaagaccatactcagcgaagttcgcttcgtccacgtcaataccagcgccgtgcttaagcttagtggtgctcacctgcctgactggggctataggcagttggaaattgtaggtgagaaacttagcaggggctaccacggctccacagtgtggaacgtggaggaacaccgctacggcgcctcccaggagcaacgcgagcgtgaaagggagctgcattctcctgcacaggtcgatgtgtctagaaatcttagtttcatggcacgattctccgagttgcaggctcagattcatcttttggggaatatcgttatttgggtctctggcagcctggccctggccatttacgccctgctctctctctggtaccttttgcgaagaaggcggaacgttcatgacctgccgcaagacgcatggctgagatgggtgctggccggggcattatgtgctggcggctgggctgtgaactatctccccttttttctgatggagaaaacgctgttcttgtaccattacctgccggccctcacattccagatattgctcctaccagttgtgttacagcatatctcagaccacttatgcagaagccaactgcagagatcaattttcagcgccctcgtggtcgcttggtactcatccgcttgtcatgtctccaacactttacggccccttacctacggcgacaagtccttatcacctcacgaactgaaagctctacggtggaaggatagctgggatattttaatcagaaaacactag

SEQ ID NO: 51941 - DNA, 1827 bp, Artificial Sequence
  derived and/or modified sequence
atggcgtaccaaatcgtccttgagctacatttctcccattgcgctgcgatgggcgctgctctactgatgctgattgagaacgccttaatcacacagtccaggcttatgcttcttgagtctgtgcttattttctttaatttgctggccgttctctcctatctgaaattctttaactgccagaaacactctccttttagcctgtcctggtggttctggctaactttgacaggagtggcctgcagttgtgcagttgggattaaatacatgggcgtctttacttacgtcctggtgttgggggtggccgctgtccatgcctggcacctactgggagaccagactctttctaatgtttgcgtattctgccaccttcttgcaagagctgttgcactgttggtgatccctgtcgtcctgtatttgctgtttttttatgtgcacctcatcctggtgtttcggagcggtccacacgaccagatcatgtctagtgcattccaggcctccctcgaaggaggcctggctagaattacccagggccaacctctggaggtggcatttggatctcaggtgacactgcgaaatgtgtttgggaaacctgtcccatgctggctgcactcccaccaagatacttatcctatgatttatgagaacggtcgaggatccagccatcaacagcaggtgacttgctacccgtttaaagacgttaataattggtggatcgttaaggatcccagacgacatcaactcgtggtaagctcaccacccagaccggtccggcatggggacatggtccagctggtccatgggatgacgacccgtagcctcaatacgcacgacgtggccgctcccctgagcccccacagtcaggaggtctcttgttacatcgactacaacatctccatgcccgcacagaacctgtggaggctggagatagtaaatcgcggtagcgatacagatgtttggaagaccatactgtcagaggtgcgattcgttcacgtcaacaccagtgctgttttaaagctgagtggggctcacttgcccgactggggataccgtcagctagagatagtgggcgagaagctttcacgaggttaccacgggagcacggtctggaatgtggaggagcatcgctatggagcctcgcaggagcagcgcgaacgcgaacgcgagctccactctccagcccaagtggacgttagtcgaaatcttagtttcatggcgagattctccgaactgcagtggaggatgctggccctccgcagcgacgactcagagcataagtattctagttccccgctcgaatgggtcactctggacactaatatcgcctactggcttcaccccagaacctccgcacagatccacttgctgggcaacatagtgatttgggtctccggcagcctggccctggctatttacgctctcctgtcattatggtatttattgcggagaaggcgtaatgttcacgacttaccccaggatgcttggttgaggtgggtactggcaggggctctttgcgcaggaggatgggcggtaaactacctgccattcttcctaatggagaagaccctctttctgtatcattacctacctgccttgacgttccaaatactgctcctgcccgtggtgctgcagcacatttctgaccatttgtgtcgcagccaactgcagaggagtatcttctccgccttagtggtggcctggtacagctctgcatgccatgtgtctaacactttaaggccgctgacatacggcgacaaatctttatccccacacgagctcaaagcactccggtggaaagacagctgggacatattgattaggaaacactag

SEQ ID NO: 51942 - DNA, 507 bp, Artificial Sequence
  derived and/or modified sequence
atggcttaccaaatcgtgttagagttgcacttttctcactgcgccgcaatgggcgctgccctcttgatgctcatagaaaacgctctcatcacacaatctagacttatgttgctcgagagtgttttaatcttcttcaacttgctggctgtgctgtcttacctgaagtttttcaattgccagaaacattctccttttagtttgtcatggtggttctggcttacattaacaggggtggcctgttcgtgtgctgtcgggatcaaatacatgggcgtgtttacttatgttcttgttttgggggtggctgcagtgcacgcctggcatctgctgggggatcagaccctgagtaacgtctgcgtgttctgccatctcttggccagagccgtagcccttctggtaatccctgtcgtgctgtacctgctgttcttttacgtgcatctgatccttgtgttccgaagcggaccccacgaccagataatgtcttccgcctttcaggccagcttggaatag

SEQ ID NO: 51943 - DNA, 1398 bp, Artificial Sequence
  derived and/or modified sequence
atggcaatattctgcggtaccgagttagagcaggtgtgcgtgttctgtcacctgctagccagagctgtcgcgctgttagtgattcccgtggtgctctatctgctgtttttttacgtgcacctgatcttggtgtttaggtccggcccacacgaccaaattatgagctcagccttccaagctagtctggaaggcggactggcgagaatcacacagggccagcctctggaagtagcatttggctcgcaagtcaccttgaggaatgtctttggaaagcctgtgccctgttggctgcattctcaccaggacacgtaccctatgatatatgagaacgggaggggctcttcacaccagcagcaagtgacgtgctatcccttcaaggacgtgaataactggtggatcgtcaaggatcctagaagacatcagcttgtagtcagcagtccgccacggccagtccgccacggcgacatggtgcagctcgtgcacgggatgaccacacggtcgttgaatacacatgatgtggcggctcccctctccccccacagccaggaggtctcctgttacatcgactataacatatccatgcccgcacagaacctgtggcgcctagaaattgtgaatcgaggatcagacacagatgtctggaaaacaattttgagcgaagtgcgctttgtgcacgttaatacttccgccgtgctaaagctgtccggagcacatcttcctgactggggctataggcaactcgaaattgtgggggaaaagcttagtagagggtatcacgggagtacagtctggaacgtggaggagcacaggtatggcgcatcccaggaacagcgcgagcgagagcgagaattgcattcaccagctcaggtagatgtgtcccgaaacctgagcttcatggcacggtttagcgagctgcaggctcaaatccacctcctgggcaatatcgtaatttgggtcagcggcagtctcgcactcgccatttatgcactccttagtctatggtatctgcttagacgacggagaaacgtgcatgacttgccacaagacgcatggctgcgatgggtgctggctggggctctgtgcgctggcggttgggctgtgaattacctgccattcttcctcatggagaaaacactcttcttgtaccactacctgcctgcattaacatttcagatcctgctgctgcccgtggtgcttcagcacatttcagatcatctctgtcgtagccagttgcagagaagcattttttccgcactcgtcgtcgcatggtatagctccgcctgccacgtgtcaaacacactgcgcccacttacttacggtgacaaaagcctgtccccacatgagctgaaggccctgcgctggaaggattcttgggacattcttatcagaaaacactag

SEQ ID NO: 51944 - DNA, 1587 bp, Artificial Sequence
  derived and/or modified sequence
aacgttgagcagggcggtgggtggtgcggagtgccgagcggcctcacccccaaccgtcggcccagtcggacggttccgaggcgttgccgggagccgggcgcggctctgtgtggactcggagaaacgcgggttatttaggaggattcgatggcaattttttgtggaacagaattggagcaggtctgtgtgttctgtcacttgctcgcccgagcagtggctttgctggtcatcccggtcgtcctgtacttactgttcttctacgtccacttgattctagtcttccgctctgggccccacgaccaaatcatgtccagtgccttccaggccagcttagagggaggactagctcggatcactcagggtcagccactggaggtggcctttgggtcccaggtcactctgaggaacgtctttgggaaacctgtgccctgctggcttcattcccaccaggacacctaccccatgatatatgagaacggccgaggcagctcccaccagcaacaggtgacctgttaccccttcaaagatgtcaataactggtggattgtaaaggatcccaggaggcaccagctggtggtgagcagccctccgagacctgtgaggcacggggacatggtgcagctggtccacggcatgaccacccgctccctgaacacgcatgatgttgcagcccccctgagcccccattcacaggaggtctcctgctacattgactataacatctccatgcccgcccagaacctctggagactggaaattgtgaacagaggatctgacacagacgtctggaagaccatcctctcagaggtccgctttgtgcacgtgaacacttccgctgtcttaaagctgagcggggctcacctccctgactgggggtatcggcaactggagatcgtcggggagaagctgtcccggggctaccacgggagcacggtgtggaacgtggaggagcaccgatacggcgcgagccaggagcagagggagcgggaacgggagctgcactcacctgcgcaggtggacgtcagcaggaacctcagcttcatggcgagattctcggagctgcaggctcagatccacctacttggaaacatagtgatctgggtttcgggcagcctcgctctggccatctacgccctgctgtccttgtggtacctgctccgacggcgaagaaatgtccatgacctccctcaggatgcctggctgcgctgggtgctggctggggcgctgtgtgccggtggctgggcagtgaactacctcccgttcttcctgatggagaagacactcttcctctaccactacctgcccgcactcaccttccaaatccttctgctccctgtggtcctgcagcacatcagcgaccacctgtgcaggtcccagctccagaggagcatcttcagcgccctggtggtggcctggtactcctccgcgtgccacgtgtccaacacgctgcgcccactcacctacggggacaagtcactctcgccacatgaactcaaggcccttcgctggaaagacagctgggacatcttgatccgaaaacactagaacaagagtgtggcaaagaacacccgtgctggggtcgggatg

SEQ ID NO: 51945 - DNA, 1827 bp, Artificial Sequence
  derived and/or modified sequence
atggcctaccagatcgtgctggagctgcacttcagccactgcgccgccatgggcgccgccctgctgatgctgatcgagaacgccctgatcacccagagcagactgatgctgctggagagcgtgctgatcttcttcaacctgctggccgtgctgagctacctgaagttcttcaactgccagaagcacagccccttcagcctgagctggtggttctggctgaccctgaccggcgtggcctgcagctgcgccgtgggcatcaagtacatgggcgtgttcacctacgtgctggtgctgggcgtggccgccgtgcacgcctggcacctgctgggcgaccagaccctgagcaacgtgtgcgtgttctgccacctgctggccagagccgtggccctgctggtgatccccgtggtgctgtacctgctgttcttctacgtgcacctgatcctggtgttcagaagcggcccccacgaccagatcatgagcagcgccttccaggccagcctggagggcggcctggccagaatcacccagggccagcccctggaggtggccttcggcagccaggtgaccctgagaaacgtgttcggcaagcccgtgccctgctggctgcacagccaccaggacacctaccccatgatctacgagaacggcagaggcagcagccaccagcagcaggtgacctgctaccccttcaaggacgtgaacaactggtggatcgtgaaggaccccagaagacaccagctggtggtgagcagcccccccagacccgtgagacacggcgacatggtgcagctggtgcacggcatgaccaccagaagcctgaacacccacgacgtggccgcccccctgagcccccacagccaggaggtgagctgctacatcgactacaacatcagcatgcccgcccagaacctgtggagactggagatcgtgaacagaggcagcgacaccgacgtgtggaagaccatcctgagcgaggtgagattcgtgcacgtgaacaccagcgccgtgctgaagctgagcggcgcccacctgcccgactggggctacagacagctggagatcgtgggcgagaagctgagcagaggctaccacggcagcaccgtgtggaacgtggaggagcacagatacggcgccagccaggagcagagagagagagagagagagctgcacagccccgcccaggtggacgtgagcagaaacctgagcttcatggccagattcagcgagctgcagtggagaatgctggccctgagaagcgacgacagcgagcacaagtacagcagcagccccctggagtgggtgaccctggacaccaacatcgcctactggctgcaccccagaaccagcgcccagatccacctgctgggcaacatcgtgatctgggtgagcggcagcctggccctggccatctacgccctgctgagcctgtggtacctgctgagaagaagaagaaacgtgcacgacctgccccaggacgcctggctgagatgggtgctggccggcgccctgtgcgccggcggctgggccgtgaactacctgcccttcttcctgatggagaagaccctgttcctgtaccactacctgcccgccctgaccttccagatcctgctgctgcccgtggtgctgcagcacatcagcgaccacctgtgcagaagccagctgcagagaagcatcttcagcgccctggtggtggcctggtacagcagcgcctgccacgtgagcaacaccctgagacccctgacctacggcgacaagagcctgagcccccacgagctgaaggccctgagatggaaggacagctgggacatcctgatcagaaagcactag

SEQ ID NO: 51946 - DNA, 507 bp, Artificial Sequence
  derived and/or modified sequence
atggcctaccagatcgtgctggagctgcacttcagccactgcgccgccatgggcgccgccctgctgatgctgatcgagaacgccctgatcacccagagcagactgatgctgctggagagcgtgctgatcttcttcaacctgctggccgtgctgagctacctgaagttcttcaactgccagaagcacagccccttcagcctgagctggtggttctggctgaccctgaccggcgtggcctgcagctgcgccgtgggcatcaagtacatgggcgtgttcacctacgtgctggtgctgggcgtggccgccgtgcacgcctggcacctgctgggcgaccagaccctgagcaacgtgtgcgtgttctgccacctgctggccagagccgtggccctgctggtgatccccgtggtgctgtacctgctgttcttctacgtgcacctgatcctggtgttcagaagcggcccccacgaccagatcatgagcagcgccttccaggccagcctggagtag

SEQ ID NO: 51947 - DNA, 1398 bp, Artificial Sequence
  derived and/or modified sequence
atggccatcttctgcggcaccgagctggagcaggtgtgcgtgttctgccacctgctggccagagccgtggccctgctggtgatccccgtggtgctgtacctgctgttcttctacgtgcacctgatcctggtgttcagaagcggcccccacgaccagatcatgagcagcgccttccaggccagcctggagggcggcctggccagaatcacccagggccagcccctggaggtggccttcggcagccaggtgaccctgagaaacgtgttcggcaagcccgtgccctgctggctgcacagccaccaggacacctaccccatgatctacgagaacggcagaggcagcagccaccagcagcaggtgacctgctaccccttcaaggacgtgaacaactggtggatcgtgaaggaccccagaagacaccagctggtggtgagcagcccccccagacccgtgagacacggcgacatggtgcagctggtgcacggcatgaccaccagaagcctgaacacccacgacgtggccgcccccctgagcccccacagccaggaggtgagctgctacatcgactacaacatcagcatgcccgcccagaacctgtggagactggagatcgtgaacagaggcagcgacaccgacgtgtggaagaccatcctgagcgaggtgagattcgtgcacgtgaacaccagcgccgtgctgaagctgagcggcgcccacctgcccgactggggctacagacagctggagatcgtgggcgagaagctgagcagaggctaccacggcagcaccgtgtggaacgtggaggagcacagatacggcgccagccaggagcagagagagagagagagagagctgcacagccccgcccaggtggacgtgagcagaaacctgagcttcatggccagattcagcgagctgcaggcccagatccacctgctgggcaacatcgtgatctgggtgagcggcagcctggccctggccatctacgccctgctgagcctgtggtacctgctgagaagaagaagaaacgtgcacgacctgccccaggacgcctggctgagatgggtgctggccggcgccctgtgcgccggcggctgggccgtgaactacctgcccttcttcctgatggagaagaccctgttcctgtaccactacctgcccgccctgaccttccagatcctgctgctgcccgtggtgctgcagcacatcagcgaccacctgtgcagaagccagctgcagagaagcatcttcagcgccctggtggtggcctggtacagcagcgcctgccacgtgagcaacaccctgagacccctgacctacggcgacaagagcctgagcccccacgagctgaaggccctgagatggaaggacagctgggacatcctgatcagaaagcactag

SEQ ID NO: 51948 - protein, 179 aa, Artificial Sequence
  derived and/or modified sequence
MAAAAEERMAEEGGGGQGDGGSSLASGSTQRQPPPPAPQHPQPGSQALPAPALAPDQLPQNNTLVALPIVAIENILSFMSYDEISQLRLVCKRMDLVCQRMLNQGFLKVERYHNLCQKQVKAQLPRRESERRNHSLARHADILAAVETRLSLLNMTFMKYVDSNLCCFIPGKFQDRLQP

SEQ ID NO: 51949 - DNA, 1334 bp, Artificial Sequence
  derived and/or modified sequence
aaggaatcaagcccccaagatggcggcagcggcggaggagcggatggcagaggaaggaggcggcggccaaggcgacggcggttcctctttggcctccggctctacccagcgacagcctccaccgcccgcgccacagcacccgcagccggggtcccaggcgctcccagcccccgcgctggctccggaccagctgcctcaaaacaacacgcttgtggcgctgcccatcgtagccatcgagaacatcctcagctttatgtcctacgacgaaattagccagctccgcctggtttgtaaaagaatggacttggtctgccagagaatgttgaatcagggatttctgaaagtggagaggtaccataatctatgtcagaaacaagttaaagcacaactcccaaggagagagtcagaaaggagaaaccattcattagctcgtcatgcagacattcttgctgctgttgaaacaaggctgtcactattaaatatgactttcatgaaatatgtggattccaatctctgttgcttcatcccaggaaagttccaggaccgtctgcagccctaacaacaatgcagctcttctccaagcaaaatccttcaagacaagaggttaccaaactccagcagcaggttaaaacaaatggtgctggcgtgactgttctcaggcgtgaaatttctgagcttcgcaccaaagtgcaagaacagcaaaaacagcttcaagaccaggaccagaaactgctagagcagacccagatcataggtgaacaaaatgcacggttggcagagctagaacgcaaactacgagaagtaatggaaagtgctgtaggaaattcctcagggtccgggcagaatgaggagtctcctcggaaacgaaaaaaggccacggaagccatagactctcttaggaaatctaaacgtcttcggaatagaaagtaaattggaatgtggttctagttccagaggaagacacagcttagtagcttaagcagttatgcatatcaggatactgtgagcaacatggtgtcccttaagcttctaggctttcagaacacaacttaaacttgaactcttatggttgggacattcttttcctgcttctcctgattgaactgatgcacagaatctttttactttgcaatagatttgtactaaccagacctgttctatcatgttttgaggagttaacttttttctgtgcagataatgttgaaagtaagttaatttgtttctgcatatatgcacatacatacgtaaggatcttaaacccagtcttgacagactagaagttaagtttaatacagaaaatgtcctgttcacttgaaagaaaagacctacttttt

SEQ ID NO: 51950 - DNA, 540 bp, Artificial Sequence
  derived and/or modified sequence
atggccgctgccgcagaagagcggatggctgaggagggcggtggtggacagggcgatggaggatcatccctggcaagtgggtctactcagaggcaaccgcctcctcccgctccgcaacatccccagccaggctcacaggctctgccagcacctgccctggcacctgaccaacttccgcagaacaataccctggtagcactccctattgttgccattgagaacattttatcttttatgtcctatgatgaaattagtcagttacgcctcgtctgcaaaaggatggatttggtatgccagcgcatgctcaaccagggattcctgaaggtagagcgctatcacaatctgtgccaaaaacaggtgaaggcccagctgccaaggcgggaatcggagagaagaaaccacagccttgcacgacacgctgacattctggcagcggtggagacaaggctgtctctgctgaatatgaccttcatgaaatatgtcgactcgaatctttgctgtttcatcccaggtaaattccaggatagacttcagccatag

SEQ ID NO: 51951 - DNA, 540 bp, Artificial Sequence
  derived and/or modified sequence
atggctgctgctgctgaggagaggatggccgaggagggcggcggcggccagggagatggcggcagcagcctggccagcggcagcacccagaggcagcccccacctccagccccccagcacccccagcccggcagccaggccctgcctgccccagccctggccccagaccagctgccccagaacaacaccctggtggccctgcccatcgtggccatcgagaacatcctgtccttcatgtcctatgatgagatcagccagctgcggctggtgtgcaagaggatggacctggtgtgccagaggatgctgaaccagggcttcctgaaggtggagcgctaccacaacctgtgccagaagcaggtgaaggcccagctgccccggcgggagagcgagaggaggaaccacagcctggcccggcatgctgacatcctggccgctgtggagacccggctgagcctgctgaacatgaccttcatgaagtatgtggacagcaacctgtgctgcttcatccctgggaagttccaggaccggctgcagccctag

SEQ ID NO: 51952 - DNA, 540 bp, Artificial Sequence
  derived and/or modified sequence
atggccgccgccgccgaggagcggatggccgaggagggcggcggcgggcaaggggatggagggagttccctcgcctccggctcaacccagcgacaaccacccccgcccgcccctcaacatccccagcccgggtcgcaggctctgccggctccggcgttagcacccgatcaattgccgcaaaataatactctggtggctcttcctatagtggcaatcgagaatattctctcctttatgagctacgatgaaatctcccagctgaggttggtatgcaaaagaatggacctcgtctgccagcgaatgctcaatcagggttttcttaaagttgaaaggtaccacaatctttgtcagaagcaagtcaaagcccagttgccacggagagaatcagagcgacgcaaccactcactcgcccggcatgcggatatcctggcagctgtggaaacccgtctgtccctcctgaatatgactttcatgaagtatgttgattctaacttgtgttgcttcatccccggcaagttccaagatcgtctccagccttag

SEQ ID NO: 51953 - DNA, 540 bp, Artificial Sequence
  derived and/or modified sequence
atggctgcggctgctgaagagaggatggccgaggaaggaggcggtgggcaaggtgacggcggatcctcgctggcttcagggtctacgcagaggcagccgccaccccctgcccctcagcacccacagccaggttcgcaggccctgcccgcacccgcactggcccctgatcagttaccccaaaataataccctggttgctcttccaatcgttgccatagaaaatattttgtcctttatgtcttatgacgagatttcacagcttaggctcgtctgcaagcggatggaccttgtgtgccagcggatgctgaaccagggattccttaaggtggaacgctatcacaatttgtgccagaaacaggtgaaagcacaattgcccaggagggagtccgagaggcgcaaccattcccttgcgcgtcatgccgacatactagccgctgtggaaaccagactatccctgctgaacatgacttttatgaagtatgttgattctaatctgtgctgtttcatccccggaaagttccaggaccgactgcagccatag

SEQ ID NO: 51954 - DNA, 540 bp, Artificial Sequence
  derived and/or modified sequence
atggccgccgccgccgaggagagaatggccgaggagggcggcggcggccagggcgacggcggcagcagcctggccagcggcagcacccagagacagccccccccccccgccccccagcacccccagcccggcagccaggccctgcccgcccccgccctggcccccgaccagctgccccagaacaacaccctggtggccctgcccatcgtggccatcgagaacatcctgagcttcatgagctacgacgagatcagccagctgagactggtgtgcaagagaatggacctggtgtgccagagaatgctgaaccagggcttcctgaaggtggagagataccacaacctgtgccagaagcaggtgaaggcccagctgcccagaagagagagcgagagaagaaaccacagcctggccagacacgccgacatcctggccgccgtggagaccagactgagcctgctgaacatgaccttcatgaagtacgtggacagcaacctgtgctgcttcatccccggcaagttccaggacagactgcagccctag

SEQ ID NO: 51955 - protein, 1186 aa, Artificial Sequence
  derived and/or modified sequence
MTRRCMPARPGFPSSPAPGSSPPRCHLRPGSTAHAAAGKRTESPGDRKQSIIDFFKPASKQDRHMLDSPQKSNIKYGGSRLSITGTEQFERKLSSPKESKPKRVPPEKSPIIEAFMKGVKEHHEDHGIHESRRPCLSLASKYLAKGTNIYVPSSYHLPKEMKSLKKKHRSPERRKSLFIHENNEKNDRDRGKTNADSKKQTTVAEADIFNNSSRSLSSRSSLSRHHPEESPLGAKFQLSLASYCRERELKRLRKEQMEQRINSENSFSEASSLSLKSSIERKYKPRQEQRKQNDIIPGKNNLSNVENGHLSRKRSSSDSWEPTSAGSKQNKFPEKRKRNSVDSDLKSTRESMIPKARESFLEKRPDGPHQKEKFIKHIALKTPGDVLRLEDISKEPSDETDGSSAGLAPSNSGNSGHHSTRNSDQIQVAGTKETKMQKPHLPLSQEKSAIKKASNLQKNKTASSTTKEKETKLPLLSRVPSAGSSLVPLNAKNCALPVSKKDKERSSSKECSGHSTESTKHKEHKAKTNKADSNVSSGKISGGPLRSEYGTPTKSPPAALEVVPCIPSPAAPSDKAPSEGESSGNSNAGSSALKRKLRGDFDSDEESLGYNLDSDEEEETLKSLEEIMALNFNQTPAATGKPPALSKGLRSQSSDYTGHVHPGTYTNTLERLVKEMEDTQRLDELQKQLQEDIRQGRGIKSPIRIGEEDSTDDEDGLLEEHKEFLKKFSVTIDAIPDHHPGEEIFNFLNSGKIFNQYTLDLRDSGFIGQSAVEKLILKSGKTDQIFLTTQGFLTSAYHYVQCPVPVLKWLFRMMSVHTDCIVSVQILSTLMEITIRNDTFSDSPVWPWIPSLSDVAAVFFNMGIDFRSLFPLENLQPDFNEDYLVSETQTTSRGKESEDSSYKPIFSTLPETNILNVVKFLGLCTSIHPEGYQDREIMLLILMLFKMSLEKQLKQIPLVDFQSLLINLMKNIRDWNTKVPELCLGINELSSHPHNLLWLVQLVPNWTSRGRQLRQCLSLVIISKLLDEKHEDVPNASNLQVSVLHRYLVQMKPSDLLKKMVLKKKAEQPDGIIDDSLHLELEKQAYYLTYILLHLVGEVSCSHSFSSGQRKHFVLLCGALEKHVKCDIREDARLFYRTKVKDLVARIHGKWQEIIQNCRPTQVSFCYTISCILNSFAEWHSSYCLK

SEQ ID NO: 51956 - DNA, 3712 bp, Artificial Sequence
  derived and/or modified sequence
ccgccatgaagagagaagggggtgccgcccacctctgctccgacagcctcccggagtcccagcagcaagacggcaaccacgcacccaacttctccagccacggctcatgccgccgtcgccagcggcgccgacatgacaaggcgctgcatgcccgctaggccaggtttcccctcatccccagccccggggtcgtcgcccccgcgctgccatctgagacccggtagtaccgcccatgctgcagcgggaaagagaacagagagtcctggggacaggaagcagtcaattatagatttcttcaaaccagcttcaaaacaagacagacacatgttggattcaccacaaaaatcaaacatcaaatatggaggaagtagattgtctatcactgggacagagcagtttgaaaggaaactatcctcaccaaaagaatctaaacccaaaagggtgccaccagaaaagagccctattatagaagctttcatgaaaggtgttaaagagcaccatgaagatcatggtatacatgagtcacgtcggccttgtctgtcactagcctccaaatatttagccaaaggaacaaatatctatgttccttcttcatatcacttgccaaaggagatgaagtcactaaagaaaaaacatcgatccccagagagaaggaagtcactattcattcatgaaaataatgagaagaatgatagagatcgaggcaaaaccaatgcagactccaaaaagcagaccacagtggcagaagctgacatcttcaataacagctccagaagccttagcagcaggagcagcctgtccaggcaccacccggaagaaagcccactgggagctaaattccagttgtcactagcttcttactgcagagaacgagaactaaagaggttgagaaaggagcaaatggagcagagaatcaactccgagaattctttctcagaagcaagcagtctttccttaaaatctagtatagaaagaaaatataaaccaaggcaggaacaaaggaaacagaatgacatcatacctggaaaaaataatctgtcaaatgtggaaaatggacatctctcaagaaaaagatcctcttctgattcatgggaacctacttcagcaggctctaagcagaataaattccctgaaaaaagaaaaaggaactctgtggactcagatctgaaaagcacaagagaatctatgataccaaaagcaagagagtccttccttgagaagcgtcctgatggaccacatcagaaagaaaaatttataaaacatattgcactgaagacacctggtgatgtgttgcgcttagaagatatatccaaggaaccgagtgatgaaactgatggctcttctgcaggcttggcaccttcaaattctggcaattctggccaccattctaccaggaatagtgaccaaatccaagtggcaggtaccaaggagactaagatgcagaaaccccacttacctttatctcaggaaaagtctgcaattaaaaaagctagcaaccttcagaaaaataaaaccgctagctccacgacaaaggagaaggagacaaaactacctttactttcccgtgttccaagtgctggttcctctctagtaccattaaatgctaaaaattgtgctcttccagtttctaaaaaagataaagagcgttcctcatctaaagaatgttctgggcattctacagaatccaccaaacacaaggaacacaaagcaaagactaataaggccgattctaatgtatcttcagggaaaatttctgggggacctttgcgctcagaatatggcactcctacaaagtctccccctgctgctttggaagttgtgccatgtatcccaagccctgcagcaccttcagataaagccccttcagaaggagagagttcaggaaattccaatgcaggtagcagtgcactgaaaagaaaactaaggggtgattttgatagtgatgaagaaagtttaggttacaacctagacagtgatgaggaagaggaaacattaaagtcactggaagaaataatggctttgaacttcaatcagactcctgcagctacaggaaagcctcctgctctttccaaggggcttagatctcagtcatcagactatacaggacatgttcatcctggaacttacacaaataccttagaacgtctagtgaaggaaatggaagacacacaaaggctagatgaactgcagaagcaactacaagaagacataaggcaaggccgaggcattaaatccccaatcagaattggagaagaagacagtacagatgatgaggatggcctcttagaagagcacaaggaatttctaaagaaattttcagttacaattgatgctattcctgatcatcatccaggtgaagaaatatttaatttcctcaattctggaaaaattttcaatcagtataccttggatttaagagactctggttttattggacaaagtgctgtagaaaaacttattcttaaatcgggaaaaacagatcagatttttttgacaacacaaggtttccttacgtctgcttatcactatgtccagtgtcctgtccctgtgttaaagtggctgtttcggatgatgtcagttcatacagactgtattgtgtcagtgcagattttaagtacattgatggaaataacaattagaaatgataccttcagtgactcaccagtttggccatggatcccatcattgtctgatgtagcagctgtgtttttcaatatggggattgattttagatctttgtttcccctggagaatcttcagccagactttaatgaagactatctagtttctgaaacacagacaacatcaagggggaaagaaagtgaagattcatcttataagccaattttttcaacacttcctgaaaccaacattttaaatgtggttaagtttctaggcttgtgtacatctatacatccagaaggttaccaggatcgtgaaataatgttgctgattttaatgttatttaaaatgagtttggaaaaacagctgaaacagattcctttagtagactttcaaagcctcctgataaacctgatgaaaaacatcagagattggaacacaaaggtgcctgaactctgtctgggcataaatgaactctccagtcatccccacaacctcctgtggttggtacagctggtccctaattggacatcacgtggaaggcaactgagacagtgcctcagtctagtgattatttcaaagcttttggatgagaaacacgaagatgttcctaatgccagtaatctgcaggtatcagtcctacatcgctatcttgtgcagatgaagccttctgatttgttaaagaaaatggtcttgaagaaaaaggctgaacaaccagatggcattattgatgacagtcttcatttagaacttgaaaagcaggcatattacctgacctacattcttcttcatttagtcggtgaagttagttgttctcattctttttcttctggacaacggaaacactttgtgctactctgtggggctttggaaaagcatgttaaatgtgatattagggaagatgcaagacttttttacagaactaaggtgaaagacttggtcgccaggatacatggaaaatggcaggaaataatccagaactgtcggcctactcaggtgtcattttgttatacaatttcatgtattcttaatagttttgctgaatggcactcttcatactgtttgaaataaaatagggtataacagtgca

SEQ ID NO: 51957 - DNA, 2931 bp, Artificial Sequence
  derived and/or modified sequence
acttccgaagagagaaccgccatgaagagagaagggggtgccgcccacctctgctccgacagcctcccggagtcccagcagcaagacggcaaccacgcacccaacttctccagccacggctcatgccgccgtcgccagcggcgccgacatgacaaggcgctgcatgcccgctaggccaggtttcccctcatccccagccccggggtcgtcgcccccgcgctgccatctgagacccggtagtaccgcccatgctgcagcgggaaagagaacagagagtcctggggacaggaagcagtcaattatagatttcttcaaaccagcttcaaaacaagacagacacatgttggattcaccacaaaaatcaaacatcaaatatggaggaagtagattgtctatcactgggacagagcagtttgaaaggaaactatcctcaccaaaagaatctaaacccaaaagggtgccaccagaaaagagccctattatagaagctttcatgaaaggtgttaaagagcaccatgaagatcatggtatacatgagtcacgtcggccttgtctgtcactagcctccaaatatttagccaaaggaacaaatatctatgttccttcttcatatcacttgccaaaggagatgaagtcactaaagaaaaaacatcgatccccagagagaaggaagtcactattcattcatgaaaataatgagaagaatgatagagatcgaggcaaaaccaatgcagactccaaaaagcagaccacagtggcagaagctgacatcttcaataacagctccagaagccttagcagcaggagcagcctgtccaggcaccacccggaagaaagcccactgggagctaaattccagttgtcactagcttcttactgcagagaacgagaactaaagaggttgagaaaggagcaaatggagcagagaatcaactccgagaattctttctcagaagcaagcagtctttccttaaaatctagtatagaaagaaaatataaaccaaggcaggaacaaaggaaacagaatgacatcatacctggaaaaaataatctgtcaaatgtggaaaatggacatctctcaagaaaaagatcctcttctgattcatgggaacctacttcagcaggctctaagcagaataaattccctgaaaaaagaaaaaggaactctgtggactcagatctgaaaagcacaagagaatctatgataccaaaagcaagagagtccttccttgagaagcgtcctgatggaccacatcagaaagaaaaatttataaaacatattgcactgaagacacctggtgatgtgttgcgcttagaagatatatccaaggaaccgagtgatgaaactgatggctcttctgcaggcttggcaccttcaaattctggcaattctggccaccattctaccaggaatagtgaccaaatccaagtggcaggtaccaaggagactaagatgcagaaaccccacttacctttatctcaggaaaagtctgcaattaaaaaagctagcaaccttcagaaaaataaaaccgctagctccacgacaaaggagaaggagacaaaactacctttactttcccgtgttccaagtgctggttcctctctagtaccattaaatgctaaaaattgtgctcttccagtttctaaaaaagataaagagcgttcctcatctaaagaatgttctgggcattctacagaatccaccaaacacaaggaacacaaagcaaagactaataaggccgattctaatgtatcttcagggaaaatttctgggggacctttgcgctcagaatatggcactcctacaaagtctccccctgctgctttggaagttgtgccatgtatcccaagccctgcagcaccttcagataaagccccttcagaaggagagagttcaggaaattccaatgcaggtagcagtgcactgaaaagaaaactaaggggtgattttgatagtgatgaagaaagtttaggttacaacctagacagtgatgaggaagaggaaacattaaagtcactggaagaaataatggctttgaacttcaatcagactcctgcagctacaggaaagcctcctgctctttccaaggggcttagatctcagtcatcagactatacaggacatgttcatcctggaacttacacaaataccttagaacgtctagtgaaggaaatggaagacacacaaaggtttgttagcataaagattaatttgctaaatttaacattttgcttgtttgtgtggcttacttttaatttaccttttttaaaaaatcatgagaaattagcgtgcattttggactctgttgtcaactgtgttagaataagatatgttggccggacgcagtggctcatgcctgtaatcacaacactttgggagacccaggcaagattacttgagcccaggagttcaaggctgcggtgagtcgtgatggcgccacttcactgcagcctgggtggcagagtgagacccagtctcaaatgaaaaaaagaggccaggtgtgatggctcatgcctgtaatccagtactttaggaggccaaagcaggcaaatctcttgagcccaggagtttgagactagcctgggcaacatggtgaaaccccatctctacaaaaaatacaaaaattagccagtcatggtgccacatacctatggtcccagctactcaacaggctgaggttgggaggatcacctgagcccaaggaggtcaaggctgtagtgagctgtgattgagccactgcactccaatctgggtgacagaataagaccccgtctcaaaaaaaaaaaaagtggggggccaggcgcagtggctcacgcctgtaatcccagcactttgggaggccgaggcaggtggatcatgaggtcaggagatcgagaccatgctggctaacatggtgaaaccccatctctactaaaaaataaaaaaaaaaa

SEQ ID NO: 51958 - DNA, 3561 bp, Artificial Sequence
  derived and/or modified sequence
atgacacggcggtgtatgccggcaagaccaggattcccaagttccccggcacccggtagcagtccacctcgttgtcacctgaggcccggatccactgcccacgccgcagctggcaaaaggacagagtcccctggcgaccgcaaacagtctataatcgatttcttcaaaccggcgtccaagcaggatagacacatgttagacagcccacagaagtctaacattaagtatggcggcagccgcctgtcaataaccggcaccgaacagttcgaaagaaagctgtcctcaccaaaggagtcgaaacccaagagagtgccacctgagaagagcccgataatagaagcctttatgaaaggggtgaaagagcatcacgaagaccacggaatccatgagtcaaggagaccgtgcctgagtttggcttcaaagtacctcgcgaagggcactaacatttatgtcccttcttcatatcatctcccgaaagaaatgaagtctttgaagaagaaacatcggagcccagagcgccgaaagtccttgttcatccacgagaataacgaaaagaatgaccgggatcggggtaagactaacgcagactcaaaaaagcagacgacagtggcagaagccgatatctttaataacagcagtcgatctctgagttccaggagtagcctgtctcggcaccacccagaagaatctccactgggtgcaaagtttcagctctctctcgccagttactgcagagagcgggagctcaaacgactgcggaaggagcaaatggaacagcgaattaattctgagaactctttctcggaggcctcttccctgagtttgaagagtagcattgagagaaagtacaagcccaggcaggaacagaggaagcaaaatgatattatcccaggtaagaacaatctgtcgaatgtcgaaaatgggcacctatctcggaagcgtagctcttcggattcttgggaacccactagtgctggttctaagcagaacaagttccccgaaaaacgcaagaggaacagcgtagatagcgatctgaagagtactagggaaagcatgattcccaaggcaagagaatccttcctggagaagcgaccagacgggccacaccaaaaggagaagtttattaagcatattgctctcaagacccctggcgacgttctgagacttgaagacatcagcaaggagccgtccgatgagaccgacgggtcttcagccggacttgccccttcaaactctgggaatagcggccaccactcgactaggaacagtgaccagatccaggtggccggcactaaggaaacaaagatgcaaaagcctcatcttcccctcagtcaagaaaagtccgctatcaaaaaagcctccaacctccagaaaaataagaccgcctccagcacaacaaaggagaaagaaacaaagctgcccctgctctctcgggtgccatcagccgggtcaagccttgtccccctgaacgccaagaattgtgctctgcctgtgagcaagaaagacaaagagcgtagttcctctaaggaatgctcaggccactcgaccgagagtaccaagcacaaggaacacaaggcgaagacaaacaaggccgacagcaatgtgagctcagggaagattagtggtggcccccttcggtctgagtacggcacacctactaaaagccccccagcagcactagaagtcgtgccatgcatcccgtccccagctgcacctagtgataaggcacccagcgaaggagaatccagcgggaacagtaacgctggcagcagcgctctgaaacggaaattgcgcggtgactttgactcagacgaggagtcactcgggtacaacctcgactccgatgaggaggaagaaaccttaaagagtctggaggagattatggcattaaattttaaccagacacctgcggccaccggcaagccaccggctctctccaaagggttgcgctctcaatcttcagactataccggccacgttcacccaggtacttacaccaatacacttgaaaggctggtaaaggaaatggaagatacacagcgcctagatgagttgcagaagcagcttcaagaagatatcagacagggacgcggcataaagagtccaattaggatcggtgaagaagactcgacagacgacgaagacgggctgctggaggaacacaaagaattcttgaaaaagttctctgtgacgattgacgcaattccggatcaccacccaggcgaggagatcttcaactttctgaacagcgggaagatattcaatcagtataccttagacctaagagacagtggctttattggtcagagtgcagtagagaagctcatcctgaagagcggcaaaacagatcagatattccttacgacccagggatttctgacttccgcgtaccactacgttcagtgccccgtgcccgtcctgaagtggctcttccggatgatgagcgtacacactgactgcatcgtttcggttcagattttgtcgacactgatggaaattacgatccgtaatgacaccttcagcgatagccctgtgtggccatggattccctccctgtccgatgtggccgctgtgttctttaatatgggtattgacttccggagcttatttccattagaaaatctgcaacccgactttaacgaagattatcttgtttctgagacacagacaactagcaggggcaaggaatcggaggactcaagttacaaacccatcttttctacgctccccgagaccaacatcctgaatgtcgtgaagtttctggggttatgtaccagcatccaccccgagggataccaggaccgggagataatgttactgatcctgatgttgttcaagatgtctttggaaaagcaactgaagcagatccctcttgtcgatttccagtctctgcttattaacctgatgaaaaatattagggattggaacactaaggtacccgagctgtgtctggggatcaacgagctgagttctcatcctcacaacctgttgtggctcgtgcagctggtgcccaattggacctcacgggggcgacaactcaggcagtgcctctcactagtgattatctctaagctgctcgatgaaaaacacgaggacgttcctaatgcatccaatctgcaagtgagtgtgctccaccggtacttggtgcagatgaaaccttccgacttgctcaaaaaaatggtactgaaaaagaaggcagagcagccagatgggattattgatgattcccttcatctagaactggaaaagcaagcttattatctcacctatatcctcctgcacctcgttggtgaagtgagctgctctcactcatttagcagcgggcagcgaaaacactttgtcttgctttgtggggcacttgagaaacacgtgaaatgcgacattagggaggacgctcgcctcttctaccgcaccaaggtaaaagatctggttgcgcgaatccacggaaaatggcaggaaatcattcagaactgccgacccacacaggtctccttctgttacaccatttcttgcattctgaattcatttgccgagtggcattcctcttattgtctgaaatag

SEQ ID NO: 51959 - DNA, 2277 bp, Artificial Sequence
  derived and/or modified sequence
atgactcggcgctgcatgccagctaggccaggtttcccgtcctctcccgctcccggttcttctcccccgcggtgccacttgaggcccgggtccactgctcacgcagctgccggtaagaggacagagtcccctggcgacagaaaacagtccatcatcgatttcttcaaaccggctagcaaacaagatcgtcatatgctggactctccccagaagagtaatatcaagtacgggggcagtaggctctctattaccggcacggagcagttcgaacggaaactgtcatccccaaaagagagcaagccgaagagagtgccaccggagaaatcccctattattgaagccttcatgaagggggtgaaggaacatcacgaagaccatggaatccatgagtcaagacgtccttgtctcagtttagcaagcaagtacctcgcgaaagggacaaatatctacgttcctagcagttatcacctgccaaaggaaatgaaaagcctcaagaaaaagcatcggagccctgagcgcagaaagtcactctttatacatgagaacaacgaaaaaaatgatagggaccgggggaagaccaatgcagatagcaagaaacagacgacggtggccgaggcagacatttttaacaatagtagtcgatccctgtcctccagatctagtctgtcaagacatcatcctgaggaaagcccactgggggcgaagtttcaacttagtctcgccagttattgtagggagcgtgagctgaagcgcctgcgcaaagaacagatggaacagagaatcaattcagagaattcattctcggaggcatcaagcctgtccctgaagtcatctatcgagcgcaagtacaagccccggcaggaacagcgaaagcagaacgatatcatcccagggaagaataatttaagtaacgttgagaacggccacctatctagaaagcggtccagctccgattcttgggagcctactagtgcgggatctaagcaaaacaagttccctgaaaaaaggaagcgaaatagcgtggatagcgatctcaagagcaccagggagtctatgatcccaaaggcccgcgagtcattcctggagaaaaggccagatggcccccaccagaaagaaaagttcataaagcatatcgccctgaagacacctggggacgtgctgagactagaagatatcagcaaggaaccttctgatgaaacagatggatcctcagctgggttggctccgtctaatagtggcaactccggacaccactcgacaaggaactctgaccagatccaggtggccggcaccaaagaaaccaagatgcagaagccgcacttgcctctgtcacaggaaaaatcggccataaagaaggcttcaaacctgcagaagaataaaaccgcttctagtactactaaagaaaaagagaccaaactgcctctgctgtccagagtgccaagtgcagggtcctctctcgtgccactcaatgccaaaaattgtgcacttcccgtgtctaaaaaagacaaggaaaggtcttcatccaaggaatgtagcgggcactccacagaaagtaccaaacacaaggaacacaaggccaagaccaacaaggctgactctaatgtgtcaagcggaaaaatttccggcgggccccttaggagtgagtacgggacccctaccaaaagcccacctgcggctctggaggtggtcccctgcatcccaagccctgcagccccatcggataaagccccaagcgaaggcgagtcctccggcaattctaacgcagggagtagcgcactgaaacgtaagctcaggggggatttcgacagtgacgaggaaagcctggggtataacttagactccgacgaggaagaagaaacccttaaaagtctcgaggagatcatggccctcaatttcaatcagacacccgctgccactggaaagccacccgcactctccaagggactcaggtcgcaatcatcagattacacggggcacgtgcacccgggtacctacaccaataccctggaacggctggtgaaggaaatggaagatacgcaaagattcgtgagcatcaagattaatttgcttaaccttaccttctgtctgttcgtatggctcacttttaacctcccatttcttaagaatcacgaaaagctggcttgcatcctcgactccgtagtgaactgtgtgagaatccgctacgtgggacgaactcaatggctgatgcctgtgatcactacactgtgggaaacacaggctcgactgttagagcctcgctccagtcgcctgagatag

SEQ ID NO: 51960 - DNA, 3561 bp, Artificial Sequence
  derived and/or modified sequence
atgacccggcgctgcatgcctgcccggcccggcttccccagcagccctgcccctggcagcagccccccacgctgccacctgcggcccggcagcacagcccatgctgctgctgggaagaggacagagagccctggggacaggaagcagagcatcatcgacttcttcaagccagccagcaagcaggacagacacatgctggacagcccccagaagagcaacatcaagtatggaggcagccggctgagcatcaccggcacagagcagtttgagaggaagctgagcagccccaaggagagcaagcccaagagggtgcccccagagaagagccccatcatcgaggccttcatgaagggcgtgaaggagcaccacgaggaccacggcatccacgagagccggcggccctgcctgagcctggccagcaagtacctggccaagggcaccaacatctacgtgcccagcagctaccacctgcccaaggagatgaagagcctgaagaagaagcacaggagccctgagaggaggaagagcctcttcatccatgaaaataatgagaagaatgaccgggaccggggcaagaccaatgctgacagcaagaagcagaccaccgtggccgaggccgacatcttcaacaacagcagccgcagcctgagcagccgcagcagcctgagccgccaccaccctgaggagagccccctgggcgccaagttccagctgagcctggccagctactgccgggagcgggagctgaagaggctgaggaaggagcagatggagcagaggatcaacagcgagaacagcttcagcgaggccagcagcctgagcctgaagagcagcattgaaaggaagtacaagccccggcaggagcagaggaagcagaatgacatcatccctgggaagaacaacctgagcaatgtggagaatggccacctgagcaggaagaggagcagcagtgacagctgggagcccaccagcgctggcagcaagcagaacaagtttcctgagaagaggaagaggaacagcgtggacagcgacctgaagagcacccgggagagcatgatccccaaggcccgggagagcttcctggagaagaggccagatggcccccaccagaaggagaagttcatcaagcacatcgccctgaagaccccaggagatgtgctgcggctggaggacatcagcaaggagcccagtgatgaaacagatggcagcagcgctggcctggcccccagcaacagcggcaacagcggccaccacagcaccaggaacagcgaccagatccaggtggccggcaccaaggagaccaagatgcagaagccccacctgcccctgagccaggagaagagcgccatcaagaaggccagcaacctgcagaagaacaagacagccagcagcaccaccaaggagaaggagaccaagctgcccctgctgagccgggtgcccagcgctggcagcagcctggtgcccctgaatgccaagaactgtgccctgcctgtgtccaagaaggacaaggagaggagcagcagcaaggagtgcagcggccacagcacagagagcaccaagcacaaggagcacaaggccaagaccaacaaggctgacagcaatgtgtcctctgggaagatcagcggcggccccctgcggagtgaatatggcacccccaccaagagccccccagctgccctggaggtggtgccctgcatccccagccctgctgcccccagcgacaaggcccccagcgagggggagagcagcggcaacagcaatgccggcagcagcgccctgaagaggaagctgcggggggactttgacagtgatgaggagagcctgggctacaacctggacagtgatgaggaggaggagaccctgaagagcctggaggagatcatggccctgaacttcaaccagaccccagctgccaccgggaagcccccagccctgagcaagggcctgcggagccagagcagtgactacacaggccacgtgcaccctggcacctacaccaacaccctggagcggctggtgaaggagatggaggacacccagaggctggatgagctgcagaagcagctgcaggaggacatccggcagggccggggcatcaagagccccatcagaattggagaggaggacagcacagatgatgaagatggcctgctggaggagcacaaggagttcctgaagaagttctctgtgaccattgatgccatcccagaccaccaccctggagaggagatcttcaacttcctgaacagcggcaagatcttcaaccagtacaccctggacctgcgggacagcggcttcatcggccagagcgctgtggagaagctgatcctgaagagcggcaagacagaccagatcttcctgaccacccagggcttcctgaccagcgcctaccactacgtgcagtgccctgtgcctgtgctgaagtggctgttcaggatgatgtctgtgcacacagactgcatcgtgtctgtgcagatcctgagcaccctgatggagatcaccatcagaaatgacaccttcagtgacagccctgtgtggccctggatccccagcctgagtgatgtggccgctgtgttcttcaacatgggcatcgacttccgcagcctcttccccctggagaacctgcagcctgacttcaatgaagactacctggtgtctgagacccagaccaccagccggggcaaggagagcgaggacagcagctacaagcccatcttcagcaccctgcctgagaccaacatcctgaatgtggtgaagttcctgggcctgtgcaccagcatccaccctgagggctaccaggaccgggagatcatgctgctgatcctgatgctgttcaagatgagcctggagaagcagctgaagcagatccccctggtggacttccagagcctgctgatcaacctgatgaagaacatccgggactggaacaccaaggtgcctgagctgtgcctgggcatcaatgagctgagcagccacccccacaacctgctgtggctggtgcagctggtgcccaactggaccagccggggccggcagctgcggcagtgcctgagcctggtgatcatcagcaagctgctggatgagaagcatgaagatgtgcccaatgccagcaacctgcaggtgtctgtgctgcaccgctacctggtgcagatgaagcccagcgacctgctgaagaagatggtgctgaagaagaaggccgagcagccagatggcatcattgatgacagcctgcacctggagctggagaagcaggcctactacctgacctacatcctgctgcacctggtgggggaggtgtcctgcagccacagcttcagcagcggccagaggaagcactttgtgctgctgtgtggggccctggagaagcacgtgaagtgtgacatccgggaggatgcccggctcttctaccgcaccaaggtgaaggacctggtggcccgcatccacggcaagtggcaggagatcatccagaactgccggcccacccaggtgtccttctgctacaccatcagctgcatcctgaacagctttgctgagtggcacagcagctactgcctgaagtag

SEQ ID NO: 51961 - DNA, 2277 bp, Artificial Sequence
  derived and/or modified sequence
atgacccggcgctgcatgcctgcccggcccggcttccccagcagccctgcccctggcagcagccccccacgctgccacctgcggcccggcagcacagcccatgctgctgctgggaagaggacagagagccctggggacaggaagcagagcatcatcgacttcttcaagccagccagcaagcaggacagacacatgctggacagcccccagaagagcaacatcaagtatggaggcagccggctgagcatcaccggcacagagcagtttgagaggaagctgagcagccccaaggagagcaagcccaagagggtgcccccagagaagagccccatcatcgaggccttcatgaagggcgtgaaggagcaccacgaggaccacggcatccacgagagccggcggccctgcctgagcctggccagcaagtacctggccaagggcaccaacatctacgtgcccagcagctaccacctgcccaaggagatgaagagcctgaagaagaagcacaggagccctgagaggaggaagagcctcttcatccatgaaaataatgagaagaatgaccgggaccggggcaagaccaatgctgacagcaagaagcagaccaccgtggccgaggccgacatcttcaacaacagcagccgcagcctgagcagccgcagcagcctgagccgccaccaccctgaggagagccccctgggcgccaagttccagctgagcctggccagctactgccgggagcgggagctgaagaggctgaggaaggagcagatggagcagaggatcaacagcgagaacagcttcagcgaggccagcagcctgagcctgaagagcagcattgaaaggaagtacaagccccggcaggagcagaggaagcagaatgacatcatccctgggaagaacaacctgagcaatgtggagaatggccacctgagcaggaagaggagcagcagtgacagctgggagcccaccagcgctggcagcaagcagaacaagtttcctgagaagaggaagaggaacagcgtggacagcgacctgaagagcacccgggagagcatgatccccaaggcccgggagagcttcctggagaagaggccagatggcccccaccagaaggagaagttcatcaagcacatcgccctgaagaccccaggagatgtgctgcggctggaggacatcagcaaggagcccagtgatgaaacagatggcagcagcgctggcctggcccccagcaacagcggcaacagcggccaccacagcaccaggaacagcgaccagatccaggtggccggcaccaaggagaccaagatgcagaagccccacctgcccctgagccaggagaagagcgccatcaagaaggccagcaacctgcagaagaacaagacagccagcagcaccaccaaggagaaggagaccaagctgcccctgctgagccgggtgcccagcgctggcagcagcctggtgcccctgaatgccaagaactgtgccctgcctgtgtccaagaaggacaaggagaggagcagcagcaaggagtgcagcggccacagcacagagagcaccaagcacaaggagcacaaggccaagaccaacaaggctgacagcaatgtgtcctctgggaagatcagcggcggccccctgcggagtgaatatggcacccccaccaagagccccccagctgccctggaggtggtgccctgcatccccagccctgctgcccccagcgacaaggcccccagcgagggggagagcagcggcaacagcaatgccggcagcagcgccctgaagaggaagctgcggggggactttgacagtgatgaggagagcctgggctacaacctggacagtgatgaggaggaggagaccctgaagagcctggaggagatcatggccctgaacttcaaccagaccccagctgccaccgggaagcccccagccctgagcaagggcctgcggagccagagcagtgactacacaggccacgtgcaccctggcacctacaccaacaccctggagcggctggtgaaggagatggaggacacccagagatttgtgtccatcaagatcaacctgctgaacctgaccttctgcctgtttgtgtggctgaccttcaacctgcccttcctgaagaaccacgagaagctggcctgcatcctggacagcgtggtgaactgtgtgcgcatccgctacgtgggccgcacccagtggctgatgcctgtgatcaccaccctgtgggagacccaggcccggctgctggagcccaggagcagccggctgaggtag

SEQ ID NO: 51962 - DNA, 3561 bp, Artificial Sequence
  derived and/or modified sequence
atgacccggcggtgcatgcccgcccggcccggcttccccagcagcccagcccctgggtcttctcccccacgctgccatctcaggcccggaagcaccgctcacgcggcagccgggaagcggaccgagtctcccggagaccgcaagcagtctattatagattttttcaagcctgctagtaagcaggatagacacatgctcgacagccctcagaagtctaatattaagtatggagggagcaggctgtcaatcaccgggaccgaacaatttgagagaaagctgagtagcccgaaagagagcaaacccaagcgggtgccccccgagaaatcgccgataattgaggccttcatgaagggggtaaaagaacatcacgaagatcacggcatccacgaatcacgtcggccatgcctgtcccttgcatctaaatacctggccaaaggcacaaacatctatgtgccctcaagctaccatcttccaaaggagatgaaaagcttaaaaaaaaagcataggtcaccagagagaagaaaatcgctcttcatccacgaaaataacgaaaagaatgaccgggatagagggaagaccaacgctgatagtaaaaaacaaactaccgttgccgaggcggatattttcaacaattcttctagaagtttgtccagccgatcgagcttgtcccgccatcacccagaagaatcccctctgggagcaaagttccagctctccctcgccagctactgcagagagcgtgaactgaaacgtttaagaaaagagcagatggaacagcgaattaatagtgagaactcatttagcgaagcatcaagcctctccctgaaaagtagtattgaaagaaaatacaaacctcgtcaggagcaacgtaagcagaacgatataatccctggaaaaaataatctgtctaacgtggagaatggtcacttgtcgagaaagcggagcagctcggattcctgggagccaacctctgccgggtctaagcagaataagtttcctgagaagaggaaacgcaactctgttgattccgatctgaaaagtactagagagagcatgattcctaaggcccgcgaatcttttttggaaaagagacctgatgggccacaccagaaggaaaagttcattaagcatatagctcttaaaactccaggagacgtactgcgcctggaagacataagcaaagagcctagcgacgagactgatggcagctctgctggtctggcaccatccaatagtggtaactcgggacaccactccactaggaactcagaccagatacaagtggcaggcaccaaagagactaaaatgcaaaagccccacctgccattaagccaagagaaatcagcaattaagaaagcctcgaatcttcagaaaaacaaaaccgcctccagcacaaccaaagaaaaagaaactaagctgccacttctcagcagggttccatccgctggatccagtttggtaccattaaatgcaaaaaattgtgccctcccagtgtctaaaaaggataaggaacggtcatccagcaaggaatgctctgggcacagtactgagagcaccaagcataaggagcacaaagcgaagacgaataaagccgatagcaacgttagctctggcaaaatcagcggtggaccactacggagcgagtacggaactcccacaaagtcacccccagccgccctagaagtggtgccttgcattccctcaccagcagccccttccgataaagcaccgtcagagggggagagctcaggaaactctaacgccggaagtagtgcgctgaagcgaaagctgcgaggagacttcgacagtgacgaggagtccttgggctacaatcttgatagcgatgaagaggaggaaaccctgaagtcactcgaagaaattatggccctgaacttcaatcagacacccgcagcgacagggaaaccccccgccctttccaaggggttaagatctcaatcctcagactacactgggcatgtgcaccccggaacatatactaatactctcgagcgtcttgtgaaagagatggaggacacacagcgcctggacgaactgcagaaacaactacaagaagacatccgccagggccgcggcataaaatcaccaatcaggataggtgaagaagacagcacggacgacgaagacgggttgctggaggaacacaaggaatttctgaaaaaattttccgtaacgatcgacgccattcccgatcatcaccccggagaagagatctttaactttctgaactcgggcaagattttcaaccagtacacgctggacttgagggattctgggtttatcggccagtctgcagtggaaaaactgatccttaaaagcggcaaaacagatcagatcttcctgacgacccagggctttcttaccagcgcttaccactatgtgcaatgtccggtacccgttttaaagtggctgtttcgaatgatgtccgtccatacagactgtatcgtttccgtccaaatcctttccaccttgatggaaatcaccatccggaacgacacatttagcgatagccccgtgtggccgtggatcccttccctgagtgacgtagccgccgttttctttaatatgggcatcgatttcagatctctgtttcccttggagaatctccaaccggactttaatgaggattatcttgtgagcgaaacccagacaacatccagggggaaggaatctgaagatagctcctataaaccaatcttttccaccctgcctgagacaaatatcttgaacgtggtcaagttcctcggcttgtgtacctctattcacccggaaggctaccaggaccgtgagatcatgctgctcatcctaatgctgtttaagatgtcactggaaaaacagttgaagcaaattcctttggttgacttccagtcactattgatcaatctgatgaaaaatattagagactggaatactaaggtccctgagctgtgtctcggaatcaatgaactgagctcccacccccacaatctgctctggctggtgcagcttgtgccaaattggacttcacgcggacggcagctacggcaatgtctaagtctcgtaatcatttccaagttgctcgatgagaagcatgaggatgtgccaaatgccagcaacctgcaggtgtctgtgctgcatcgatacttggttcaaatgaaacccagtgacttgctaaaaaagatggtgttaaaaaaaaaggcagagcagcccgacggaatcatcgacgactcgctgcacctggagctggaaaaacaagcatactacttgacatatatcctgctgcacctggtcggtgaggtttcttgcagtcactcattcagctctggacaaaggaagcatttcgttctcctgtgtggggccctcgaaaaacatgttaagtgtgacatcagagaggacgcccgcctgttctataggactaaggtgaaagacctggtggcccggatccacggtaaatggcaggagataatccagaactgcaggcccactcaagtcagcttctgttatacgatctcatgcattttgaacagctttgccgagtggcactcctcatactgtctcaagtag

SEQ ID NO: 51963 - DNA, 2277 bp, Artificial Sequence
  derived and/or modified sequence
atgacccggcggtgcatgcccgcccggcccggcttccccagcagccccgctccagggagcagtcctccgaggtgtcacctgcgccctgggagcacagctcacgcagctgctgggaagcggaccgaatcgcctggtgatagaaaacagtccataattgacttttttaagccagcctccaagcaggacagacacatgctggattctcctcagaaatctaatatcaaatacggcggcagtcggctgagtattacagggacggagcagtttgagcggaagctttctagccctaaggagtcgaaaccaaagagggtaccacccgagaaatcccctatcatcgaggcctttatgaagggagtcaaagaacatcacgaggaccacggaatacatgagtctcggcgaccgtgccttagcctcgcttcaaagtatctcgcaaagggaactaatatttatgtgccatcctcttaccacctgcccaaggagatgaagtctctgaagaagaagcatcggagcccagagaggaggaagagtctcttcatacatgaaaataatgaaaaaaacgatagagacaggggcaagactaatgcagatagcaagaagcagacaaccgtcgcagaggctgatatcttcaataattccagtcgatccctgtcttctaggtctagcctcagcaggcaccacccagaggaatctcctttgggcgccaaattccagctgtccctagctagctattgccgggaacgcgaactgaagaggcttaggaaagaacagatggagcaaagaatcaactctgaaaactcattttcagaagcgtccagcctgtctctgaaaagtagtatcgagagaaagtataaaccccgacaggagcagcgtaagcagaacgacataattcctggaaaaaacaacctttcaaatgtggaaaacgggcacctcagccggaagaggagctcatccgactcctgggaaccaacttccgctgggtcgaagcagaacaagtttcctgaaaaacggaaaaggaacagcgtcgactccgacttgaaatctacacgcgaatccatgatacccaaagcccgcgagtctttcctggaaaaaagacccgatggtcctcatcagaaggaaaagttcattaaacatattgctctcaaaaccccgggagacgtgctcaggcttgaagatatctcaaaagagccctccgatgagaccgacggatccagcgcaggactagctccatccaatagtggcaactctggccatcactcaacaaggaatagtgatcagattcaagtggccggaaccaaagagacgaaaatgcagaaaccgcacctaccgctgagtcaggagaaaagcgccatcaaaaaggccagcaacctgcaaaaaaataaaaccgcgtccagcaccacgaaagagaaggaaactaagctgccgctgctatctagggtgccatccgctggttcctctttagttcccctgaatgcaaaaaattgtgcacttcctgtttccaagaaggacaaggaacggtctagctctaaagagtgttcaggacacagtacagaaagcacaaagcacaaggaacacaaagcgaaaaccaacaaagcggactccaatgtgtcatctggtaaaatctccggggggcctttgagatccgaatacggaacacccaccaagtcaccgcccgccgcactcgaggtggtgccttgtatcccgtctcctgcggcaccatccgataaagccccctcggaaggagagtcatctggaaactccaatgcgggcagctccgcacttaaaagaaaactgagaggggatttcgactctgacgaagaaagtctgggttataacctggattcggacgaagaagaggagacgctcaaatcccttgaggaaattatggcgctgaactttaaccagactcccgccgcgaccggaaagccacccgctctgtccaagggactccgctcccagagctccgactatacagggcatgtccatcccgggacatacaccaacaccctagagagattggttaaagagatggaagacactcagaggttcgtttctatcaagattaacctgctgaacctgaccttttgcctttttgtctggttgacctttaacttgcctttcctcaaaaatcacgaaaagctggcatgtattctggatagcgtggtgaattgtgttaggatacgttacgtcggcaggacccaatggctgatgccagttatcacaactctgtgggaaacccaggccagactgctcgaacctaggagctcgaggctccgatag

SEQ ID NO: 51964 - DNA, 3561 bp, Artificial Sequence
  derived and/or modified sequence
atgactcgtcgatgcatgccggcacggcctggattccccagtagccccgctccgggatcaagcccacctcgctgtcatttacggccaggaagtacggcccatgccgctgcgggtaagcgcaccgaaagtcctggagatagaaagcagtccattattgatttttttaagccagcctccaaacaagatagacacatgttggacagcccgcaaaagtcaaacattaagtatggcggtagcaggctttctattaccggcacagagcagttcgagcgtaaattatcatcccccaaagaatctaagccaaaacgcgttccaccagaaaagtcacccatcatcgaggcatttatgaaaggggtgaaagaacatcatgaagatcacgggatacatgagagccgcagaccatgcttgtcactcgcgtccaagtatctggcaaagggaacaaatatctatgtgccgagtagctatcacctgcctaaagagatgaagagtcttaagaagaaacacaggagccccgagagacgcaaatcgctgtttatccatgagaacaacgagaaaaacgatcgggaccgcggtaagaccaatgccgacagtaagaagcagaccactgttgccgaggcagacatctttaacaattctagtaggagcctcagtagcagaagctccctgtccaggcatcatcccgaagagagccccctgggggcaaaatttcaactgagtcttgcaagttactgccgcgagcgcgagctaaagagactcagaaaggagcaaatggaacagaggatcaattctgagaactctttttccgaagcatcctctcttagtctcaagagtagtattgagcgaaagtataagccacggcaggaacagagaaagcaaaacgatataattcctggcaagaataacctgagcaacgtcgagaacggacacttgtcaagaaaaagaagctcaagcgattcatgggagccgacttctgccggttccaaacaaaacaaatttcccgaaaaacgaaagcggaactccgtggactcggatctgaaatccacccgcgaatccatgatccccaaagccagggaaagttttctggagaagaggcctgacggacctcaccaaaaggagaaattcatcaaacatattgcactcaaaacaccgggagatgtgctgaggctcgaggatatttctaaggagccttcagatgagaccgatgggagctccgcagggctcgcaccgagtaactcaggaaattccgggcaccactcgaccagaaatagcgatcaaattcaagtggcaggaactaaagaaacaaagatgcaaaagcctcacctgcctctgtctcaggaaaagtctgccattaaaaaggcatcgaatctgcagaagaataagactgcctcttcaaccacaaaggagaaggaaacaaagctgcccctcctcagtcgagttccaagcgccggatcgagccttgtgcctttgaatgcgaagaactgcgctctacctgtgtctaaaaaggataaagaacgaagcagttctaaggagtgcagcggccactcaaccgagtccaccaagcacaaggagcataaagctaagacaaataaggccgactccaatgtgtcctctggaaaaatatctggaggccctctccgctccgaatatggtactcccacgaagtctcctccagccgctctggaagtcgtaccctgcattccaagccccgcagctccctccgataaagcaccctctgagggggagtcaagcggcaactccaacgctggaagttctgcactcaagcgcaagcttcggggagattttgattccgatgaagagtcactggggtacaacctggattccgatgaggaggaggaaactttaaagtcgcttgaagaaattatggctttgaactttaatcaaaccccagccgcaacggggaaaccacctgcactcagtaagggactccggagccaatccagtgattatacaggtcacgtgcaccccggaacctacacaaacacattagagcgactggtgaaagaaatggaggatacacagcggctagacgagctccaaaagcaattgcaggaagacatccgacagggcagaggaataaagtctccaataagaatcggagaggaagattcgacagatgatgaggacggactcctggaggaacataaggaattcctaaaaaaatttagcgttacaattgatgcaatcccagatcatcatcctggagaagagatcttcaacttcctgaatagcggcaagattttcaatcagtatacccttgacctacgggacagtggatttattggacagagtgccgtggagaagttgatactcaaaagcggcaagaccgatcagatctttttgacaacccaagggtttctgacatccgcctatcattacgttcagtgtcctgtgccagtccttaaatggctgtttcgtatgatgtcagtccacactgattgtatcgtcagcgtgcaaattttatctacccttatggagatcactataaggaacgatacattctctgatagcccagtatggccttggatccccagcttatccgacgttgcagccgtatttttcaacatggggatcgacttccgatctctctttccactcgagaatctgcagcctgactttaatgaagattatctggtctcagaaacccagacgaccagccgtgggaaggaaagcgaggacagtagctataagcctatcttctctaccctacccgaaaccaatatactgaatgtagtcaagttccttggcctttgcaccagcattcaccctgagggttaccaggaccgcgagattatgctgcttatccttatgttattcaagatgtccttggagaaacagttgaagcagattccactcgtcgattttcaaagcctgctgatcaaccttatgaaaaacattagagattggaacaccaaggtacctgagctgtgcctgggaatcaatgaactgtcctctcacccccataatctgctctggctggtgcagctggtgccgaactggacctcccgtggcagacagcttcgtcagtgcctgagtctggtaattatttctaaactgttggacgaaaaacacgaggacgtgccaaacgccagtaacttgcaggtttctgtgctgcacaggtacctcgtccagatgaaaccctcagacctcctgaagaagatggttctcaagaagaaggcagagcaacctgacggaattatcgacgacagtctgcacctagaacttgagaagcaagcatactacctgacatatatcctcctgcatctcgtgggagaggtttcctgttcccacagttttagtagcgggcagcgtaagcattttgtgttactttgcggtgcacttgaaaagcatgtgaaatgtgatatcagggaagacgctagactattctaccggacaaaggtcaaggacctggtggccagaattcacggcaaatggcaggagatcattcagaactgcaggccaacacaggttagcttttgctacactattagttgcatcctgaacagcttcgcagaatggcacagcagctattgtctcaaatag

SEQ ID NO: 51965 - DNA, 2277 bp, Artificial Sequence
  derived and/or modified sequence
atgacgcgcaggtgcatgcccgctcggccaggcttcccaagctcacccgcacccggatcttctcccccacggtgccacctcagacccggttctacggctcatgccgctgctggaaagcgtacagaaagccccggtgatagaaaacagtccattatcgatttttttaaaccggcttctaaacaagacagacatatgttggactcccctcagaaatctaacatcaaatatggcggaagccgtttgagcatcactggcacagaacagttcgagcgtaagttatcctcacctaaggagtctaaacccaaaagagttccccctgaaaagtcacccatcatcgaagcattcatgaaaggtgtgaaggagcatcacgaggaccacggtatccatgagtccaggcgtccttgcttaagcttggcctcaaagtacctggcaaaggggaccaatatttacgtacctagcagttaccaccttcctaaggaaatgaagtctctgaagaaaaagcataggagccccgagagaagaaagagtctcttcatacatgagaacaacgaaaaaaacgacagagatcgaggaaagaccaatgctgacagcaaaaaacaaactaccgtcgccgaagcagatatttttaacaacagcagccgatctctgagctccagaagcagcctgtctagacaccatccggaggagtctcccctgggggctaagtttcagctgtccctagcttcatattgccgcgaaagagagctcaagcggctgaggaaagaacaaatggagcaacggattaactctgaaaatagctttagtgaagcctcttctctatccctgaaaagtagcattgaaagaaagtacaagcccaggcaagagcaaagaaagcagaacgatattattcctgggaagaataatctgagcaacgtggagaatggacatctttcaaggaaaagatcaagttcggatagctgggagcctaccagtgctggcagtaagcagaacaaatttcccgaaaagaggaagaggaacagcgtcgactccgacttgaagtccacgagggagagcatgattcctaaggctcgtgaaagctttctggagaagcggcctgacgggcctcaccagaaagagaagtttataaaacacatcgctctgaagaccccaggcgatgttctacgcttagaagatatcagtaaggagccgagcgatgagactgacggctcatccgctgggcttgccccatctaatagcggcaactcaggtcaccactccactaggaactccgatcagattcaagtcgccggaacaaaggaaaccaaaatgcagaaacctcatttgcctctgagccaggaaaaaagcgccattaagaaggcctcaaatctgcagaagaacaagacagctagctcaacaactaaggagaaggaaacaaagctgccacttctgagccgcgtgccttccgccggatcttcactcgttccgcttaacgctaagaactgcgccctgcccgtaagtaagaaagataaggagcgtagcagcagcaaggaatgttccgggcacagtactgagtctacaaaacacaaggagcacaaagctaaaacaaataaggctgactccaacgtgtcctccgggaagataagcggagggccacttcgttccgagtacgggacgcctacaaaatcccctcccgctgcactggaggtcgtgccctgcatcccctcccctgccgctccctctgacaaggccccaagtgagggagaaagctctgggaattctaacgccggatccagtgcacttaagagaaagctgagaggcgacttcgactcagatgaagagtccctaggctacaatttggactctgacgaggaagaagagacgctgaagtctctggaggagattatggccctgaatttcaaccagacccccgctgccactgggaagcccccagcgctctccaagggtctgcgctcacagagctcggattataccggtcacgttcacccaggcacctatacaaatactcttgagaggcttgtcaaggagatggaagacacccagcgattcgttagtatcaagatcaatctccttaatctcaccttctgtctgtttgtctggctaacctttaatttgccctttctgaaaaatcacgaaaaactggcctgcattttggatagtgtagtcaattgcgtccggatcaggtatgttggacggacccagtggctcatgcccgtcatcacgaccctctgggagactcaggctaggctgctcgagcctaggagcagccgcctcaggtag

SEQ ID NO: 51966 - DNA, 3561 bp, Artificial Sequence
  derived and/or modified sequence
atgaccagaagatgcatgcccgccagacccggcttccccagcagccccgcccccggcagcagcccccccagatgccacctgagacccggcagcaccgcccacgccgccgccggcaagagaaccgagagccccggcgacagaaagcagagcatcatcgacttcttcaagcccgccagcaagcaggacagacacatgctggacagcccccagaagagcaacatcaagtacggcggcagcagactgagcatcaccggcaccgagcagttcgagagaaagctgagcagccccaaggagagcaagcccaagagagtgccccccgagaagagccccatcatcgaggccttcatgaagggcgtgaaggagcaccacgaggaccacggcatccacgagagcagaagaccctgcctgagcctggccagcaagtacctggccaagggcaccaacatctacgtgcccagcagctaccacctgcccaaggagatgaagagcctgaagaagaagcacagaagccccgagagaagaaagagcctgttcatccacgagaacaacgagaagaacgacagagacagaggcaagaccaacgccgacagcaagaagcagaccaccgtggccgaggccgacatcttcaacaacagcagcagaagcctgagcagcagaagcagcctgagcagacaccaccccgaggagagccccctgggcgccaagttccagctgagcctggccagctactgcagagagagagagctgaagagactgagaaaggagcagatggagcagagaatcaacagcgagaacagcttcagcgaggccagcagcctgagcctgaagagcagcatcgagagaaagtacaagcccagacaggagcagagaaagcagaacgacatcatccccggcaagaacaacctgagcaacgtggagaacggccacctgagcagaaagagaagcagcagcgacagctgggagcccaccagcgccggcagcaagcagaacaagttccccgagaagagaaagagaaacagcgtggacagcgacctgaagagcaccagagagagcatgatccccaaggccagagagagcttcctggagaagagacccgacggcccccaccagaaggagaagttcatcaagcacatcgccctgaagacccccggcgacgtgctgagactggaggacatcagcaaggagcccagcgacgagaccgacggcagcagcgccggcctggcccccagcaacagcggcaacagcggccaccacagcaccagaaacagcgaccagatccaggtggccggcaccaaggagaccaagatgcagaagccccacctgcccctgagccaggagaagagcgccatcaagaaggccagcaacctgcagaagaacaagaccgccagcagcaccaccaaggagaaggagaccaagctgcccctgctgagcagagtgcccagcgccggcagcagcctggtgcccctgaacgccaagaactgcgccctgcccgtgagcaagaaggacaaggagagaagcagcagcaaggagtgcagcggccacagcaccgagagcaccaagcacaaggagcacaaggccaagaccaacaaggccgacagcaacgtgagcagcggcaagatcagcggcggccccctgagaagcgagtacggcacccccaccaagagcccccccgccgccctggaggtggtgccctgcatccccagccccgccgcccccagcgacaaggcccccagcgagggcgagagcagcggcaacagcaacgccggcagcagcgccctgaagagaaagctgagaggcgacttcgacagcgacgaggagagcctgggctacaacctggacagcgacgaggaggaggagaccctgaagagcctggaggagatcatggccctgaacttcaaccagacccccgccgccaccggcaagccccccgccctgagcaagggcctgagaagccagagcagcgactacaccggccacgtgcaccccggcacctacaccaacaccctggagagactggtgaaggagatggaggacacccagagactggacgagctgcagaagcagctgcaggaggacatcagacagggcagaggcatcaagagccccatcagaatcggcgaggaggacagcaccgacgacgaggacggcctgctggaggagcacaaggagttcctgaagaagttcagcgtgaccatcgacgccatccccgaccaccaccccggcgaggagatcttcaacttcctgaacagcggcaagatcttcaaccagtacaccctggacctgagagacagcggcttcatcggccagagcgccgtggagaagctgatcctgaagagcggcaagaccgaccagatcttcctgaccacccagggcttcctgaccagcgcctaccactacgtgcagtgccccgtgcccgtgctgaagtggctgttcagaatgatgagcgtgcacaccgactgcatcgtgagcgtgcagatcctgagcaccctgatggagatcaccatcagaaacgacaccttcagcgacagccccgtgtggccctggatccccagcctgagcgacgtggccgccgtgttcttcaacatgggcatcgacttcagaagcctgttccccctggagaacctgcagcccgacttcaacgaggactacctggtgagcgagacccagaccaccagcagaggcaaggagagcgaggacagcagctacaagcccatcttcagcaccctgcccgagaccaacatcctgaacgtggtgaagttcctgggcctgtgcaccagcatccaccccgagggctaccaggacagagagatcatgctgctgatcctgatgctgttcaagatgagcctggagaagcagctgaagcagatccccctggtggacttccagagcctgctgatcaacctgatgaagaacatcagagactggaacaccaaggtgcccgagctgtgcctgggcatcaacgagctgagcagccacccccacaacctgctgtggctggtgcagctggtgcccaactggaccagcagaggcagacagctgagacagtgcctgagcctggtgatcatcagcaagctgctggacgagaagcacgaggacgtgcccaacgccagcaacctgcaggtgagcgtgctgcacagatacctggtgcagatgaagcccagcgacctgctgaagaagatggtgctgaagaagaaggccgagcagcccgacggcatcatcgacgacagcctgcacctggagctggagaagcaggcctactacctgacctacatcctgctgcacctggtgggcgaggtgagctgcagccacagcttcagcagcggccagagaaagcacttcgtgctgctgtgcggcgccctggagaagcacgtgaagtgcgacatcagagaggacgccagactgttctacagaaccaaggtgaaggacctggtggccagaatccacggcaagtggcaggagatcatccagaactgcagacccacccaggtgagcttctgctacaccatcagctgcatcctgaacagcttcgccgagtggcacagcagctactgcctgaagtag

SEQ ID NO: 51967 - DNA, 2277 bp, Artificial Sequence
  derived and/or modified sequence
atgaccagaagatgcatgcccgccagacccggcttccccagcagccccgcccccggcagcagcccccccagatgccacctgagacccggcagcaccgcccacgccgccgccggcaagagaaccgagagccccggcgacagaaagcagagcatcatcgacttcttcaagcccgccagcaagcaggacagacacatgctggacagcccccagaagagcaacatcaagtacggcggcagcagactgagcatcaccggcaccgagcagttcgagagaaagctgagcagccccaaggagagcaagcccaagagagtgccccccgagaagagccccatcatcgaggccttcatgaagggcgtgaaggagcaccacgaggaccacggcatccacgagagcagaagaccctgcctgagcctggccagcaagtacctggccaagggcaccaacatctacgtgcccagcagctaccacctgcccaaggagatgaagagcctgaagaagaagcacagaagccccgagagaagaaagagcctgttcatccacgagaacaacgagaagaacgacagagacagaggcaagaccaacgccgacagcaagaagcagaccaccgtggccgaggccgacatcttcaacaacagcagcagaagcctgagcagcagaagcagcctgagcagacaccaccccgaggagagccccctgggcgccaagttccagctgagcctggccagctactgcagagagagagagctgaagagactgagaaaggagcagatggagcagagaatcaacagcgagaacagcttcagcgaggccagcagcctgagcctgaagagcagcatcgagagaaagtacaagcccagacaggagcagagaaagcagaacgacatcatccccggcaagaacaacctgagcaacgtggagaacggccacctgagcagaaagagaagcagcagcgacagctgggagcccaccagcgccggcagcaagcagaacaagttccccgagaagagaaagagaaacagcgtggacagcgacctgaagagcaccagagagagcatgatccccaaggccagagagagcttcctggagaagagacccgacggcccccaccagaaggagaagttcatcaagcacatcgccctgaagacccccggcgacgtgctgagactggaggacatcagcaaggagcccagcgacgagaccgacggcagcagcgccggcctggcccccagcaacagcggcaacagcggccaccacagcaccagaaacagcgaccagatccaggtggccggcaccaaggagaccaagatgcagaagccccacctgcccctgagccaggagaagagcgccatcaagaaggccagcaacctgcagaagaacaagaccgccagcagcaccaccaaggagaaggagaccaagctgcccctgctgagcagagtgcccagcgccggcagcagcctggtgcccctgaacgccaagaactgcgccctgcccgtgagcaagaaggacaaggagagaagcagcagcaaggagtgcagcggccacagcaccgagagcaccaagcacaaggagcacaaggccaagaccaacaaggccgacagcaacgtgagcagcggcaagatcagcggcggccccctgagaagcgagtacggcacccccaccaagagcccccccgccgccctggaggtggtgccctgcatccccagccccgccgcccccagcgacaaggcccccagcgagggcgagagcagcggcaacagcaacgccggcagcagcgccctgaagagaaagctgagaggcgacttcgacagcgacgaggagagcctgggctacaacctggacagcgacgaggaggaggagaccctgaagagcctggaggagatcatggccctgaacttcaaccagacccccgccgccaccggcaagccccccgccctgagcaagggcctgagaagccagagcagcgactacaccggccacgtgcaccccggcacctacaccaacaccctggagagactggtgaaggagatggaggacacccagagattcgtgagcatcaagatcaacctgctgaacctgaccttctgcctgttcgtgtggctgaccttcaacctgcccttcctgaagaaccacgagaagctggcctgcatcctggacagcgtggtgaactgcgtgagaatcagatacgtgggcagaacccagtggctgatgcccgtgatcaccaccctgtgggagacccaggccagactgctggagcccagaagcagcagactgagatag

SEQ ID NO: 51968 - protein, 220 aa, Artificial Sequence
  derived and/or modified sequence
MELLCCEGTRHAPRAGPDPRLLGDQRVLQSLLRLEERYVPRASYFQCVQREIKPHMRKMLAYWMLEDWEVLVLGKLKWDLAAVIAHDFLAFILHRLSLPRDRQALVKKHAQTFLALCATDYTFAMYPPSMIATGSIGAAVQGLGACSMSGDELTELLAGITGTEVDCLRACQEQIEAALRESLREASQTSSSPAPKAPRGSSSQGPSQTSTPTDVTAIHL

SEQ ID NO: 51969 - DNA, 663 bp, Artificial Sequence
  derived and/or modified sequence
atggagctgctgtgctgcgagggcaccagacacgcccccagagccggccccgaccccagactgctgggcgaccagagagtgctgcagagcctgctgagactggaggagagatacgtgcccagagccagctacttccagtgcgtgcagagagagatcaagccccacatgagaaagatgctggcctactggatgctggaggactgggaggtgctggtgctgggcaagctgaagtgggacctggccgccgtgatcgcccacgacttcctggccttcatcctgcacagactgagcctgcccagagacagacaggccctggtgaagaagcacgcccagaccttcctggccctgtgcgccaccgactacaccttcgccatgtacccccccagcatgatcgccaccggcagcatcggcgccgccgtgcagggcctgggcgcctgcagcatgagcggcgacgagctgaccgagctgctggccggcatcaccggcaccgaggtggactgcctgagagcctgccaggagcagatcgaggccgccctgagagagagcctgagagaggccagccagaccagcagcagccccgcccccaaggcccccagaggcagcagcagccagggccccagccagaccagcacccccaccgacgtgaccgccatccacctgtag

SEQ ID NO: 51970 - DNA, 1724 bp, Artificial Sequence
  derived and/or modified sequence
gcagtgccagcgccagcgccagacccgcgccccgcgctctccggcccgtcgcctgccttgggactcgcgagcccgcactcccgccctgcctgttcgctgcccgagtatggagctgctgtgttgcgaaggcacccggcacgcgccccgggccgggccggacccgcggctgctgggggaccagcgtgtcctgcagagcctgctccgcctggaggagcgctacgtaccccgcgcctcctacttccagtgcgtgcagcgggagatcaagccgcacatgcggaagatgctggcttactggatgctggaggactgggaggtgctggtcctagggaagctcaagtgggacctggctgctgtgattgcacatgatttcctggccttcattctgcaccggctctctctgccccgtgaccgacaggccttggtcaaaaagcatgcccagacctttttggccctctgtgctacagattatacctttgccatgtacccgccatccatgatcgccacgggcagcattggggctgcagtgcaaggcctgggtgcctgctccatgtccggggatgagctcacagagctgctggcagggatcactggcactgaagtggactgcctgcgggcctgtcaggagcagatcgaagctgcactcagggagagcctcagggaagcctctcagaccagctccagcccagcgcccaaagccccccggggctccagcagccaagggcccagccagaccagcactcctacagatgtcacagccatacacctgtagccctggagaggccctctggagtggccactaagcagaggaggggccgctgccacccacctccctgcctccaggaaccacaccacatctaagcctgaaggggcgtctgttcccccttcacaaagcccaagggatctggtcctacccatccccgcagtgtgcactaaggggcccggccagccatgtctgcatttcggtggctagtcaagctcctcctccctgcatctgaccagcagcgcctttcccaactctagctgggggtgggccaggctgatgggacagaattggatacatacaccagcattccttttgaacgcccccccccacccctgggggctctcatgttttcaactgccaaaatgctctagtgccttctaaaggtgttgtcccttctagggttattgcatttggattggggtccctctaaaatttaatgcatgatagacacatatgagggggaatagtctagatggctcctctcagtactttggaggcccctatgtagtccgtgctgacagctgctcctagagggaggggcctaggcctcagccagagaagctataaattcctctttgctttgctttctgctcagcttctcctgtgtgattgacagctttgctgctgaaggctcattttaatttattaattgctttgagcacaactttaagaggacataatggggtcctggccatcccacaagtggtggtaaccctggtggttgctgttttcctcccttctgctactggcaaaaggatctttgtggccaaggagctgctatagcctggggtggggtcatgccctcctctcccattgtccctctgccccatcctccagcagggaaaatgcagcagggatgccctggaggtggctgagcccctgtctagagagggaggcaagccctgttgacacaggtctttcctaaggctgcaaggtttaggctggtggcccaggaccatca

SEQ ID NO: 51971 - DNA, 1843 bp, Artificial Sequence
  derived and/or modified sequence
acctatgccgcgtggggcgggggctgcgggcgggggtgcgcggcgccggatgagcctcctggcctcgccgagggtgtacagggggtgggagagtcaggccggggaccgaaacttggctgagcagagcaccagcccctttgtctcctccgccccctcttccccacttcctgcccagctctggatcggcggcgcggcgcggactttgtaaacacttcgccactgcaggggtggagactggctctgttcggatgccggccgggggggagaggtgcaatcctctcctcgcggctggtggttgcgaccacccccactccccaaaggcaggctccggaggcggcgggacagagcgcctgcgaccccagtcggtgctccggggaggtcacctgacgaggaggactgggaggtgctggtcctagggaagctcaagtgggacctggctgctgtgattgcacatgatttcctggccttcattctgcaccggctctctctgccccgtgaccgacaggccttggtcaaaaagcatgcccagacctttttggccctctgtgctacagattatacctttgccatgtacccgccatccatgatcgccacgggcagcattggggctgcagtgcaaggcctgggtgcctgctccatgtccggggatgagctcacagagctgctggcagggatcactggcactgaagtggactgcctgcgggcctgtcaggagcagatcgaagctgcactcagggagagcctcagggaagcctctcagaccagctccagcccagcgcccaaagccccccggggctccagcagccaagggcccagccagaccagcactcctacagatgtcacagccatacacctgtagccctggagaggccctctggagtggccactaagcagaggaggggccgctgccacccacctccctgcctccaggaaccacaccacatctaagcctgaaggggcgtctgttcccccttcacaaagcccaagggatctggtcctacccatccccgcagtgtgcactaaggggcccggccagccatgtctgcatttcggtggctagtcaagctcctcctccctgcatctgaccagcagcgcctttcccaactctagctgggggtgggccaggctgatgggacagaattggatacatacaccagcattccttttgaacgcccccccccacccctgggggctctcatgttttcaactgccaaaatgctctagtgccttctaaaggtgttgtcccttctagggttattgcatttggattggggtccctctaaaatttaatgcatgatagacacatatgagggggaatagtctagatggctcctctcagtactttggaggcccctatgtagtccgtgctgacagctgctcctagagggaggggcctaggcctcagccagagaagctataaattcctctttgctttgctttctgctcagcttctcctgtgtgattgacagctttgctgctgaaggctcattttaatttattaattgctttgagcacaactttaagaggacataatggggtcctggccatcccacaagtggtggtaaccctggtggttgctgttttcctcccttctgctactggcaaaaggatctttgtggccaaggagctgctatagcctggggtggggtcatgccctcctctcccattgtccctctgccccatcctccagcagggaaaatgcagcagggatgccctggaggtggctgagcccctgtctagagagggaggcaagccctgttgacacaggtctttcctaaggctgcaaggtttaggctggtggcccaggaccatcatcctactgtaataaagatgattgtgaaat

SEQ ID NO: 51972 - DNA, 663 bp, Artificial Sequence
  derived and/or modified sequence
atggaacttttgtgctgtgagggcactcggcacgccccccgcgccggacccgatccaagactccttggagaccagcgcgtgctgcaatccctgttgcgattagaagaacgttatgtcccccgggcctcttacttccagtgtgtacagagggagataaagccgcatatgaggaaaatgctggcctattggatgctggaagactgggaagtgctcgtgctgggcaagctcaagtgggacctggccgcggtcattgcacatgactttctggctttcattctgcatcgattgtcacttcccagagacagacaggccctcgtgaaaaaacacgcacaaacgttcttggcgctctgcgccaccgactatactttcgctatgtacccgccttctatgattgccacagggtccataggggccgcagttcaaggcctgggggcttgcagcatgtcaggcgacgaactgacagaactgctggctggaattactggtactgaagtcgactgtctgagggcttgtcaggaacagatagaggctgcactgcgggaaagtctccgggaggcctcccaaacatcgagctctccagcccccaaggcaccccgtgggagcagttctcagggtcccagccaaactagcacgcctaccgatgtgacggcaatccacttatag

SEQ ID NO: 51973 - DNA, 663 bp, Artificial Sequence
  derived and/or modified sequence
atggagctgctgtgctgtgagggcaccaggcatgcccccagggctggccctgacccccggctgctgggggaccagagggtgctgcagagcctgctgcggctggaggagcgctacgtgccccgggccagctacttccagtgtgtgcagcgggagatcaagccccacatgaggaagatgctggcctactggatgctggaggactgggaggtgctggtgctgggcaagctgaagtgggacctggccgccgtcatcgcccatgacttcctggccttcatcctgcaccggctgagcctgccccgggaccggcaggccctggtgaagaagcacgcccagaccttcctggccctgtgtgccacagactacacctttgccatgtacccacccagcatgattgccaccggcagcatcggggctgctgtgcagggcctgggcgcctgcagcatgtctggagatgagctgacagagctgctggccggcatcactggaacagaggtggactgcctgcgggcctgccaggagcagattgaagctgccctgcgggagagcctgcgggaggccagccagaccagcagcagccctgcccccaaggccccccggggcagcagcagccagggccccagccagaccagcacccccacagatgtgacagccatccacctgtag

SEQ ID NO: 51974 - DNA, 663 bp, Artificial Sequence
  derived and/or modified sequence
atggagctgctgtgctgcgagggcacccggcacgccccccgggccgggcccgatcctcgacttttgggtgaccagcgtgtgttgcagagcttactgcgcctggaggagagatacgtgccaagggcttcctatttccagtgtgtccagcgggagattaaaccccacatgaggaaaatgctggcttattggatgttagaggactgggaggttctggtcctgggtaaactcaaatgggacctggccgccgtgattgcccacgacttcctggccttcatcttacataggctatctttgccacgagaccggcaggccttggtgaagaagcacgctcagacctttcttgccctttgcgcgaccgattatacgtttgccatgtacccccccagcatgattgccaccggctctatcggcgctgctgtgcagggcctgggcgcctgttccatgtccggtgatgagctcactgaattgcttgcgggcattaccggaacagaagtggactgccttcgggcttgccaggaacaaattgaggccgctctgagagagtccttgagggaggccagccagacgtccagctcacccgcccccaaagcaccccgtggttcttccagccaaggcccctcccagacctctactccaacggacgtgacagctatccacctctag

SEQ ID NO: 51975 - DNA, 663 bp, Artificial Sequence
  derived and/or modified sequence
atggaactcttgtgttgcgagggaacccggcacgcccctcgcgcaggccctgatcccagactgctcggggaccaaagagtgttgcagagtcttctcaggctggaagaaaggtacgttccaagggcctcatattttcaatgcgtccagcgggagatcaagccacatatgcgtaagatgttggcttattggatgttagaagattgggaggtcctcgttctgggaaagctgaaatgggatctggccgctgtgattgcacatgacttccttgccttcattctccacagacttagtctgcctagggatagacaggcactggtgaaaaagcatgcgcagacctttttggccctctgtgccaccgattacacattcgcaatgtatcctccctctatgatagcaaccgggtcaatcggggctgccgtccaggggctgggtgcgtgctccatgtccggcgatgaattgacggaattgctggcgggtatcacaggcactgaggtggactgcctgcgagcctgccaggagcagattgaggccgctctgagggagtccctccgtgaagcaagccaaacgagttcctcccctgctcctaaggcacctaggggctcctcgagccagggtccttcacagacaagcactccgacagacgtaacggccatccacttatag

SEQ ID NO: 51976 - protein, 859 aa, Artificial Sequence
  derived and/or modified sequence
MGNREMEELIPLVNRLQDAFSALGQSCLLELPQIAVVGGQSAGKSSVLENFVGRDFLPRGSGIVTRRPLVLQLVTSKAEYAEFLHCKGKKFTDFDEVRLEIEAETDRVTGMNKGISSIPINLRVYSPHVLNLTLIDLPGITKVPVGDQPPDIEYQIREMIMQFITRENCLILAVTPANTDLANSDALKLAKEVDPQGLRTIGVITKLDLMDEGTDARDVLENKLLPLRRGYVGVVNRSQKDIDGKKDIKAAMLAERKFFLSHPAYRHIADRMGTPHLQKVLNQQLTNHIRDTLPNFRNKLQGQLLSIEHEVEAYKNFKPEDPTRKTKALLQMVQQFAVDFEKRIEGSGDQVDTLELSGGAKINRIFHERFPFEIVKMEFNEKELRREISYAIKNIHGIRTGLFTPDMAFEAIVKKQIVKLKGPSLKSVDLVIQELINTVKKCTKKLANFPRLCEETERIVANHIREREGKTKDQVLLLIDIQVSYINTNHEDFIGFANAQQRSSQVHKKTTVGNQVIRKGWLTISNIGIMKGGSKGYWFVLTAESLSWYKDDEEKEKKYMLPLDNLKVRDVEKSFMSSKHIFALFNTEQRNVYKDYRFLELACDSQEDVDSWKASLLRAGVYPDKSVAENDENGQAENFSMDPQLERQVETIRNLVDSYMSIINKCIRDLIPKTIMHLMINNVKDFINSELLAQLYSSEDQNTLMEESAEQAQRRDEMLRMYQALKEALGIIGDISTATVSTPAPPPVDDSWIQHSRRSPPPSPTTQRRPTLSAPLARPTSGRGPAPAIPSPGPHSGAPPVPFRPGPLPPFPSSSDSFGAPPQVPSRPTRAPPSVPSRRPPPSPTRPTIIRPLESSLLD

SEQ ID NO: 51977 - protein, 445 aa, Artificial Sequence
  derived and/or modified sequence
MNKGISSIPINLRVYSPHVLNLTLIDLPGITKVPVGDQPPDIEYQIREMIMQFITRENCLILAVTPANTDLANSDALKLAKEVDPQGLRTIGVITKLDLMDEGTDARDVLENKLLPLRRGYVGVVNRSQKDIDGKKDIKAAMLAERKFFLSHPAYRHIADRMGTPHLQKVLNQQLTNHIRDTLPNFRNKLQGQLLSIEHEVEAYKNFKPEDPTRKTKALLQMVQQFAVDFEKRIEGSGDQVDTLELSGGAKINRIFHERFPFEIVKMEFNEKELRREISYAIKNIHGIRTGLFTPDMAFEAIVKKQIVKLKGPSLKSVDLVIQELINTVKKCTKKLANFPRLCEETERIVANHIREREGKTKDQVLLLIDIQVSYINTNHEDFIGFANAQQRSSQVHKKTTVGNQVIRKGWLTISNIGIMKGGSKGYWFVLTAESLSWYKDDEEK

SEQ ID NO: 51978 - DNA, 2580 bp, Artificial Sequence
  derived and/or modified sequence
atgggcaacagagagatggaggagctgatccccctggtgaacagactgcaggacgccttcagcgccctgggccagagctgcctgctggagctgccccagatcgccgtggtgggcggccagagcgccggcaagagcagcgtgctggagaacttcgtgggcagagacttcctgcccagaggcagcggcatcgtgaccagaagacccctggtgctgcagctggtgaccagcaaggccgagtacgccgagttcctgcactgcaagggcaagaagttcaccgacttcgacgaggtgagactggagatcgaggccgagaccgacagagtgaccggcatgaacaagggcatcagcagcatccccatcaacctgagagtgtacagcccccacgtgctgaacctgaccctgatcgacctgcccggcatcaccaaggtgcccgtgggcgaccagccccccgacatcgagtaccagatcagagagatgatcatgcagttcatcaccagagagaactgcctgatcctggccgtgacccccgccaacaccgacctggccaacagcgacgccctgaagctggccaaggaggtggacccccagggcctgagaaccatcggcgtgatcaccaagctggacctgatggacgagggcaccgacgccagagacgtgctggagaacaagctgctgcccctgagaagaggctacgtgggcgtggtgaacagaagccagaaggacatcgacggcaagaaggacatcaaggccgccatgctggccgagagaaagttcttcctgagccaccccgcctacagacacatcgccgacagaatgggcaccccccacctgcagaaggtgctgaaccagcagctgaccaaccacatcagagacaccctgcccaacttcagaaacaagctgcagggccagctgctgagcatcgagcacgaggtggaggcctacaagaacttcaagcccgaggaccccaccagaaagaccaaggccctgctgcagatggtgcagcagttcgccgtggacttcgagaagagaatcgagggcagcggcgaccaggtggacaccctggagctgagcggcggcgccaagatcaacagaatcttccacgagagattccccttcgagatcgtgaagatggagttcaacgagaaggagctgagaagagagatcagctacgccatcaagaacatccacggcatcagaaccggcctgttcacccccgacatggccttcgaggccatcgtgaagaagcagatcgtgaagctgaagggccccagcctgaagagcgtggacctggtgatccaggagctgatcaacaccgtgaagaagtgcaccaagaagctggccaacttccccagactgtgcgaggagaccgagagaatcgtggccaaccacatcagagagagagagggcaagaccaaggaccaggtgctgctgctgatcgacatccaggtgagctacatcaacaccaaccacgaggacttcatcggcttcgccaacgcccagcagagaagcagccaggtgcacaagaagaccaccgtgggcaaccaggtgatcagaaagggctggctgaccatcagcaacatcggcatcatgaagggcggcagcaagggctactggttcgtgctgaccgccgagagcctgagctggtacaaggacgacgaggagaaggagaagaagtacatgctgcccctggacaacctgaaggtgagagacgtggagaagagcttcatgagcagcaagcacatcttcgccctgttcaacaccgagcagagaaacgtgtacaaggactacagattcctggagctggcctgcgacagccaggaggacgtggacagctggaaggccagcctgctgagagccggcgtgtaccccgacaagagcgtggccgagaacgacgagaacggccaggccgagaacttcagcatggacccccagctggagagacaggtggagaccatcagaaacctggtggacagctacatgagcatcatcaacaagtgcatcagagacctgatccccaagaccatcatgcacctgatgatcaacaacgtgaaggacttcatcaacagcgagctgctggcccagctgtacagcagcgaggaccagaacaccctgatggaggagagcgccgagcaggcccagagaagagacgagatgctgagaatgtaccaggccctgaaggaggccctgggcatcatcggcgacatcagcaccgccaccgtgagcacccccgcccccccccccgtggacgacagctggatccagcacagcagaagaagccccccccccagccccaccacccagagaagacccaccctgagcgcccccctggccagacccaccagcggcagaggccccgcccccgccatccccagccccggcccccacagcggcgccccccccgtgcccttcagacccggccccctgccccccttccccagcagcagcgacagcttcggcgcccccccccaggtgcccagcagacccaccagagccccccccagcgtgcccagcagaagacccccccccagccccaccagacccaccatcatcagacccctggagagcagcctgctggactag

SEQ ID NO: 51979 - DNA, 2580 bp, Artificial Sequence
  derived and/or modified sequence
atgggtaaccgcgagatggaagagctcattcccctcgtgaataggttgcaggacgccttttcagccctcggccagagctgtcttttagaactgccacagatcgctgttgtgggaggtcagtccgccggcaaatcaagcgtattggaaaatttcgtcggacgtgactttctcccccggggcagcgggatagtgacgagacgtccccttgttttacagctggtgacatccaaggccgaatacgctgagtttttgcactgcaaaggcaagaagttcacagacttcgatgaagtgagactggagatcgaggccgagacggaccgggttaccgggatgaataaaggaatttcctccatcccaataaatctacgggtgtattcccctcacgttttgaacctgaccctcatcgatctgcccggcattaccaaagtgcctgtgggagatcagcctcccgacattgaataccaaatccgagagatgataatgcagttcatcactcgggagaattgccttatcctcgctgttacaccagctaacaccgacctcgccaacagcgacgcactgaaattggccaaggaggtggaccctcagggtctgaggactattggggtaataacaaagcttgacctgatggatgaggggacggatgcaagggacgtgctagaaaacaaacttctcccgctcaggaggggttatgtgggagtcgtgaatagaagccagaaggatatcgacggcaaaaaggacatcaaagcagccatgcttgccgagaggaaattttttctatcccatcctgcctataggcacatcgctgatcgaatgggaactccacatctgcagaaggtcctgaaccagcagctcaccaatcatattcgtgacaccctccccaacttcagaaataagctacaagggcagctgctttccatagagcacgaggtggaagcctataagaactttaagccagaggatcctaccagaaaaactaaggcattactgcaaatggtgcagcagtttgcagtggattttgagaaacggattgaagggtcaggtgaccaggtcgacaccctcgaactgtctggaggcgcaaaaatcaacaggatcttccacgagcgcttccccttcgagatcgtcaaaatggaatttaatgaaaaagagcttcggagggagatctcatatgcaatcaaaaacattcacggcatacgaaccgggctatttacaccggacatggccttcgaagcaattgtcaagaaacagatagtgaaactgaagggaccatccttaaaaagtgtcgacctggtcatccaggagttaatcaacactgtgaaaaaatgcaccaaaaagctggccaacttccctcgcctttgcgaggagaccgaaaggatcgtagccaaccacatccgcgagcgagagggaaagactaaagaccaggtactcctcctgatcgacatccaggtcagttatattaacacaaaccacgaggatttcattggttttgctaacgctcagcagagatccagccaggtacacaaaaagactactgttggaaatcaagtaatcaggaaaggctggctcaccataagtaacatcgggataatgaaaggggggtcgaaaggatattggtttgtcttgacagcagaatccctgagttggtataaggacgatgaggagaaagaaaaaaagtatatgttgcctttggacaacctgaaggtcagggacgtggagaagtcatttatgtcaagtaagcatatctttgctctcttcaacaccgagcagcgcaacgtttataaagattaccggttcttagagcttgcctgcgacagccaggaggatgtggactcttggaaggccagcctgctgcgggccggggtctatccagataagagtgtggccgagaatgacgaaaatggccaggcggagaacttcagtatggacccgcaactagagcgccaggtggaaacaatcagaaatcttgtcgacagttacatgtctatcattaacaaatgtataagggacctgatccccaagaccattatgcatctcatgattaacaatgtgaaggattttatcaattcagagctgctcgcgcaactatacagctctgaagaccagaatactctgatggaggagtccgccgagcaggctcagagaagggacgaaatgttgaggatgtatcaggcactgaaagaagcccttgggataattggagatatctcaactgctactgtatccacaccagctcccccccccgtcgacgattcgtggatccaacacagccgaagatcaccacccccatcacctaccacacaacggcggccaactctgtccgccccactagctagacctacgagcggcagggggcccgccccagcaatcccttcacctggacctcacagtggcgcaccacctgtgccatttcgtccgggcccgttaccgcctttccctagttctagtgattcctttggagccccccctcaggtccccagtcggcctaccagggcccctccctccgtgccctccaggcggcccccccccagccctacacgcccaacaatcatcaggccactggagtcatcccttctggactag

SEQ ID NO: 51980 - DNA, 7613 bp, Artificial Sequence
  derived and/or modified sequence
agccaagcggcgggctggcggcgggctccgacgtctgcgccaggacctggctggctgagcccggcgcagcagcagcagccagggcagcgcggcccctactccctgtcaggtcgtagaggcgagcagggaccagctggtcgccggcccctcgggcaagatggggaaccgggagatggaggagctgatcccgctggtgaaccgtctgcaggacgcgttttcggcgctgggacagagctgcctgctggagctgccgcagatcgccgtggtgggcggccagagcgccggcaagagctcggtgctcgagaacttcgtgggcagggactttctccctcgagggtcgggcattgtaacaagacgacctcttgtgctgcagcttgttacttctaaagcagaatatgccgagtttctacattgcaaaggaaagaaatttacagattttgatgaagttcgccttgagattgaagcagaaacagatcgcgtgactggaatgaataaaggcatttcctccatacccattaatttacgagtctattccccacacgtgttaaatctaacccttattgatctacctggaataactaaagtgcctgtgggagatcagccaccagatatcgagtatcagatcagagaaatgattatgcagttcatcacgagggagaactgtctgattttagctgttactccagccaacactgatcttgcaaactcagatgcgctgaagctagctaaagaagttgatcctcaaggtctgagaaccattggagttatcaccaaactggaccttatggatgaaggaacggatgccagggatgttctagagaacaaactgttgcctcttcgcaggggttacgtgggggtggtaaacagaagccagaaggacatagatgggaagaaggacataaaggcagccatgctggcagagaggaagtttttcctttcccacccggcttacagacatatcgctgaccgaatgggaaccccacacctgcagaaggtccttaatcagcaacttaccaaccacattcgggataccctaccaaacttcaggaacaaactacagggacagttgctctccatagaacatgaagtagaagcctacaaaaatttcaaaccagaagacccaacaaggaagaccaaagcattgctgcagatggttcagcaatttgctgtggactttgagaagagaattgaagggtcaggggatcaagtagataccctggaactctcaggtggtgctaaaatcaatcgtatttttcatgaacgctttccttttgagatagtaaagatggagttcaatgagaaagaattgcgaagagaaataagctatgcaatcaaaaacatacatggtatcaggacagggttgtttactccagacatggcatttgaagcgatagtcaagaaacagattgtaaagttgaaagggccttccttgaagagtgtggatctggtaatacaagaattaatcaacactgtgaagaagtgtaccaaaaaactggcaaacttccccagactctgcgaggaaacggaaaggattgttgctaaccacattcgtgagcgagaagggaagacaaaggaccaggtattgctattgattgacattcaagtctcttacatcaacaccaaccatgaagacttcattggcttcgcaaatgctcagcagaggagcagtcaggttcacaagaaaaccacagttggaaatcaggtgattcgcaaggggtggctcaccatcagcaacattggcatcatgaaaggcggctcgaagggatactggttcgtccttactgcggaaagcttgtcctggtataaagatgatgaggaaaaagaaaagaagtacatgcttcccttggacaacctgaaagttcgggatgtggaaaagagctttatgtctagcaagcacatctttgcactctttaatacagagcaaaggaatgtatacaaagactatcgcttccttgagctggcatgtgattcccaggaggatgtcgacagctggaaggcatctctactaagagctggggtctatcctgacaaatctgtagctgaaaatgatgagaatggacaagcagaaaacttttccatggacccacaattggagaggcaagtggagaccattcgcaacctcgtagactcctacatgtccattatcaacaaatgtatccgagatctaattccaaaaacaataatgcaccttatgatcaataacgttaaagatttcataaattccgagctcctagcacagttgtattcttcagaggaccaaaataccctgatggaggaatctgctgagcaggctcagcgccgggatgagatgcttcgaatgtatcaagcactgaaagaagcccttgggataattggggacatcagcacagccaccgtgtccactccggcaccccctccagtggatgactcctggatacagcactctcgcaggtcacctcctccaagccccacaacccaaaggaggccaacactaagtgctcccctcgcaaggcccacatccggccgaggaccagctcctgccattccctctcctggcccccactctggggctcctccagtcccattccgtccaggcccattacctcctttccccagcagcagtgactccttcggagcccctccacaagttccatctaggcctacgagggccccgcccagtgtcccaagccggagaccacccccatcaccaactcgtcccactataatccgcccactagaatcctccctgttagactaaacgaagtgtctggcatggcaattaatcactaatgaattatgcgaaagcaacatatttgataaccgttgcagtaaatcatgagtagtcgcatgtgtggacatcagtaggcaagtaaccagttttactaatgcattcatcgctcatcttcattgctcatggtatgtcaaacctttggggtttgactcagaaactgctaaccttttagaggctttatatgttgtactgaccaaggtaggtttgtatagcagccctatactttggggatcatttgcctaccatggcatatatttgaaattgctttggacaagttttctaggctatctaccaggtagctcattaaacgtaattcttcagatatgagatagtgggcttagacctaagccatacatatttcttttcccacattctgtttaggatgacagtaattctgttgtctaccattaatgctactacctactccataattgcctatttagctcctcttttcttcctttttatttcataagactgctaggaagtgattttttaaaattaggactccttaagaataaacttttccagaagcacgaggtagtttgcaaaggaaaagtctgcactgtttgctctaaagagcttctcctcattccaatgtgttttgcttcatgctagaagcatatgcaacagtgaataaaagcttctttttttgttaatcagtcaataaatttggctaattagtttcagagttcaaggaagaagcaaaatatcacatctctagaagtgttgggaaaaatataatttctttctttacttatattcacctcatggtaggttatattgaaggctgacatggagaatgtttacttttctatttggcatagctaactacactttgatactaactccagttttactattattattttggttggaaaaaaaattcactctttacgtgctaatttgtaatcttgttttgtaagaatttatcctacccttgaaacaggctcagtgtaactgtatatccattctaggctttcttaataaatcttgaggctatgggataatcacatttaaagaatggttcctgaaatgaagtcagtagaaatggcatgggataagagcagagctcacacttttacagttgcagtatttcaaagtccctatccaggtcactccagaaaagggtattgaaacgttgaaatctaaagcaaatttgcaatttcttaagatttctaaaatttaccagaacagtttagcctgggggttaatagttaagtcttgaggctaagttttggactaccaaggaccagatgattcacatgtaggaaacagccagaagccaactggaattttgtgtgctaactgttcccagacagcagagcaagtattcactgagtaggggtgtcccatgacactatttcatattctacagaagtaaatcaggtttcaccaactgaaatgtctccctttgaaagtagcaaacatgatttgtatgttaacttaactttaatttcctgtgtagtttacacccagagcagatactcataaagtataaagtaaaaacttttaaccattattaaacagagaacttgccatgttgagtgccattgtattgaacttattctaaaggcttatgctaacccatttataattggtaaaaatcagaaaatacaagatttacataaaggtcatttcaacttttaaggttaccagtgattgtataaaaacatcacaatcctaaatcctctcgtatctcaccccaaaccccaaactgggggaaaaaaagttaactctttgtgaatggaaccaatgtgcaagatacatactgcatttttaaaatagtgtctcagctaaatggaaaactgttaagcaaacatccatagtaaaacaaataatcttcagtgagatctttttataaaacttcttgtttttaggattccctttgcttcttcctttgaattctctaaaataggcagctaacggattatatacttcagggtttggctttgtgctaaatgtggttttgtgttttgctgtatttcaaaattttccttctgttaaaggaaaatattgtgaataaccactggtgtgttcttagatcagcacaaaccatgtcaaaaaaaattggagatttttttccaattttccttccactgatcttaggcagtaataaacaatggcatttgtcatctttggcacttgcttttagattatagtcccacagttgcactgccccaattgtctacctttgtgggtacatttttgttctttactcctaagttatttctcatagaacccagcctactctagaatttcagcagtgacattggagaatatttttaatttgctgcagtactatgtcatattattagtatgaatctcatttcccaaagggtttgtattctgctaaaaggagatgccaatgttgaatgaagtctgaaactctagtatgtgcatagtttgacgtgcagcatgcacaccaggccttaagatgggaatgtagcttaatgattttctgtttcccataccatttctaatcttttgtgtaattttctcttaactgattgctctgatattgtaaacacaatagatgtagctctatcatgtctagcataatttaaaaaatcagtgtttttaggatttgggaaaataaactgtaaatgtttatttgataggtaaatatagttttattgtcacatgctaaatattgcatgcatattgactaattggaataaccatttactcaattatggacagcttattgaaatagtattgatttagaaaaagtatattgcatttctaaaaaacatctaccaaggttactcgtctgaatattgcttttagccgtgttttataacatagacgagcagtagggtctgtttattagcaaatttcctatttgttccaatacaaactcactttattctaaagtatattaatgaaaccagttcctgtgatgtaactgtaagccttctcgacttagacttaaaaagtggtcacatagattaattttgtgactttttagtatagactgtagccataattctcaaatatgaaatgggacctaataccagtatgtgataaatgttgatgttttctgtgtacaaacacattttctatgcatgtgtctctgtgtatatggcatatacctagtaagtatgtttctgtaagtatgtgtattttatgtccatttgagtaggtaggtaggttttaaaaatactagttaaaatgccacaagcatgagtgtgattgtatgtgcactgtgtgtatatatataaatatatgtatatgtatggttgtaaatatctatgtatacatgtacttagtatgtgtggtatcaggatattttttaaactgtgataatacaacagatagctttgaatgatctgccataacatgtggtaacaatagttcatttctcataacatatatgaggtatacaaaattttctaactccagattgtagtcattttgagaggtacaaagctcataattaccatgacaacatggtaatgtccatagacatttgtatctgaatccacaagaagatctgaatctaagaaggaattacctttgacaatatttttcggtaagaagtaaaacctctggagacctatctttaagatctctaattggaattataaattatttttggattgctgagctgaatcttaaaaagccaagttgatatacatagtcatttttcctctatggtagaagtaaaaaaaaaaaaaaaggacatagcaacattaaagtagtggatttttctgagtaaatttgctgaaaatataagagagaagctatctaataccttggaggtaggtcatccactttttcaggtaaacatttttcatttggcaaatggcataattatttgaaagtgacaggaatctcctcagaatgaagaataaagcctactaggtctctaactgttgaactcatgaaagaagatagtgtatgagacttaagccatgagttttgtatcatttcaattagaagactactagctgtgagctcagagtttaatgtaaatgaatctagatgattttgaagaaatgattattcgttcaccagatcactcattgtacattctaaaaagctcaaatgagtcttctagatactcttactcatcctgtctggttgctatgtttaaaattatgtggtgctgtgtaggtgaaactttaagaatatttttgaagcatatgtaatatatgcactgctatttgtgtgtgtgtgtgtgtctttgtatatatgtaagaatgtgtgtatgtgtgagagcaagagagaggaaactcaaagaggagtgtttgtcttaagacctgttcatactggtatattggtgagacttctcacttctggttggaggtttcacatatggctcaactcaagtcattaatctctttttaatttttactcttgaattccttaaacttcgctcattatgaaatgttttaaaattatgacaaaaattactctgtctaaccacttgccttgtctgctaccagtttgttaaaaattattccccccaaccagtaattccaccagtactacttgatttgtgttatatttcctatgtacatgtacagcctttgttttgcttgcttgtctatttttactttcccttttttgggtcaaatttttcttttgctttgtttgaagaaggaatatacagaagtaaaatcttgtcttctctgctgattctttaattaatatgagccggatactttccactgtcttcttggcactttcaggatttcttaatgctgatatatggactcttagaatggaatttttgaagaaaaatctcaaagcctgtatcgttcttgaaggtcacatgtacctattgtgaaaatgtgaagctgtatttctgaagctgaaataaattataacatttgaagga

SEQ ID NO: 51981 - DNA, 2580 bp, Artificial Sequence
  derived and/or modified sequence
atgggcaaccgggagatggaggagctgatccccctggtgaaccggctgcaggatgccttcagcgccctgggccagagctgcctgctggagctgccccagattgctgtggtgggcggccagagcgctgggaagagctctgtgctggagaactttgtgggccgggacttcctgccccggggcagcggcatcgtgacccggcggcccctggtgctgcagctggtgaccagcaaggccgagtatgcagagttcctgcactgcaagggcaagaagttcacagactttgatgaggtgcggctggagattgaagctgagacagacagagtgacaggcatgaacaagggcatcagcagcatccccatcaacctgcgggtgtacagcccccacgtgctgaacctgaccctgattgacctgcccggcatcaccaaggtgcctgtgggggaccagcccccagacatcgagtaccagatccgggagatgatcatgcagttcatcacccgggagaactgcctgatcctggccgtgaccccagccaacacagacctggccaacagtgatgccctgaagctggccaaggaggtggacccccagggcctgcggaccatcggggtcatcaccaagctggacctgatggatgagggcacagatgccagagatgtgctggagaacaagctgctgcccctgcggcggggctacgtgggcgtggtgaacagaagccagaaggacattgatggcaagaaggacatcaaggccgccatgctggccgagaggaagttcttcctgagccacccagcctaccgccacatcgctgacaggatgggcaccccccacctgcagaaggtgctgaaccagcagctgaccaaccacatccgggacaccctgcccaacttcaggaacaagctgcagggccagctgctgagcattgaacatgaggtggaggcctacaagaacttcaagccagaggaccccaccaggaagaccaaggccctgctgcagatggtgcagcagtttgctgtggactttgagaagagaattgagggcagcggggaccaggtggacaccctggagctgtctggaggagccaagatcaaccgcatcttccacgagcgcttcccctttgagatcgtgaagatggagttcaatgagaaggagctgcggcgggagatctcctatgccatcaagaacatccacggcatcagaacaggcctcttcaccccagacatggcctttgaggccatcgtgaagaagcagatcgtgaagctgaagggccccagcctgaagtctgtggacctggtgatccaggagctgatcaacacagtgaagaagtgcaccaagaagctggccaacttcccccggctgtgtgaggagacagaaagaattgtggccaaccacatccgggagcgggagggcaagaccaaggaccaggtgctgctgctgattgacatccaggtgtcctacatcaacaccaaccacgaggacttcatcggctttgccaatgcccagcagaggagcagccaggtgcacaagaagaccaccgtgggcaaccaggtgatcaggaagggctggctgaccatcagcaacatcggcatcatgaagggcggcagcaagggctactggtttgtgctgacagctgagagcctgtcctggtacaaggatgatgaggagaaggagaagaagtacatgctgcccctggacaacctgaaggtgagagatgtggagaagagcttcatgagcagcaagcacatctttgccctcttcaacacagagcagagaaatgtgtacaaggactaccgcttcctggagctggcctgtgacagccaggaggatgtggacagctggaaggccagcctgctgcgggccggcgtgtacccagacaagtctgtggctgaaaatgatgaaaatggccaggccgagaacttctccatggacccccagctggagcggcaggtggagaccatccggaacctggtggacagctacatgagcatcatcaacaagtgcatccgggacctgatccccaagaccatcatgcacctgatgatcaacaacgtgaaggacttcatcaacagcgagctgctggcccagctgtacagcagcgaggaccagaacaccctgatggaggagagcgctgagcaggcccagaggagagatgagatgctgaggatgtaccaggccctgaaggaggccctgggcatcatcggggacatcagcacagccaccgtgtccaccccagcccctcctcctgtggatgacagctggatccagcacagcagaagaagccccccacccagccccaccacccagaggcggcccaccctgagcgcccccctggcccggcccaccagcggccggggccctgccccagccatccccagccctggcccccacagcggggcccctcctgtgcccttccggcccggccccctgccccccttccccagcagcagtgacagctttggagccccaccccaggtgcccagccggcccacccgggccccacccagcgtgcccagccggcggcccccacccagccccacccggcccaccatcatccggcccctggagagcagcctgctggactag

SEQ ID NO: 51982 - DNA, 2580 bp, Artificial Sequence
  derived and/or modified sequence
atgggcaaccgggagatggaggagctgatccccctggtgaaccggctccaagacgccttttcagcattgggacagtcttgcctccttgaattgccacagatcgccgtcgtgggtggccaatccgccgggaagtcatcggtattagagaactttgtgggcagagattttctcccccggggtagtggcatcgtgaccaggagacctctcgtactccagcttgtgacaagcaaggccgaatatgcagaatttctccactgcaagggcaaaaaatttaccgattttgacgaagtccgcctcgaaattgaagctgagacggatcgtgtgacaggcatgaacaaggggatttcctccatccccataaacctgcgcgtttattccccgcatgtattgaatttaactttaattgacctgccaggcataacaaaagtgccggttggagatcagccccctgacatcgagtaccagatccgggagatgatcatgcagtttatcacccgtgagaactgcctcatacttgctgtcacgcctgccaacacagaccttgccaactctgatgcgctgaagctcgccaaggaagtcgacccccagggcctgcgaacgatcggcgtgatcacaaagcttgacctgatggacgagggaactgatgcccgtgacgtcttggagaacaagctgcttccactcagaaggggctatgtgggcgtcgtgaataggtcacagaaagacatcgacggaaagaaagatataaaggcagctatgctcgctgagcggaaatttttcctcagtcaccccgcctacaggcatattgccgatagaatggggaccccacatctgcagaaggttcttaatcagcagctgacaaatcatattagggacacgctgcctaatttccggaataagttacagggccaactcctaagtatagagcacgaggtggaagcttataagaactttaagcctgaggacccgacacgcaagacaaaggcattgctacaaatggttcagcagttcgctgtggattttgaaaagagaattgaagggagtggagatcaagtggatacattagagctctccggtggtgcgaagattaatagaatctttcatgaaaggttcccgttcgagatagtaaagatggagtttaatgagaaggaattacgcagggagatctcctacgcaattaagaacattcatggcatccggacagggctgttcactccagacatggcctttgaagcgattgtgaaaaaacagattgtgaaactgaaaggccctagcctcaaaagcgtggatttggtcatccaggagctgatcaacacagtgaagaaatgcactaagaagctcgctaattttccgcgcctgtgcgaggaaacagagaggatcgtcgctaaccacatcagagagcgcgagggcaagacgaaggaccaagtgctgcttctgattgacatccaggtgtcgtatataaatactaaccacgaggattttattggatttgcaaatgcccagcagaggtcttcccaagtgcataagaagactactgtcggcaaccaagttatacgcaagggctggctcaccatctcaaacataggcattatgaagggcggttccaaaggctattggtttgtgctgaccgcggaatccctgtcctggtataaggatgatgaagagaaggaaaagaaatacatgctgcctctcgataaccttaaagtgcgggacgtcgagaaatcgttcatgtcaagcaaacatatcttcgccttattcaacaccgaacagcgaaatgtgtataaagattacaggtttttagaacttgcctgtgattcacaggaggacgtcgactcctggaaggcttccctgttacgcgcgggggtgtatcctgataagtctgtcgccgagaacgacgagaatgggcaggccgagaacttcagtatggatccgcaattggaacgacaggttgaaacgatacgtaatcttgtcgacagctatatgtccattataaacaaatgcatccgtgatttaatcccaaagacaatcatgcatcttatgattaacaatgtgaaagattttattaactcagaactgctggcacagctgtactccagcgaggaccagaatacactgatggaggaaagcgcagagcaagcgcagcgcagagatgaaatgctgaggatgtaccaggctctgaaagaggctttaggcattatcggcgacataagcacagctactgtgtctacacccgcgccacctcccgtagacgactcatggattcagcactcccggcggagtccacctccgtcccctacaacacaacgacgccctaccctcagcgcaccgctggcacgtcctacctccggcaggggccctgcgccagccatcccgtctcccgggccgcattcaggcgcccctcccgtgccatttaggccggggccactccctcctttcccgtcttccagcgatagcttcggtgcccccccccaggtcccatctaggccaacaagagcaccgccttccgtcccttcacgccgtcctcccccaagccccacaaggcctactatcatccggccgctcgagagctcactcctggattag

SEQ ID NO: 51983 - DNA, 2580 bp, Artificial Sequence
  derived and/or modified sequence
atgggtaacagggaaatggaggagttgattccgctcgtgaatcgccttcaggacgcattctctgccctcggccagtcatgcttgctggaacttccacagatcgctgtggttggcggtcagtccgcgggaaaatccagcgtcctagaaaatttcgtaggcagggacttcctccccaggggatccggaatagtcactaggagacccctggtcctgcagctcgtgacgtccaaagccgagtacgcagagttcttacattgcaaaggaaaaaagttcaccgacttcgacgaagtccggttggaaattgaggccgaaacagaccgcgtgactggtatgaacaagggaattagcagcattccgataaaccttagagtatacagcccccacgtcctcaatctcaccctgatcgatctccccggaatcacaaaagttcccgtcggggaccagcctcccgacattgagtatcaaatacgggaaatgatcatgcagtttatcacaagggagaattgtctcatactcgctgtgacccccgcaaacacggatctggctaacagtgacgcacttaagctggccaaagaagtcgatccacagggtcttaggacaataggggttatcactaagctggacttgatggatgaaggtaccgatgctagggacgttctggagaataagttgctgccacttagacgaggatatgttggggtggtgaacagaagccagaaggacattgatggcaagaaggacataaaagctgccatgcttgccgagcggaagtttttcctgtcccatccagcatatcgccatattgcagaccgcatgggtaccccacacctgcagaaggtgcttaaccagcagctaacgaaccacattagagacactctccctaacttccgtaacaagctgcagggacagctcctttctatagagcacgaagtcgaagcatataaaaacttcaagcctgaggatcccacccgcaagacgaaagccctgctccagatggttcagcagttcgccgttgattttgagaagcgaatcgagggatctggagaccaggtggatacccttgaactgtcaggcggtgccaagatcaaccgtatctttcacgagcggttcccatttgaaatcgtcaagatggaattcaacgaaaaggagctgaggcgggaaatctcttacgccatcaaaaatatccacggaatacgcaccggccttttcacacctgacatggccttcgaggctatcgtgaaaaagcagattgtgaagcttaaaggaccatcgctgaagtccgtagatctggtgatacaagaacttattaatactgtgaagaagtgcacaaagaaattagcaaactttcccaggctgtgcgaggaaacggagaggatcgtggccaaccatataagagagagagagggaaagaccaaggaccaggttctgctcctaattgatatccaggtgagctacatcaacaccaatcacgaagatttcatcggcttcgccaatgctcagcagcgttctagccaggtgcacaaaaagacaaccgtgggaaatcaagttattaggaagggatggttgactatctccaatatcggaatcatgaagggtgggtccaaggggtattggttcgttctgaccgctgagtctctgagttggtacaaggatgacgaagaaaaagaaaagaagtacatgcttcctctagacaatctcaaagtgagagatgtagaaaagtcattcatgtcttcaaaacacatcttcgcactcttcaataccgaacagcgcaacgtctacaaagattatcggtttcttgaacttgcgtgtgattcgcaggaggacgtggacagctggaaggcatccctcctgcgggctggcgtgtaccccgataagtcagtcgcagaaaatgacgaaaacgggcaagcggaaaactttagcatggaccctcagttagagaggcaggtggaaactatccggaatttggtggactcctacatgtctattatcaacaaatgcattcgagacctcatacctaaaactattatgcaccttatgatcaataacgtgaaggacttcatcaacagcgagcttctggctcagctctactcaagcgaggaccagaatactctgatggaggagtccgcagagcaggcgcagcgaagggatgagatgctgcggatgtatcaggccttgaaagaggctctgggcatcatcggcgatatttcaaccgccactgtaagcacacctgcacccccaccagtcgatgatagctggattcaacactccagacgatcaccacctccttcacccaccacccagcgcagacctacgttgtccgcacccctggctagacctacttcagggaggggcccagcgcctgccatacccagtccagggccacatagcggagcccctccagtgcccttccgacctggccctctgcctcccttcccctcttcttctgattccttcggagcgccaccacaagtgccctcgaggcctactcgagcgccaccctcggtcccttcacgccgaccacccccaagccccaccaggcccactatcataaggccgcttgaatcttccctgctcgattag

SEQ ID NO: 51984 - protein, 639 aa, Artificial Sequence
  derived and/or modified sequence
MLPGLALLLLAAWTARALEVYPELQITNVVEANQPVTIQNWCKRGRKQCKTHPHFVIPYRCLVGEFVSDALLVPDKCKFLHQERMDVCETHLHWHTVAKETCSEKSTNLHDYGMLLPCGIDKFRGVEFVCCPLAEESDNVDSADAEEDDSDVWWGGADTDYADGSEDKVVEVAEEEEVAEVEEEEADDDEDDEDGDEVEEEAEEPYEEATERTTSIATTTTTTTESVEEVVRVPTTAASTPDAVDKYLETPGDENEHAHFQKAKERLEAKHRERMSQVMREWEEAERQAKNLPKADKKAVIQHFQEKVESLEQEAANERQQLVETHMARVEAMLNDRRRLALENYITALQAVPPRPRHVFNMLKKYVRAEQKDRQHTLKHFEHVRMVDPKKAAQIRSQVMTHLRVIYERMNQSLSLLYNVPAVAEEIQDEVDELLQKEQNYSDDVLANMISEPRISYGNDALMPSLTETKTTVELLPVNGEFSLDDLQPWHSFGADSVPANTENEVEPVDARPAADRGLTTRPGSGLTNIKTEEISEVKMDAEFRHDSGYEVHHQKLVFFAEDVGSNKGAIIGLMVGGVVIATVIVITLVMLKKKQYTSIHHGVVEVDAAVTPEERHLSKMQQNGYENPTYKFFEQMQN

SEQ ID NO: 51985 - DNA, 2088 bp, Artificial Sequence
  derived and/or modified sequence
atgctgccaggccttgcgcttctcctcctcgcagcctggacagctagagccctggaggtgccaaccgacggcaacgcgggccttctggccgaaccacagatagcaatgttctgtggcaggctgaacatgcacatgaatgtgcaaaatggcaaatgggattcggacccaagtgggactaagacttgcattgacaccaaggagggaatactgcagtattgccaagaagtctatccagagctgcagattaccaacgtggtggaggctaaccagcccgtgactatacagaattggtgcaaacgtgggcggaaacagtgcaaaacccatccccattttgttataccttatcggtgtctggtcggagagtttgtttctgatgcacttttggtgccggataagtgcaagttcctccaccaggagcgcatggacgtgtgcgaaacacacctgcattggcataccgtagccaaagagacgtgttctgagaagagcacaaatctgcatgactacggaatgctcctcccttgtggtatcgataagtttcgcggagtggagtttgtgtgttgccccctggctgaggagagtgacaacgtggactctgctgacgcagaagaggacgactcagacgtctggtggggcggcgcggacaccgactatgcagacggatctgaagataaagtggtagaagtcgctgaggaagaagaggttgccgaggtggaagaggaggaagctgacgatgacgaagacgacgaagatggagacgaggtagaggaggaagcagaggaaccatatgaggaggcgaccgagcggactacatccatcgccacaactacgaccacaactaccgaatctgtggaggaggttgtccgcgttcccaccaccgccgcgagcacgcctgatgcagtggataagtatcttgaaactccaggcgacgagaacgagcacgctcactttcagaaagctaaagaaagactggaggcgaagcacagggaacggatgtcacaggtgatgcgcgagtgggaagaggctgagcgccaagcaaagaacttgccaaaagccgacaagaaagccgtaattcagcacttccaggaaaaagtcgaatccttagagcaggaagccgctaacgagagacagcagctagtggagactcatatggctagagttgaggccatgctcaacgatcggcgaagacttgcgctggagaattatattactgcactgcaggcagttccgcctagaccccgccacgtttttaatatgctcaaaaagtacgtgcgcgccgaacaaaaagaccgccagcacactctcaaacatttcgagcatgtgagaatggttgaccctaaaaaagctgcccagataagatcccaagtgatgacccacctgcgcgtgatctatgaaaggatgaatcagagccttagcctgttgtacaatgtcccagctgtcgccgaggagatccaggacgaggtggatgagctgctgcagaaggaacagaactatagcgacgacgtcctggccaacatgatttcggagccaagaatatcttatggcaatgatgccctgatgccctctctcacagagactaaaaccacagtggagttgttaccagtcaacggagagttctccttggacgatttacagccatggcatagctttggcgcagatagcgttccggccaataccgagaatgaggtcgaacccgtggacgcacgcccggctgcagatcggggcttgaccacaaggcctgggtcaggtctgacaaatatcaagaccgaggagatctctgaggtgaagatggacgccgagttccggcacgattcgggctatgaggtgcaccaccagaagttggtattttttgctgaggatgtggggtctaacaagggcgctattattggtctgatggtgggaggagttgtgatagccacagttatcgtaattactcttgtcatgctgaagaagaagcaatacacatccatacatcacggcgtggtcgaggtcgatgcagccgttacccccgaagagcggcacttgagtaagatgcagcagaacggatacgaaaacccaacttacaaattctttgaacagatgcagaactag

SEQ ID NO: 51986 - DNA, 1920 bp, Artificial Sequence
  derived and/or modified sequence
atgctgccagggctggccctcctattgctcgccgcttggaccgccagggctttggaggtgtaccccgaactccagatcaccaacgtggtcgaggccaatcaacctgtgacaatacaaaattggtgtaagcgagggcggaaacagtgtaaaactcacccccactttgtaattccctacaggtgcctggtgggtgaatttgtgtccgacgcactcctggtgccagataagtgtaagtttcttcaccaagaaagaatggacgtctgcgaaacccacttgcattggcacacagtagccaaagaaacatgcagcgaaaaaagcaccaatctacacgactatgggatgctgttaccatgcggcattgataaattccggggggtcgagttcgtgtgttgcccattggccgaggaaagcgacaatgtggacagcgccgatgccgaagaggatgattccgacgtgtggtgggggggcgctgatacagactatgcagatgggtccgaggataaagttgtcgaggtcgcagaggaagaggaggttgcggaagtagaggaagaggaagcagacgatgatgaagatgatgaggatggggacgaagttgaggaagaagcagaggaaccttacgaagaagctacggaacgcactacatcaattgccacaaccactacgacaaccacagagagcgttgaggaagtagtgagggtgcccaccactgcagccagtacccctgacgccgtcgacaaatacttggaaacccccggcgacgagaatgaacacgcccacttccagaaggcaaaagagagactcgaggctaagcacagagagaggatgtcccaggtcatgcgggaatgggaggaggccgaacgacaggccaagaatctgcccaaagccgataagaaggccgtaattcagcactttcaggaaaaggtggagagtctggaacaagaggctgctaatgaaagacaacagttagtggaaacacacatggccagggtggaggctatgctcaacgaccgccgccgcctggcactcgagaactacattaccgcgctgcaagctgtcccacccagaccaaggcacgttttcaatatgttgaagaaatacgtgcgggcggagcagaaagatagacagcacacacttaagcacttcgaacacgtcagaatggtggaccctaagaaggccgcccaaatccggagccaggtaatgactcatctccgcgtgatttacgaacgtatgaaccagtcactgagtttgttatacaatgtaccggcagtggccgaagaaatccaggatgaggtggacgaactgctgcaaaaagagcagaactatagtgatgacgtcctggccaatatgatttccgagccccgaatatcatacggcaatgatgcgttaatgcccagcctcaccgagacaaagaccaccgtggaactgttgcctgtgaacggcgagttttcacttgacgacctgcagccatggcacagttttggcgcagacagtgtaccagctaatactgagaacgaggtggaaccagtggatgccagaccagcagcagatagagggttgaccacccgccccggtagcggcctgaccaacattaagactgaggagattagcgaggtgaaaatggacgccgagtttagacacgattcgggttatgaagtacatcaccaaaagttggtcttttttgcagaggatgtgggctctaacaaaggcgccatcattggtctgatggtaggaggagttgtgattgcaaccgttatcgtaataaccctggtgatgctcaaaaagaaacagtacactagcatccaccacggcgtggtggaggtggatgccgctgtgaccccggaggagaggcacttgtctaagatgcagcagaacggatacgagaatcctacctataagtttttcgaacagatgcagaactag

SEQ ID NO: 51987 - DNA, 1983 bp, Artificial Sequence
  derived and/or modified sequence
atgttctgcggcaggctgaatatgcatatgaacgtgcagaacggaaagtgggattccgatccctctggcactaaaacttgtatcgatacgaaggaggggattctgcaatactgccaagaggtgtatccagagttacagattaccaacgttgtggaggcgaaccagcccgtcacgatccaaaattggtgtaagcggggccgtaaacaatgcaagacgcacccacactttgtcatcccttatcggtgcctcgttggggagttcgtgtctgacgctctccttgtgcccgacaagtgtaaattcttgcaccaggagcgtatggatgtgtgtgagactcacctgcattggcacaccgttgccaaggagacatgttccgagaaaagtaccaaccttcatgattacggaatgctgctgccatgtgggatagataaattccggggagtggaatttgtctgctgcccacttgcggaggaatctgacaatgtggattcagcagacgctgaggaggacgatagcgatgtttggtgggggggcgcagacacagattatgcagacggaagcgaagataaagtagtggaagtggctgaagaagaagaagtggcagaggtggaagaggaggaagctgatgatgacgaagacgatgaagacggagacgaggtggaggaggaagcagaggagccctacgaggaagcgactgaacgcaccacgagtatcgcaacgactaccactactacaaccgagtctgttgaggaagtggttagagtccccacaacggctgcttcaacgcccgacgccgtggataagtacctggaaacgcccggcgacgagaatgagcacgcacactttcagaaggcaaaggagcgcctggaagctaagcatcgtgaaagaatgtcccaggttatgcgcgagtgggaagaggcggagcgtcaggccaaaaacctccctaaagccgataaaaaggcagtcattcaacattttcaggaaaaggtggaatcacttgaacaagaggccgcaaatgaacgccagcagcttgtggaaactcatatggcccgagtggaagccatgctcaatgatagacggcggctcgctctcgagaattacattaccgccctgcaggccgtgcctccgagacctagacacgtctttaatatgttgaaaaagtatgtgagggcagagcagaaagataggcagcataccctgaaacacttcgagcacgtgagaatggttgaccccaaaaaggctgcccagatccgatcacaggtcatgacacaccttcgagtgatctatgaacggatgaatcagagcctctccttactgtacaacgtcccggctgttgccgaagagatacaggatgaagtggacgagttactgcagaaagagcaaaactactccgacgatgtgctcgctaatatgatatcggagcctagaatttcttatggtaacgacgcacttatgccatcactcacagagactaagaccaccgtggagctgctgcccgtgaatggagaattcagcctggacgacttacagccttggcacagttttggagctgactcagtgcccgcaaataccgagaacgaagtcgaacccgttgacgctcgcccagcagcggatcgaggactgaccacccggccagggtccggcctgacgaatattaagaccgaagaaattagcgaggtgaaaatggacgctgaatttcggcacgatagcggctatgaagtgcaccaccaaaaactggtcttcttcgccgaggacgtgggaagtaacaagggcgccattattggactcatggtcgggggtgtggtgattgctaccgtcatagtgataactcttgtgatgctgaaaaaaaaacagtatactagcatccatcacggagtggtagaggtggacgccgctgtgactcctgaggagcggcacctcagtaaaatgcagcagaatggatacgagaaccctacttacaagttctttgaacagatgcagaactag

SEQ ID NO: 51988 - DNA, 2088 bp, Artificial Sequence
  derived and/or modified sequence
atgctgcccggcctggccctgctgctgctggccgcctggacagcccgggccctggaggtgcccacagatggaaatgccggcctgctggccgagccccagatcgccatgttctgtggccgcctgaacatgcacatgaatgtgcagaatggcaagtgggacagcgaccccagcggcaccaagacctgcatcgacaccaaggagggcatcctgcagtactgccaggaggtgtacccagagctgcagatcaccaacgtggtggaggccaaccagcctgtgaccatccagaactggtgcaagaggggcaggaagcagtgcaagacccacccccactttgtgatcccctaccgctgcctggtgggggagtttgtgtctgatgccctgctggtgcctgacaagtgcaagttcctgcaccaggagaggatggatgtgtgtgagacccacctgcactggcacacagtggccaaggagacctgcagcgagaagagcaccaacctgcatgactatggcatgctgctgccctgtggcatcgacaagttccggggcgtggagtttgtgtgctgccccctggccgaggagagtgacaacgtggacagcgcagatgctgaagaagatgacagtgatgtgtggtggggcggcgctgacacagattatgcagatggcagcgaggacaaggtggtggaggtggccgaggaggaggaggtggccgaggtggaggaggaggaggctgatgatgatgaagatgatgaagatggagatgaggtggaggaggaggccgaggagccctatgaggaggccacagagaggaccaccagcatcgccaccaccaccaccaccaccacagagagcgtggaggaggtggtgcgggtgcccaccacagctgccagcaccccagatgctgtggacaagtacctggagaccccaggagatgaaaatgaacatgcccacttccagaaggccaaggagcggctggaggccaagcaccgggagaggatgagccaggtgatgagggagtgggaggaggccgagcggcaggccaagaacctgcccaaggctgacaagaaggctgtgatccagcacttccaggagaaggtggagagcctggagcaggaggccgccaatgaaaggcagcagctggtggagacccacatggcccgggtggaggccatgctgaatgacagaagaaggctggccctggagaactacatcacagccctgcaggccgtgcccccccggcccaggcatgtgttcaacatgctgaagaagtatgtgcgggcagagcagaaggaccggcagcacaccctgaagcactttgaacatgtgaggatggtggaccccaagaaggccgcccagatccgcagccaggtgatgacccacctgcgggtcatctatgaaagaatgaaccagagcctgagcctgctgtacaacgtgcctgctgtggccgaggagatccaggatgaggtggatgagctgctgcagaaggagcagaactacagtgatgatgtgctggccaacatgatcagcgagccccgcatctcctatggaaatgatgccctgatgcccagcctgacagagaccaagaccaccgtggagctgctgcctgtgaatggagagttcagcctggatgacctgcagccctggcacagctttggagctgacagcgtgcctgccaacacagaaaatgaggtggagcctgtggatgcccggcctgctgctgaccggggcctgaccaccaggcctggcagcggcctgaccaacatcaagacagaggagatcagcgaggtgaagatggatgctgagttcagacatgacagcggctatgaggtgcaccaccagaagctggtgttctttgctgaagatgtgggcagcaacaagggggccatcatcggcctgatggtgggcggcgtggtgattgccaccgtgattgtcatcaccctggtgatgctgaagaagaagcagtacaccagcatccaccacggcgtggtggaggtggatgctgctgtgaccccagaggagcggcacctgagcaagatgcagcagaatggctatgagaaccccacctacaagttctttgagcagatgcagaactag

SEQ ID NO: 51989 - DNA, 1920 bp, Artificial Sequence
  derived and/or modified sequence
atgctgcccggcctggccctgctgctgctggccgcctggacagcccgggccctggaggtgtacccagagctgcagatcaccaacgtggtggaggccaaccagcctgtgaccatccagaactggtgcaagaggggcaggaagcagtgcaagacccacccccactttgtgatcccctaccgctgcctggtgggggagtttgtgtctgatgccctgctggtgcctgacaagtgcaagttcctgcaccaggagaggatggatgtgtgtgagacccacctgcactggcacacagtggccaaggagacctgcagcgagaagagcaccaacctgcatgactatggcatgctgctgccctgtggcatcgacaagttccggggcgtggagtttgtgtgctgccccctggccgaggagagtgacaacgtggacagcgcagatgctgaagaagatgacagtgatgtgtggtggggcggcgctgacacagattatgcagatggcagcgaggacaaggtggtggaggtggccgaggaggaggaggtggccgaggtggaggaggaggaggctgatgatgatgaagatgatgaagatggagatgaggtggaggaggaggccgaggagccctatgaggaggccacagagaggaccaccagcatcgccaccaccaccaccaccaccacagagagcgtggaggaggtggtgcgggtgcccaccacagctgccagcaccccagatgctgtggacaagtacctggagaccccaggagatgaaaatgaacatgcccacttccagaaggccaaggagcggctggaggccaagcaccgggagaggatgagccaggtgatgagggagtgggaggaggccgagcggcaggccaagaacctgcccaaggctgacaagaaggctgtgatccagcacttccaggagaaggtggagagcctggagcaggaggccgccaatgaaaggcagcagctggtggagacccacatggcccgggtggaggccatgctgaatgacagaagaaggctggccctggagaactacatcacagccctgcaggccgtgcccccccggcccaggcatgtgttcaacatgctgaagaagtatgtgcgggcagagcagaaggaccggcagcacaccctgaagcactttgaacatgtgaggatggtggaccccaagaaggccgcccagatccgcagccaggtgatgacccacctgcgggtcatctatgaaagaatgaaccagagcctgagcctgctgtacaacgtgcctgctgtggccgaggagatccaggatgaggtggatgagctgctgcagaaggagcagaactacagtgatgatgtgctggccaacatgatcagcgagccccgcatctcctatggaaatgatgccctgatgcccagcctgacagagaccaagaccaccgtggagctgctgcctgtgaatggagagttcagcctggatgacctgcagccctggcacagctttggagctgacagcgtgcctgccaacacagaaaatgaggtggagcctgtggatgcccggcctgctgctgaccggggcctgaccaccaggcctggcagcggcctgaccaacatcaagacagaggagatcagcgaggtgaagatggatgctgagttcagacatgacagcggctatgaggtgcaccaccagaagctggtgttctttgctgaagatgtgggcagcaacaagggggccatcatcggcctgatggtgggcggcgtggtgattgccaccgtgattgtcatcaccctggtgatgctgaagaagaagcagtacaccagcatccaccacggcgtggtggaggtggatgctgctgtgaccccagaggagcggcacctgagcaagatgcagcagaatggctatgagaaccccacctacaagttctttgagcagatgcagaactag

SEQ ID NO: 51990 - DNA, 1983 bp, Artificial Sequence
  derived and/or modified sequence
atgttctgtggccgcctgaacatgcacatgaatgtgcagaatggcaagtgggacagcgaccccagcggcaccaagacctgcatcgacaccaaggagggcatcctgcagtactgccaggaggtgtacccagagctgcagatcaccaacgtggtggaggccaaccagcctgtgaccatccagaactggtgcaagaggggcaggaagcagtgcaagacccacccccacttcgtcatcccctaccgctgcctggtgggggagtttgtgtctgatgccctgctggtgcctgacaagtgcaagttcctgcaccaggagaggatggatgtgtgtgagacccacctgcactggcacacagtggccaaggagacctgcagcgagaagagcaccaacctgcatgactatggcatgctgctgccctgtggcatcgacaagttccggggcgtggagtttgtgtgctgccccctggccgaggagagtgacaacgtggacagcgcagatgctgaggaggatgacagtgatgtgtggtggggcggcgctgacacagattatgcagatggcagcgaggacaaggtggtggaggtggccgaggaggaggaggtggccgaggtggaggaggaggaggctgatgatgatgaagatgatgaagatggagatgaggtggaggaggaggccgaggagccctatgaggaggccacagagaggaccaccagcatcgccaccaccaccaccaccaccacagaatctgtggaggaggtggtgcgggtgcccaccacagctgccagcaccccagatgctgtggacaagtacctggagaccccaggagatgaaaatgagcacgcccacttccagaaggccaaggagcggctggaggccaagcaccgggagaggatgagccaggtgatgagggagtgggaggaggccgagcggcaggccaagaacctgcccaaggctgacaagaaggccgtcatccagcacttccaggagaaggtggagagcctggagcaggaggccgccaatgaaaggcagcagctggtggagacccacatggcccgggtggaggccatgctgaatgacagaagaaggctggccctggagaactacatcacagccctgcaggccgtgcccccccggcccaggcatgtgttcaacatgctgaagaagtatgtgcgggcagagcagaaggaccggcagcacaccctgaagcactttgagcacgtgaggatggtggaccccaagaaggccgcccagatccgcagccaggtgatgacccacctgcgggtcatctatgaaagaatgaaccagagcctgagcctgctgtacaacgtgcctgctgtggccgaggagatccaggatgaggtggatgagctgctgcagaaggagcagaactacagtgatgatgtgctggccaacatgatcagcgagccccgcatctcctatggaaatgatgccctgatgcccagcctgacagagaccaagaccaccgtggagctgctgcctgtgaatggagagttcagcctggatgacctgcagccctggcacagctttggagctgacagcgtgcctgccaacacagaaaatgaggtggagcctgtggatgcccggcctgctgctgaccggggcctgaccacccggcccggcagcggcctgaccaacatcaagacagaggagatcagcgaggtgaagatggatgctgagttcagacatgattctggctatgaggtgcaccaccagaagctggtgttctttgctgaagatgtgggcagcaacaagggggccatcatcggcctgatggtgggcggcgtggtgattgccaccgtcatcgtcatcaccctggtgatgctgaagaagaagcagtacaccagcatccaccacggcgtggtggaggtggatgctgctgtgaccccagaggagcggcacctgagcaagatgcagcagaatggctatgagaaccccacctacaagttctttgagcagatgcagaactag

SEQ ID NO: 51991 - DNA, 2088 bp, Artificial Sequence
  derived and/or modified sequence
atgctgcccggcctggccctgctgctgctggccgcctggaccgcccgcgctctagaggtcccaaccgacggcaatgccggactgctggcggaaccacagatcgccatgttttgtggtagactgaacatgcatatgaatgtgcaaaacggcaaatgggatagcgaccccagcggaacaaagacgtgcatagacaccaaggaggggattcttcaatactgtcaggaggtgtatccagaacttcaaataactaatgttgtggaggctaaccagccagttacaatccagaactggtgcaaaagaggccgcaaacaatgtaaaacccatccccacttcgtgataccctacaggtgtctggtcggagagtttgtgagtgatgccttgctggttcccgacaaatgcaaatttctgcatcaggaacggatggatgtctgcgaaacgcatcttcactggcacactgtggctaaggagacctgctcagaaaagagcactaatctccacgactatggcatgcttttgccatgtggaatcgataaatttaggggagtagagttcgtgtgctgtccgctggccgaagaaagtgacaatgttgactctgccgatgctgaggaggatgattccgatgtatggtgggggggggcagacaccgattatgctgacggctctgaagataaggtggtcgaagttgctgaggaagaggaagtggccgaggtcgaagaagaggaggccgatgacgacgaagatgacgaagacggcgacgaagtcgaggaagaagccgaggagccatacgaagaggctacagagagaactacttcaattgccacaactaccacaacaacgacagagtcagtcgaagaagtggttcgggtaccaaccacagctgcttcaacccctgacgccgttgataaatatttggagacgccaggtgatgagaatgaacacgcgcattttcagaaggctaaggagcggctcgaagccaaacatcgcgaacgcatgagtcaggtcatgagggaatgggaagaggccgaaagacaggccaagaacctgcccaaggcggacaagaaagccgttatccagcattttcaggagaaagtcgagtctcttgagcaggaagccgcgaacgagaggcagcagcttgtggagacgcatatggcacgcgttgaagccatgcttaatgatagacggcgactcgcgctcgagaactatattaccgccctgcaggcagtcccgccgcggccgaggcatgtttttaacatgctgaagaaatacgtgcgagcagaacagaaggatcgtcagcacaccctgaagcattttgagcatgttaggatggtagatcccaaaaaagcagcccagatccggagccaggttatgactcacctcagagttatttatgagcggatgaaccaatccctgtcgctgttatataatgtgcctgcggtcgctgaggagatacaggacgaggtggatgagctgctgcagaaggagcagaattattccgacgacgtgctggctaacatgatcagcgaaccgaggatctcatacggcaatgacgctctgatgccatccttgacagagactaagaccacggtggagttgctgcctgtgaacggagaattcagtctcgacgatctgcaaccctggcatagcttcggagccgactccgtgccagccaacaccgagaacgaggtcgaacctgtggacgccagaccggcagccgatcgagggctcactactaggcctgggtcaggcctgactaacatcaagaccgaggaaatcagtgaggttaagatggatgccgaatttcgacacgatagtggttatgaggtgcaccatcagaagttggtatttttcgctgaagatgtcggctcgaacaaaggcgccattattggtttgatggtgggaggggtcgtgatagccaccgtgatcgtcattactctagtcatgctcaagaaaaagcagtatacttcaatacaccatggagtagtggaagtcgatgccgccgtaacgccagaggaacgacacctttccaagatgcagcagaacgggtacgagaatcccacatacaagttttttgagcagatgcagaactag

SEQ ID NO: 51992 - DNA, 1920 bp, Artificial Sequence
  derived and/or modified sequence
atgctgcccggcctggccctgctgctgctggccgcctggaccgccagagctttagaagtatatcctgagcttcaaattaccaacgtagtagaagccaatcagccagttaccatccagaactggtgcaagcgcggacggaagcagtgtaagacacatcctcactttgtgattccataccggtgcctggtgggagagtttgtgtccgatgcattgctcgttcctgataagtgtaaatttctccaccaagagcggatggatgtttgtgaaacgcacctccactggcacaccgtcgccaaggagacctgtagtgagaaatctacaaatttacacgactacggaatgctcttgccgtgtggaattgacaagtttcgaggagtagaattcgtctgttgccccctcgctgaggaatccgacaacgtggactccgcagatgctgaggaggacgacagcgacgtgtggtgggggggagctgacaccgactacgccgacgggagtgaagacaaggtggtggaggtggctgaggaggaggaagtggccgaagtggaggaagaagaggctgatgatgatgaagacgacgaagacggcgatgaggtcgaggaggaagccgaggaaccctacgaggaggcaacggaacgcaccaccagcatagccactactacaaccaccacaaccgaatccgtggaagaagtggtacgggttccaacaaccgccgcttcaacacctgacgcagtggacaagtacttggagacacccggggacgagaatgaacacgcgcactttcagaaagcaaaggaaagactcgaggctaagcaccgagagcgtatgtctcaggtaatgcgtgagtgggaggaggccgagcgacaagccaagaatcttccgaaggccgacaaaaaagcagtcattcagcatttccaggagaaggtggagtccctggaacaggaggccgctaatgagaggcagcagctggtcgagacacacatggcgagggtggaggccatgctcaacgatcgccgaaggctcgctctggagaactatataactgccctgcaggcagtgccgcccaggccccggcatgtgttcaacatgctcaaaaagtacgtccgagcagagcagaaggaccggcaacatacactgaaacattttgagcatgtgaggatggtggacccaaagaaggccgcccaaattcgatctcaagtgatgactcacctgcgcgtgatttatgaaaggatgaatcagagtctctccttgctgtacaacgtacctgccgtggcggaagagatccaggacgaagtagatgaattgctgcaaaaggaacagaattactcagacgacgtactggccaatatgattagcgaacctcgcattagctatggcaacgatgctctgatgccgagccttacagaaaccaaaactacagtcgaactgttgcctgtcaacggcgaattctctctcgatgacttgcagccgtggcactccttcggtgccgattcagtacccgccaataccgagaatgaagtggaacctgtggatgctagaccagcagcggataggggtctgactacacgccccggtagcggcctgactaatatcaaaactgaagagatatctgaggtcaaaatggatgctgagtttcgacatgatagtggctacgaagtacatcatcagaaacttgtgttctttgctgaagatgttggctctaacaaaggggccataattgggttaatggtcggcggcgttgtgattgccacagtgattgtcattacattagtaatgctcaaaaagaagcagtacacatcaattcaccatggcgtggttgaagtggacgctgctgtaacccctgaggagaggcacctgagtaagatgcagcagaacggatacgagaatccgacatacaagtttttcgaacagatgcaaaactag

SEQ ID NO: 51993 - DNA, 1983 bp, Artificial Sequence
  derived and/or modified sequence
atgttctgcggccggctgaacatgcacatgaacgtgcagaacggcaaatgggactccgacccatccggcactaaaacgtgtatcgacactaaagagggcattctgcagtactgccaggaggtgtatccagagctgcagatcactaacgttgtagaggccaatcaacccgtaactatccagaactggtgcaagaggggacggaagcaatgcaagacgcaccctcatttcgtaataccgtaccggtgcctcgtgggtgaatttgtctccgacgctctcctggtgcccgataagtgtaaattccttcaccaggagcgcatggatgtgtgtgagacccacctgcactggcacacagttgcgaaggagacttgttctgagaagtccactaatctgcatgactatgggatgctgctgccatgcggcattgataagtttcgaggcgttgaatttgtctgttgccccctggccgaggagagcgataacgtcgatagtgcggatgccgaggaagatgacagtgacgtgtggtggggtggtgcggatacagattacgccgatggaagtgaggataaggtcgttgaagtggctgaagaagaggaagtcgctgaggtggaggaagaagaagctgacgatgatgaggatgacgaggatggtgacgaagtcgaagaggaagccgaagagccctacgaagaagctactgagcgcacaacctccatcgccacgaccactacgactaccacagagagcgtcgaagaggtggtgagagtgccaacaacggcagcctctactccagacgcggtcgataaatacctggagactcctggcgatgaaaatgaacacgcacactttcaaaaagcgaaagaacgcttagaagcaaagcacagagaaaggatgtcgcaagtgatgagagaatgggaggaagctgaacggcaggcaaagaacctgcctaaggcagataaaaaagcagttatccagcatttccaagaaaaggttgaatctttggagcaggaggccgctaacgagagacagcagttggtggagacacacatggcacgcgtggaagcaatgctgaacgatcggcgccgtctggccctggagaactatattaccgcactccaggccgtcccaccccggcccaggcacgtctttaacatgctgaaaaagtatgtccgggccgaacagaaagaccgccagcacaccttgaagcacttcgagcacgtccgcatggtagaccctaagaaagctgcccagatccgatcccaagtgatgacacacctgcgggtgatatacgagcgcatgaatcagtctctgagtttactgtataacgtgcccgccgtcgctgaagagatccaggacgaggtcgatgaactgctgcagaaggaacaaaactacagcgatgatgtgctggctaatatgatctctgagcctaggatctcttatggtaatgacgctcttatgccgagcttaacagaaaccaagaccacagtagagctactccccgtgaacggtgaattctccttagacgacctacagccctggcacagcttcggagctgacagcgtccccgccaatactgaaaacgaagttgagccagtggacgcacgcccggcagctgaccgggggctgacaactcggccaggatccgggctgaccaacatcaagactgaagagatcagcgaggtgaagatggatgccgagtttcggcacgactccggatacgaagtgcaccatcagaagctcgtatttttcgccgaggatgtgggaagtaacaaaggggccattatagggcttatggtggggggtgtagtgatcgctactgttattgtcataacactagtcatgcttaaaaagaaacagtacacctccatccatcacggggtggtggaagtagacgccgctgtcacgcctgaggagcgccatctgagcaagatgcagcagaacgggtatgaaaaccctacctacaagtttttcgaacaaatgcagaattag

SEQ ID NO: 51994 - DNA, 3355 bp, Artificial Sequence
  derived and/or modified sequence
agtttcctcggcagcggtaggcgagagcacgcggaggagcgtgcgcgggggccccgggagacggcggcggtggcggcgcgggcagagcaaggacgcggcggatcccactcgcacagcagcgcactcggtgccccgcgcagggtcgcgatgctgcccggtttggcactgctcctgctggccgcctggacggctcgggcgctggaggtacccactgatggtaatgctggcctgctggctgaaccccagattgccatgttctgtggcagactgaacatgcacatgaatgtccagaatgggaagtgggattcagatccatcagggaccaaaacctgcattgataccaaggaaggcatcctgcagtattgccaagaagtctaccctgaactgcagatcaccaatgtggtagaagccaaccaaccagtgaccatccagaactggtgcaagcggggccgcaagcagtgcaagacccatccccactttgtgattccctaccgctgcttagttggtgagtttgtaagtgatgcccttctcgttcctgacaagtgcaaattcttacaccaggagaggatggatgtttgcgaaactcatcttcactggcacaccgtcgccaaagagacatgcagtgagaagagtaccaacttgcatgactacggcatgttgctgccctgcggaattgacaagttccgaggggtagagtttgtgtgttgcccactggctgaagaaagtgacaatgtggattctgctgatgcggaggaggatgactcggatgtctggtggggcggagcagacacagactatgcagatgggagtgaagacaaagtagtagaagtagcagaggaggaagaagtggctgaggtggaagaagaagaagccgatgatgacgaggacgatgaggatggtgatgaggtagaggaagaggctgaggaaccctacgaagaagccacagagagaaccaccagcattgccaccaccaccaccaccaccacagagtctgtggaagaggtggttcgagttcctacaacagcagccagtacccctgatgccgttgacaagtatctcgagacacctggggatgagaatgaacatgcccatttccagaaagccaaagagaggcttgaggccaagcaccgagagagaatgtcccaggtcatgagagaatgggaagaggcagaacgtcaagcaaagaacttgcctaaagctgataagaaggcagttatccagcatttccaggagaaagtggaatctttggaacaggaagcagccaacgagagacagcagctggtggagacacacatggccagagtggaagccatgctcaatgaccgccgccgcctggccctggagaactacatcaccgctctgcaggctgttcctcctcggcctcgtcacgtgttcaatatgctaaagaagtatgtccgcgcagaacagaaggacagacagcacaccctaaagcatttcgagcatgtgcgcatggtggatcccaagaaagccgctcagatccggtcccaggttatgacacacctccgtgtgatttatgagcgcatgaatcagtctctctccctgctctacaacgtgcctgcagtggccgaggagattcaggatgaagttgatgagctgcttcagaaagagcaaaactattcagatgacgtcttggccaacatgattagtgaaccaaggatcagttacggaaacgatgctctcatgccatctttgaccgaaacgaaaaccaccgtggagctccttcccgtgaatggagagttcagcctggacgatctccagccgtggcattcttttggggctgactctgtgccagccaacacagaaaacgaagttgagcctgttgatgcccgccctgctgccgaccgaggactgaccactcgaccaggttctgggttgacaaatatcaagacggaggagatctctgaagtgaagatggatgcagaattccgacatgactcaggatatgaagttcatcatcaaaaattggtgttctttgcagaagatgtgggttcaaacaaaggtgcaatcattggactcatggtgggcggtgttgtcatagcgacagtgatcgtcatcaccttggtgatgctgaagaagaaacagtacacatccattcatcatggtgtggtggaggttgacgccgctgtcaccccagaggagcgccacctgtccaagatgcagcagaacggctacgaaaatccaacctacaagttctttgagcagatgcagaactagacccccgccacagcagcctctgaagttggacagcaaaaccattgcttcactacccatcggtgtccatttatagaataatgtgggaagaaacaaacccgttttatgatttactcattatcgccttttgacagctgtgctgtaacacaagtagatgcctgaacttgaattaatccacacatcagtaatgtattctatctctctttacattttggtctctatactacattattaatgggttttgtgtactgtaaagaatttagctgtatcaaactagtgcatgaatagattctctcctgattatttatcacatagccccttagccagttgtatattattcttgtggtttgtgacccaattaagtcctactttacatatgctttaagaatcgatgggggatgcttcatgtgaacgtgggagttcagctgcttctcttgcctaagtattcctttcctgatcactatgcattttaaagttaaacatttttaagtatttcagatgctttagagagattttttttccatgactgcattttactgtacagattgctgcttctgctatatttgtgatataggaattaagaggatacacacgtttgtttcttcgtgcctgttttatgtgcacacattaggcattgagacttcaagcttttctttttttgtccacgtatctttgggtctttgataaagaaaagaatccctgttcattgtaagcacttttacggggcgggtggggaggggtgctctgctggtcttcaattaccaagaattctccaaaacaattttctgcaggatgattgtacagaatcattgcttatgacatgatcgctttctacactgtattacataaataaattaaataaaataaccccgggcaagacttttctttgaaggatgactacagacattaaataatcgaagtaattttgggtggggagaagaggcagattcaattttctttaaccagtctgaagtttcatttatgatacaaaagaagatgaaaatggaagtggcaatataaggggatgaggaaggcatgcctggacaaacccttcttttaagatgtgtcttcaatttgtataaaatggtgttttcatgtaaataaatacattcttggaggagca

SEQ ID NO: 51995 - DNA, 3167 bp, Artificial Sequence
  derived and/or modified sequence
gcgagagcacgcggaggagcgtgcgcgggggccccgggagacggcggcggtggcggcgcgggcagagcaaggacgcggcggatcccactcgcacagcagcgcactcggtgccccgcgcagggtcgcgatgctgcccggtttggcactgctcctgctggccgcctggacggctcgggcgctggaggtctaccctgaactgcagatcaccaatgtggtagaagccaaccaaccagtgaccatccagaactggtgcaagcggggccgcaagcagtgcaagacccatccccactttgtgattccctaccgctgcttagttggtgagtttgtaagtgatgcccttctcgttcctgacaagtgcaaattcttacaccaggagaggatggatgtttgcgaaactcatcttcactggcacaccgtcgccaaagagacatgcagtgagaagagtaccaacttgcatgactacggcatgttgctgccctgcggaattgacaagttccgaggggtagagtttgtgtgttgcccactggctgaagaaagtgacaatgtggattctgctgatgcggaggaggatgactcggatgtctggtggggcggagcagacacagactatgcagatgggagtgaagacaaagtagtagaagtagcagaggaggaagaagtggctgaggtggaagaagaagaagccgatgatgacgaggacgatgaggatggtgatgaggtagaggaagaggctgaggaaccctacgaagaagccacagagagaaccaccagcattgccaccaccaccaccaccaccacagagtctgtggaagaggtggttcgagttcctacaacagcagccagtacccctgatgccgttgacaagtatctcgagacacctggggatgagaatgaacatgcccatttccagaaagccaaagagaggcttgaggccaagcaccgagagagaatgtcccaggtcatgagagaatgggaagaggcagaacgtcaagcaaagaacttgcctaaagctgataagaaggcagttatccagcatttccaggagaaagtggaatctttggaacaggaagcagccaacgagagacagcagctggtggagacacacatggccagagtggaagccatgctcaatgaccgccgccgcctggccctggagaactacatcaccgctctgcaggctgttcctcctcggcctcgtcacgtgttcaatatgctaaagaagtatgtccgcgcagaacagaaggacagacagcacaccctaaagcatttcgagcatgtgcgcatggtggatcccaagaaagccgctcagatccggtcccaggttatgacacacctccgtgtgatttatgagcgcatgaatcagtctctctccctgctctacaacgtgcctgcagtggccgaggagattcaggatgaagttgatgagctgcttcagaaagagcaaaactattcagatgacgtcttggccaacatgattagtgaaccaaggatcagttacggaaacgatgctctcatgccatctttgaccgaaacgaaaaccaccgtggagctccttcccgtgaatggagagttcagcctggacgatctccagccgtggcattcttttggggctgactctgtgccagccaacacagaaaacgaagttgagcctgttgatgcccgccctgctgccgaccgaggactgaccactcgaccaggttctgggttgacaaatatcaagacggaggagatctctgaagtgaagatggatgcagaattccgacatgactcaggatatgaagttcatcatcaaaaattggtgttctttgcagaagatgtgggttcaaacaaaggtgcaatcattggactcatggtgggcggtgttgtcatagcgacagtgatcgtcatcaccttggtgatgctgaagaagaaacagtacacatccattcatcatggtgtggtggaggttgacgccgctgtcaccccagaggagcgccacctgtccaagatgcagcagaacggctacgaaaatccaacctacaagttctttgagcagatgcagaactagacccccgccacagcagcctctgaagttggacagcaaaaccattgcttcactacccatcggtgtccatttatagaataatgtgggaagaaacaaacccgttttatgatttactcattatcgccttttgacagctgtgctgtaacacaagtagatgcctgaacttgaattaatccacacatcagtaatgtattctatctctctttacattttggtctctatactacattattaatgggttttgtgtactgtaaagaatttagctgtatcaaactagtgcatgaatagattctctcctgattatttatcacatagccccttagccagttgtatattattcttgtggtttgtgacccaattaagtcctactttacatatgctttaagaatcgatgggggatgcttcatgtgaacgtgggagttcagctgcttctcttgcctaagtattcctttcctgatcactatgcattttaaagttaaacatttttaagtatttcagatgctttagagagattttttttccatgactgcattttactgtacagattgctgcttctgctatatttgtgatataggaattaagaggatacacacgtttgtttcttcgtgcctgttttatgtgcacacattaggcattgagacttcaagcttttctttttttgtccacgtatctttgggtctttgataaagaaaagaatccctgttcattgtaagcacttttacggggcgggtggggaggggtgctctgctggtcttcaattaccaagaattctccaaaacaattttctgcaggatgattgtacagaatcattgcttatgacatgatcgctttctacactgtattacataaataaattaaataaaataaccccgggcaagacttttctttgaaggatgactacagacattaaataatcgaagtaattttgggtggggagaagaggcagattcaattttctttaaccagtctgaagtttcatttatgatacaaaagaagatgaaaatggaagtggcaatataaggggatgaggaaggcatgcctggacaaacccttcttttaagatgtgtcttcaatttgtataaaatggtgttttcatgtaaataaatacattcttggaggagca

SEQ ID NO: 51996 - DNA, 2518 bp, Artificial Sequence
  derived and/or modified sequence
gtcggatgattcaagctcacggggacgagcaggagcgctctcgacttttctagagcctcagcgtcctaggactcacctttccctgatcctgcaccgtccctctcctggccccagactctccctcccactgttcacgaagcccaggtacccactgatggtaatgctggcctgctggctgaaccccagattgccatgttctgtggcagactgaacatgcacatgaatgtccagaatgggaagtgggattcagatccatcagggaccaaaacctgcattgataccaaggaaggcatcctgcagtattgccaagaagtctaccctgaactgcagatcaccaatgtggtagaagccaaccaaccagtgaccatccagaactggtgcaagcggggccgcaagcagtgcaagacccatccccactttgtgattccctaccgctgcttagttggtgagtttgtaagtgatgcccttctcgttcctgacaagtgcaaattcttacaccaggagaggatggatgtttgcgaaactcatcttcactggcacaccgtcgccaaagagacatgcagtgagaagagtaccaacttgcatgactacggcatgttgctgccctgcggaattgacaagttccgaggggtagagtttgtgtgttgcccactggctgaagaaagtgacaatgtggattctgctgatgcggaggaggatgactcggatgtctggtggggcggagcagacacagactatgcagatgggagtgaagacaaagtagtagaagtagcagaggaggaagaagtggctgaggtggaagaagaagaagccgatgatgacgaggacgatgaggatggtgatgaggtagaggaagaggctgaggaaccctacgaagaagccacagagagaaccaccagcattgccaccaccaccaccaccaccacagagtctgtggaagaggtggttcgagttcctacaacagcagccagtacccctgatgccgttgacaagtatctcgagacacctggggatgagaatgaacatgcccatttccagaaagccaaagagaggcttgaggccaagcaccgagagagaatgtcccaggtcatgagagaatgggaagaggcagaacgtcaagcaaagaacttgcctaaagctgataagaaggcagttatccagcatttccaggagaaagtggaatctttggaacaggaagcagccaacgagagacagcagctggtggagacacacatggccagagtggaagccatgctcaatgaccgccgccgcctggccctggagaactacatcaccgctctgcaggctgttcctcctcggcctcgtcacgtgttcaatatgctaaagaagtatgtccgcgcagaacagaaggacagacagcacaccctaaagcatttcgagcatgtgcgcatggtggatcccaagaaagccgctcagatccggtcccaggttatgacacacctccgtgtgatttatgagcgcatgaatcagtctctctccctgctctacaacgtgcctgcagtggccgaggagattcaggatgaagttgatgagctgcttcagaaagagcaaaactattcagatgacgtcttggccaacatgattagtgaaccaaggatcagttacggaaacgatgctctcatgccatctttgaccgaaacgaaaaccaccgtggagctccttcccgtgaatggagagttcagcctggacgatctccagccgtggcattcttttggggctgactctgtgccagccaacacagaaaacgaagttgagcctgttgatgcccgccctgctgccgaccgaggactgaccactcgaccaggttctgggttgacaaatatcaagacggaggagatctctgaagtgaagatggatgcagaattccgacatgactcaggatatgaagttcatcatcaaaaattggtgttctttgcagaagatgtgggttcaaacaaaggtgcaatcattggactcatggtgggcggtgttgtcatagcgacagtgatcgtcatcaccttggtgatgctgaagaagaaacagtacacatccattcatcatggtgtggtggaggttgacgccgctgtcaccccagaggagcgccacctgtccaagatgcagcagaacggctacgaaaatccaacctacaagttctttgagcagatgcagaactagacccccgccacagcagcctctgaagttggacagcaaaaccattgcttcactacccatcggtgtccatttatagaataatgtgggaagaaacaaacccgttttatgatttactcattatcgccttttgacagctgtgctgtaacacaagtagatgcctgaacttgaattaatccacacatcagtaatgtattctatctctctttacattttggtctctatactacattattaatgggttttgtgtactgtaaagaatttagctgtatcaaactagtgcatgaatagattctctcctgattatttatcacatagccccttagccagttgtatattattcttgtgg

SEQ ID NO: 51997 - DNA, 2088 bp, Artificial Sequence
  derived and/or modified sequence
atgttaccaggactggctctgctacttctcgctgcttggaccgctcgggcactggaggtcccaacggacggcaacgccggtctactggcagagccccaaattgccatgttctgtggaagactcaatatgcacatgaatgttcaaaatggcaagtgggactctgatccttctggcactaagacttgtatcgatactaaagaaggcatactgcaatactgtcaagaagtctacccggagctgcagatcactaacgtggtggaggctaatcagccagttactattcagaactggtgcaagcgcggacgaaagcagtgcaagacccatccccactttgtgatcccatacagatgcctcgtcggtgaatttgtgtccgacgctctgttagtgcccgacaaatgcaagtttcttcaccaggaaagaatggacgtatgcgagacacacctgcactggcacacagtggcaaaggagacgtgcagtgagaagtctaccaacctccacgactatggaatgttgctgccttgtggcattgataagttccggggtgttgaattcgtatgctgtcctctggccgaggagagcgataatgtggacagtgcagacgcggaggaagacgattcagacgtctggtggggtggcgctgacacagactacgcggatgggtccgaagacaaggtggtggaagtcgcggaagaagaggaggtggcagaagtcgaggaggaggaggccgacgacgacgaggatgacgaggacggtgacgaagtcgaagaagaagccgaagaaccttatgaagaggctaccgagagaacaacaagtatcgccaccacaactactactactaccgagtccgtggaggaagttgtgagggtgcctacgacagccgcatcaactccggacgccgtggacaagtatctggaaacacccggtgatgagaacgagcacgcacatttccagaaggccaaagaacgattagaggcaaaacatcgcgagcgcatgagccaagtgatgagggaatgggaagaagctgagcggcaggctaaaaacctgcccaaggcagacaaaaaagctgtcatacagcactttcaggagaaggtggagtctctcgagcaggaggctgccaacgagcgccagcaactcgtggaaactcatatggctcgggtcgaggcaatgcttaatgaccggcgacggttggctctggagaattacatcactgctttacaggcagtgcctcctaggccaaggcacgtgtttaatatgctgaaaaagtacgtccgcgctgagcagaaagatagacagcacacgcttaagcatttcgaacatgttcgaatggtcgacccaaagaaggccgcacaaattaggtcacaggttatgacacacttgcgggtcatctatgaaaggatgaaccagtcattgtctctactctacaatgtgcctgcagtcgccgaagaaatccaggatgaggtggatgagctgttacagaaggagcaaaattacagcgacgatgttttggcgaacatgattagcgaacccagaatcagctacgggaacgacgcgctcatgcccagtcttaccgagacaaaaactacggtggaactattgcccgtaaatggagagttttccctcgacgaccttcagccttggcattcattcggggcagattctgtcccagccaacacagagaatgaagtggaaccagtcgatgcgcgacctgcagcagaccgaggtctgaccacaaggccgggtagtggactgaccaacatcaagaccgaggagatttcggaagttaagatggatgccgagttccgccacgattcgggatacgaggtgcatcatcaaaaactggtttttttcgccgaggacgttgggagtaacaaaggcgcaatcattgggttgatggtggggggagtggttatagcaacagtgatagttattacccttgtcatgcttaagaagaaacaatatacaagcatccaccacggggtcgtggaagtggatgccgctgtgacacctgaagaacggcacctgtccaaaatgcaacaaaacggttacgagaacccaacttacaagttcttcgagcagatgcagaattag

SEQ ID NO: 51998 - DNA, 1920 bp, Artificial Sequence
  derived and/or modified sequence
atgctgccagggctcgccttactgttgctcgccgcatggaccgcacgggcactggaggtgtatcccgaactgcaaattactaatgttgtagaagcaaatcagcctgtgaccatccaaaattggtgtaagcggggacggaaacagtgtaagacacacccgcatttcgtgatcccatacagatgtctggttggcgagtttgtgtctgacgctttgctggtccctgacaagtgtaagttcttgcaccaagagagaatggatgtctgcgagacccacctccattggcacacagtggcaaaggagacctgcagtgaaaagtctacgaatttgcatgattatggaatgctacttccttgtgggattgacaaatttcgcggtgttgagtttgtttgttgtcctctggcagaggaatctgacaacgtagacagcgccgatgcagaggaggacgacagtgatgtttggtgggggggagcagataccgattatgccgacggctccgaagataaggtggtggaagtcgccgaggaggaagaggtcgccgaggtcgaagaagaagaggctgatgacgacgaggacgatgaagatggggacgaagtcgaggaagaggccgaagaaccatacgaggaagccactgaaagaaccacttctatcgccacaacaactaccacgacaactgagtctgtggaggaagtggtgagggtcccaaccacagctgccagtactccggatgcagttgacaagtacctggagacaccaggcgacgagaatgagcacgcccactttcagaaggcaaaggagcgtttagaggctaagcatagggagcgtatgtctcaagtgatgcgcgagtgggaagaggcagagcggcaggctaaaaacctgcccaaggccgataagaaggctgtgattcagcactttcaagaaaaggtggagtcacttgagcaagaggctgcaaacgagcgccagcagcttgtcgaaactcacatggcgagggtggaagctatgctgaacgacaggcggagactcgctctcgagaattacataacagcacttcaggctgtcccaccccgacccaggcatgtgttcaatatgctcaaaaaatatgtcagagctgagcaaaaggatcggcagcacacacttaagcactttgagcacgtgcgcatggtggaccccaagaaggccgctcaaattaggtcacaggtgatgacccacctcagggtaatatatgagaggatgaaccagagcctgtccctgctctacaacgtgcccgcagtggcagaggaaattcaggatgaagtcgatgaactgttacagaaggaacagaactacagcgacgatgtactcgcgaacatgatctcggagcctcggatttcctatgggaatgacgcccttatgccctctctgacagagactaagaccacagtcgagttgcttcccgtgaatggagagttctctctggacgatctgcagccctggcacagcttcggggcagactccgtgcctgctaacacagaaaacgaagtggagccagttgacgccagacctgctgccgaccgtggcctgaccacaagacctggatcaggtctgacaaatattaaaaccgaagagatttcagaggtgaagatggacgccgagttcagacacgacagcgggtacgaggtgcaccatcagaaactagtgttctttgcagaagacgtcggcagtaacaagggagcgattatcggattaatggttggaggagtggttatcgcaaccgtgattgtgattacacttgtgatgctgaagaagaaacagtatacttctatacaccatggggttgttgaagtcgacgctgctgtcacacctgaagagagacatttaagcaaaatgcagcagaacggttacgagaatcccacctataaatttttcgaacagatgcagaattag

SEQ ID NO: 51999 - DNA, 1983 bp, Artificial Sequence
  derived and/or modified sequence
atgttttgtggacgtttgaacatgcacatgaatgtccaaaacgggaagtgggatagtgacccatccggcaccaaaacctgtatcgatacaaaggagggcattctgcagtactgccaggaagtatatccagagttgcaaattaccaacgtcgttgaggcaaatcagccagtgactattcagaactggtgtaagcggggacgtaaacaatgtaagacgcacccacacttcgtaataccataccgctgccttgtgggtgaatttgtgtccgatgccctcctcgtgccagacaaatgtaagttcctgcaccaagaaagaatggatgtttgtgagacacatctgcattggcacaccgttgcgaaggagacatgctccgaaaagagcaccaatctgcacgattacggaatgctgctaccctgcggaattgataaatttaggggcgtggaatttgtgtgctgccctctcgcagaggagtcagacaacgttgactctgctgacgccgaggaggatgactccgacgtctggtggggaggcgctgataccgattatgccgatggatccgaggacaaagtggtagaggttgccgaagaagaggaggtggcagaagtcgaagaggaggaagctgacgacgatgaggacgacgaggacggagatgaggttgaagaggaggcagaggagccatacgaggaagccactgagaggaccacaagcattgcaacgaccaccacaaccactacggagtctgtagaggaagtcgtgcgagtgccaacaaccgctgcaagtacacccgatgctgtggataagtaccttgagacccccggagatgaaaacgaacatgctcacttccagaaagctaaagaaaggttagaagccaaacatcgagaacggatgagccaagttatgagggagtgggaagaggctgaaaggcaggccaaaaaccttccaaaggccgataaaaaagcagtaatccagcattttcaggaaaaggtcgagagcctggagcaagaagccgctaacgagagacagcaattggtggaaactcatatggccagagtcgaggccatgctgaacgatcgtcggaggctggccctcgaaaattacataactgctctgcaagccgtcccgccacggccacgccacgtcttcaatatgcttaagaaatacgtcagggccgagcagaaggatcggcagcacacattgaagcatttcgaacacgtgcggatggtcgatcctaaaaaagccgcacaaatccgctcacaagtaatgactcacttgagagtcatttacgagcggatgaatcagagcctgtcccttttatacaacgtgccagcagtggccgaggaaatccaggacgaggtggatgagttgctgcaaaaggaacagaactactctgatgacgtgctagccaatatgatctctgagcctaggatctcttacggaaacgatgctctgatgccctccttgactgaaacaaagacaacggttgagctccttccagtaaacggcgagttctctttggacgaccttcagccgtggcactcttttggcgcagattctgttccagccaacacagaaaacgaagtcgagccggtagatgctagaccagcagccgacagagggctgaccacacgccctgggtccggcctgacaaatataaaaaccgaggagatcagcgaagtgaaaatggacgccgagttccgccacgacagtgggtacgaggtgcaccaccagaagcttgtcttttttgctgaggatgtcggatcgaataagggagccattatcggcctaatggttggcggagtggttatcgctaccgtgatagtgattaccctggttatgctcaaaaaaaaacagtatactagcatccaccacggggtcgtggaagtggatgccgcagtgaccccagaagaacgtcacctgtccaagatgcagcagaacgggtacgaaaacccgacttataagtttttcgaacaaatgcagaattag

SEQ ID NO: 52000 - DNA, 2088 bp, Artificial Sequence
  derived and/or modified sequence
atgctgcccggcctggccctgctgctgctggccgcctggaccgccagagccctggaggtgcccaccgacggcaacgccggcctgctggccgagccccagatcgccatgttctgcggcagactgaacatgcacatgaacgtgcagaacggcaagtgggacagcgaccccagcggcaccaagacctgcatcgacaccaaggagggcatcctgcagtactgccaggaggtgtaccccgagctgcagatcaccaacgtggtggaggccaaccagcccgtgaccatccagaactggtgcaagagaggcagaaagcagtgcaagacccacccccacttcgtgatcccctacagatgcctggtgggcgagttcgtgagcgacgccctgctggtgcccgacaagtgcaagttcctgcaccaggagagaatggacgtgtgcgagacccacctgcactggcacaccgtggccaaggagacctgcagcgagaagagcaccaacctgcacgactacggcatgctgctgccctgcggcatcgacaagttcagaggcgtggagttcgtgtgctgccccctggccgaggagagcgacaacgtggacagcgccgacgccgaggaggacgacagcgacgtgtggtggggcggcgccgacaccgactacgccgacggcagcgaggacaaggtggtggaggtggccgaggaggaggaggtggccgaggtggaggaggaggaggccgacgacgacgaggacgacgaggacggcgacgaggtggaggaggaggccgaggagccctacgaggaggccaccgagagaaccaccagcatcgccaccaccaccaccaccaccaccgagagcgtggaggaggtggtgagagtgcccaccaccgccgccagcacccccgacgccgtggacaagtacctggagacccccggcgacgagaacgagcacgcccacttccagaaggccaaggagagactggaggccaagcacagagagagaatgagccaggtgatgagagagtgggaggaggccgagagacaggccaagaacctgcccaaggccgacaagaaggccgtgatccagcacttccaggagaaggtggagagcctggagcaggaggccgccaacgagagacagcagctggtggagacccacatggccagagtggaggccatgctgaacgacagaagaagactggccctggagaactacatcaccgccctgcaggccgtgccccccagacccagacacgtgttcaacatgctgaagaagtacgtgagagccgagcagaaggacagacagcacaccctgaagcacttcgagcacgtgagaatggtggaccccaagaaggccgcccagatcagaagccaggtgatgacccacctgagagtgatctacgagagaatgaaccagagcctgagcctgctgtacaacgtgcccgccgtggccgaggagatccaggacgaggtggacgagctgctgcagaaggagcagaactacagcgacgacgtgctggccaacatgatcagcgagcccagaatcagctacggcaacgacgccctgatgcccagcctgaccgagaccaagaccaccgtggagctgctgcccgtgaacggcgagttcagcctggacgacctgcagccctggcacagcttcggcgccgacagcgtgcccgccaacaccgagaacgaggtggagcccgtggacgccagacccgccgccgacagaggcctgaccaccagacccggcagcggcctgaccaacatcaagaccgaggagatcagcgaggtgaagatggacgccgagttcagacacgacagcggctacgaggtgcaccaccagaagctggtgttcttcgccgaggacgtgggcagcaacaagggcgccatcatcggcctgatggtgggcggcgtggtgatcgccaccgtgatcgtgatcaccctggtgatgctgaagaagaagcagtacaccagcatccaccacggcgtggtggaggtggacgccgccgtgacccccgaggagagacacctgagcaagatgcagcagaacggctacgagaaccccacctacaagttcttcgagcagatgcagaactag

SEQ ID NO: 52001 - DNA, 1920 bp, Artificial Sequence
  derived and/or modified sequence
atgctgcccggcctggccctgctgctgctggccgcctggaccgccagagccctggaggtgtaccccgagctgcagatcaccaacgtggtggaggccaaccagcccgtgaccatccagaactggtgcaagagaggcagaaagcagtgcaagacccacccccacttcgtgatcccctacagatgcctggtgggcgagttcgtgagcgacgccctgctggtgcccgacaagtgcaagttcctgcaccaggagagaatggacgtgtgcgagacccacctgcactggcacaccgtggccaaggagacctgcagcgagaagagcaccaacctgcacgactacggcatgctgctgccctgcggcatcgacaagttcagaggcgtggagttcgtgtgctgccccctggccgaggagagcgacaacgtggacagcgccgacgccgaggaggacgacagcgacgtgtggtggggcggcgccgacaccgactacgccgacggcagcgaggacaaggtggtggaggtggccgaggaggaggaggtggccgaggtggaggaggaggaggccgacgacgacgaggacgacgaggacggcgacgaggtggaggaggaggccgaggagccctacgaggaggccaccgagagaaccaccagcatcgccaccaccaccaccaccaccaccgagagcgtggaggaggtggtgagagtgcccaccaccgccgccagcacccccgacgccgtggacaagtacctggagacccccggcgacgagaacgagcacgcccacttccagaaggccaaggagagactggaggccaagcacagagagagaatgagccaggtgatgagagagtgggaggaggccgagagacaggccaagaacctgcccaaggccgacaagaaggccgtgatccagcacttccaggagaaggtggagagcctggagcaggaggccgccaacgagagacagcagctggtggagacccacatggccagagtggaggccatgctgaacgacagaagaagactggccctggagaactacatcaccgccctgcaggccgtgccccccagacccagacacgtgttcaacatgctgaagaagtacgtgagagccgagcagaaggacagacagcacaccctgaagcacttcgagcacgtgagaatggtggaccccaagaaggccgcccagatcagaagccaggtgatgacccacctgagagtgatctacgagagaatgaaccagagcctgagcctgctgtacaacgtgcccgccgtggccgaggagatccaggacgaggtggacgagctgctgcagaaggagcagaactacagcgacgacgtgctggccaacatgatcagcgagcccagaatcagctacggcaacgacgccctgatgcccagcctgaccgagaccaagaccaccgtggagctgctgcccgtgaacggcgagttcagcctggacgacctgcagccctggcacagcttcggcgccgacagcgtgcccgccaacaccgagaacgaggtggagcccgtggacgccagacccgccgccgacagaggcctgaccaccagacccggcagcggcctgaccaacatcaagaccgaggagatcagcgaggtgaagatggacgccgagttcagacacgacagcggctacgaggtgcaccaccagaagctggtgttcttcgccgaggacgtgggcagcaacaagggcgccatcatcggcctgatggtgggcggcgtggtgatcgccaccgtgatcgtgatcaccctggtgatgctgaagaagaagcagtacaccagcatccaccacggcgtggtggaggtggacgccgccgtgacccccgaggagagacacctgagcaagatgcagcagaacggctacgagaaccccacctacaagttcttcgagcagatgcagaactag

SEQ ID NO: 52002 - DNA, 1983 bp, Artificial Sequence
  derived and/or modified sequence
atgttctgcggcagactgaacatgcacatgaacgtgcagaacggcaagtgggacagcgaccccagcggcaccaagacctgcatcgacaccaaggagggcatcctgcagtactgccaggaggtgtaccccgagctgcagatcaccaacgtggtggaggccaaccagcccgtgaccatccagaactggtgcaagagaggcagaaagcagtgcaagacccacccccacttcgtgatcccctacagatgcctggtgggcgagttcgtgagcgacgccctgctggtgcccgacaagtgcaagttcctgcaccaggagagaatggacgtgtgcgagacccacctgcactggcacaccgtggccaaggagacctgcagcgagaagagcaccaacctgcacgactacggcatgctgctgccctgcggcatcgacaagttcagaggcgtggagttcgtgtgctgccccctggccgaggagagcgacaacgtggacagcgccgacgccgaggaggacgacagcgacgtgtggtggggcggcgccgacaccgactacgccgacggcagcgaggacaaggtggtggaggtggccgaggaggaggaggtggccgaggtggaggaggaggaggccgacgacgacgaggacgacgaggacggcgacgaggtggaggaggaggccgaggagccctacgaggaggccaccgagagaaccaccagcatcgccaccaccaccaccaccaccaccgagagcgtggaggaggtggtgagagtgcccaccaccgccgccagcacccccgacgccgtggacaagtacctggagacccccggcgacgagaacgagcacgcccacttccagaaggccaaggagagactggaggccaagcacagagagagaatgagccaggtgatgagagagtgggaggaggccgagagacaggccaagaacctgcccaaggccgacaagaaggccgtgatccagcacttccaggagaaggtggagagcctggagcaggaggccgccaacgagagacagcagctggtggagacccacatggccagagtggaggccatgctgaacgacagaagaagactggccctggagaactacatcaccgccctgcaggccgtgccccccagacccagacacgtgttcaacatgctgaagaagtacgtgagagccgagcagaaggacagacagcacaccctgaagcacttcgagcacgtgagaatggtggaccccaagaaggccgcccagatcagaagccaggtgatgacccacctgagagtgatctacgagagaatgaaccagagcctgagcctgctgtacaacgtgcccgccgtggccgaggagatccaggacgaggtggacgagctgctgcagaaggagcagaactacagcgacgacgtgctggccaacatgatcagcgagcccagaatcagctacggcaacgacgccctgatgcccagcctgaccgagaccaagaccaccgtggagctgctgcccgtgaacggcgagttcagcctggacgacctgcagccctggcacagcttcggcgccgacagcgtgcccgccaacaccgagaacgaggtggagcccgtggacgccagacccgccgccgacagaggcctgaccaccagacccggcagcggcctgaccaacatcaagaccgaggagatcagcgaggtgaagatggacgccgagttcagacacgacagcggctacgaggtgcaccaccagaagctggtgttcttcgccgaggacgtgggcagcaacaagggcgccatcatcggcctgatggtgggcggcgtggtgatcgccaccgtgatcgtgatcaccctggtgatgctgaagaagaagcagtacaccagcatccaccacggcgtggtggaggtggacgccgccgtgacccccgaggagagacacctgagcaagatgcagcagaacggctacgagaaccccacctacaagttcttcgagcagatgcagaactag

SEQ ID NO: 52003 - protein, 714 aa, Artificial Sequence
  derived and/or modified sequence
MLPGLALLLLAAWTARALEVPTDGNAGLLAEPQIAMFCGRLNMHMNVQNGKWDSDPSGTKTCIDTKEGILQYCQEVYPELQITNVVEANQPVTIQNWCKRGRKQCKTHPHFVIPYRCLVGEFVSDALLVPDKCKFLHQERMDVCETHLHWHTVAKETCSEKSTNLHDYGMLLPCGIDKFRGVEFVCCPLAEESDNVDSADAEEDDSDVWWGGADTDYADGSEDKVVEVAEEEEVAEVEEEEADDDEDDEDGDEVEEEAEEPYEEATERTTSIATTTTTTTESVEEVVRVSQSLLKTTQEPLARDPVKLPTTAASTPDAVDKYLETPGDENEHAHFQKAKERLEAKHRERMSQVMREWEEAERQAKNLPKADKKAVIQHFQEKVESLEQEAANERQQLVETHMARVEAMLNDRRRLALENYITALQAVPPRPRHVFNMLKKYVRAEQKDRQHTLKHFEHVRMVDPKKAAQIRSQVMTHLRVIYERMNQSLSLLYNVPAVAEEIQDEVDELLQKEQNYSDDVLANMISEPRISYGNDALMPSLTETKTTVELLPVNGEFSLDDLQPWHSFGADSVPANTENEVEPVDARPAADRGLTTRPGSGLTNIKTEEISEVKMDAEFRHDSGYEVHHQKLVFFAEDVGSNKGAIIGLMVGGVVIATVIVITLVMLKKKQYTSIHHGVVEVDAAVTPEERHLSKMQQNGYENPTYKFFEQMQN

SEQ ID NO: 52004 - protein, 714 aa, Artificial Sequence
  derived and/or modified sequence
MLPGLALLLLAAWTARALEVYPELQITNVVEANQPVTIQNWCKRGRKQCKTHPHFVIPYRCLVGEFVSDALLVPDKCKFLHQERMDVCETHLHWHTVAKETCSEKSTNLHDYGMLLPCGIDKFRGVEFVCCPLAEESDNVDSADAEEDDSDVWWGGADTDYADGSEDKVVEVAEEEEVAEVEEEEADDDEDDEDGDEVEEEAEEPYEEATERTTSIATTTTTTTESVEEVVREVCSEQAETGPCRAMISRWYFDVTEGKCAPFFYGGCGGNRNNFDTEEYCMAVCGSAMSQSLLKTTQEPLARDPVKLPTTAASTPDAVDKYLETPGDENEHAHFQKAKERLEAKHRERMSQVMREWEEAERQAKNLPKADKKAVIQHFQEKVESLEQEAANERQQLVETHMARVEAMLNDRRRLALENYITALQAVPPRPRHVFNMLKKYVRAEQKDRQHTLKHFEHVRMVDPKKAAQIRSQVMTHLRVIYERMNQSLSLLYNVPAVAEEIQDEVDELLQKEQNYSDDVLANMISEPRISYGNDALMPSLTETKTTVELLPVNGEFSLDDLQPWHSFGADSVPANTENEVEPVDARPAADRGLTTRPGSGLTNIKTEEISEVKMDAEFRHDSGYEVHHQKLVFFAEDVGSNKGAIIGLMVGGVVIATVIVITLVMLKKKQYTSIHHGVVEVDAAVTPEERHLSKMQQNGYENPTYKFFEQMQN

SEQ ID NO: 52005 - DNA, 2145 bp, Artificial Sequence
  derived and/or modified sequence
atgctccccgggctcgcacttctgctcctcgccgcatggactgcccgggcactcgaggtgcctacggacgggaacgcgggcttattagcagaaccacaaattgcaatgttctgtggccgactcaacatgcatatgaacgtgcagaacggcaaatgggactctgatcccagtggcaccaagacttgtatcgacacaaaggagggtatcctccagtattgtcaggaagtgtaccccgagctccagatcacaaacgttgtggaggccaaccagccagtgaccatccaaaattggtgcaaaagaggaagaaaacagtgtaaaacacatcctcactttgtgatcccttatcggtgcttagtaggggagttcgttagtgatgcactgttagtccccgataagtgcaaattcctgcaccaggagagaatggatgtctgcgaaacgcatctccactggcatacggtggctaaagagacgtgtagcgaaaagtccaccaatctgcatgactatggcatgcttctgccatgtgggatagataagtttcgcggagtcgagttcgtctgttgtccattggccgaagagtcagacaatgtggactcagcagatgccgaggaagacgacagcgacgtgtggtgggggggcgccgacaccgattacgccgacgggagtgaggacaaggtggttgaagtggccgaagaggaggaagtcgccgaggtcgaagaggaagaggccgatgacgacgaggacgacgaggacggcgacgaagtggaggaggaggctgaagagccatacgaagaagctaccgaacgaactacctccatcgcaacaactacgaccactactacggagtctgtcgaggaggtagtacgagtctcccagtctctcctaaagaccacccaggagccgctcgccagggatcccgttaagctccctacaactgctgctagtactcctgatgccgtcgataaatacctggaaacccctggagacgagaatgaacatgcgcactttcagaaagccaaagagcggcttgaggccaagcaccgggagcgcatgtcacaggtaatgcgtgagtgggaggaagctgagcgacaggctaaaaatctgcccaaagcggacaagaaagctgttatccaacactttcaggaaaaggtggagtctttggaacaagaggctgcaaacgagaggcagcagcttgtagagacacatatggcaagagtggaggcaatgttgaacgaccgaaggcgcctggccctggaaaactatattaccgctctccaggccgtccctccacgcccacgccacgtgttcaacatgctgaagaagtatgtgcgcgctgaacagaaagaccgtcagcacacgcttaaacattttgagcatgtgcgcatggtggaccctaaaaaggccgcccagattaggagccaggttatgacgcatctacgcgtcatttatgagcggatgaatcagtccttgagtctgttgtataatgtgccggccgtagccgaagaaatccaggatgaggtggacgaactgctgcaaaaggagcagaactacagcgacgatgttctcgcaaatatgataagcgagcctcgaatctcctatggcaatgatgcccttatgccctcccttacggagactaaaaccaccgtggaactgctgcccgtaaacggcgaatttagtcttgacgaccttcagccctggcacagctttggcgctgactctgtgccagcgaataccgagaatgaagtagaaccagtcgatgctcgcccggcagccgaccgcggcttaaccactaggcctggatcaggtctcaccaacattaagactgaagagatttctgaggtaaaaatggacgcagagttcaggcacgattctggctatgaggtacaccatcagaaactggtgtttttcgctgaagacgtgggctccaacaagggcgctattatcggcctcatggtcggaggtgtcgtcatagccaccgtcattgttattactctggtgatgctcaaaaagaagcagtacacttccatccaccacggtgtagtagaggtggacgctgctgttacccccgaagagagacacctctctaagatgcagcagaacggctatgaaaatccgacttacaaattcttcgagcagatgcaaaactag

SEQ ID NO: 52006 - DNA, 2145 bp, Artificial Sequence
  derived and/or modified sequence
atgctgcccggcctggccctgctgctgctggccgcctggacagcccgggccctggaggtgcccacagatggaaatgccggcctgctggccgagccccagatcgccatgttctgtggccgcctgaacatgcacatgaatgtgcagaatggcaagtgggacagcgaccccagcggcaccaagacctgcatcgacaccaaggagggcatcctgcagtactgccaggaggtgtacccagagctgcagatcaccaacgtggtggaggccaaccagcctgtgaccatccagaactggtgcaagaggggcaggaagcagtgcaagacccacccccactttgtgatcccctaccgctgcctggtgggggagtttgtgtctgatgccctgctggtgcctgacaagtgcaagttcctgcaccaggagaggatggatgtgtgtgagacccacctgcactggcacacagtggccaaggagacctgcagcgagaagagcaccaacctgcatgactatggcatgctgctgccctgtggcatcgacaagttccggggcgtggagtttgtgtgctgccccctggccgaggagagtgacaacgtggacagcgcagatgctgaagaagatgacagtgatgtgtggtggggcggcgctgacacagattatgcagatggcagcgaggacaaggtggtggaggtggccgaggaggaggaggtggccgaggtggaggaggaggaggctgatgatgatgaagatgatgaagatggagatgaggtggaggaggaggccgaggagccctatgaggaggccacagagaggaccaccagcatcgccaccaccaccaccaccaccacagagagcgtggaggaggtggtgcgggtgtcccagagcctgctgaagaccacccaggagcccctggcccgggaccctgtgaagctgcccaccacagctgccagcaccccagatgctgtggacaagtacctggagaccccaggagatgaaaatgagcacgcccacttccagaaggccaaggagcggctggaggccaagcaccgggagaggatgagccaggtgatgagggagtgggaggaggccgagcggcaggccaagaacctgcccaaggctgacaagaaggccgtcatccagcacttccaggagaaggtggagagcctggagcaggaggccgccaatgaaaggcagcagctggtggagacccacatggcccgggtggaggccatgctgaatgacagaagaaggctggccctggagaactacatcacagccctgcaggccgtgcccccccggcccaggcatgtgttcaacatgctgaagaagtatgtgcgggcagagcagaaggaccggcagcacaccctgaagcactttgagcacgtgaggatggtggaccccaagaaggccgcccagatccgcagccaggtgatgacccacctgcgggtcatctatgaaagaatgaaccagagcctgagcctgctgtacaacgtgcctgctgtggccgaggagatccaggatgaggtggatgagctgctgcagaaggagcagaactacagtgatgatgtgctggccaacatgatcagcgagccccgcatctcctatggaaatgatgccctgatgcccagcctgacagagaccaagaccaccgtggagctgctgcctgtgaatggagagttcagcctggatgacctgcagccctggcacagctttggagctgacagcgtgcctgccaacacagaaaatgaggtggagcctgtggatgcccggcctgctgctgaccggggcctgaccacccggcccggcagcggcctgaccaacatcaagacagaggagatcagcgaggtgaagatggatgctgagttcagacatgattctggctatgaggtgcaccaccagaagctggtgttctttgctgaagatgtgggcagcaacaagggggccatcatcggcctgatggtgggcggcgtggtgattgccaccgtcatcgtcatcaccctggtgatgctgaagaagaagcagtacaccagcatccaccacggcgtggtggaggtggatgctgctgtgaccccagaggagcggcacctgagcaagatgcagcagaatggctatgagaaccccacctacaagttctttgagcagatgcagaactag

SEQ ID NO: 52007 - DNA, 2145 bp, Artificial Sequence
  derived and/or modified sequence
atgctgcccggcctggccctgctgctgctggccgcctggaccgcccgagctttggaggtgcctaccgacggaaatgcagggctcctggccgaaccacagatcgccatgttttgtgggagactgaacatgcacatgaacgtgcagaacggaaagtgggatagcgacccttcaggtaccaagacttgcatcgataccaaggagggaattcttcagtactgccaagaggtgtacccagaactccaaattaccaatgttgtggaggctaatcagccagtaactattcagaattggtgcaagcgagggaggaagcagtgtaagacccacccccattttgtaattccgtacagatgcctagtcggggagttcgtgagcgatgccctgttggtgcctgacaagtgcaagtttctgcatcaggagcgaatggacgtctgtgagacgcacctgcactggcacaccgtggcgaaagaaacttgctcggagaaatctaccaatctgcacgattacggaatgctgttgccatgcggaattgataagtttcgcggcgtagagtttgtctgttgtccactggccgaggaatctgataatgttgatagtgcagatgcggaggaagatgactccgacgtgtggtggggaggtgccgacacagactatgcagatgggagtgaagataaggtggtcgaggtcgcagaggaagaagaggtggccgaagtagaggaagaagaagcggacgacgacgaagatgatgaagatggagacgaagtggaggaagaggcagaggagccctacgaagaggcaaccgaacgcaccaccagcatagccaccacaaccactacgacgacagaatctgtggaagaagtggtgagagtatctcagtcccttctgaagactacccaagagccactggcacgggatcctgtgaaactgcctaccactgcggcgtccacccccgacgccgttgacaaatatctcgagactccgggagacgagaatgagcatgctcacttccagaaggccaaggagcgactggaagctaagcaccgcgagagaatgtctcaggtgatgagagagtgggaggaggccgagcgccaagcaaaaaatctgccgaaggccgataaaaaagccgttatccagcactttcaggagaaagttgagtccttggaacaggaggcagctaatgagcgccagcagctggtcgagacacatatggccagagtagaggccatgctcaatgacaggcgacgccttgctcttgaaaactatattacagccctacaggcggttcctccccgccctcgtcacgtgttcaatatgctgaagaagtacgtgcgcgccgagcagaaagaccgccagcatacactgaagcatttcgaacacgtccgaatggtggatccaaagaaagctgctcaaatccgttcccaggtcatgacacatttacgagtcatttacgagcggatgaatcagtcactgtctttgctctacaatgtgccagctgtggctgaggaaattcaggatgaggttgacgagctattacagaaggaacagaattacagcgatgacgtccttgctaacatgatcagcgaacctcgaatttcttatggtaacgacgccctcatgcctagccttacagagaccaagacaacagttgagctgctgcctgtgaatggcgagttcagcttagacgatttgcagccctggcattcgtttggcgcagactccgtacctgccaatacagaaaatgaagttgaacccgtggacgcaaggcccgccgctgaccgaggtctgacaacccgaccaggaagtggactgaccaacattaagacagaggaaatttccgaggtcaagatggatgccgagtttaggcacgatagtggttacgaggtccatcaccaaaagcttgtatttttcgctgaggacgtgggaagcaacaagggcgcaattatcggcctgatggtcggcggggtggtgatcgcgaccgtcatcgtaataaccctggtcatgctcaaaaaaaaacagtacacttcaattcatcacggggtggtggaagtggacgcagcagtgacccctgaagagagacacctatcaaagatgcaacagaacggatacgagaaccctacctacaagttctttgagcagatgcagaactag

SEQ ID NO: 52008 - DNA, 3464 bp, Artificial Sequence
  derived and/or modified sequence
ggatcagctgactcgcctggctctgagccccgccgccgcgctcgggctccgtcagtttcctcggcagcggtaggcgagagcacgcggaggagcgtgcgcgggggccccgggagacggcggcggtggcggcgcgggcagagcaaggacgcggcggatcccactcgcacagcagcgcactcggtgccccgcgcagggtcgcgatgctgcccggtttggcactgctcctgctggccgcctggacggctcgggcgctggaggtacccactgatggtaatgctggcctgctggctgaaccccagattgccatgttctgtggcagactgaacatgcacatgaatgtccagaatgggaagtgggattcagatccatcagggaccaaaacctgcattgataccaaggaaggcatcctgcagtattgccaagaagtctaccctgaactgcagatcaccaatgtggtagaagccaaccaaccagtgaccatccagaactggtgcaagcggggccgcaagcagtgcaagacccatccccactttgtgattccctaccgctgcttagttggtgagtttgtaagtgatgcccttctcgttcctgacaagtgcaaattcttacaccaggagaggatggatgtttgcgaaactcatcttcactggcacaccgtcgccaaagagacatgcagtgagaagagtaccaacttgcatgactacggcatgttgctgccctgcggaattgacaagttccgaggggtagagtttgtgtgttgcccactggctgaagaaagtgacaatgtggattctgctgatgcggaggaggatgactcggatgtctggtggggcggagcagacacagactatgcagatgggagtgaagacaaagtagtagaagtagcagaggaggaagaagtggctgaggtggaagaagaagaagccgatgatgacgaggacgatgaggatggtgatgaggtagaggaagaggctgaggaaccctacgaagaagccacagagagaaccaccagcattgccaccaccaccaccaccaccacagagtctgtggaagaggtggttcgagtgtcccaaagtttactcaagactacccaggaacctcttgcccgagatcctgttaaacttcctacaacagcagccagtacccctgatgccgttgacaagtatctcgagacacctggggatgagaatgaacatgcccatttccagaaagccaaagagaggcttgaggccaagcaccgagagagaatgtcccaggtcatgagagaatgggaagaggcagaacgtcaagcaaagaacttgcctaaagctgataagaaggcagttatccagcatttccaggagaaagtggaatctttggaacaggaagcagccaacgagagacagcagctggtggagacacacatggccagagtggaagccatgctcaatgaccgccgccgcctggccctggagaactacatcaccgctctgcaggctgttcctcctcggcctcgtcacgtgttcaatatgctaaagaagtatgtccgcgcagaacagaaggacagacagcacaccctaaagcatttcgagcatgtgcgcatggtggatcccaagaaagccgctcagatccggtcccaggttatgacacacctccgtgtgatttatgagcgcatgaatcagtctctctccctgctctacaacgtgcctgcagtggccgaggagattcaggatgaagttgatgagctgcttcagaaagagcaaaactattcagatgacgtcttggccaacatgattagtgaaccaaggatcagttacggaaacgatgctctcatgccatctttgaccgaaacgaaaaccaccgtggagctccttcccgtgaatggagagttcagcctggacgatctccagccgtggcattcttttggggctgactctgtgccagccaacacagaaaacgaagttgagcctgttgatgcccgccctgctgccgaccgaggactgaccactcgaccaggttctgggttgacaaatatcaagacggaggagatctctgaagtgaagatggatgcagaattccgacatgactcaggatatgaagttcatcatcaaaaattggtgttctttgcagaagatgtgggttcaaacaaaggtgcaatcattggactcatggtgggcggtgttgtcatagcgacagtgatcgtcatcaccttggtgatgctgaagaagaaacagtacacatccattcatcatggtgtggtggaggttgacgccgctgtcaccccagaggagcgccacctgtccaagatgcagcagaacggctacgaaaatccaacctacaagttctttgagcagatgcagaactagacccccgccacagcagcctctgaagttggacagcaaaaccattgcttcactacccatcggtgtccatttatagaataatgtgggaagaaacaaacccgttttatgatttactcattatcgccttttgacagctgtgctgtaacacaagtagatgcctgaacttgaattaatccacacatcagtaatgtattctatctctctttacattttggtctctatactacattattaatgggttttgtgtactgtaaagaatttagctgtatcaaactagtgcatgaatagattctctcctgattatttatcacatagccccttagccagttgtatattattcttgtggtttgtgacccaattaagtcctactttacatatgctttaagaatcgatgggggatgcttcatgtgaacgtgggagttcagctgcttctcttgcctaagtattcctttcctgatcactatgcattttaaagttaaacatttttaagtatttcagatgctttagagagattttttttccatgactgcattttactgtacagattgctgcttctgctatatttgtgatataggaattaagaggatacacacgtttgtttcttcgtgcctgttttatgtgcacacattaggcattgagacttcaagcttttctttttttgtccacgtatctttgggtctttgataaagaaaagaatccctgttcattgtaagcacttttacggggcgggtggggaggggtgctctgctggtcttcaattaccaagaattctccaaaacaattttctgcaggatgattgtacagaatcattgcttatgacatgatcgctttctacactgtattacataaataaattaaataaaataaccccgggcaagacttttctttgaaggatgactacagacattaaataatcgaagtaattttgggtggggagaagaggcagattcaattttctttaaccagtctgaagtttcatttatgatacaaaagaagatgaaaatggaagtggcaatataaggggatgaggaaggcatgcctggacaaacccttcttttaagatgtgtcttcaatttgtataaaatggtgttttcatgtaaataaatacattcttggaggagc

SEQ ID NO: 52009 - DNA, 2145 bp, Artificial Sequence
  derived and/or modified sequence
atgctcccaggattggctcttctgctcttggctgcgtggactgcgagagcactggaagtgccaaccgacggaaatgcagggttactagccgaaccccagatagctatgttctgcggtcggttgaatatgcatatgaacgtccagaacggaaagtgggattccgatccatctggaactaaaacgtgtatcgataccaaggagggtatactgcagtactgccaggaggtgtaccccgaattacagattacaaatgttgtagaggctaatcagccggtgacgatccagaactggtgtaaaaggggacggaaacaatgcaagacgcatccccactttgttattccttatagatgtcttgtcggggagttcgtgtcagatgcattgctcgtgcccgataagtgcaagttccttcaccaggagcgcatggacgtgtgtgagactcacctacattggcatactgttgccaaagaaacctgcagcgaaaagagcactaatctacacgattacggcatgctgctaccgtgtgggattgataaatttagaggagtggagttcgtttgttgccctctggccgaagagtccgacaacgtggactctgccgatgccgaggaagacgattcagacgtttggtggggaggggcagacaccgattacgccgacggatcagaggataaagtggtggaggtagcagaggaggaggaagtggccgaagtcgaggaggaggaagcagatgatgacgaagatgacgaggacggcgacgaggtggaggaagaagccgaggagccatacgaggaggctacagaaaggaccaccagcatagcaaccactaccactacaacaaccgaaagcgtggaagaagtcgtccgggtgtcccaatctttgttgaagaccactcaggaaccactggcacgcgacccggtgaaattacccactactgctgcttctactcctgacgccgtcgacaaatacctcgagactcccggagacgaaaatgagcatgctcacttccagaaggccaaagaaaggctcgaagccaaacatagggagagaatgtcccaggtgatgagagagtgggaggaagccgagaggcaagctaagaatttacccaaggccgataagaaggcagtcattcaacacttccaagagaaggtggaaagcctggagcaggaagccgcaaacgagcgtcagcagctggtcgagactcatatggccagggtggaagccatgctgaatgatcgccgtcgcctggcattagagaattacattacagccctgcaagcagtgccacccagacctcgacatgtgtttaacatgttaaaaaaatatgtgcgggctgagcagaaggatcgtcagcacacactgaagcacttcgaacacgtccgcatggtggatcctaagaaagccgcacaaattagatcccaggtcatgacgcacttgcgggtgatttacgagaggatgaatcaaagtctcagtcttctgtacaatgtcccagccgtcgctgaagagatccaggatgaggtggacgagcttttacagaaggaacagaattactccgatgatgttcttgccaacatgattagcgagccgcgaatttcatatggaaatgatgccctgatgccatctctgaccgaaacaaaaactaccgtcgagctcctgcctgtcaatggagagttttccctggatgacttacaaccttggcacagtttcggcgcagactctgtccccgctaatactgaaaacgaagtggaacctgtggacgccagacctgccgctgaccgcggattgacgacaaggccaggttccggactgactaacatcaagacagaggagatctcggaagttaaaatggatgccgagtttaggcacgactctggctatgaagtacatcaccagaagctggtctttttcgcagaagacgtgggatcaaacaaaggggctattattggcctcatggttgggggagtggtaatagccaccgtcattgtcatcaccctcgtcatgttgaagaaaaaacagtatacctctatccaccatggcgtggtggaggttgacgccgctgtcactcctgaggaaaggcacctgtcaaaaatgcagcaaaatgggtatgaaaaccccacatacaagtttttcgagcagatgcagaattag

SEQ ID NO: 52010 - DNA, 2145 bp, Artificial Sequence
  derived and/or modified sequence
atgctgcccggcctggccctgctgctgctggccgcctggaccgccagagccctggaggtgcccaccgacggcaacgccggcctgctggccgagccccagatcgccatgttctgcggcagactgaacatgcacatgaacgtgcagaacggcaagtgggacagcgaccccagcggcaccaagacctgcatcgacaccaaggagggcatcctgcagtactgccaggaggtgtaccccgagctgcagatcaccaacgtggtggaggccaaccagcccgtgaccatccagaactggtgcaagagaggcagaaagcagtgcaagacccacccccacttcgtgatcccctacagatgcctggtgggcgagttcgtgagcgacgccctgctggtgcccgacaagtgcaagttcctgcaccaggagagaatggacgtgtgcgagacccacctgcactggcacaccgtggccaaggagacctgcagcgagaagagcaccaacctgcacgactacggcatgctgctgccctgcggcatcgacaagttcagaggcgtggagttcgtgtgctgccccctggccgaggagagcgacaacgtggacagcgccgacgccgaggaggacgacagcgacgtgtggtggggcggcgccgacaccgactacgccgacggcagcgaggacaaggtggtggaggtggccgaggaggaggaggtggccgaggtggaggaggaggaggccgacgacgacgaggacgacgaggacggcgacgaggtggaggaggaggccgaggagccctacgaggaggccaccgagagaaccaccagcatcgccaccaccaccaccaccaccaccgagagcgtggaggaggtggtgagagtgagccagagcctgctgaagaccacccaggagcccctggccagagaccccgtgaagctgcccaccaccgccgccagcacccccgacgccgtggacaagtacctggagacccccggcgacgagaacgagcacgcccacttccagaaggccaaggagagactggaggccaagcacagagagagaatgagccaggtgatgagagagtgggaggaggccgagagacaggccaagaacctgcccaaggccgacaagaaggccgtgatccagcacttccaggagaaggtggagagcctggagcaggaggccgccaacgagagacagcagctggtggagacccacatggccagagtggaggccatgctgaacgacagaagaagactggccctggagaactacatcaccgccctgcaggccgtgccccccagacccagacacgtgttcaacatgctgaagaagtacgtgagagccgagcagaaggacagacagcacaccctgaagcacttcgagcacgtgagaatggtggaccccaagaaggccgcccagatcagaagccaggtgatgacccacctgagagtgatctacgagagaatgaaccagagcctgagcctgctgtacaacgtgcccgccgtggccgaggagatccaggacgaggtggacgagctgctgcagaaggagcagaactacagcgacgacgtgctggccaacatgatcagcgagcccagaatcagctacggcaacgacgccctgatgcccagcctgaccgagaccaagaccaccgtggagctgctgcccgtgaacggcgagttcagcctggacgacctgcagccctggcacagcttcggcgccgacagcgtgcccgccaacaccgagaacgaggtggagcccgtggacgccagacccgccgccgacagaggcctgaccaccagacccggcagcggcctgaccaacatcaagaccgaggagatcagcgaggtgaagatggacgccgagttcagacacgacagcggctacgaggtgcaccaccagaagctggtgttcttcgccgaggacgtgggcagcaacaagggcgccatcatcggcctgatggtgggcggcgtggtgatcgccaccgtgatcgtgatcaccctggtgatgctgaagaagaagcagtacaccagcatccaccacggcgtggtggaggtggacgccgccgtgacccccgaggagagacacctgagcaagatgcagcagaacggctacgagaaccccacctacaagttcttcgagcagatgcagaactag

SEQ ID NO: 52011 - protein, 660 aa, Artificial Sequence
  derived and/or modified sequence
MFCGRLNMHMNVQNGKWDSDPSGTKTCIDTKEGILQYCQEVYPELQITNVVEANQPVTIQNWCKRGRKQCKTHPHFVIPYRCLVGEFVSDALLVPDKCKFLHQERMDVCETHLHWHTVAKETCSEKSTNLHDYGMLLPCGIDKFRGVEFVCCPLAEESDNVDSADAEEDDSDVWWGGADTDYADGSEDKVVEVAEEEEVAEVEEEEADDDEDDEDGDEVEEEAEEPYEEATERTTSIATTTTTTTESVEEVVRVPTTAASTPDAVDKYLETPGDENEHAHFQKAKERLEAKHRERMSQVMREWEEAERQAKNLPKADKKAVIQHFQEKVESLEQEAANERQQLVETHMARVEAMLNDRRRLALENYITALQAVPPRPRHVFNMLKKYVRAEQKDRQHTLKHFEHVRMVDPKKAAQIRSQVMTHLRVIYERMNQSLSLLYNVPAVAEEIQDEVDELLQKEQNYSDDVLANMISEPRISYGNDALMPSLTETKTTVELLPVNGEFSLDDLQPWHSFGADSVPANTENEVEPVDARPAADRGLTTRPGSGLTNIKTEEISEVKMDAEFRHDSGYEVHHQKLVFFAEDVGSNKGAIIGLMVGGVVIATVIVITLVMLKKKQYTSIHHGVVEVDAAVTPEERHLSKMQQNGYENPTYKFFEQMQN

SEQ ID NO: 52012 - protein, 651 aa, Artificial Sequence
  derived and/or modified sequence
MNQPQRMAPVGTDKELSDLLDFSMMFPLPVTNGKGRPASLAGAQFGGSGLEDRPSSGSWGSGDQSSSSFDPSRTFSEGTHFTESHSSLSSSTFLGPGLGGKSGERGAYASFGRDAGVGGLTQAGFLSGELALNSPGPLSPSGMKGTSQYYPSYSGSSRRRAADGSLDTQPKKVRKVPPGLPSSVYPPSSGEDYGRDATAYPSAKTPSSTYPAPFYVADGSLHPSAELWSPPGQAGFGPMLGGGSSPLPLPPGSGPVGSSGSSSTFGGLHQHERMGYQLHGAEVNGGLPSASSFSSAPGATYGGVSSHTPPVSGADSLLGSRGTTAGSSGDALGKALASIYSPDHSSNNFSSSPSTPVGSPQGLAGTSQWPRAGAPGALSPSYDGGLHGLQSKIEDHLDEAIHVLRSHAVGTAGDMHTLLPGHGALASGFTGPMSLGGRHAGLVGGSHPEDGLAGSTSLMHNHAALPSQPGTLPDLSRPPDSYSGLGRAGATAAASEIKREEKEDEENTSAADHSEEEKKELKAPRARTSSTDEVLSLEEKDLRDRERRMANNARERVRVRDINEAFRELGRMCQMHLKSDKAQTKLLILQQAVQVILGLEQQVRERNLNPKAACLKRREEEKVSGVVGDPQMVLSAPHPGLSEAHNPAGHM

SEQ ID NO: 52013 - DNA, 1956 bp, Artificial Sequence
  derived and/or modified sequence
atgaaccagccccagagaatggcccccgtgggcaccgacaaggagctgagcgacctgctggacttcagcatgatgttccccctgcccgtgaccaacggcaagggcagacccgccagcctggccggcgcccagttcggcggcagcggcctggaggacagacccagcagcggcagctggggcagcggcgaccagagcagcagcagcttcgaccccagcagaaccttcagcgagggcacccacttcaccgagagccacagcagcctgagcagcagcaccttcctgggccccggcctgggcggcaagagcggcgagagaggcgcctacgccagcttcggcagagacgccggcgtgggcggcctgacccaggccggcttcctgagcggcgagctggccctgaacagccccggccccctgagccccagcggcatgaagggcaccagccagtactaccccagctacagcggcagcagcagaagaagagccgccgacggcagcctggacacccagcccaagaaggtgagaaaggtgccccccggcctgcccagcagcgtgtacccccccagcagcggcgaggactacggcagagacgccaccgcctaccccagcgccaagacccccagcagcacctaccccgcccccttctacgtggccgacggcagcctgcaccccagcgccgagctgtggagcccccccggccaggccggcttcggccccatgctgggcggcggcagcagccccctgcccctgccccccggcagcggccccgtgggcagcagcggcagcagcagcaccttcggcggcctgcaccagcacgagagaatgggctaccagctgcacggcgccgaggtgaacggcggcctgcccagcgccagcagcttcagcagcgcccccggcgccacctacggcggcgtgagcagccacaccccccccgtgagcggcgccgacagcctgctgggcagcagaggcaccaccgccggcagcagcggcgacgccctgggcaaggccctggccagcatctacagccccgaccacagcagcaacaacttcagcagcagccccagcacccccgtgggcagcccccagggcctggccggcaccagccagtggcccagagccggcgcccccggcgccctgagccccagctacgacggcggcctgcacggcctgcagagcaagatcgaggaccacctggacgaggccatccacgtgctgagaagccacgccgtgggcaccgccggcgacatgcacaccctgctgcccggccacggcgccctggccagcggcttcaccggccccatgagcctgggcggcagacacgccggcctggtgggcggcagccaccccgaggacggcctggccggcagcaccagcctgatgcacaaccacgccgccctgcccagccagcccggcaccctgcccgacctgagcagaccccccgacagctacagcggcctgggcagagccggcgccaccgccgccgccagcgagatcaagagagaggagaaggaggacgaggagaacaccagcgccgccgaccacagcgaggaggagaagaaggagctgaaggcccccagagccagaaccagcagcaccgacgaggtgctgagcctggaggagaaggacctgagagacagagagagaagaatggccaacaacgccagagagagagtgagagtgagagacatcaacgaggccttcagagagctgggcagaatgtgccagatgcacctgaagagcgacaaggcccagaccaagctgctgatcctgcagcaggccgtgcaggtgatcctgggcctggagcagcaggtgagagagagaaacctgaaccccaaggccgcctgcctgaagagaagagaggaggagaaggtgagcggcgtggtgggcgacccccagatggtgctgagcgccccccaccccggcctgagcgaggcccacaaccccgccggccacatgtag

SEQ ID NO: 52014 - DNA, 1956 bp, Artificial Sequence
  derived and/or modified sequence
atgaatcaaccccaacgaatggctcctgtgggcacagacaaagagctttcagacctcctagatttctcaatgatgttcccgttgccagtgacgaatggcaagggcaggcccgcctccctcgcaggtgcccagttcggcggctccgggctcgaagataggcccagtagcggctcctggggaagcggggatcagtccagctcatcctttgacccaagcaggaccttttccgaggggactcattttacagagtcgcattccagcctctcttcatctacctttctggggcccggattgggcggtaagtctggcgagcgaggtgcttacgcttctttcggacgcgatgccggcgtcggcggcctcacacaggcaggttttctcagtggggaactggctcttaacagccctggccccctgtcaccctccgggatgaagggaacaagccaatactaccctagttactccggatcatccaggcgccgtgcagccgatgggtctctggacacacaacccaaaaaagtccggaaggtgccaccaggattgccgtcctctgtctatccgccctccagtggggaggattatggacgggacgccacagcttatccatccgccaagacccctagctctacgtaccccgcccccttttatgttgcagatgggtccctgcacccttccgctgagctctggtctccacccgggcaagccgggttcggtccgatgctgggtggcggcagttcacccctgcccctgccaccaggtagcgggcctgtcgggtccagtggtagttccagtaccttcggcgggcttcaccagcatgagcgaatgggctatcagctgcacggcgccgaggtaaacggtgggcttccaagcgctagcagtttctcctctgcaccaggggctacttacggcggcgtttcatcgcacacacctcctgtaagcggagccgacagtttgttaggcagtagaggaaccaccgccggaagctccggagacgcgctcggaaaagcgcttgcttctatttactcaccagatcactccagcaataacttctcttctagtccaagcacccctgtcggcagtcctcagggattggccgggaccagccagtggccacgagctggagctcccggtgcactttccccgtcatatgacggcggtttgcacggtctgcagtcgaaaatcgaggaccatttagacgaggctattcatgttctgcgcagccatgccgtgggcacagccggcgacatgcatacccttttgcctgggcacggcgccttggctagcgggttcactggccctatgtctttaggagggcgccacgccggcctggtcggaggctcccaccccgaagatggcctggcaggatccacatctttaatgcacaatcacgccgccttaccgtcgcaacccggcacgctgccagacctgtctaggcccccagacagctattccggcttgggcagagcaggagccactgccgctgccagtgagatcaaacgggaagagaaggaagacgaggaaaacacaagtgcagccgatcactctgaagaggagaagaaagaattgaaggccccacgtgcccgcacttcttccactgatgaggttctttccctagaagagaaggacctgagagacagggagaggcgaatggctaacaatgctcgcgagcgcgtgcgggtccgagatatcaatgaagcatttcgcgaactcggccgcatgtgccagatgcatctgaaaagcgacaaggcacagactaaactcctcatcttgcagcaagccgtgcaggtgattctggggcttgaacagcaggtccgtgaaaggaatctgaaccctaaagcggcctgcctgaaaagaagggaagaagaaaaagtctccggagtggtgggagatccccagatggtcctgtctgcacctcaccccgggttgtccgaggcacataacccagcagggcatatgtag

SEQ ID NO: 52015 - DNA, 1956 bp, Artificial Sequence
  derived and/or modified sequence
atgaaccaacctcagagaatggctcccgtgggaactgataaggagctgtcagacctccttgatttctcaatgatgttccctctgccagtgacaaatgggaaaggacggcctgcgtctctcgccggtgcccagtttggaggatccggcctcgaggaccgcccgagctctggttcatggggctctggggatcaatcatcttcatccttcgatcccagcagaaccttctccgagggaacccacttcacagaaagccatagttccttgagctcatcaaccttcctgggtccagggctcggaggcaagtcaggcgagagaggggcgtacgccagcttcggccgggatgcaggtgtgggcgggctcactcaggctgggtttctgagcggcgaactggctcttaacagtcccggccctttgtccccatctggcatgaagggcacttctcagtattaccccagctacagcggcagttctaggcgacgagctgctgacggctcactcgacacccagcctaagaaggtgcgcaaagtcccacctgggctgccgagttctgtgtatccgccttcctctggcgaggactacggccgagacgcaaccgcttatcctagcgcaaagactccctccagcacatatcccgctccattttacgtggctgatggttcactccaccctagcgccgagctgtggtctcctccaggccaggctgggttcggccctatgctgggaggaggcagctctcccctgccactgcctccaggctcagggccagtaggcagctccggcagcagcagcacatttggaggcctgcaccagcatgagcggatgggataccagctgcatggagcagaagtgaatggaggtctaccgtccgccagttcatttagctctgctccgggggccacatacgggggcgtctcatctcatacacctcctgtgagcggcgcggacagcctgctcggttctagaggaacaacggccggcagcagcggggatgcactgggaaaggcactggcgagtatctactcccctgaccactcttcaaacaacttttcgtccagcccttcgactcccgtgggctcaccccagggcctcgctggtacatcccagtggccgcgggccggtgcacccggcgcgctgtctccgagctatgatggagggttgcacggccttcaaagtaaaatagaggaccatctcgatgaagctattcacgtcctgcgatctcacgccgtgggaacagctggcgatatgcacacactgctgccgggacacggcgccctggctagcggcttcaccggtcccatgtctcttggaggaaggcatgccggcctggtggggggaagtcaccccgaagatggcttagctggctctacctcgctgatgcataatcacgcagcactgccttcccagcctggtacgctcccggatttgtcgagaccccccgactcctacagcggactaggtcgggctggtgctacagccgctgcctctgagataaaacgtgaggaaaaggaggacgaggaaaatacctcagcagcggaccactccgaggaagaaaagaaggaacttaaggcccctcgcgcaaggacaagctctaccgacgaggtgttgtctcttgaagagaaggatctgcgggaccgagaacgcagaatggctaacaatgccagagagcgggtacgtgtcagagacataaatgaagccttccgtgaactgggacgaatgtgtcagatgcatctcaagtccgacaaagcacagacaaagctgctgattttgcagcaggccgtccaggtgatcctcgggttggagcagcaagttagggagagaaatcttaatccaaaagctgcgtgcctgaaacgcagagaagaggagaaagtgtctggtgtggttggggacccacagatggtgctgagtgctccgcacccagggctgtccgaagctcacaaccccgccggccacatgtag

SEQ ID NO: 52016 - DNA, 1956 bp, Artificial Sequence
  derived and/or modified sequence
atgaaccagccccagaggatggcccctgtgggcacagacaaggagctgagtgacctgctggacttctccatgatgttccccctgcctgtgaccaacgggaagggccgcccagccagcctggccggggcccagtttggaggcagcggcctggaggaccggcccagcagcggctcctggggcagcggggaccagagcagcagcagctttgaccccagcaggaccttcagcgagggcacccacttcacagagagccacagcagcctgagcagcagcaccttcctgggccctggcctgggcggcaagagcggggagcggggggcctatgccagctttggaagagatgctggggtgggcggcctgacccaggccggcttcctgtctggagagctggccctgaacagccctggccccctgagccccagcggcatgaagggcaccagccagtactaccccagctacagcggcagcagcagaagaagagctgctgatggcagcctggacacccagcccaagaaggtgaggaaggtgcccccaggcctgcccagctctgtgtacccacccagcagtggagaagattatggaagagatgccacagcctaccccagcgccaagacccccagcagcacctacccagcccccttctacgtggctgatggcagcctgcaccccagcgctgagctgtggagccccccaggccaggccggcttcggccccatgctgggcggcggcagcagccccctgcccctgcccccaggcagcggccctgtgggcagcagcggcagcagcagcacctttggaggcctgcaccagcacgagaggatgggctaccagctgcatggagctgaggtgaatggaggcctgcccagcgccagcagcttcagcagcgcccctggggccacctatggaggagtgagcagccacaccccacctgtgtctggagctgacagcctgctgggcagccggggcaccacagctggcagcagtggagatgccctgggcaaggccctggccagcatctacagcccagaccacagcagcaacaacttcagcagcagccccagcacccctgtgggcagcccccagggcctggccggcaccagccagtggccccgggccggggcccctggggccctgagccccagctatgatggcggcctgcacggcctgcagagcaagattgaggaccacctggatgaggccatccacgtgctgcggagccatgctgtgggcacagctggggacatgcacaccctgctgcccggccacggggccctggccagcggcttcaccggccccatgagcctgggcggcagacatgctggcctggtgggcggcagccacccagaagatggcctggccggcagcaccagcctgatgcacaaccacgccgccctgcccagccagcccggcaccctgcctgacctgagccggcccccagacagctacagcggcctgggccgggccggggccacagctgctgccagcgagatcaagcgggaggagaaggaggatgaggagaacaccagcgctgctgaccacagcgaggaggagaagaaggagctgaaggccccccgggcccggaccagcagcacagatgaggtgctgagcctggaggagaaggacctgcgggaccgggagaggaggatggccaacaatgcccgggagcgggtgcgggtgcgggacatcaatgaggccttccgggagctgggccgcatgtgccagatgcacctgaagagtgacaaggcccagaccaagctgctgatcctgcagcaggccgtgcaggtgatcctgggcctggagcagcaggtgcgggagaggaacctgaaccccaaggccgcctgcctgaagagaagagaggaggagaaggtgtctggagtggtgggggacccccagatggtgctgagcgccccccaccctggcctgtctgaggcccacaacccagctggccacatgtag

SEQ ID NO: 52017 - DNA, 1956 bp, Artificial Sequence
  derived and/or modified sequence
atgaaccagccccagcggatggcccccgtgggcaccgacaaggagttgtccgatcttctggatttttcaatgatgtttccactccccgtcaccaatggtaagggccgacctgccagtttggctggagctcagttcggaggaagcgggctggaggatcgaccatcttctgggagttgggggtccggagaccagagtagctcgtctttcgacccgtcccggacgtttagcgaaggtacccatttcactgagtctcactcctccttgtcctcctccacttttttgggtcctgggctggggggcaaaagtggagagcgcggggcttacgcatccttcggacgcgacgcgggagtgggaggactgacccaagcaggctttctttccggggagctggcactaaacagccctgggcccctgagtccaagtggcatgaagggcacttctcagtactatccatcctattctgggtccagtcgcagaagagcagccgatggcagcctggacactcagcctaaaaaggtcaggaaagttccgcccgggctgcctagttctgtatatcccccatcaagcggtgaggactacggacgcgatgctaccgcctatcctagcgcaaaaaccccgtccagcacttaccctgcacctttctacgtggctgacggtagtttacatccttcagctgagctgtggtcacctcccggccaagccggcttcggtccaatgctaggcggggggagctccccgctgccactacccccaggaagcggccctgtcggaagctcgggttcctcttccacattcggcggactgcatcagcacgaaaggatgggctaccaattacacggcgcagaagttaacggaggcttgccttctgcgtcttcattcagcagtgctccaggcgccacatacggcggcgtgtccagtcataccccccctgtatccggggcggattctctgttgggatcgagaggaaccactgcaggatcaagcggagacgctctgggaaaagctctggccagcatatactcgcccgaccatagctccaacaacttctcaagctccccgtccacccccgtcgggagccctcaaggtcttgcgggcaccagtcagtggccaagggctggggctcctggagccctcagtcctagttacgacggtggtctacacgggctgcagagtaaaatagaggatcacctcgatgaagcaatccacgtgcttcgcagccatgccgttggcaccgctggcgacatgcacaccctgctacctggccacggagcactcgcttctgggtttacaggacccatgtccttaggggggaggcacgctggcctggttggtgggtcacaccctgaagatggtcttgccggcagcacctcgctaatgcacaaccatgctgccctcccctctcaaccaggaactctacccgaccttagtagacccccggatagctactcaggacttgggagggccggagcaaccgccgcagcctccgaaatcaagcgcgaagagaaggaggatgaagagaatacatctgctgctgaccactctgaggaggagaagaaggagctgaaagcccctcgggcccggactagcagcacggatgaggtgttatctttagaagagaaagacttacgtgaccgagaaaggcggatggcgaataacgcacgcgaaagagtgcgcgtgagggacatcaacgaggcatttagagaattggggcgcatgtgccagatgcatctgaagtcagacaaggcccagacaaagctgcttatccttcagcaggctgtgcaagtaatcctggggctggaacagcaagtccgcgagcggaatctcaaccccaaggcagcatgcctgaaacgccgcgaagaagaaaaggttagtggggtggtgggggatccacagatggtgctatccgccccccacccaggactgtcagaggcccacaatccagcaggtcacatgtag

SEQ ID NO: 52018 - DNA, 1956 bp, Artificial Sequence
  derived and/or modified sequence
atgaaccagccccagcggatggcccccgtgggcaccgacaaggagcttagcgatctgctcgatttcagcatgatgtttcctctccctgtcacgaacggtaagggacggcctgcctctctcgccggcgctcaatttggcggcagtggcctggaagacaggccttcctccggatcttgggggagtggagatcagtcctcttcttcattcgacccttcgcgcaccttcagtgaaggcacacatttcacagagagccattcgtcactgagcagctctacttttctcggccctggattgggggggaaaagcggagagaggggagcttatgcctcttttggacgggacgccggagtcggcgggctgactcaagccggttttctgagtggggaactcgcactgaactcgccaggtcccttatccccatccgggatgaagggcacatcacagtactacccatcctattctgggtcaagtaggaggcgagccgccgatggttccctggacacgcaacctaagaaagtgagaaaagtgccaccaggactgcctagcagtgtctatccgccatcttcaggggaggactatggtcgcgacgctaccgcttacccctctgctaagacgcctagcagtacctaccctgcgccattttatgtggctgacggatccctacacccttcggccgagttgtggtccccacccgggcaggcaggattcgggcctatgcttggcgggggcagtagccccttacctctgccccctggcagcgggccagtcggtagcagcgggtcatcctctacattcggcgggctgcatcagcatgaacgaatgggctaccaactgcatggtgcggaagtgaacggcggccttccgtccgcgtcttctttctcgtcagccccgggggccacctatggaggagtgtcttcacatactccaccggtgagtggcgccgacagtctgctggggtctagaggcactacagcgggaagctctggagacgccttggggaaggccctcgcatccatctatagccctgaccactcatctaataatttttcgtccagtcccagtacacccgtcggttccccccagggtctggcgggaacatctcaatggccgagggcaggcgccccaggagctctgtcaccttcctacgacggtgggctccacggcctccaaagcaagattgaagaccatttagatgaagcaatccacgtgctgcggtcccacgccgtgggaaccgctggcgacatgcacactctcttgcctggacacggcgccctggcctctggcttcactggccccatgtctttgggcggcagacacgctggcctggttggcggatctcaccccgaggatgggctggccggaagcacatctctgatgcataatcacgcagctcttccctcccaacccggcacattaccagatctgtcccgcccaccagattcatacagtggacttggaagggccggcgccaccgccgctgcctccgagatcaaaagagaggaaaaggaggatgaggagaacacatcagctgccgaccactccgaggaagaaaagaaagaactgaaggcacctagagcacgtacatcctccacagacgaggtgctgtcgctagaggagaaggacctccgagaccgcgaacgccgaatggccaataacgcccgggaaagagtgagggtcagggacattaacgaagcattcagagagttaggccgaatgtgccagatgcatctgaagtccgacaaggcgcagacaaagttgctgatcctccagcaggcagtccaggtgatcctgggtttggagcaacaggttagagaacgtaatctcaaccccaaagctgcctgtcttaaaaggcgcgaggaagaaaaagtgagcggcgtggtgggagacccccagatggtccttagtgctcctcaccccgggctgtctgaagcacacaatccagcaggccacatgtag

SEQ ID NO: 52019 - DNA, 1956 bp, Artificial Sequence
  derived and/or modified sequence
atgaatcagcctcagcgcatggcgcctgtgggcacggacaaggagctgtccgatctgctggatttcagtatgatgttccccttgccggtcacaaatggcaagggcagacccgctagtctggccggagcacagttcggaggatccggactggaggatagaccatcttccggcagctggggcagcggagatcagagctcatcttccttcgatccaagtagaacctttagcgaaggaacacatttcacagagtcccacagctccctatcctcttccacattcctgggtccaggtctcggagggaaaagtggcgaacggggagcatacgcctcatttgggagagatgccggagttggcggtctgacccaggccggattcctgtcaggtgaactcgccctaaacagcccgggaccgctaagtccatccggaatgaaaggaacctcccagtactatccgtcatacagcggatcatctaggagacgagctgcagatggcagtctggatacacaacccaagaaggtgcggaaggttcctccagggctgcctagtagtgtgtacccaccgtcatctggcgaagactacggccgagatgcaaccgcctatcccagcgcgaagactccctcctcaacataccccgcacccttttatgttgccgacgggtcactgcacccatccgcagaactgtggtcccctcccggtcaggccggtttcggccctatgttgggaggcggaagtagccccctgccccttccgccaggctctggacccgtgggtagctctggctcttccagtacatttggcggtctacaccaacacgaaagaatgggataccaactgcacggagctgaggtgaacgggggactgccctccgcgtcatctttttccagtgcgccaggcgctacctacggcggagtgtcaagccatacccctccagtgtcgggcgcagattccctgttgggcagtagaggcactaccgctggcagctctggcgacgctctggggaaagctctggcctctatctatagcccagaccattcgagtaacaattttagcagtagcccttctaccccagtgggctctcctcagggcctggcgggaacaagccagtggccgcgtgctggcgctccaggcgcattatcgcctagttatgacgggggactccacggcctccagagcaagattgaggatcacctggacgaagcgatccatgtgcttcggtcccatgccgtggggacagccggagatatgcacacgctgcttcccggacacggtgccctggcttccggatttactggaccaatgagcctaggtgggcgtcacgctggtctggttgggggtagccatcccgaggacggcctggcgggatcgacctccctgatgcataaccatgccgctctgccttcgcagcctgggacactcccggatctttctcgtccccctgactcttatagcggccttggacgggctggcgcaaccgctgccgcatcagagataaaacgggaagagaaagaggacgaggagaatacatccgcggcagaccactccgaggaggaaaagaaggagctcaaggcaccccgagccaggacctcctccaccgatgaggtgctgtccctcgaggaaaaggatctgcgcgatcgtgagcgcagaatggctaataatgcccgtgagagggtacgagtgcgcgacattaatgaggccttccgtgaactgggtagaatgtgtcaaatgcacttaaaaagtgataaggcgcagaccaagctgctgatcttgcagcaggctgtccaggttattctgggcctagaacaacaggtcagggaacggaatctaaacccgaaggccgcttgccttaagagaagggaggaagaaaaagtgagtggggtcgttggagatccccagatggtactcagcgccccacatcccggactgtctgaggcccataacccagcaggacacatgtag

SEQ ID NO: 52020 - DNA, 1956 bp, Artificial Sequence
  derived and/or modified sequence
atgaaccagcctcagagaatggcccctgtcgggaccgacaaagagttgtctgatctgcttgacttcagtatgatgttcccgctaccagtgaccaacggcaaaggcagacccgcatccctggctggcgcacagttcgggggttcaggactggaagaccggccaagcagcggatcctggggtagcggagatcagagcagttcttcttttgacccctccagaaccttcagcgagggcactcactttaccgagtcacattcctccctctcgagtagcacttttctgggccctggactgggaggcaagagcggggaacggggtgcctacgcatccttcgggcgtgacgctggcgtgggagggttgacacaggccggattcctgtctggggaactagcactgaattctcctggtcccctttcgccatctggtatgaaggggactagccagtattatccaagttacagtggtagtagcagacgcagggcagccgatggctctctggatactcaacccaaaaaggtgcgcaaagttccccctggcttaccctcatccgtgtatccacctagtagcggggaggattatggacgggatgcaactgcctaccccagtgccaaaaccccaagttccacataccctgctcctttttacgttgcggatggctccttgcacccttcagctgagctgtggtcacccccaggtcaggctggattcggacctatgttaggcggtggctctagtccactgcctctgccccctggctcaggacccgtcggctcatcgggcagtagctcaacattcggcggactacaccaacatgagcggatgggttaccagctccatggcgctgaggtgaacggtgggttgccgtccgcttccagcttttccagcgcccctggggctacctacggcggtgttagcagtcatacaccccctgtgtcaggggctgattccctgctgggctctagaggtacgaccgccggttcgagtggtgatgcgctcgggaaagccctcgcttctatttattcccccgatcactcatcaaacaacttttcgtccagcccatcaacccccgtgggatcccctcaggggctcgccggaacctctcaatggcctagggcaggcgctcctggcgcactgagtccctcgtacgacggaggtcttcacggacttcagtctaagattgaagaccatttggatgaagcaatccacgtgttgagaagccatgccgtgggaaccgcaggtgacatgcataccctcctgccaggccacggggcactggcctccgggtttaccggtccgatgagtcttggaggccgacacgctggcctggtgggcggttcccacccagaggatggactagccggttcaacctccctcatgcacaaccacgcggctctgccctcccagcctggaacactcccagacctgtctagaccaccagatagctactcaggcttaggcagagccggagccacagcagctgcctccgagataaagcgcgaggaaaaagaggacgaggagaacacttcggccgctgatcactcagaagaagaaaagaaagaactaaaagctccacgggctagaacaagttcgactgatgaagtgttaagcctggaagaaaaagatttaagagaccgggagcggaggatggccaacaatgcaagggagagagtgagggtgcgagatattaacgaggcctttcgagagctggggaggatgtgccagatgcacctgaagagcgacaaagcccaaaccaagctgctcattctgcagcaggctgtgcaagtcatcctcggcctagaacagcaagtccgggagcgaaatttgaaccccaaagccgcttgcttgaagcgccgagaggaggaaaaagtcagcggggtggtgggggatccacagatggtgttgtcagctcctcacccgggtctaagtgaggctcataaccccgctgggcatatgtag

SEQ ID NO: 52021 - DNA, 4436 bp, Artificial Sequence
  derived and/or modified sequence
gcgccgcgtgcccggccgcgcccagcagggtttccaggcctgaggtgcccgccctggccccaggagaatgaaccagccgcagaggatggcgcctgtgggcacagacaaggagctcagtgacctcctggacttcagcatgatgttcccgctgcctgtcaccaacgggaagggccggcccgcctccctggccggggcgcagttcggaggttcaggtcttgaggaccggcccagctcaggctcctggggcagcggcgaccagagcagctcctcctttgaccccagccggaccttcagcgagggcacccacttcactgagtcgcacagcagcctctcttcatccacattcctgggaccgggactcggaggcaagagcggtgagcggggcgcctatgcctccttcgggagagacgcaggcgtgggcggcctgactcaggctggcttcctgtcaggcgagctggccctcaacagccccgggcccctgtccccttcgggcatgaaggggacctcccagtactacccctcctactccggcagctcccggcggagagcggcagacggcagcctagacacgcagcccaagaaggtccggaaggtcccgccgggtcttccatcctcggtgtacccacccagctcaggtgaggactacggcagggatgccaccgcctacccgtccgccaagacccccagcagcacctatcccgcccccttctacgtggcagatggcagcctgcacccctcagccgagctctggagtcccccgggccaggcgggcttcgggcccatgctgggtgggggctcatccccgctgcccctcccgcccggtagcggcccggtgggcagcagtggaagcagcagcacgtttggtggcctgcaccagcacgagcgtatgggctaccagctgcatggagcagaggtgaacggtgggctcccatctgcatcctccttctcctcagcccccggagccacgtacggcggcgtctccagccacacgccgcctgtcagcggggccgacagcctcctgggctcccgagggaccacagctggcagctccggggatgccctcggcaaagcactggcctcgatctactccccggatcactcaagcaataacttctcgtccagcccttctacccccgtgggctccccccagggcctggcaggaacgtcacagtggcctcgagcaggagcccccggtgccttatcgcccagctacgacgggggtctccacggcctgcagagtaagatagaagaccacctggacgaggccatccacgtgctccgcagccacgccgtgggcacagccggcgacatgcacacgctgctgcctggccacggggcgctggcctcaggtttcaccggccccatgtcactgggcgggcggcacgcaggcctggttggaggcagccaccccgaggacggcctcgcaggcagcaccagcctcatgcacaaccacgcggccctccccagccagccaggcaccctccctgacctgtctcggcctcccgactcctacagtgggctagggcgagcaggtgccacggcggccgccagcgagatcaagcgggaggagaaggaggacgaggagaacacgtcagcggctgaccactcggaggaggagaagaaggagctgaaggccccccgggcccggaccagcagtacggacgaggtgctgtccctggaggagaaagacctgagggaccgggagaggcgcatggccaataacgcgcgggagcgggtgcgcgtgcgggatattaacgaggccttccgggagctggggcgcatgtgccagatgcacctcaagtcggacaaagcgcagaccaagctgctcatcctgcagcaggccgtgcaggtcatcctggggctggagcagcaggtgcgagagcggaacctgaatcccaaagcagcctgtttgaaacggcgagaagaggaaaaggtgtcaggtgtggttggagacccccagatggtgctttcagctccccacccaggcctgagcgaagcccacaaccccgccgggcacatgtgaaaggtatgcctccgtgggacgagccacccgctttcagccctgtgctctggccccagaacggccactcgagaccccgggcttcatccacatccacacctcacacacctgttgtcagcatcgagccaacaccaacctgacaaggttcggagtgatgggggcggccaaggtgacactgggtccaggagctccctggggccctggcctaccactcactggcctcgctccccctgtccccgaatctcagccaccgtgtcactctgtgacctgtcccatggatcctgaaactgcatcttggccctgttgcctgggctgacaggagcattttttttttttccagtaaacaaaacctgaaagcaagcaacaaaacatacactttgtcagagaagaaaaaaatgccttaactataaaaagcggagaaatggaaacatatcactcaagggggatgctgtggaaacctggcttattcttctaaagccaccagcaaattgtgcctaagcgaaatattttttttaaggaaaataaaaacattagttacaagattttttttttcttaatgtagatgaaaattagcaaggatgctgcctttggtctctggtttttttaagctttttttgcatatgttttgtaagcaacaaatttttttgtataaaagtcccgtgtctctcgctatttctgctgctgttcctagactgagcattgcatttcttgatcaaccagatgattaaacgttgtattaaaaagaccccgtgtaaacctgagcccccccgtccccccccccccccggaagccactgcacacagacagaacggggacaggcggcgggtcttttgtttttttgatgttgggggttctcttggttttgtcatgtggaaagtgatgcgtgggcgttccctgatgaaggcaccttggggcttccctgccgcatcctctcccctcaggaaggggactgacctgggcttgggggaagggacgtcagcaaggtggctctgaccctcccaggtgactctgccaagcagctgtggcccccagggctaccctacacaacgccctccccaggcccccctaagctgctctcccttggaacctgcacagctctctgaaatggggcattttgttgggaccagtgacccctggcatggggaccacaccctggagcccggtgctggggacctcctggacaccctgtccttcactcctttgccccagggacccaggctcatgctctgaactctggctgagaggatgctgctcaggagccagcacaggacaccccccaccccaccccaccatgtccccattacaccagagggccatcgtgacgtagacaggatgccaggggcctggccagcctcccccaatgctggggagcatccctgggcctggggccacacctgctgccctccctctgtgtggtccaagggcaagagtggctggagccgggggactgtgctggtctgagccccacgaaggccttgggctgtgcgtccgaccctgctgcagaaccagcagggtgtcccctcgggcccatctgtgtcccatgtcccagcacccaggcctctctccaggtctccttttctggtcttttgccatgagggtaaccagctcttcccagctggctggggactgtcttgggtttaaaactgcaagtctcctaccctgggatcccatccagttccacacgaactagggcagtggtcactgtggcacccaggtgtgggcctggctagctgggggccttcatgtgcccttcatgcccctccctgcattgaggccttgtggacccctgggctggctgtgttcatccccgctgcaggtcgggcgtctccccccgtgccactcctgagactcccaccgttacccccaggagatcctggactgcctgactcccctccccagactggcttgggagcctgggccccatggtagatgcaagggaaacctcaaggccagctcaatgcctggtatctgcccccagtccaggccaggcggaggggaggggctgtccggctgcctctcccttctcggtggcttcccctacgccctgggagtttgatctcttaagggaacttgcctctccctcttgttttgctcctggccctgcccctaggtctgggtgggcagtggccccatagcctctggaactgtgcgttctgcatagaattcaaacgagattcacccagcgcgaggaggaagaaacagcagttcctgggaaccacaattatggggggtggggggtgtgatctgagtgcctcaagatggttttcaaaaaaatttttttaaagaaaataattgtatacgtgtcaacacagctggctggatgattgggactttaaaacgaccctctttcaggtggattcagagacctgtcctgtatataacagcactgtagcaataaacgtgacattttataacg

SEQ ID NO: 52022 - DNA, 4074 bp, Artificial Sequence
  derived and/or modified sequence
ggtttccaggcctgaggtgcccgccctggccccaggagaatgaaccagccgcagaggatggcgcctgtgggcacagacaaggagctcagtgacctcctggacttcagcatgatgttcccgctgcctgtcaccaacgggaagggccggcccgcctccctggccggggcgcagttcggaggttcaggtcttgaggaccggcccagctcaggctcctggggcagcggcgaccagagcagctcctcctttgaccccagccggaccttcagcgagggcacccacttcactgagtcgcacagcagcctctcttcatccacattcctgggaccgggactcggaggcaagagcggtgagcggggcgcctatgcctccttcgggagagacgcaggcgtgggcggcctgactcaggctggcttcctgtcaggcgagctggccctcaacagccccgggcccctgtccccttcgggcatgaaggggacctcccagtactacccctcctactccggcagctcccggcggagagcggcagacggcagcctagacacgcagcccaagaaggtccggaaggtcccgccgggtcttccatcctcggtgtacccacccagctcaggtgaggactacggcagggatgccaccgcctacccgtccgccaagacccccagcagcacctatcccgcccccttctacgtggcagatggcagcctgcacccctcagccgagctctggagtcccccgggccaggcgggcttcgggcccatgctgggtgggggctcatccccgctgcccctcccgcccggtagcggcccggtgggcagcagtggaagcagcagcacgtttggtggcctgcaccagcacgagcgtatgggctaccagctgcatggagcagaggtgaacggtgggctcccatctgcatcctccttctcctcagcccccggagccacgtacggcggcgtctccagccacacgccgcctgtcagcggggccgacagcctcctgggctcccgagggaccacagctggcagctccggggatgccctcggcaaagcactggcctcgatctactccccggatcactcaagcaataacttctcgtccagcccttctacccccgtgggctccccccagggcctggcaggaacgtcacagtggcctcgagcaggagcccccggtgccttatcgcccagctacgacgggggtctccacggcctgcagagtaagatagaagaccacctggacgaggccatccacgtgctccgcagccacgccgtgggcacagccggcgacatgcacacgctgctgcctggccacggggcgctggcctcaggtttcaccggccccatgtcactgggcgggcggcacgcaggcctggttggaggcagccaccccgaggacggcctcgcaggcagcaccagcctcatgcacaaccacgcggccctccccagccagccaggcaccctccctgacctgtctcggcctcccgactcctacagtgggctagggcgagcaggtgccacggcggccgccagcgagatcaagcgggaggagaaggaggacgaggagaacacgtcagcggctgaccactcggaggaggagaagaaggagctgaaggccccccgggcccggaccagcagtacggacgaggtgctgtccctggaggagaaagacctgagggaccgggagaggcgcatggccaataacgcgcgggagcgggtgcgcgtgcgggatattaacgaggccttccgggagctggggcgcatgtgccagatgcacctcaagtcggacaaagcgcagaccaagctgctcatcctgcagcaggccgtgcaggtcatcctggggctggagcagcaggtgcgagagcggaacctgaatcccaaagcagcctgtttgaaacggcgagaagaggaaaaggtgtcaggtgtggttggagacccccagatggtgctttcagctccccacccaggcctgagcgaagcccacaaccccgccgggcacatgtgaaagtaaacaaaacctgaaagcaagcaacaaaacatacactttgtcagagaagaaaaaaatgccttaactataaaaagcggagaaatggaaacatatcactcaagggggatgctgtggaaacctggcttattcttctaaagccaccagcaaattgtgcctaagcgaaatattttttttaaggaaaataaaaacattagttacaagattttttttttcttaatgtagatgaaaattagcaaggatgctgcctttggtctctggtttttttaagctttttttgcatatgttttgtaagcaacaaatttttttgtataaaagtcccgtgtctctcgctatttctgctgctgttcctagactgagcattgcatttcttgatcaaccagatgattaaacgttgtattaaaaagaccccgtgtaaacctgagcccccccgtccccccccccccccggaagccactgcacacagacagaacggggacaggcggcgggtcttttgtttttttgatgttgggggttctcttggttttgtcatgtggaaagtgatgcgtgggcgttccctgatgaaggcaccttggggcttccctgccgcatcctctcccctcaggaaggggactgacctgggcttgggggaagggacgtcagcaaggtggctctgaccctcccaggtgactctgccaagcagctgtggcccccagggctaccctacacaacgccctccccaggcccccctaagctgctctcccttggaacctgcacagctctctgaaatggggcattttgttgggaccagtgacccctggcatggggaccacaccctggagcccggtgctggggacctcctggacaccctgtccttcactcctttgccccagggacccaggctcatgctctgaactctggctgagaggatgctgctcaggagccagcacaggacaccccccaccccaccccaccatgtccccattacaccagagggccatcgtgacgtagacaggatgccaggggcctggccagcctcccccaatgctggggagcatccctgggcctggggccacacctgctgccctccctctgtgtggtccaagggcaagagtggctggagccgggggactgtgctggtctgagccccacgaaggccttgggctgtgcgtccgaccctgctgcagaaccagcagggtgtcccctcgggcccatctgtgtcccatgtcccagcacccaggcctctctccaggtctccttttctggtcttttgccatgagggtaaccagctcttcccagctggctggggactgtcttgggtttaaaactgcaagtctcctaccctgggatcccatccagttccacacgaactagggcagtggtcactgtggcacccaggtgtgggcctggctagctgggggccttcatgtgcccttcatgcccctccctgcattgaggccttgtggacccctgggctggctgtgttcatccccgctgcaggtcgggcgtctccccccgtgccactcctgagactcccaccgttacccccaggagatcctggactgcctgactcccctccccagactggcttgggagcctgggccccatggtagatgcaagggaaacctcaaggccagctcaatgcctggtatctgcccccagtccaggccaggcggaggggaggggctgtccggctgcctctcccttctcggtggcttcccctacgccctgggagtttgatctcttaagggaacttgcctctccctcttgttttgctcctggccctgcccctaggtctgggtgggcagtggccccatagcctctggaactgtgcgttctgcatagaattcaaacgagattcacccagcgcgaggaggaagaaacagcagttcctgggaaccacaattatggggggtggggggtgtgatctgagtgcctcaagatggttttcaaaaaaatttttttaaagaaaataattgtatacgtgtcaacacagctggctggatgattgggactttaaaacgaccctctttcaggtggattcagagacctgtcctgtatataacagcactgtagcaataaacgtgacattttataacg

SEQ ID NO: 52023 - protein, 222 aa, Artificial Sequence
  derived and/or modified sequence
MAELMLLSEIADPTRFFTDNLLSPEDWGLQNSTLYSGLDEVAEEQTQLFRCPEQDVPFDGSSLDVGMDVSPTDQPSFSNLTAFPGGAKELLLRDLDQLFLSSDCRHFNRTESLRLADELSGWVQRHQRGRRKIPQRAQERQKSQPRKKSPPVKAVPIQPPGPPERDSVGQLQLYRHPDRSQPAFLDAIDRREDTFYVVSFRRTTCCSQPSATTRPPGPRCPW

SEQ ID NO: 52024 - protein, 700 aa, Artificial Sequence
  derived and/or modified sequence
MAELMLLSEIADPTRFFTDNLLSPEDWDSTLYSGLDEVAEEQTQLFRCPEQDVPFDGSSLDVGMDVSPSEPPWELLPIFPDLQVKSEPSSPCSSSSLSSESSRLSTEPSSEALGVGEVLHVKTESLAPPLCLLGDDPTSSFETVQINVIPTSDDSSDVQTKIEPVSPCSSVNSEASLLSADSSSQAFIGEEVLEVKTESLSPSGCLLWDVPAPSLGAVQISMGPSLDGSSGKALPTRKPPLQPKPVVLTTVPMPSRAVPPSTTVLLQSLVQPPPVSPVVLIQGAIRVQPEGPAPSLPRPERKSIVPAPMPGNSCPPEVDAKLLKRQQRMIKNRESACQSRRKKKEYLQGLEARLQAVLADNQQLRRENAALRRRLEALLAENSELKLGSGNRKVVCIMVFLLFIAFNFGPVSISEPPSAPISPRMNKGEPQPRRHLLGFSEQEPVQGVEPLQGSSQGPKEPQPSPTDQPSFSNLTAFPGGAKELLLRDLDQLFLSSDCRHFNRTESLRLADELSGWVQRHQRGRRKIPQRAQERQKSQPRKKSPPVKAVPIQPPGPPERDSVGQLQLYRHPDRSQPAFLDAIDRREDTFYVVSFRRDHLLLPAISHNKTSRPKMSLVMPAMAPNETLSGRGAPGDYEEMMQIECEVMDTRVIHIKTSTVPPSLRKQPSPTPGNATGGPLPVSAASQAHQASHQPLYLNHP

SEQ ID NO: 52025 - DNA, 669 bp, Artificial Sequence
  derived and/or modified sequence
atggcggaactcatgctgctgtctgaaattgctgaccccacccgcttttttaccgacaatctcctctcacccgaagattggggacttcaaaactctacgctgtattctggattggatgaggtggcagaagaacagacccagctctttagatgtccagagcaggacgtgccattcgacggatcctcgctcgatgtgggcatggatgtgtcaccaaccgaccaaccctcatttagtaacctgacagctttcccaggaggagctaaggaactgttgctgagggatttagaccaactgtttctaagcagcgactgcagacactttaatagaacagagagccttcgattagccgatgaattgtcgggttgggttcagcggcaccaacggggacgcagaaaaattccgcagcgcgcccaggaacgccaaaagtcccagccacgcaagaagagtcctcccgtgaaggctgtgcccattcagccgcctgggcctccagagcgtgactcagtcggccaactgcagctatatagacaccctgaccgttcacaaccagccttcctcgacgccatcgatcgtcgcgaggatactttctacgtggtgagcttcaggagaaccacatgttgttcccagccgagcgctactacaaggcccccaggaccacggtgcccctggtag

SEQ ID NO: 52026 - DNA, 2103 bp, Artificial Sequence
  derived and/or modified sequence
atggccgaactgatgctcctcagtgagattgccgatcccacacggttcttcaccgataatttgctgtcccctgaagactgggactctaccctgtactctggacttgatgaagttgccgaggaacagacccagctgtttaggtgcccagagcaggatgtgccctttgacgggtccagtttagatgtagggatggatgtcagtccatcagaaccaccttgggagctgcttcctatattccctgatctccaggtgaaaagtgaaccatcgtcgccatgctctagctcttctctgagcagtgagtcatcccggctttctactgagccttcttccgaagcattgggcgtcggtgaagtgttgcacgtaaagaccgaaagcctggcaccccctctctgcctgctcggagacgatccaacctccagcttcgaaactgtgcagattaatgtcatccctacttccgacgattctagtgatgttcaaactaagattgaacctgtgtccccctgtagctccgtaaactccgaggcgtccctattgtcagccgattcgtctagtcaagcttttatcggcgaggaggtgttagaggtgaaaactgaaagtctgtccccgtcaggctgcctcctctgggacgtgcctgcccctagtttaggggccgtacagatctctatgggtcctagtttagacggaagctccggcaaggccctgcccactagaaaacccccactgcagccaaaacctgtcgttctcaccactgtcccaatgcccagccgggccgttccaccctctacaactgtcctgctccagtcactcgttcagccacctcccgtttcccccgtggttctgatccaaggggcgatcagggtacagccggaaggtcctgccccatctcttccaagacctgaacgcaagtcaatagtgcctgcccccatgccaggcaactcctgtccgcctgaggtagatgccaagctgctgaagcggcagcagaggatgataaagaatagagagagcgcttgccagtcccgccgtaagaagaaagagtacttacaggggctggaggcacgtttgcaggccgtgttggccgataatcagcagctgcgccgagagaatgcggcactcagacggcgactagaggctctgttggcagagaactctgaattgaaactaggtagcggcaacaggaaggttgtatgtattatggtgtttctgctattcatagcattcaatttcggtcccgtcagcatcagtgagccgccttctgcccctatctccccgagaatgaataagggtgagcctcaaccaaggcggcatctgttgggattctccgaacaagaaccagtgcagggagtggaacccttgcaaggatcaagccaaggccctaaggagccccagccgagtcctactgaccagccatctttttcgaacctgacagccttccctggaggcgccaaggagctgctgcttcgggatctcgaccagttgtttctcagttcagactgccggcactttaaccggacggaatccctgaggctcgccgatgaactttctggctgggtacagcggcatcagcgtgggcggaggaaaataccccagagagcacaggagaggcaaaaaagccagcctaggaagaagtcaccccctgtgaaggctgttcctatacagcctcccggcccccccgagcgtgatagcgtcgggcagttgcagctgtacagacatccagatagatctcagccggccttcctggacgccatagaccgcagagaggacacattttatgtggtgagtttcaggcgcgaccacctgctgttgccggctatctctcataataagacttcaagacccaaaatgagcctggttatgccagccatggcccctaacgaaacgctgagtggacggggagcccccggggattacgaggaaatgatgcaaatcgagtgtgaggtgatggacacccgcgtgattcacatcaaaacctccacagtgccacccagtctgaggaagcaaccaagccccacccccggaaatgctacaggcgggcctctccccgtttccgcagcaagccaggctcatcaggcctcccaccagccactgtatctgaaccacccatag

SEQ ID NO: 52027 - DNA, 2103 bp, Artificial Sequence
  derived and/or modified sequence
atggcggagcttatgctgttgtcagaaatagctgatcctacccggttcttcacggataatcttctgtctccggaggactgggatagcacgctgtactcaggtcttgacgaggtggctgaggagcagacccagttgtttaggtgccctgagcaggatgtgccctttgacgggtccagtttggatgtgggaatggacgtttctccatccgaaccaccgtgggagctcctgcctattttccctgatctccaggtcaagagcgagccttctagcccatgctcctcaagttccctgtcgtcagagtccagtcgactgtccacagagccttcctccgaggccctgggtgttggggaggttctccacgtcaaaacggaaagtttggcacccccactgtgccttctgggtgacgatcccacatcatctttcgaaaccgttcagattaacgttatccccacctcggacgatagttcagatgtccaaacaaaaatcgagcctgtttcaccatgttcctctgtaaacagtgaagcgtccctgctttcagccgactctagctctcaggctttcatcggcgaggaggtcttggaggtgaaaactgagagcctttcaccatccggttgtctgctctgggatgtacctgctccaagtctgggagcagtccagatttccatggggccgagtttggacggctcctcaggaaaggctctgcccactcgcaagcccccactccagcctaaaccagtagtgctgaccacagtcccaatgccgtcccgcgcagtgccgccatccaccaccgtacttttacagtcccttgtgcagccaccaccggtctccccagtggtcctgatccagggcgcaatccgtgtacagcccgagggtcccgccccctctctgccccggcccgagcggaagagcatcgtccctgcccctatgcctggcaactcttgccccccggaggtggacgccaagttacttaagagacagcagaggatgatcaaaaatcgggaatccgcgtgccagtctagacggaagaagaaagagtatttgcagggtcttgaggcccggcttcaggccgtacttgctgacaaccagcaacttaggcgggagaacgctgcgctgaggcgcaggctcgaggcgctgcttgccgaaaactctgagctcaagctaggctcaggtaatcggaaagttgtgtgtatcatggtttttcttctgttcattgcttttaactttggacccgtgagtataagcgagcctccaagtgcacccatttctcctcggatgaacaagggtgaaccccaaccacgccgccaccttttaggcttctccgagcaggaacctgtgcaaggcgtggaacctctccagggtagttcccaggggccgaaagaaccccagccctccccaacggaccagcccagctttagcaacctgactgcctttcccgggggtgccaaagaattacttctcagagacctggaccagctttttcttagctccgactgccggcattttaaccggacggaatctctgcggctcgcagatgagctgtcaggttgggtccaacggcatcagcgaggaagaaggaaaatcccccagagagcccaggagcggcaaaaatctcagccccggaaaaagtcccctccagtgaaggcggtgccaatccaaccccctggaccgcctgaaagagattcagtcggccagctgcagctgtaccgccatcctgatcgctctcagccagctttcctggatgccatagaccgtagagaagataccttttatgtagtgagcttccgtcgggaccaccttctcctgccagccatttcccacaacaagactagccgaccaaagatgtctctcgtgatgcctgcaatggcacccaacgaaaccctcagcggtcggggggctccaggtgattacgaagagatgatgcaaattgagtgtgaggtgatggataccagggttatccatatcaaaaccagcactgttccaccgagtcttagaaagcaaccatcacccacgcccggcaatgccaccggcggtccgctgcctgtctccgccgcaagccaggcacaccaggctagccatcagccgctgtacttaaatcacccatag

SEQ ID NO: 52028 - DNA, 429 bp, Artificial Sequence
  derived and/or modified sequence
tgacaaccatctcccacagaccaaccgtctttctcaaatctgacggccttcccagggggcgcaaaagagctcttgctgagggacctagaccagctgtttctgtcatcagactgtcgccacttcaaccggaccgagtctctccgcctggctgatgaattgtccgggtgggtccaacgacatcagcgcgggagaagaaagatccctcaaagagcacaggagcggcagagtctggacacaagccccagcagatccttgtctcacggccgctcccatctgcagttaagacagtctccgtctaatccgctggacccccagaaaggcattttgtgggcctcctgcaactacatcgccactcagactgtacgcagtcaacactcatggatgcaactgactgatggtaagacccactttatgttatcgctctcatag

SEQ ID NO: 52029 - DNA, 2103 bp, Artificial Sequence
  derived and/or modified sequence
atggccgaactgatgctcctttctgaaattgctgatccaaccagatttttcaccgacaatcttctgagcccagaggactgggattccaccttatactctgggcttgatgaggttgcagaagaacagactcagctgtttcgatgtcccgaacaggatgtgcctttcgacgggtcatcactcgatgtaggtatggatgtgagtccatcggagccgccgtgggagctcctccctatcttccctgacctgcaggtgaaaagtgaaccgagtagcccttgttcctccagcagcctcagttccgagtcatcacggctgtctacagagccaagtagcgaggccctcggagttggcgaggttttgcacgtgaaaacggaaagcctggcacccccactttgtctactcggagatgaccctaccagttccttcgaaactgtacaaattaatgtgatcccaacaagtgacgactccagcgatgtacagaccaagatcgaacccgtgtccccatgtagcagtgttaactctgaggcgtccctgttatctgccgactcatcaagtcaggccttcattggcgaagaggtgctggaagtgaagacagaatcactttcaccaagcgggtgcctcctgtgggatgtgcccgcgccaagcctgggggccgtccagatctccatggggcccagccttgacggatcctcaggtaaagccctgccgactcggaaacctccattgcagcctaagcctgttgttctgaccactgttccgatgccgtctagagcggttcccccgagcactaccgtccttctgcaatctttagttcagccgccaccagtgtcccctgtggtcctaatccagggtgcaataagggttcagccagaggggcctgcccccagcctgcctcgccccgaaagaaaaagcatcgtccctgctccgatgcccgggaattcctgtcctcccgaggtggacgctaaactgctgaaacgccagcaaagaatgatcaaaaaccgggagtccgcctgccagagcagacggaagaaaaaagaatacctgcagggcttagaggcacgcctccaagccgtgctggccgacaatcaacagctgcgtagggagaatgcagccctgcgcaggcgattggaggccctgttagccgagaatagcgaattaaagctcggaagtgggaatcgtaaggtcgtatgcataatggtcttcctactctttatcgcgttcaatttcgggcctgtgagcataagcgagcctccttctgcccccatttctccacgcatgaataagggcgaaccccagccccgtcgacacctgctggggttctccgagcaggagcccgtccaaggggtcgagcccctacaaggctcctcccaaggtccaaaggaaccacagcctagccccacagaccagcctagtttctctaatctgacagcttttccaggtggcgcaaaggaactgctcctacgggatctggatcagcttttcttatcaagcgactgccgccatttcaaccgcaccgagagcctgcgactggccgacgagcttagtggctgggtccagagacaccagagaggccgccgtaagatcccccaacgtgcccaagaacgccagaagagtcaaccccgcaagaagtctcctcctgtgaaagcagttccgattcagcctcccggaccaccagaacgagattcagttgggcagcttcagctgtaccggcacccagacagatcccagccagcattcctcgatgcaattgatcgccgcgaagacaccttttatgtcgtatcattcagacgggaccacctgctgctgcctgccatctctcataacaagaccagcaggcccaagatgtcccttgtcatgcccgcaatggcccccaacgaaaccttgagcgggcgcggcgctccaggcgactatgaggagatgatgcagattgagtgcgaggtaatggatacccgggtgatccacatcaaaacaagtactgtgccaccatccttaaggaaacagcctagcccaacaccaggcaacgctaccggcggcccccttccagtgagtgcagcgtcacaggcccatcaggccagtcatcagcctctctacctgaaccatccttag

SEQ ID NO: 52030 - DNA, 2103 bp, Artificial Sequence
  derived and/or modified sequence
atggccgaactgatgttgctctctgagatcgctgacccaacaaggtttttcacagataacctgctaagccctgaagattgggattctacgctctatagtggtctcgatgaagttgctgaggagcagactcagcttttccgatgtcctgaacaggacgtgcctttcgacggatcttcactggacgtaggcatggatgtctcaccttcagagcctccatgggagttgctgcctattttcccagacctgcaagtgaagtccgagccgtcctctccgtgtagctcatcatccctgagctccgaatcctcacgcttaagtactgaaccaagcagtgaagccctgggagtgggggaagtgcttcacgtgaagacggaatcactcgctccacccctttgcctgctcggtgatgaccctacatcatcgttcgagaccgtacaaattaatgtgattcctactagcgacgacagctctgatgtgcagacgaagatcgaacccgtgtcgccatgctccagtgtgaattctgaggcaagtctcttaagcgcagatagcagtagccaagcgttcatcggagaggaggtactggaggtaaagaccgaaagcctctctccatccggatgccttctgtgggacgtccccgccccgtccctcggtgccgtccagattagtatggggccctcactcgacgggagcagcggcaaggcactccctacacgtaagccccctctgcagcctaagcctgtggtgcttacaaccgtcccaatgccttctcgagccgtcccaccaagcaccacggttctgctgcagtccctggtgcagccaccaccagttagccccgtggttttgattcagggagcaattcgggtacagcccgaaggccccgcccctagtctcccacgccctgagaggaaaagcattgttcctgcacccatgcccgggaacagctgtcctcccgaagtggacgccaagttactgaaacgccaacagagaatgatcaagaatcgggagagcgcctgccagagccgtcgcaaaaagaaagagtacctgcagggactggaggctagactgcaggctgtgcttgcagataatcagcagctccgaagggaaaacgccgccctgcgcaggaggttagaggccctccttgccgaaaatagtgagctcaagttaggctcgggcaataggaaggttgtctgtatcatggtattcctgctctttatagcctttaacttcggtccagtgagtatctctgaacccccttctgctcctatcagtcctcgcatgaacaaaggcgagcctcagcctcggcgtcacctactgggcttctccgaacaagaaccggtgcagggcgttgagccactgcagggatcttcgcaggggcccaaggaaccccagccctcccctactgaccagcctagcttcagcaatctgaccgctttccctggaggagcaaaagagcttttactaagggatcttgatcagcttttcttgagctcagactgtcggcacttcaacaggacagagagcttacgtcttgcagatgagttgtccggctgggtccagaggcatcagcgtggtaggcggaaaatcccacagcgggcccaggagagacagaagtcccaaccccggaaaaaatctcctcctgtgaaggcggttccaatccaaccccccggacctccagagagagactccgttggacagcttcagctgtaccgccaccctgatcgctcccagcctgccttcctggacgccattgataggagagaagatacattctatgttgttagctttagaagggaccatttgctcctgcccgcaattagtcataataaaacgagccggccaaagatgtccctggtgatgcccgccatggccccaaatgagacactatcagggcgaggagcgccaggggactatgaagaaatgatgcagatagagtgcgaggttatggatactcgtgtcattcacatcaagacgagcacagtgccccctagcctgcgtaaacagcctagcccaacgcctgggaacgctacaggcggacctttgcccgtctcggccgcttctcaggcccaccaggcatctcatcaaccattgtatctgaatcatccctag

SEQ ID NO: 52031 - DNA, 669 bp, Artificial Sequence
  derived and/or modified sequence
atggccgaattgatgttgctgagcgagatcgcagacccaacccggtttttcactgataatcttttatcacctgaagattggggcttgcagaatagtactttgtactcgggcttagatgaggttgctgaggaacaaacacagctgttcagatgccccgaacaggacgtgcccttcgacggatcaagcttggatgtaggtatggatgtgtcaccgaccgatcagccctctttcagcaacctgacggcgttcccaggaggcgccaaggagctgcttctgcgggacttagaccagctctttctatcaagcgattgtcgccactttaaccggacagagtccttacggctggcagatgagctcagtggctgggtgcagcgtcatcaacggggaagacgtaaaattccacagagggctcaggagcgtcagaaaagtcagccccgtaaaaagtctccacccgttaaagccgtgccaatccagccacctggacccccggagcgcgactctgtgggccaactgcagttatatcgccatcctgataggtctcagccagcgtttctggacgccatcgacaggagggaagacaccttttacgtagtaagcttccggcgcactacatgttgttcccaaccatctgccacaacgaggcccccaggtccacggtgcccctggtag

SEQ ID NO: 52032 - DNA, 669 bp, Artificial Sequence
  derived and/or modified sequence
atggctgaactgatgttgttgtcagagatcgctgatccaacaaggttcttcacagataatcttctctcccccgaagactggggtctacagaactccactctgtattccggactggacgaggtcgcagaggagcagactcagctttttcgctgtccggaacaggacgtcccattcgatgggtcctccttggacgttggcatggatgtcagccctactgatcaaccctccttttccaacctgacagccttccccggaggagctaaggaactgttactcagggatctcgaccaactgtttttgagtagcgactgtaggcactttaatcgcacagagtccctgagattagccgacgagctgtccggatgggtgcaaaggcaccagagaggcaggcggaagattcctcaacgggcccaggagaggcagaaatctcaacctcgcaagaaatccccccctgtgaaggctgtgcccatacagcctcccggcccacctgagcgcgacagcgtcggacagctgcagctgtaccgccaccctgaccgatctcagccagctttccttgacgctatcgatcggagggaggacactttctatgttgtgagctttagacgaactacgtgttgctcacagccttcagccacaactcgtcctcctggacctcgctgtccatggtag

SEQ ID NO: 52033 - DNA, 669 bp, Artificial Sequence
  derived and/or modified sequence
atggccgaactcatgctgctctcagaaattgcagaccctacacggttcttcacggacaacttactgtcgcctgaagactggggcctgcagaatagcactttgtactccggactcgacgaagtggctgaagagcagacacaactgttcaggtgtcccgagcaagacgtcccctttgatggctctagtttagacgttggtatggacgtgtcaccgactgatcagcccagtttttctaacctcaccgccttccctgggggtgctaaggagctcctgcttcgggatctagaccaactgtttcttagcagcgactgccgccattttaatagaactgagagcctacggctggctgacgagctgagcggctgggtacagaggcaccagcggggacggcgcaagatcccccagagagctcaggaaagacagaagtctcaaccccgcaaaaagtcccccccagtcaaggcggtacctatccagccaccaggaccgcccgagagagattccgtgggccagctgcagctgtatcgccatccagataggtcccagccggcctttctggacgcaatagataggcgcgaggatacgttctatgtggtgtccttccgacgcactacatgttgctcccaaccaagcgccaccacccgcccccctggaccacgttgcccttggtag

SEQ ID NO: 52034 - DNA, 669 bp, Artificial Sequence
  derived and/or modified sequence
atggccgagctgatgctgctgtctgaaattgctgaccccacccgcttcttcacagacaacctgctgagccctgaggactggggcctgcagaacagcaccctgtacagcggcctggatgaggtggccgaggagcagacccagctgttccgctgcccagagcaggatgtgccctttgatggcagcagcctggatgtgggcatggatgtgagccccacagaccagcccagcttcagcaacctgacagccttccctgggggcgccaaggagctgctgctgcgggacctggaccagctgttcctgagcagtgactgccgccacttcaacagaacagagagcctgcggctggctgatgagctgagcggctgggtgcagaggcaccagaggggccgcaggaagatcccccagagggcccaggagcggcagaagagccagcccaggaagaagagcccccctgtgaaggctgtgcccatccagcccccaggccccccagagcgggacagcgtgggccagctgcagctgtaccgccacccagacaggagccagcctgccttcctggatgccatcgaccggcgggaggacaccttctacgtggtgtccttccggaggaccacctgctgcagccagcccagcgccaccaccaggcctcctggcccccgctgcccctggtag

SEQ ID NO: 52035 - DNA, 2103 bp, Artificial Sequence
  derived and/or modified sequence
atggccgagctgatgctgctgtctgaaattgctgaccccacccgcttcttcacagacaacctgctgagccctgaggactgggacagcaccctgtacagcggcctggatgaggtggccgaggagcagacccagctgttccgctgcccagagcaggatgtgccctttgatggcagcagcctggatgtgggcatggatgtgagccccagcgagcccccctgggagctgctgcccatcttcccagacctgcaggtgaagtctgagcccagcagcccctgcagcagcagcagcctgagcagcgagagcagccggctgagcacagagcccagcagcgaggccctgggcgtgggggaggtgctgcacgtgaagacagagagcctggccccacccctgtgcctgctgggagatgaccccaccagcagctttgaaacagtgcagatcaacgtcatccccaccagtgatgacagcagtgatgtgcagaccaagattgagcctgtgagcccctgcagctctgtgaacagcgaggccagcctgctgtctgctgacagcagcagccaggccttcatcggggaggaggtgctggaggtgaagacagagagcctgagccccagcggctgcctgctgtgggatgtgcctgcccccagcctgggcgctgtgcagatctccatgggccccagcctggatggcagcagcggcaaggccctgcccaccaggaagccacccctgcagcccaagcctgtggtgctgaccaccgtgcccatgcccagcagagctgtgccccccagcaccaccgtgctgctgcagagcctggtgcagcccccacctgtgtcccctgtggtgctgatccagggcgccatccgggtgcagcctgagggccctgcccccagcctgcccaggcctgagaggaagagcatcgtgcctgcccccatgcctggcaacagctgccccccagaggtggatgccaagctgctgaagaggcagcagaggatgatcaagaaccgggagagcgcctgccagagcaggaggaagaagaaggagtacctgcagggcctggaggcccggctgcaggccgtgctggccgacaaccagcagctgcggagagaaaatgctgccctgcggcggcggctggaggccctgctggctgaaaattctgagctgaagctgggcagcggcaacaggaaggtggtgtgcatcatggtgttcctgctcttcatcgccttcaactttggacctgtgtccatcagcgagccccccagcgcccccatcagccccaggatgaacaagggggagccccagcccaggaggcacctgctgggcttcagcgagcaggagcctgtgcagggcgtggagcccctgcagggcagcagccagggccccaaggagccccagcccagccccacagaccagcccagcttcagcaacctgacagccttccctgggggcgccaaggagctgctgctgcgggacctggaccagctgttcctgagcagtgactgccgccacttcaacagaacagagagcctgcggctggctgatgagctgagcggctgggtgcagaggcaccagaggggccgcaggaagatcccccagagggcccaggagcggcagaagagccagcccaggaagaagagcccccctgtgaaggctgtgcccatccagcccccaggccccccagagcgggacagcgtgggccagctgcagctgtaccgccacccagacaggagccagcctgccttcctggatgccatcgaccggcgggaggacaccttctacgtggtgtccttcagaagagaccacctgctgctgcctgccatcagccacaacaagaccagccggcccaagatgagcctggtgatgcctgccatggccccaaatgagaccctgagcggccgcggggcccctggggactatgaggagatgatgcagattgaatgtgaggtgatggacaccagggtcatccacatcaagaccagcacagtgccccccagcctgaggaagcagcccagccccaccccaggaaatgccactggaggccccctgcctgtgtctgctgccagccaggcccaccaggccagccaccagcccctgtacctgaaccacccctag

SEQ ID NO: 52036 - DNA, 669 bp, Artificial Sequence
  derived and/or modified sequence
atggccgagctgatgctgctgagcgagatcgccgaccccacccggttcttcactgataaccttctaagcccagaggactgggggctgcagaatagtacactgtactccggccttgacgaggtcgccgaggagcagacacagcttttccgctgccctgaacaggacgtcccctttgatggatcgtctctcgacgtgggaatggatgtgagccccacggaccaaccgtctttcagcaacctcaccgcctttcctggaggtgccaaagagcttttgctgagagatctggaccagctgttcctttcatctgactgcaggcactttaacagaaccgagagcctacgtctggcagatgaattgtctggctgggtgcagcgtcatcagagggggcggaggaaaatcccacagcgggcccaggagcggcaaaagtcccagcccagaaagaagtcccctcctgtgaaagccgtccctatccagccaccaggtccccctgaaagagatagcgttgggcagctgcagctgtacagacatccagatcgcagtcaacctgcattcctggacgcaatcgaccgaagggaagacaccttctacgtggtatcattccgccgtacgacttgttgttctcagccttccgctactacacggcctccggggccaaggtgtccttggtag

SEQ ID NO: 52037 - DNA, 2103 bp, Artificial Sequence
  derived and/or modified sequence
atggccgagctgatgctgctgagcgagatcgccgaccccacccggtttttcacggataatctgctttcccctgaggactgggactccaccctctattccgggcttgacgaggtcgctgaagaacagacccagctgttccgttgccctgagcaggatgtccccttcgacgggtcatctctggacgtgggaatggacgtgagcccttcagagcctccatgggagctcctccctattttccctgacctccaggttaagagcgagcccagcagtccatgttcatcgtcttctctctctagcgagtcgtcccggctatcaacggagcccagcagtgaggcattaggcgtgggggaagtgcttcacgttaagacggagtccctcgcccctcctctgtgcctactcggggacgatcctacaagtagctttgaaactgtgcagattaatgtgattcccacctccgatgattcaagcgacgttcagactaagatcgaacctgtgagcccctgcagtagcgtgaactctgaagcctcattgcttagtgccgacagcagttcgcaagccttcattggagaagaagtccttgaagtcaagaccgagtctttgagtccgagcgggtgcctgttgtgggacgtcccagccccttcccttggagccgtgcagatttccatgggtcctagtctggacggatcctctggcaaggccctaccaaccaggaagcccccattgcagcccaagcccgtcgtgctcacaacagtgcccatgcccagtcgtgcagttccaccatctacaaccgtactgttacaaagtttggttcagcccccacccgtgtcacccgtagtcctgattcagggggcaatcagagtgcagcctgagggtccagcaccctcactgcccaggcctgagagaaaatctattgtaccagcacccatgcccggcaatagctgcccccccgaggtggacgcaaaactcctgaagcgccagcagcgcatgatcaaaaacagagaaagtgcttgtcaaagtcgccggaaaaaaaaggaatacctccaagggttggaggcaaggttacaggccgtcttggccgataaccagcagctgcgccgggagaacgcagccctgcggcgacggcttgaggctcttttagcggagaacagcgagctgaagctgggctctggcaatcgaaaagttgtctgtatcatggtgttcctcttatttatcgcctttaactttggcccagtgtccatttccgagccccccagtgctccaattagccctagaatgaataagggggagcctcaacctcgaaggcatttattaggttttagtgaacaagaaccagtccaaggtgttgagccactgcaggggtcaagtcagggccccaaagagccacagcctagtccgaccgaccagccttctttctccaacctgaccgcgtttccaggcggcgccaaggaactgctactgcgcgatttagatcagctctttctttcctctgattgcaggcattttaaccgcactgaaagtttgcggctggctgacgagttgtctgggtgggttcagaggcatcagagagggaggcggaaaataccacagagagcacaagagagacagaagtctcaacctaggaaaaagagcccacccgtcaaggcagtccctatacagcccccaggccctccagaacgcgattctgtggggcaactccagttataccgtcatcctgaccgcagtcagccagccttcctagacgcaatcgatcgcagagaggatactttctacgtggtgagttttaggagggatcacctcctcttgcctgccatctcgcacaacaaaacttcgagacctaaaatgtccctcgtgatgcctgccatggctcctaacgagactctgtcaggacgcggcgcccctggagactatgaggagatgatgcagattgagtgcgaggtgatggataccagagttatccatataaagacaagcaccgtgccgccaagtctcagaaagcagccttcaccaacacccgggaatgccacggggggacctctacccgtcagcgccgcctcccaggcgcatcaggccagtcaccagcccctttaccttaatcacccatag

SEQ ID NO: 52038 - DNA, 2103 bp, Artificial Sequence
  derived and/or modified sequence
atggccgagctgatgctgctgagcgagatcgccgaccccacccggttttttacggataatctgttgagccccgaggactgggactcaacactctacagtggcctggatgaggttgccgaagaacagacccagcttttcagatgtccagaacaggatgtgcccttcgatggctcctccctggacgtgggcatggacgtgtccccctctgaacctccttgggaattgttacctattttccctgatctccaggtcaaatccgaaccctcctcaccatgttcgtcaagttccctatcatccgagagctcgcggctgagtaccgagccatcatcagaggctctgggagtaggggaggtccttcacgtcaaaactgagagcctggctccgcccctctgcctgctcggggacgaccctacatccagctttgaaacagtgcagatcaatgtaatccccacatctgacgatagcagcgatgtacagaccaagattgaaccagtttctccttgctcaagcgttaactctgaagcatccctgctgtcggccgactctagctctcaagctttcattggggaggaagtcctcgaggttaagactgagtcactgagccccagcggatgtctcttgtgggacgtcccagcccccagccttggcgctgtgcagatttccatgggaccctcattggacggctccagcggaaaggctcttcccactcggaaacctcccctccagccaaagcccgtggtgcttacgaccgtcccgatgccatccagggccgtccccccctctaccacggtgctactgcaatccctggttcagcctccgcccgtcagtcccgtcgtactgattcagggcgccattagagtccagcccgagggccctgcccccagcctgccaagacccgagcgtaagtcgatcgtccctgcccccatgcccggcaacagctgtccccctgaagtggacgcaaaattgctgaaacgccaacagcgtatgattaagaatcgggagtcggcttgccagtctaggcggaagaaaaaggaatatctgcaaggactcgaagccagattgcaagccgtcctggccgacaatcagcaactccggagagaaaatgctgccttgaggagacgtttggaggcactcttagcagagaactcagagcttaagctcggctccggcaatcggaaggtggtgtgcataatggtgttcctgttattcatcgcttttaacttcggcccagtaagtatttctgaacctccttctgcgcccatttctcctcggatgaataagggcgagcctcaaccccgccgccatctgctcggtttttccgagcaagagccggtacagggagttgagcccctgcagggctcaagccagggaccgaaggagccgcagccgtccccaactgaccagcccagtttctcaaacctgaccgcctttccaggtggcgctaaagaactgctgctgagagacttggaccagctctttctgtctagcgattgccgacattttaaccgcaccgaaagccttcgcctagcagacgaattatcagggtgggtccagcggcaccaacggggccggagaaagatccctcagagagcacaggagcgacagaagtcccagccaagaaaaaaatcccccccggtgaaagccgtcccgatccagccgcccggaccaccggaacgcgattccgtgggtcaactgcagctataccgccatcctgaccgctctcaacccgctttccttgatgctatcgacaggagagaggataccttttacgtcgtctcttttcgacgggaccatctactcctacctgcaataagtcacaacaaaacttccagaccaaagatgtccctggtcatgcccgcgatggccccaaacgagacgttgtcaggacgtggcgcccctggcgattacgaggagatgatgcagatcgaatgcgaggtcatggacacacgcgttatccatatcaaaacatccacggttccccctagcctacggaagcagccatccccaaccccaggcaacgctaccggggggcctctcccggtctcggcggcctctcaggctcatcaggcttcccatcagccactatatctgaatcacccctag

SEQ ID NO: 52039 - DNA, 2103 bp, Artificial Sequence
  derived and/or modified sequence
atggccgagctgatgctgctgagcgagatcgccgaccccacccggttcttcaccgacaacctcttatctcccgaagactgggactccactctctattcaggacttgatgaagttgcggaggaacagacccaattgttcaggtgtcctgaacaggacgtcccgttcgacggaagttctctagacgtgggaatggatgtttctcctagtgagccgccctgggagctgctgcctatttttccagatcttcaagtgaaatctgaaccatcatctccttgctcctcctcttccttgtcatctgagtcctccaggctgtctacggaaccttcaagcgaggctttgggcgtgggcgaggttcttcatgttaaaactgaatccctggctcctcccctgtgtctcctgggcgacgaccctactagtagctttgaaaccgtgcaaataaacgttattccgacctctgatgatagttccgatgtgcagactaagattgagcccgttagcccctgttcctctgttaacagcgaagcctcactgctgtcagctgacagctctagtcaagccttcatcggtgaggaggtccttgaagtgaaaaccgaaagcctcagcccatccgggtgcctgttatgggacgtgcccgctccctcactaggagccgtccagatcagcatgggccccagcctcgatggtagcagcggaaaagccttgcctacccgcaagcccccgcttcaaccgaagccagttgtgctgaccacagtaccaatgccttcacgcgcagtgcctccgtccacaacagtgctgcttcagagcctggttcaacccccacccgtgtctccggtggttttgattcaaggggcgatcagggtgcagccagaagggcccgccccctcactcccgagacctgagcggaagtcaatcgttcctgctcccatgcctgggaacagctgcccgccggaagtggacgccaagctactcaagaggcaacagaggatgattaagaatcgcgagtcagcctgccaaagtaggcgaaaaaagaaggagtatcttcagggcctggaggcccgcctgcaggccgtgctggcagataaccagcagcttcgcagagagaacgccgcgttgcgtagacggctggaagcgctgctcgcagagaacagtgaattaaaactgggcagcggaaatcggaaagtggtgtgcataatggtgttcctcttgtttatcgccttcaacttcggccccgtgagcataagtgagccccccagtgcgcctatctcaccaaggatgaataaaggcgagcctcagccacggagacacctcttgggattctccgagcaggagcccgtgcagggagtggaacctctccagggttcctcacaaggccctaaggagcctcagcctagtcctaccgaccaaccttctttctccaacctcaccgccttccccggcggtgccaaagagctgctgctgagggatctcgatcagctttttctctcatccgattgcaggcacttcaatcggaccgagtctctcagattggccgacgaactttccggctgggttcagcggcatcagagaggacgcagaaagataccccaaagagcccaggagcggcagaaatcccagccacgcaaaaaatctccccctgtgaaggcagtcccaattcagccccctggacctcctgaaagggattctgtaggccagttgcagctgtatcgccatcctgatcgcagtcagccagcgttcctggatgctattgaccgacgggaagacacattctatgtggtttcctttcgcagggaccacctcctattgcccgccattagccataataagacaagtcgtcctaaaatgtcattggttatgcctgcaatggcccctaacgagacactcagtgggagaggggcgccaggggactatgaggagatgatgcagatcgaatgcgaagtgatggatacaagggtcatccacattaaaacctccacagtgcccccaagcctgaggaagcaaccgagtcccactcccggcaacgccaccggtgggccattgcccgtctcagctgcatctcaagcgcaccaggccagtcatcagccactgtaccttaaccatccttag

SEQ ID NO: 52040 - DNA, 2103 bp, Artificial Sequence
  derived and/or modified sequence
atggccgagctgatgctgctgagcgagatcgccgaccccacccggttttttaccgacaaccttttgtccccggaagattgggactctacactttactcaggcctggatgaggtcgccgaagagcaaacacagcttttcaggtgtcccgaacaggatgtgccattcgacggtagttctcttgacgtcggcatggatgtctctccctctgaacccccgtgggaactcctgcctatttttcccgatttgcaagtcaaatccgagccctcctctccgtgttcctcaagctctctgagttcagagtccagtcgcctctccactgagccttccagtgaggctctaggcgtaggagaagtgttacacgtgaaaacagagtctctggctccacccttgtgcctgctgggcgacgacccaacctcttcattcgagacggtccaaattaatgtgattcctacttccgacgattcatcggacgtgcagacaaagatcgagcctgtaagtccatgctctagtgtcaatagcgaggcatcacttctgtctgcagactccagcagtcaggctttcatcggggaggaggttctggaagtcaagacagagtccctctccccttccggctgcctgctgtgggacgtgccagcccctagcctgggcgccgtccaaatctcaatggggccctccttggatggttcttccggaaaggcactgcccaccaggaaaccaccattacaacccaaaccggttgtgttgacaaccgtccctatgccctccagagcagtcccaccctctaccaccgtccttctccagtctcttgtgcagcctccgccagtttctcccgtcgttcttatccagggtgccatccgagtccagcctgaggggcccgcgcctagcctcccacggcccgagcgaaagtctatcgttcccgctccaatgcctggaaactcatgcccacccgaggtcgacgcaaagctccttaagcgacagcagcgcatgatcaagaaccgcgaatctgcttgccagagccgccggaaaaagaaggaatatctccaggggctggaggcccggctccaggcagtgctggccgacaatcaacagttaaggcgcgaaaacgccgcgctgcggcggcggctggaggccctactcgctgaaaatagcgaattgaagctcgggtctggtaaccgcaaggtcgtctgcatcatggtgttcctcctctttatcgcctttaatttcggcccggtgtccatttcagagccccctagtgcccctatcagtccacgcatgaataagggggagccccaaccaagacgccaccttctcggtttctctgagcaagagcccgtacagggagttgagccactgcaggggtcttctcaagggccgaaggagccacagccttcacccacggatcagccttcattttcaaacctgacggcctttcccggcggggcaaaagaactgttgttacgcgatctggatcaattgttcctctcctctgattgtcggcacttcaatcgcactgaaagccttaggctcgccgatgagctgagcggctgggtgcaacggcaccaacgtgggcgcaggaagatcccccagcgcgcccaggaacgccagaagtcacagcctagaaagaaaagtcctcccgttaaagccgtccccattcagccaccaggtcctccagagcgggactctgtcggacagctccagctctacagacatccagatcggtcccagcccgcctttctggacgccatagatagaagagaggatacgttttacgtagtctcgtttcgccgcgatcacctgctcttgccagccatatcgcataacaagacttcccggccaaaaatgtctctggtgatgccagcaatggcgccgaatgaaaccctatcggggcgcggggcaccgggggactacgaagaaatgatgcagattgaatgcgaagtgatggacaccagggtgatccacatcaaaactagcacagttcccccctccctccggaaacaaccttcgccaacccctgggaacgcaacgggtggccctctgcctgtgtctgcagccagccaggctcaccaggcctcccatcagccactttatttgaaccatccttag

SEQ ID NO: 52041 - DNA, 669 bp, Artificial Sequence
  derived and/or modified sequence
atggccgagctgatgctgctgagcgagatcgccgaccccacccggtttttcacagacaatctcctctctcctgaggactggggcctgcagaattcaaccctgtatagcggcctcgatgaggtggcagaggaacaaactcagctttttagatgtcccgaacaggacgtgccctttgatggttcttcgctggatgtaggaatggatgtttccccgaccgaccaaccgtctttctctaacttgacggccttccccggtggcgcaaaggagctcctgctgcgcgacctagatcagctttttttgagcagtgattgtagacacttcaaccggactgaaagcctgaggctcgcagacgaactgtcggggtgggttcagcgccatcagcgtggtaggcgtaaaatcccccagcgggcgcaggaacggcagaaatcgcagccaaggaagaagtccccgcctgtgaaggcagtcccaatacagcccccaggacccccggagcgggactccgtcgggcagcttcaactataccggcatcctgatagaagccagcccgcatttctggacgccattgacaggcgagaagatacattctatgtcgtctcattcaggagaacaacatgctgcagccaaccgagcgctacaactaggccccctggtccccgctgcccttggtag

SEQ ID NO: 52042 - DNA, 669 bp, Artificial Sequence
  derived and/or modified sequence
atggccgagctgatgctgctgagcgagatcgccgaccccacccggttttttaccgacaacctccttagccctgaagattggggcctgcagaactccactctgtacagtggcttagatgaagtggcggaagagcaaacacagctattcaggtgccccgaacaggacgtgccattcgacggtagtagtctcgacgtgggaatggatgtatcccccacagaccagccaagtttttcgaatttaaccgccttcccggggggcgccaaggaattgctactccgcgatttggatcagctctttttgtccagcgattgtaggcactttaatcgaacagagagtctgagactggctgacgagctcagcgggtgggtccagcgtcatcaacgtggccgacgcaagatccctcagagagctcaagagcgccagaaatcccaaccgagaaagaaatcccctccagtgaaagcagtacctattcagccaccaggccccccggagagggattctgtcggtcagctccagctttaccgccacccagatcgatcacagcctgcctttcttgatgcaattgaccgaagggaggatactttctatgtggtgtccttcagaagaaccacctgctgctcgcagccctctgcaactactcgacccccgggacctcgatgtccttggtag

SEQ ID NO: 52043 - DNA, 669 bp, Artificial Sequence
  derived and/or modified sequence
atggccgagctgatgctgctgagcgagatcgccgaccccacccggttctttacagacaatctcctgagcccggaggattgggggctccagaacagtactctgtatagcggcttagacgaggtcgcagaggaacagacccaattattccggtgtccggagcaggacgtccccttcgacggctcaagtctcgacgtcggcatggatgtgagccctaccgaccagccaagcttttctaatcttactgctttccctgggggcgccaaggaactccttttacgagatctcgaccaactgtttctctcatctgattgtagacattttaatagaactgaatcattaagactggccgatgagctgtctggctgggtgcagcgccatcagagagggagaagaaaaatccctcaacgggcacaggagagacagaaatcccaacctcggaagaagtcccctcccgtcaaagcagtgccgattcaacccccagggcctccagagcgcgactctgttggccagctacaactttataggcacccggacagatcacagcccgctttcttggatgccatcgacaggcgggaagatacgttttatgtcgtcagctttaggagaacaacgtgctgtagtcagccttcggccactacccgccctccggggcctaggtgtccatggtag

SEQ ID NO: 52044 - DNA, 669 bp, Artificial Sequence
  derived and/or modified sequence
atggccgaactcatgctcctctcggagattgccgacccaaccagattctttaccgacaacttgctgtccccagaagactggggtctgcagaactccacactgtattcaggcctcgacgaggtcgcagaagagcagactcaactctttagatgccctgagcaggatgttccgttcgatgggagtagcctggacgtggggatggacgtgtctccaacagatcagccaagcttcagtaatctgacagcatttcccggtggcgctaaggagctgctcctaagagatctcgaccagctcttcctgagctctgattgccgacactttaatagaacggagtccctgcgtctggcagacgaactgagtgggtgggtgcagcgccaccagcggggtcgccgaaaaatcccgcagagggcccaggagcgtcagaagtcacagcctcgcaagaagagtcctcctgttaaggcagtgccgattcaacctcctggacctcctgaacgggattccgtgggacaactccagctgtacagacacccggatcgtagccagcctgcttttctcgacgcaatcgaccggagggaggacacattctatgtggtgtcatttaggaggaccacctgttgctcccagccgagcgcaaccactaggccccctggtcccagatgtccctggtag

SEQ ID NO: 52045 - DNA, 2103 bp, Artificial Sequence
  derived and/or modified sequence
atggcagaactcatgctgcttagtgagattgccgaccccaccaggttttttaccgacaatctgctatcaccagaagactgggactcgacactctattcaggacttgatgaagtcgccgaggaacaaactcagctattccgctgtcccgagcaagatgtgccctttgacggatccagcctggatgttggaatggatgtcagcccttctgagcccccatgggaattactccctatttttcctgacttacaagtgaagagcgaaccaagctcaccttgctctagtagtagtctgtcctcagagtccagtagactctcaacagagccgagcagtgaggctctgggtgtaggagaggtactgcacgtcaagaccgagtccctggcacctcccttgtgtctactcggtgatgacccgacatccagcttcgagactgtacagataaatgtgattcccacttcagatgattcctcagacgtgcagactaagatcgagccggtgtctccatgttcctcggttaactctgaagcctctctgctgagtgcagacagtagttcccaggcctttataggggaagaagtgctggaggtgaagacagaaagtctgagccctagtggctgtctgttatgggatgtgccagcgcctagtctgggcgcagtccaaatctctatggggccttctctggatgggtcctccggaaaggccctcccaacacgtaagcccccattgcagcctaaacccgtggttctgaccaccgtgcccatgccctccagggcagtgccacccagcactacagtgctgctgcagtcactggtccagccacccccagtgtcccctgtggtgctcattcaaggagctattcgcgtacagcctgaaggtccggctccatccttgccacggcctgagcgtaagtccattgttcctgctccgatgcccggaaatagctgccctcctgaggtggacgcgaagctgctgaaacgccaacagcgaatgattaaaaaccgcgagtcggcctgtcaaagccggagaaagaagaaagagtacctgcagggtcttgaagcgcgattgcaagccgtgctcgcagataaccagcagctgcgtcgggagaacgcggcattacgcagacgtctagaagctttgttagcggagaattctgagctgaagctgggtagcggcaaccgaaaggtcgtgtgcatcatggtgtttctcttgttcatcgctttcaatttcggcccagtgtcaatcagtgaaccgccttccgcacctatctctcccaggatgaataaaggagagcctcagcctagacggcacctgttgggctttagtgagcaggagccagtccagggcgtggaacctctgcagggatcctcacagggcccaaaagagccccagcctagccccaccgatcagccatctttcagcaacctcacagccttccccggaggcgctaaagagctccttcttcgggacttggatcagctgtttctgtcttctgactgtagacatttcaataggacagagtcactccggctggccgatgagctcagtggctgggtgcaacgccaccagcggggaaggcggaagattccccagcgtgcacaggagaggcagaagagccaaccacgcaaaaagtcaccaccagtgaaagctgtacccatccaaccccctgggcctccagaaagggacagtgtgggacagcttcaattatacaggcatcccgatcgaagtcagcccgctttcctggacgcgatcgatcggagagaggacactttctacgtggtaagcttccggcgtgaccatttgcttctgccggcaatttcacacaacaagacatccaggcccaagatgagccttgttatgcccgcaatggccccaaatgaaacgttatctggccgaggtgcacccggtgactacgaggaaatgatgcagatagaatgcgaagttatggacacacgagtaatccatatcaagacgtctaccgtcccgccatccctccggaagcagccctccccgacccccggtaacgctaccggaggacccctccccgtgtcagccgcatcacaggcacaccaggcatcccatcagcccctatacctgaaccatccatag

SEQ ID NO: 52046 - DNA, 2103 bp, Artificial Sequence
  derived and/or modified sequence
atggccgagcttatgcttctgagtgaaattgccgaccccacaaggttcttcactgataatctgctgtctcctgaggattgggactcgaccctgtactctggtctggacgaagtggcagaagagcaaacccagctcttcaggtgcccagagcaggacgtaccgtttgatggcagctccctagacgtcggcatggatgtcagcccgtctgaaccaccatgggagctccttcctatctttcctgacctgcaggtgaaatctgaaccctcctctccatgttctagctcaagcctttcatccgagtcttcccgactgagcaccgaaccatcatctgaagcactcggggtaggggaggtgctccatgtgaaaacagagagtctggcccctccactgtgtctattgggtgatgacccaacttcttcatttgaaacagttcaaattaatgtcatccccacatctgatgatagctcagacgtccagaccaaaatcgaacccgtctcaccttgttcctccgtgaacagcgaggcttccctgctgtccgcagattcttcatctcaggcttttatcggcgaggaggttctcgaagtcaaaaccgagtcattgagtccaagtgggtgcctgctgtgggatgtcccagcccctagccttggggctgtgcagatatctatgggcccatctctggatgggtcttctggtaaagcccttccaacccgaaagcccccattgcagccaaagcctgtggtgctcaccactgttcccatgccctctagggccgtgccaccgtctaccacagttttgctgcagtcactggtccagccccctccggtttctcccgttgtgctgatccagggggctattcgagtgcagccagagggtcctgccccttctctgccgagaccagagcgcaaaagcatagtgcccgctcccatgcctggaaactcttgccctcccgaggttgacgccaaactgctaaagcgtcagcagcgtatgattaaaaatagagagtccgcctgccagtcccgcaggaaaaagaaggagtatttgcagggcctggaggctcgcttacaagccgttctcgcagataaccagcagcttagaagggaaaatgcggcactgaggagacgcttggaggctcttcttgcagagaactcagagcttaagctcggatctggaaaccgcaaggtggtctgtatcatggtgtttctgctatttatagcatttaatttcggaccagtgagcatctccgaacctccttctgcccctattagccccagaatgaacaagggggagcctcagccacgcaggcatcttctgggatttagcgagcaggagccagtgcaaggcgtggagccgcttcaaggctcaagtcaaggcccaaaagaaccacagccttctcccaccgaccaacctagcttttccaatctgacggcgttccctggcggagcaaaagaactgttactgcgggatttagatcaactgtttctgtcctccgattgtcgtcactttaaccgtacagaaagtctcagactggccgatgaattgtctggctgggtgcaaagacaccagaggggccgaaggaaaatccctcagagggctcaggaaagacagaagtctcagccacggaaaaagagcccccctgtcaaagcagtgccaatacagcctccgggtccgccagagagagacagcgttggacagcttcagttgtacagacatccagatagatcccagccagcttttctcgatgccatagaccgcagggaggacacattctacgtggtctcattcagaagagatcatctactgctgccagccataagtcacaacaagacaagcagacctaagatgtccctggtgatgccagcgatggccccaaacgaaacgctgtcaggacgaggagcgcctggcgattacgaggaaatgatgcagatcgaatgcgaggtcatggatactagagttatccacatcaaaacgagcacggtgcctccctctctgcggaagcagccttcccctactccagggaatgccacaggaggtccactgcctgtgtcagccgctagtcaagcccaccaggctagtcaccaacccctctacctgaaccatccgtag

SEQ ID NO: 52047 - DNA, 429 bp, Artificial Sequence
  derived and/or modified sequence
tgacaaccctcccctacagaccagcccagcttttcaaatctaactgcctttccagggggagccaaagagctactgctccgcgaccttgatcagctcttcttgagctcagattgtcgacacttcaatcggacagagtcactccgcctagccgatgaactcagcggttgggtgcagcgccatcagaggggaaggaggaaaatcccccagcgagctcaagaaagacagtctctcgacacttcccctagcaggagtttatcacacggcaggtcccacctccaactaagacaaagtccctccaaccctttagacccacaaaaggggatcttgtgggcttcctgcaactatatagctactcagaccgtccgatctcagcacagctggatgcagctgaccgacggaaagacccattttatgctctctctcagttag

SEQ ID NO: 52048 - DNA, 2103 bp, Artificial Sequence
  derived and/or modified sequence
atggcagagctgatgctgttatccgaaatcgccgatcctactagattctttacagacaatttgctctctcctgaagactgggactctacactctactctgggctggatgaagtggcggaggagcagacccagcttttcagatgccctgagcaggatgtgcccttcgacgggtcttctctcgacgtgggaatggacgtctccccgtctgaaccgccatgggagctcctgcccatttttccagatctacaggtaaaaagtgaaccttcatcaccgtgttcaagctcttccttaagctcagaaagcagtcgtctcagcacggagcctagttctgaagcgttaggcgtgggtgaagttctgcatgtgaaaaccgagagcctggctcccccactctgcctgctgggggatgacccaacctcttcgtttgaaaccgtgcagatcaacgtgatcccaacgtccgacgacagttccgatgtccagactaagatcgagcccgtgtcaccatgtagcagtgtgaattccgaggcctccctcttgtccgccgactccagcagtcaggcatttatcggcgaagaagtgctggaagtgaaaactgagtcactgagtccatccggctgcctcctgtgggacgtccctgccccatctctgggcgcagtgcaaatttccatgggcccaagcctggacggcagtagcgggaaggctctgcccaccagaaagcccccattgcaacccaagcccgtcgtgctgacaacagtgccaatgccaagtagggcggttccacccagcaccacagtgctattacagagcctggtgcagccacccccagtttcacccgtggtccttatacagggagctataagggtgcagcccgaggggcctgcaccttcactgcccagaccagaacgcaagagtatagtccccgctccaatgcccggtaacagttgtccacccgaggtggatgcaaaactgctcaagcgccagcagcggatgattaagaatagagagtcagcctgtcagtcccgaaggaaaaagaaagaatatttgcaaggtctggaggctagactgcaggcggtcttagctgacaaccaacagctaaggcgcgagaatgccgctctgcgaaggcgattggaggccctgcttgccgagaactcagagcttaagctggggagtggcaacaggaaggtcgtgtgcataatggtgttcctcctgttcatcgccttcaactttggcccagtcagtatttccgaaccccctagcgccccaatttccccccgaatgaacaagggggaaccccagcctagaagacatctgctcggtttcagcgaacaggagccagtccagggtgtggagcctctccaaggttctagccaggggcctaaggaaccacagcctagccccactgaccagccctctttctccaacctcaccgccttccctggaggagctaaggagcttctgctcagagacctcgaccagctgtttttaagcagtgattgtcggcactttaacagaactgaaagtctgagactggccgacgagttgtcagggtgggtgcagcggcaccaacgcggtagacgcaagattcctcagcgcgcacaggaacggcagaagtcccagcctcgcaaaaagtcaccacctgtgaaggctgtgcccattcagccccctggacctcctgagagagactcggtagggcagttacagctgtaccggcatccggaccggagtcagcctgcctttctagacgcaatcgacaggagggaagacactttctatgtcgtgtcttttagaagggaccacctactgcttcctgcaattagccacaacaaaacctcacgacccaagatgagcctcgtgatgcctgccatggccccaaacgaaacgctctctggtaggggtgccccaggtgattacgaggagatgatgcagatcgaatgtgaggttatggataccagggtaatacacatcaagactagcaccgttccaccctcactgaggaagcagcctagccccactccaggcaatgctacaggtggccctctacctgtgtctgccgctagccaggctcaccaggcctcgcatcagccactgtatcttaatcacccttag

SEQ ID NO: 52049 - DNA, 2103 bp, Artificial Sequence
  derived and/or modified sequence
atggccgaactcatgttgttgagcgagattgcagatccaacaagattttttaccgataacttacttagtcctgaagactgggactcaacgttatatagcggccttgacgaagtagctgaagaacaaactcaactctttagatgtccagagcaggacgtgccctttgatggcagtagcctggacgttggaatggacgtcagcccgtccgagcccccatgggagctgctgcccatcttccccgaccttcaggtgaagtccgagccatcttccccgtgtagctcctcttccttaagttccgagtcgagcaggctgtccaccgagccctcctccgaggccttgggcgtcggagaagtgctgcatgtgaaaacagaaagccttgctccgcctctgtgccttttgggagacgacccaacctcgagctttgagaccgtgcaaattaatgtgatcccaacttctgacgactcttcagacgttcagaccaagattgagcccgtgagcccatgctcctcagtgaatagtgaggcttccctgctctcggccgacagctcaagtcaagcattcattggggaggaagtgttagaagtgaagaccgagtccttgtcgcctagtgggtgtctactctgggatgtaccggcacccagcttgggggctgtccagatctctatggggccatctctggacggctcttcaggaaaagcactcccaactaggaagcccccactacagccgaaaccagtggtgctaacaactgtccccatgccttcacgagctgtacctccttccactacagtgctgctacaatccctcgtgcagccgccaccagtgtcacctgtcgtgctgattcagggggctatcagagtccaacccgagggaccagccccttcacttccgcgtcctgagagaaagtccatagtaccagcaccaatgcctggcaatagctgccctcccgaagtggatgcgaaattgctaaagcgacagcaaaggatgatcaaaaatcgggaatccgcatgccaatcgcgacgcaagaaaaaagagtacctccaggggcttgaggccagactgcaagccgttctggctgacaaccagcagcttcgcagagagaatgcagcactgcgcaggagactggaggcccttttggctgagaactctgaactcaaactgggctcaggcaatcggaaagtcgtttgcattatggtttttctgctgttcattgcttttaattttggtccagtcagtattagcgaacctccctccgcaccaatttctcctcgtatgaataaaggtgaaccacagcccaggcggcacctgcttgggttttcggaacaagagccagtgcaaggggttgagccattgcaagggtcttcacaaggtcccaaggagccacagccctcgccaacagatcagcctagctttagtaatctcaccgcttttccaggcggagcaaaagagctattgctgcgtgatttggaccagctgtttctctctagcgactgtcggcacttcaacaggacggagtcattacggttggccgacgagctatcagggtgggtccagaggcatcagcggggacggaggaagatccctcaaagggcacaagagcgccagaaatcccaaccacgcaagaagtccccgcctgtaaaggccgttcccattcagccccctggacctcccgagcgcgactcagtcggacagcttcagctgtatcggcatccagaccggtcacagcctgcttttctcgatgccattgacaggcgcgaggatacattctacgtggtatcctttaggagagatcatctgcttctacccgcaatctcgcacaacaaaacatcccggccaaaaatgtcacttgtgatgccagccatggccccaaacgagaccctcagtggacggggtgcccctggggattacgaggagatgatgcaaatagagtgcgaggttatggacactcgcgtgatccacataaagacatccactgttccaccatcactcagaaagcagccttctccaaccccaggcaatgccaccggcggtcctctgcccgtgtctgccgctagtcaggcccaccaggccagccatcagccactgtacctgaaccacccctag

SEQ ID NO: 52050 - DNA, 669 bp, Artificial Sequence
  derived and/or modified sequence
atggctgagctgatgttgctttcagaaatcgccgaccctactcgctttttcaccgataatctcctctctcctgaagattgggggttgcagaatagcaccctgtacagtggactcgatgaagtcgcggaagagcagacacagctgttcaggtgtcccgaacaggatgtgccttttgacgggtcttccctggatgtcggtatggacgtatcgccgactgaccagcctagcttttccaatttaactgccttcccgggaggagccaaagaactgttactccgtgatttagatcagctgttcctgtctagcgactgtcgacacttcaaccggactgagagcctgagacttgcagacgagctgtccggatgggtgcagaggcatcagagaggtcgtcggaaaattccacagcgggcacaggagcgccagaagtcgcagccacgcaagaagagccctcctgtcaaagcagtacccattcaacccccaggcccacccgaacgggattcggtggggcagctacagctgtatcgtcatccggacagatcccagcctgcgtttctcgacgctatcgatcggagggaggatactttttacgttgtgagcttcaggaggactacttgttgttctcagccaagtgccactacacgcccacccggtcctcgctgcccatggtag

SEQ ID NO: 52051 - DNA, 669 bp, Artificial Sequence
  derived and/or modified sequence
atggctgagctgatgctactgagtgagattgccgacccaaccagattctttaccgacaatttgctgtcccctgaggactggggcctgcagaattctaccttgtattccgggttggatgaagtggccgaggagcaaacccaactcttccggtgtcccgaacaggacgttccctttgacggatcgagccttgatgtggggatggatgtgagtccaaccgatcagccatctttttctaatctgaccgccttcccagggggtgccaaggaactgctcctgcgagacttagaccagctctttctttcaagtgattgtcggcatttcaaccggaccgagtctctcagactggcagacgagctcagcggatgggtgcaacggcaccagcgcggtcggagaaagattccccagcgtgcccaggaacggcagaaaagccagccacggaagaaaagtccaccggtgaaggcagtgcccatccagcctcccggacctcctgagcgggatagcgtgggacagctccagttgtatagacaccctgacaggagtcagccagctttcctggacgccatcgacaggcgcgaagacaccttttacgtggtatcctttcgaagaactacctgctgctctcaaccttctgccaccacccggcctcctgggccaaggtgcccctggtag

SEQ ID NO: 52052 - DNA, 669 bp, Artificial Sequence
  derived and/or modified sequence
atggcagagctaatgcttctgagcgagatcgccgaccctacccggttctttacagataacctcctaagtcccgaggactggggcctgcaaaactccacactgtatagcgggttagatgaggtggctgaagaacagacccagctgttccgctgtccggaacaggacgtacctttcgatggctcttcactggacgtggggatggatgtttcccctacggatcagcctagtttcagcaacctgaccgcatttcccggaggggctaaagagctgcttctgagggacctcgatcagctgtttctgagttcagactgtcgacacttcaacaggactgaaagtctcagactcgcagacgagctgtccggctgggtgcagcgtcatcagaggggaaggaggaagataccccagcgagcccaggaaagacagaaaagccagcccagaaagaaatctccgccagttaaggccgtgcctattcagcccccaggcccaccggagcgcgacagcgtggggcagctgcagctctacagacaccccgaccggtcgcagcccgcttttctcgacgcaattgaccgccgtgaggacactttttatgtcgtcagctttcggcgtaccacttgttgcagccagccgtccgctacaacaaggccacccggaccaagatgtccctggtag

SEQ ID NO: 52053 - DNA, 320 bp, Artificial Sequence
  derived and/or modified sequence
cttcaaccgcactgagtccctgaggcttgctgacgagttgagtggctgggtccagcgccaccagagaggccggaggaagatccctcagagggcccaggagagacagaagtctcagccacggaagaagtcacctccagttaaggcagtccccatccaaccccctggacccccagaaagggattctgtgggccagctgcaactatatcgccacccagaccgttcgcagccagcattcttggatgcaattgaccgacgggaagacacattttatgttgtctctttccgaaggcctcctgaatgatgccagcccagtatgctct

SEQ ID NO: 52054 - DNA, 669 bp, Artificial Sequence
  derived and/or modified sequence
atggccgagctgatgctgctgagcgagatcgccgaccccaccagattcttcaccgacaacctgctgagccccgaggactggggcctgcagaacagcaccctgtacagcggcctggacgaggtggccgaggagcagacccagctgttcagatgccccgagcaggacgtgcccttcgacggcagcagcctggacgtgggcatggacgtgagccccaccgaccagcccagcttcagcaacctgaccgccttccccggcggcgccaaggagctgctgctgagagacctggaccagctgttcctgagcagcgactgcagacacttcaacagaaccgagagcctgagactggccgacgagctgagcggctgggtgcagagacaccagagaggcagaagaaagatcccccagagagcccaggagagacagaagagccagcccagaaagaagagcccccccgtgaaggccgtgcccatccagccccccggcccccccgagagagacagcgtgggccagctgcagctgtacagacaccccgacagaagccagcccgccttcctggacgccatcgacagaagagaggacaccttctacgtggtgagcttcagaagaaccacctgctgcagccagcccagcgccaccaccagaccccccggccccagatgcccctggtag

SEQ ID NO: 52055 - DNA, 2103 bp, Artificial Sequence
  derived and/or modified sequence
atggccgagctgatgctgctgagcgagatcgccgaccccaccagattcttcaccgacaacctgctgagccccgaggactgggacagcaccctgtacagcggcctggacgaggtggccgaggagcagacccagctgttcagatgccccgagcaggacgtgcccttcgacggcagcagcctggacgtgggcatggacgtgagccccagcgagcccccctgggagctgctgcccatcttccccgacctgcaggtgaagagcgagcccagcagcccctgcagcagcagcagcctgagcagcgagagcagcagactgagcaccgagcccagcagcgaggccctgggcgtgggcgaggtgctgcacgtgaagaccgagagcctggccccccccctgtgcctgctgggcgacgaccccaccagcagcttcgagaccgtgcagatcaacgtgatccccaccagcgacgacagcagcgacgtgcagaccaagatcgagcccgtgagcccctgcagcagcgtgaacagcgaggccagcctgctgagcgccgacagcagcagccaggccttcatcggcgaggaggtgctggaggtgaagaccgagagcctgagccccagcggctgcctgctgtgggacgtgcccgcccccagcctgggcgccgtgcagatcagcatgggccccagcctggacggcagcagcggcaaggccctgcccaccagaaagccccccctgcagcccaagcccgtggtgctgaccaccgtgcccatgcccagcagagccgtgccccccagcaccaccgtgctgctgcagagcctggtgcagcccccccccgtgagccccgtggtgctgatccagggcgccatcagagtgcagcccgagggccccgcccccagcctgcccagacccgagagaaagagcatcgtgcccgcccccatgcccggcaacagctgcccccccgaggtggacgccaagctgctgaagagacagcagagaatgatcaagaacagagagagcgcctgccagagcagaagaaagaagaaggagtacctgcagggcctggaggccagactgcaggccgtgctggccgacaaccagcagctgagaagagagaacgccgccctgagaagaagactggaggccctgctggccgagaacagcgagctgaagctgggcagcggcaacagaaaggtggtgtgcatcatggtgttcctgctgttcatcgccttcaacttcggccccgtgagcatcagcgagccccccagcgcccccatcagccccagaatgaacaagggcgagccccagcccagaagacacctgctgggcttcagcgagcaggagcccgtgcagggcgtggagcccctgcagggcagcagccagggccccaaggagccccagcccagccccaccgaccagcccagcttcagcaacctgaccgccttccccggcggcgccaaggagctgctgctgagagacctggaccagctgttcctgagcagcgactgcagacacttcaacagaaccgagagcctgagactggccgacgagctgagcggctgggtgcagagacaccagagaggcagaagaaagatcccccagagagcccaggagagacagaagagccagcccagaaagaagagcccccccgtgaaggccgtgcccatccagccccccggcccccccgagagagacagcgtgggccagctgcagctgtacagacaccccgacagaagccagcccgccttcctggacgccatcgacagaagagaggacaccttctacgtggtgagcttcagaagagaccacctgctgctgcccgccatcagccacaacaagaccagcagacccaagatgagcctggtgatgcccgccatggcccccaacgagaccctgagcggcagaggcgcccccggcgactacgaggagatgatgcagatcgagtgcgaggtgatggacaccagagtgatccacatcaagaccagcaccgtgccccccagcctgagaaagcagcccagccccacccccggcaacgccaccggcggccccctgcccgtgagcgccgccagccaggcccaccaggccagccaccagcccctgtacctgaaccacccctag

SEQ ID NO: 52056 - DNA, 771 bp, Artificial Sequence
  derived and/or modified sequence
aaagatggcggagctgatgctgctcagcgagattgctgacccgacgcgtttcttcaccgacaacctgcttagcccggaggactggggtctgcagaacagcaccttgtattctggcctagatgaagtggccgaggagcagacgcagctcttccgttgcccggagcaggatgtcccgtttgacggcagctccctggacgtggggatggatgtcagccccacagaccagcccagtttcagcaacctgacagccttccctgggggcgccaaggagctactactaagagacctagaccagctcttcctctcctctgattgccggcacttcaaccgcactgagtccctgaggcttgctgacgagttgagtggctgggtccagcgccaccagagaggccggaggaagatccctcagagggcccaggagagacagaagtctcagccacggaagaagtcacctccagttaaggcagtccccatccaaccccctggacccccagaaagggattctgtgggccagctgcaactatatcgccacccagaccgttcgcagccagcattcttggatgcaattgaccgacgggaagacacattttatgttgtctctttccgaaggaccacctgctgctcccagccatcagccacaacaagacctcccggcccaagatgtccctggtgatgcctgccatggcccccaatgcctcctgaatgatgccagcccagtatgctctaacctccagcctggttctcctggtgctgctgagcacagccagagca

SEQ ID NO: 52057 - DNA, 2624 bp, Artificial Sequence
  derived and/or modified sequence
ggcgggccttgggaaccgtctcctggttggggggtgggggggaaagatggcggagctgatgctgctcagcgagattgctgacccgacgcgtttcttcaccgacaacctgcttagcccggaggactgggacagcaccttgtattctggcctagatgaagtggccgaggagcagacgcagctcttccgttgcccggagcaggatgtcccgtttgacggcagctccctggacgtggggatggatgtcagcccctctgagcccccatgggaactcctgccgatcttcccagatcttcaggtgaagtctgagccatcttccccctgctcttcctcctccctcagctccgagtcatcgcgtctctccacagagccatccagcgaggctcttggggtaggggaggtgctccatgtgaagacagagtccttggcacccccactgtgtctcctgggagatgacccaacatcctcatttgaaaccgtccagatcaacgttatccccacctctgatgattcctcagatgtccagaccaagatagaacctgtctctccatgttcttccgtcaactctgaggcctccctgctctcagccgactcctccagccaggcttttataggagaggaggtcctggaagtgaagacagagtccctgtccccttcaggatgcctcctgtgggatgtcccagccccctcacttggagctgtccagatcagcatgggcccatcccttgatggctcctcaggcaaagccctgcccacccggaagccgccactgcagcccaaacctgtagtgctaaccactgtcccaatgccatccagagctgtgcctcccagcaccacagtccttctgcagtccctcgtccagccacccccagtgtccccagttgtcctcatccagggtgctattcgagtccagcctgaagggccggctccctctctaccacggcctgagaggaagagcatcgttcccgctcctatgcctggaaactcctgcccgcctgaagtggatgcaaagctgctgaagcggcagcagcgaatgatcaagaaccgggagtcagcctgccagtcccggagaaagaagaaagagtatctgcagggactggaggctcggctgcaagcagtactggctgacaaccagcagctccgccgagagaatgctgccctccggcggcggctggaggccctgctggctgaaaacagcgagctcaagttagggtctggaaacaggaaggtggtctgcatcatggtcttccttctcttcattgccttcaactttggacctgtcagcatcagtgagcctccttcagctcccatctctcctcggatgaacaagggggagcctcaaccccggagacacttgctggggttctcagagcaagagccagttcagggagttgaacctctccaggggtcctcccagggccctaaggagccccagcccagccccacagaccagcccagtttcagcaacctgacagccttccctgggggcgccaaggagctactactaagagacctagaccagctcttcctctcctctgattgccggcacttcaaccgcactgagtccctgaggcttgctgacgagttgagtggctgggtccagcgccaccagagaggccggaggaagatccctcagagggcccaggagagacagaagtctcagccacggaagaagtcacctccagttaaggcagtccccatccaaccccctggacccccagaaagggattctgtgggccagctgcaactatatcgccacccagaccgttcgcagccagcattcttggatgcaattgaccgacgggaagacacattttatgttgtctctttccgaagggaccacctgctgctcccagccatcagccacaacaagacctcccggcccaagatgtccctggtgatgcctgccatggcccccaatgagaccctgtcaggccgtggggccccgggggactatgaggagatgatgcagatcgagtgtgaggtcatggacaccagggtgattcacatcaagacctccacagtgcccccctcgctccgaaaacagccatccccaaccccaggcaatgccacaggtggccccttgccagtctctgcagccagccaggcccaccaggcctcccaccagcccctctacctcaatcatccctgacctctgccattcacactgacttagaacggggggagggggtaccaggtggccaggtgggactgtttcaaatttccctgatccccaggcttggggcaattggtaaaggaaagagcaggtgtgggggttaagcacttatttgaggtgggggtgttcacctctcttctcatcccttttcagaatatagggctcctctcattcctgtgaacccccagtcctggcttctttgtttgaggggattgtgtgaggttcagttgtggggtgggtggtgagctgctgcatattttttattttgtttctctagtgttatggcagtggaggtgggaatttagtccccaggtgggacaagggaagttttttcattttggagctagttactgggagtaagggagggtggggtgggggggagttcaggtttatgtgtgtgcatttcttttttattattattaaataaacaacttggagggagttgaaggaa

SEQ ID NO: 52058 - DNA, 2624 bp, Artificial Sequence
  derived and/or modified sequence
ggcgggccttgggaaccgtctcctggttggggggtgggggggaaagatggcggagctgatgctgctcagcgagattgctgacccgacgcgtttcttcaccgacaacctgcttagcccggaggactgggacagcaccttgtattctggcctagatgaagtggccgaggagcagacgcagctcttccgttgcccggagcaggatgtcccgtttgacggcagctccctggacgtggggatggatgtcagcccctctgagcccccatgggaactcctgccgatcttcccagatcttcaggtgaagtctgagccatcttccccctgctcttcctcctccctcagctccgagtcatcgcgtctctccacagagccatccagcgaggctcttggggtaggggaggtgctccatgtgaagacagagtccttggcacccccactgtgtctcctgggagatgacccaacatcctcatttgaaaccgtccagatcaacgttatccccacctctgatgattcctcagatgtccagaccaagatagaacctgtctctccatgttcttccgtcaactctgaggcctccctgctctcagccgactcctccagccaggcttttataggagaggaggtcctggaagtgaagacagagtccctgtccccttcaggatgcctcctgtgggatgtcccagccccctcacttggagctgtccagatcagcatgggcccatcccttgatggctcctcaggcaaagccctgcccacccggaagccgccactgcagcccaaacctgtagtgctaaccactgtcccaatgccatccagagctgtgcctcccagcaccacagtccttctgcagtccctcgtccagccacccccagtgtccccagttgtcctcatccagggtgctattcgagtccagcctgaagggccggctccctctctaccacggcctgagaggaagagcatcgttcccgctcctatgcctggaaactcctgcccgcctgaagtggatgcaaagctgctgaagcggcagcagcgaatgatcaagaaccgggagtcagcctgccagtcccggagaaagaagaaagagtatctgcagggactggaggctcggctgcaagcagtactggctgacaaccagcagctccgccgagagaatgctgccctccggcggcggctggaggccctgctggctgaaaacagcgagctcaagttagggtctggaaacaggaaggtggtctgcatcatggtcttccttctcttcattgccttcaactttggacctgtcagcatcagtgagcctccttcagctcccatctctcctcggatgaacaagggggagcctcaaccccggagacacttgctggggttctcagagcaagagccagttcagggagttgaacctctccaggggtcctcccagggccctaaggagccccagcccagccccacagaccagcccagtttcagcaacctgacagccttccctgggggcgccaaggagctactactaagagacctagaccagctcttcctctcctctgattgccggcacttcaaccgcactgagtccctgaggcttgctgacgagttgagtggctgggtccagcgccaccagagaggccggaggaagatccctcagagggcccaggagagacagaagtctcagccacggaagaagtcacctccagttaaggcagtccccatccaaccccctggacccccagaaagggattctgtgggccagctgcaactatatcgccacccagaccgttcgcagccagcattcttggatgcaattgaccgacgggaagacacattttatgttgtctctttccgaagggaccacctgctgctcccagccatcagccacaacaagacctcccggcccaagatgtccctggtgatgcctgccatggcccccaatgagaccctgtcaggccgtggggccccgggggactatgaggagatgatgcagatcgagtgtgaggtcatggacaccagggtgattcacatcaagacctccacagtgcccccctcgctccgaaaacagccatccccaaccccaggcaatgccacaggtggccccttgccagtctctgcagccagccaggcccaccaggcctcccaccagcccctctacctcaatcatccctgacctctgccattcacactgacttagaacggggggagggggtaccaggtggccaggtgggactgtttcaaatttccctgatccccaggcttggggcaattggtaaaggaaagagcaggtgtgggggttaagcacttatttgaggtgggggtgttcacctctcttctcatcccttttcagaatatagggctcctctcattcctgtgaacccccagtcccggcttctttgtttgaggggattgtgtgaggttcagttgtggggtgggtggtgagctgctgcatattttttattttgtttctctagtgttatggcagtggaggtgggaatttagtccccaggtgggacaagggaagttttttcattttggagctagttactgggagtaagggagggtggggtgggggggagttcaggtttatgtgtgtgcatttcttttttattattattaaataaacaacttggagggagttgaaggaa

SEQ ID NO: 52059 - DNA, 2624 bp, Artificial Sequence
  derived and/or modified sequence
ggcgggccttgggaaccgtctcctggttggggggtgggggggaaagatggcggagctgatgctgctcagcgagattgctgacccgacgcgtttcttcaccgacaacctgcttagcccggaggactgggacagcaccttgtattctggcctagatgaagtggccgaggagcagacgcagctcttccgttgcccggagcaggatgtcccgtttgacggcagctccctggacgtggggatggatgtcagcccctctgagcccccatgggaactcctgccgatcttcccagatcttcaggtgaagtctgagccatcttccccctgctcttcctcctccctcagctccgagtcatcgcgtctctccacagagccatccagcgaggctcttggggtaggggaggtgctccatgtgaagacagagtccttggcacccccactgtgtctcctgggagatgacccaacatcctcatttgaaaccgtccagatcaacgttatccccacctctgatgattcctcagatgtccagaccaagatagaacctgtctctccatgttcttccgtcaactctgaggcctccctgctctcagccgactcctccagccaggcttttataggagaggaggtcctggaagtgaagacagagtccctgtcgccttcaggatgcctcctgtgggatgtcccagccccctcacttggagctgtccagatcagcatgggcccatcccttgatggctcctcaggcaaagccctgcccacccggaagccgccactgcagcccaaacctgtagtgctaaccactgtcccaatgccatccagagctgtgcctcccagcaccacagtccttctgcagtccctcgtccagccacccccagtgtccccagttgtcctcatccagggtgctattcgagtccagcctgaagggccggctccctctctaccacggcctgagaggaagagcatcgttcccgctcctatgcctggaaactcctgcccgcctgaagtggatgcaaagctgctgaagcggcagcagcgaatgatcaagaaccgggagtcagcctgccagtcccggagaaagaagaaagagtatctgcagggactggaggctcggctgcaagcagtactggctgacaaccagcagctccgccgagagaatgctgccctccggcggcggctggaggccctgctggctgaaaacagcgagctcaagttagggtctggaaacaggaaggtggtctgcatcatggtcttccttctcttcattgccttcaactttggacctgtcagcatcagtgagcctccttcagctcccatctctcctcggatgaacaagggggagcctcaaccccggagacacttgctggggttctcagagcaagagccagttcagggagttgaacctctccaggggtcctcccagggccctaaggagccccagcccagccccacagaccagcccagtttcagcaacctgacagccttccctgggggcgccaaggagctactactaagagacctagaccagctcttcctctcctctgattgccggcacttcaaccgcactgagtccctgaggcttgctgacgagttgagtggctgggtccagcgccaccagagaggccggaggaagatccctcagagggcccaggagagacagaagtctcagccacggaagaagtcacctccagttaaggcagtccccatccaaccccctggacccccagaaagggattctgtgggccagctgcaactatatcgccacccagaccgttcgcagccagcattcttggatgcaattgaccgacgggaagacacattttatgttgtctctttccgaagggaccacctgctgctcccagccatcagccacaacaagacctcccggcccaagatgtccctggtgatgcctgccatggcccccaatgagaccctgtcaggccgtggggccccgggggactatgaggagatgatgcagatcgagtgtgaggtcatggacaccagggtgattcacatcaagacctccacagtgcccccctcgctccgaaaacagccatccccaaccccaggcaatgccacaggtggccccttgccagtctctgcagccagccaggcccaccaggcctcccaccagcccctctacctcaatcatccctgacctctgccattcacactgacttagaacggggggagggggtaccaggtggccaggtgggactgtttcaaatttccctgatccccaggcttggggcaattggtaaaggaaagagcaggtgtgggggttaagcacttatttgaggtgggggtgttcacctctcttctcatcccttttcagaatatagggctcctctcattcctgtgaacccccagtcctggcttctttgtttgaggggattgtgtgaggttcagttgtggggtgggtggtgagctgctgcatattttttattttgtttctctagtgttatggcagtggaggtgggaatttagtccccaggtggaacaagggaagttttttcattttggagctagttactgggagtaagggagggtggggtgggggggagttcaggtttatgtgtgtgcatttcttttttattattattaaataaacaacttggagggagttgaaggaa

SEQ ID NO: 52060 - DNA, 2624 bp, Artificial Sequence
  derived and/or modified sequence
ggcgggccttgggaaccgtctcctggttgtggggtgggggggaaagatggcggagctgatgctgctcagcgagattgctgacccgacgcgtttcttcaccgacaacctgcttagcccggaggactgggacagcaccttgtattctggcctagatgaagtggccgaggagcagacgcagctcttccgttgcccggagcaggatgtcccgtttgacggcagctccctggacgtggggatggatgtcagcccctctgagcccccatgggaactcctgccgatcttcccagatcttcaggtgaagtctgagccatcttccccctgctcttcctcctccctcagctccgagtcatcgcgtctctccacagagccatccagcgaggctcttggggtaggggaggtgctccatgtgaagacagagtccttggcacccccactgtgtctcctgggagatgacccaacatcctcatttgaaaccgtccagatcaacgttatccccacctctgatgattcctcagatgtccagaccaagatagaacctgtctctccatgttcttccgtcaactctgaggcctccctgctctcagccgactcctccagccaggcttttataggagaggaggtcctggaagtgaagacagagtccctgtccccttcaggatgcctcctgtgggatgtcccagccccctcacttggagctgtccagatcagcatgggcccatcccttgatggctcctcaggcaaagccctgcccacccggaagccgccactgcagcccaaacctgtagtgctaaccactgtcccaatgccatccagagctgtgcctcccagcaccacagtccttctgcagtccctcgtccagccacccccagtgtccccagttgtcctcatccagggtgctattcgagtccagcctgaagggccggctccctctctaccacggcctgagaggaagagcatcgttcccgctcctatgcctggaaactcctgcccgcctgaagtggatgcaaagctgctgaagcggcagcagcgaatgatcaagaaccgggagtcagcctgccagtcccggagaaagaagaaagagtatctgcagggactggaggctcggctgcaagcagtactggctgacaaccagcagctccgccgagagaatgctgccctccggcggcggctggaggccctgctggctgaaaacagcgagctcaagttagggtctggaaacaggaaggtggtctgcatcatggtcttccttctcttcattgccttcaactttggacctgtcagcatcagtgagcctccttcagctcccatctctcctcggatgaacaagggggagcctcaaccccggagacacttgctggggttctcagagcaagagccagttcagggagttgaacctctccaggggtcctcccagggccctaaggagccccagcccagccccacagaccagcccagtttcagcaacctgacagccttccctgggggcgccaaggagctactactaagagacctagaccagctcttcctctcctctgattgccggcacttcaaccgcactgagtccctgaggcttgctgacgagttgagtggctgggtccagcgccaccagagaggccggaggaagatccctcagagggcccaggagagacagaagtctcagccacggaagaagtcacctccagttaaggcagtccccatccaaccccctggacccccagaaagggattctgtgggccagctgcaactatatcgccacccagaccgttcgcagccagcattcttggatgcaattgaccgacgggaagacacattttatgttgtctctttccgaagggaccacctgctgctcccagccatcagccacaacaagacctcccggcccaagatgtccctggtgatgcctgccatggcccccaatgagaccctgtcaggccgtggggccccgggggactatgaggagatgatgcagatcgagtgtgaggtcatggacaccagggtgattcacatcaagacctccacagtgcccccctcgctccgaaaacagccatccccaaccccaggcaatgccacaggtggccccttgccagtctctgcagccagccaggcccaccaggcctcccaccagcccctctacctcaatcatccctgacctctgccattcacactgacttagaacggggggagggggtaccaggtggccaggtgggactgtttcaaatttccctgatccccaggcttggggcaattggtaaaggaaagagcaggtgtgggggttaagcacttatttgaggtgggggtgttcacctctcttctcatcccttttcagaatatagggctcctctcattcctgtgaacccccagtcctggcttctttgtttgaggggattgtgtgaggttcagttgtggggtgggtggtgagctgctgcatattttttattttgtttctctagtgttatggcagtggaggtgggaatttagtccccaggtgggacaagggaagttttttcattttggagctagttactgggagtaagggagggtggggtgggggggagttcaggtttatgtgtgtgcatttcttttttattattattaaataaacaacttggagggagttgaaggaa

SEQ ID NO: 52061 - protein, 486 aa, Artificial Sequence
  derived and/or modified sequence
MIQTVPDPAAHIKEALSVVSEDQSLFECAYGTPHLAKTEMTASSSSDYGQTSKMSPRVPQQDWLSQPPARVTIKMECNPSQVNGSRNSPDECSVAKGGKMVGSPDTVGMNYGSYMEEKHMPPPNMTTNERRVIVPADPTLWSTDHVRQWLEWAVKEYGLPDVNILLFQNIDGKELCKMTKDDFQRLTPSYNADILLSHLHYLRETPLPHLTSDDVDKALQNSPRLMHARNTGGAAFIFPNTSVYPEATQRITTRPDLPYEPPRRSAWTGHGHPTPQSKAAQPSPSTVPKTEDQRPQLDPYQILGPTSSRLANPGSGQIQLWQFLLELLSDSSNSSCITWEGTNGEFKMTDPDEVARRWGERKSKPNMNYDKLSRALRYYYDKNIMTKVHGKRYAYKFDFHGIAQALQPHPPESSLYKYPSDLPYMGSYHAHPQKMNFVAPHPPALPVTSSSFFAAPNPYWNSPTGGIYPNTRLPTSHMPSHLGTYY

SEQ ID NO: 52062 - DNA, 1461 bp, Artificial Sequence
  derived and/or modified sequence
atgatccagaccgtgcccgaccccgccgcccacatcaaggaggccctgagcgtggtgagcgaggaccagagcctgttcgagtgcgcctacggcaccccccacctggccaagaccgagatgaccgccagcagcagcagcgactacggccagaccagcaagatgagccccagagtgccccagcaggactggctgagccagccccccgccagagtgaccatcaagatggagtgcaaccccagccaggtgaacggcagcagaaacagccccgacgagtgcagcgtggccaagggcggcaagatggtgggcagccccgacaccgtgggcatgaactacggcagctacatggaggagaagcacatgcccccccccaacatgaccaccaacgagagaagagtgatcgtgcccgccgaccccaccctgtggagcaccgaccacgtgagacagtggctggagtgggccgtgaaggagtacggcctgcccgacgtgaacatcctgctgttccagaacatcgacggcaaggagctgtgcaagatgaccaaggacgacttccagagactgacccccagctacaacgccgacatcctgctgagccacctgcactacctgagagagacccccctgccccacctgaccagcgacgacgtggacaaggccctgcagaacagccccagactgatgcacgccagaaacaccggcggcgccgccttcatcttccccaacaccagcgtgtaccccgaggccacccagagaatcaccaccagacccgacctgccctacgagccccccagaagaagcgcctggaccggccacggccaccccaccccccagagcaaggccgcccagcccagccccagcaccgtgcccaagaccgaggaccagagaccccagctggacccctaccagatcctgggccccaccagcagcagactggccaaccccggcagcggccagatccagctgtggcagttcctgctggagctgctgagcgacagcagcaacagcagctgcatcacctgggagggcaccaacggcgagttcaagatgaccgaccccgacgaggtggccagaagatggggcgagagaaagagcaagcccaacatgaactacgacaagctgagcagagccctgagatactactacgacaagaacatcatgaccaaggtgcacggcaagagatacgcctacaagttcgacttccacggcatcgcccaggccctgcagccccacccccccgagagcagcctgtacaagtaccccagcgacctgccctacatgggcagctaccacgcccacccccagaagatgaacttcgtggccccccacccccccgccctgcccgtgaccagcagcagcttcttcgccgcccccaacccctactggaacagccccaccggcggcatctaccccaacaccagactgcccaccagccacatgcccagccacctgggcacctactactag

SEQ ID NO: 52063 - DNA, 1461 bp, Artificial Sequence
  derived and/or modified sequence
atgatccagactgttcccgatcctgccgcccacattaaagaggccctttcagtggtgtctgaggatcagagtctgttcgaatgtgcctatggaactcctcatctggctaagacggaaatgacagcaagctctagtagtgactacgggcagaccagcaaaatgtcgcctagagtgcctcagcaggactggctgtctcaaccccctgcccgggtcaccatcaaaatggaatgcaacccgtcccaggtgaacgggtccagaaatagtccagacgagtgttctgtcgctaaaggtggtaagatggtcgggtctccagacactgtggggatgaattacggcagttacatggaggagaaacacatgcctcccccaaacatgacaacaaacgaacgcagggtcattgtaccagccgacccaacactttggtctaccgatcatgtgagacagtggctggaatgggctgtgaaggaatatggattgccagacgttaatatcttactgttccagaatatagacggcaaagagttgtgtaagatgaccaaggacgacttccagagactgacccccagctacaatgccgatatcctcttaagccacctgcattatttacgggagaccccgctccctcacctcacttctgatgatgtggataaggctctgcagaactcccccaggctgatgcacgctcggaacaccgggggcgctgcattcattttccctaatactagcgtgtaccccgaagctacacagcggatcactacccggccagatctcccatacgagccgccaaggcgtagcgcttggacaggacatggccaccccaccccacagtccaaagcagcccagccttctcctagcactgtgcccaaaacagaagaccaaagaccccagcttgatccgtaccagatcttaggtccgactagtagtcgacttgcaaaccccggcagcggacagatccagctgtggcagttcctgctcgaactgctgagtgacagctcaaatagctcatgtataacatgggaggggacaaacggtgaattcaagatgaccgatcccgacgaagtggctagaaggtggggggaacgtaagtcaaaacctaatatgaattacgataagctctcaagagcgctgcgttactactacgataagaacatcatgactaaggtgcatgggaagcggtatgcctacaaattcgactttcacggtatcgcccaggctctacagccacatccccctgagtcatccctctacaagtatccatccgatctcccctacatgggttcctatcacgcgcacccgcaaaagatgaacttcgtggcccctcacccaccagctctgcccgtgaccagcagcagcttctttgccgctccaaatccttactggaattcaccaaccggtggcatctacccaaacacgagactaccaacgagccacatgccgtcccacctgggtacctactattag

SEQ ID NO: 52064 - DNA, 1461 bp, Artificial Sequence
  derived and/or modified sequence
atgatccagacagtaccagatcctgcagctcatattaaggaagccctgagcgtcgtgagcgaggatcaaagtctgttcgaatgcgcatacggcaccccacacttagctaagactgagatgacagcatcatcatccagtgattacggccagacgtctaagatgagccccagagtgccccagcaggattggctaagccagcccccagccagagtaaccatcaagatggagtgcaatccaagccaggtgaatgggagccgcaattcacccgacgaatgttcagttgctaaaggaggtaaaatggtaggatccccagacacagtgggaatgaactatggttcctatatggaagagaaacacatgccgccacctaatatgactacaaacgagcgcagagtcatcgttcccgcagacccaactctatggtccacagatcacgttcgacagtggctggagtgggccgttaaggaatacggcctgccagatgtgaacatcttgctttttcagaacattgacggtaaggaactgtgcaagatgaccaaggacgactttcaacgactgacgccgtcttataacgccgacatcttgctgtcccatctacactacctccgcgagactcccttgccccatctgaccagtgatgacgtggacaaggctctgcaaaattcgcctcgtctaatgcatgctaggaacaccggaggcgccgcttttattttcccaaatacaagcgtctatccagaagccacacagcgcattactactcgtccagaccttccttatgaaccaccccgtagaagcgcttggactggccacgggcaccctactccacagtcaaaagcagctcagccttccccttccaccgtcccgaaaaccgaagatcagcggccccaattggatccataccagatcctgggcccaactagcagcagacttgccaaccccggcagcggacaaatacagctttggcagtttctccttgaattactgtctgactctagcaacagttcatgcatcacctgggagggcactaatggcgagtttaaaatgacggaccccgacgaagtcgctaggaggtggggggagagaaaatccaagcccaacatgaactatgacaaactctctagggcattacggtactactatgacaaaaacattatgactaaagtgcatggtaaacgatatgcatataagttcgactttcacggcatcgcccaggccctccagccccacccgcctgagtccagtctttacaagtacccatctgatctaccttatatgggatcctatcacgcgcacccgcagaagatgaactttgtagcacctcacccgcctgcactgccagttacctcctcctcatttttcgctgcccctaacccgtactggaactcccctaccggtggaatttaccccaacacccgactccccacatcacacatgccaagtcatctgggcacgtattattag

SEQ ID NO: 52065 - DNA, 1461 bp, Artificial Sequence
  derived and/or modified sequence
atgatccagacagtgcctgaccctgctgcccacatcaaggaggccctgtctgtggtgtctgaggaccagagcctgtttgaatgtgcctacggcaccccccacctggccaagacagagatgacagccagcagcagcagtgactatggccagaccagcaagatgagcccccgggtgccccagcaggactggctgagccagcccccagcccgggtgaccatcaagatggagtgcaaccccagccaggtgaatggcagcaggaacagcccagatgaatgttctgtggccaagggcggcaagatggtgggcagcccagacacagtgggcatgaactacggcagctacatggaggagaagcacatgcccccacccaacatgaccaccaatgaaagaagagtgattgtgcctgctgaccccaccctgtggagcacagaccacgtgcggcagtggctggagtgggccgtgaaggagtatggcctgcctgatgtgaacatcctgctcttccagaacattgatggcaaggagctgtgcaagatgaccaaggatgacttccagaggctgacccccagctacaatgctgacatcctgctgagccacctgcactacctgcgggagacccccctgccccacctgaccagtgatgatgtggacaaggccctgcagaacagcccccggctgatgcacgccagaaatactggaggagctgccttcatcttccccaacacctctgtgtacccagaggccacccagaggatcaccaccaggccagacctgccctatgagcccccaagaagaagtgcctggacaggccacggccaccccaccccccagagcaaggccgcccagcccagccccagcacagtgcccaagacagaggaccagaggccccagctggacccctaccagatcctgggccccaccagcagccggctggccaaccctggcagcggccagatccagctgtggcagttcctgctggagctgctgagtgacagcagcaacagcagctgcatcacctgggagggcaccaatggagagttcaagatgacagatcctgatgaggtggcccggcgctggggcgagaggaagagcaagcccaacatgaactatgacaagctgagccgggccctgcgctactactatgacaagaacatcatgaccaaggtgcacggcaagagatatgcctacaagtttgacttccacggcatcgcccaggccctgcagccccaccccccagagagcagcctgtacaagtaccccagcgacctgccctacatgggcagctaccacgcccacccccagaagatgaactttgtggccccccaccccccagccctgcctgtgaccagcagcagcttctttgctgcccccaacccctactggaacagccccaccggcggcatctaccccaacacccggctgcccaccagccacatgcccagccacctgggcacctactactag

SEQ ID NO: 52066 - DNA, 1461 bp, Artificial Sequence
  derived and/or modified sequence
atgatccagaccgtgcccgaccccgccgcccacatcaaggaggccctgtctgtggtatccgaggatcagagtctctttgagtgcgcctatggaacaccgcacctcgctaaaacagaaatgacggcttcctccagttcagattatggccagaccagcaagatgagccccagggtgccgcagcaggactggctttcccaaccaccagcaagggtcactattaaaatggaatgcaacccatcacaggtgaatggcagtcgtaatagcccagacgagtgtagtgtggcgaaaggagggaagatggtgggctcccctgatacagtggggatgaattatggatcatacatggaagaaaagcatatgcctcccccgaatatgacaacaaatgaacgccgggttatcgtgcccgctgacccgactttgtggtccaccgatcacgtacggcagtggctggaatgggcagtcaaggagtacggactgcccgacgtcaacatcttgctgtttcagaacattgacgggaaagagctgtgtaagatgactaaggatgacttccagcgcttgacccctagctacaatgctgacatcctgttatcacacctgcactacctgcgggaaaccccactgccacatctcacaagtgacgatgtggataaagcgctacagaactcgccgcggctcatgcacgcccgcaatacagggggggccgctttcatctttcctaatacatccgtttatccggaagcgactcagcgcattactactaggcccgaccttccttatgagcctccccggcgcagcgcatggacagggcacggacatccaacgccccagtccaaggccgcccaaccatctcccagcaccgtgcccaagactgaagaccaaagacctcaactggatccgtatcagattttgggcccaacgtcaagccgccttgcaaaccctgggtctgggcaaatccagttatggcaattccttctggaactcttaagtgacagcagtaatagctcctgtattacttgggaagggaccaacggagagttcaagatgactgacccagacgaggttgctagaagatggggcgagagaaagtccaaacccaatatgaattatgacaagctctcccgcgctctgcggtattattatgacaagaatatcatgaccaaagtacatggcaagcgatatgcttataagttcgatttccacggcatcgctcaggcactacagccacatccgcccgagagtagcctgtacaaataccccagtgacttaccgtacatggggagctatcatgctcatccccagaaaatgaatttcgtggctccgcatcccccggccctccctgtcacatcatcatccttctttgctgcccccaatccatattggaattccccaaccggaggaatctaccctaacaccagactccccactagtcatatgcccagccatctgggcacttactattag

SEQ ID NO: 52067 - DNA, 1461 bp, Artificial Sequence
  derived and/or modified sequence
atgatccagaccgtgcccgaccccgccgcccacatcaaggaggccctgagcgtggtgagcgaagaccagagtctattcgaatgcgcctacgggacaccacaccttgctaaaactgagatgaccgcttcatctagttccgattacggccagacctctaagatgagtccccgcgtccctcagcaggactggctgtcccaaccccctgctagggttaccatcaagatggaatgcaacccatcccaagtgaacgggagcaggaattcccccgacgaatgtagcgttgccaaaggggggaagatggtaggatccccggatacagtgggaatgaattacggaagctatatggaggagaagcacatgcctcctccaaacatgacgacaaatgaacggcgcgtcatcgtacctgcagaccctacgctgtggtcaacagatcatgtgcgacagtggctggaatgggctgttaaggagtatggcctgcccgacgtcaatattctgctcttccagaacatagatggtaaagagctgtgcaagatgaccaaggatgattttcaacgactcactccatcttataacgcggatatcctgttgtctcatctacactacttgagagaaacgcctcttcctcatctaactagcgacgacgttgacaaagcactgcagaattccccccggctgatgcacgcccgaaatactggcggggccgccttcattttccccaataccagtgtttacccagaggcaacgcagcggatcaccacaagacccgatttaccctatgagcctccaaggaggtccgcctggactggtcacgggcacccaaccccacagtcaaaggctgcccaaccaagtccctccaccgtaccaaagaccgaagaccaaagaccacaactcgatccatatcagatactcggtccaacctcatcccgccttgccaatccaggctccggacagatacagctctggcaatttctcctggaactcttatcagactcttccaactcaagctgtattacttgggagggaaccaacggagagtttaaaatgacagatccagacgaagtggccaggcgatggggcgagagaaagtcgaagccgaacatgaattatgacaagttgagcagggctttgcgatactactacgataagaacatcatgaccaaagtccacggcaaaagatatgcttacaagttcgactttcacggtatcgctcaggccctgcagccccaccctcctgagtccagtctatataaatatccatctgatctgccgtacatgggcagttatcatgctcacccacaaaagatgaacttcgttgctccccatccaccggccctacccgtcacatcatcaagcttttttgctgctcctaatccctactggaattcccccaccgggggcatatacccgaacacccgtctgcctaccagccacatgccaagccacctaggcacatattattag

SEQ ID NO: 52068 - DNA, 1461 bp, Artificial Sequence
  derived and/or modified sequence
atgattcaaactgtcccagaccctgcagcgcatattaaagaagccctgtccgtggtaagtgaagaccagagcctttttgaatgcgcttacggaacccctcatctagccaaaactgaaatgactgcctccagctcctccgattacggtcagacatccaagatgtcccctcgggtgcctcagcaggactggttgtcgcagcccccagcacgagtgacaatcaagatggaatgcaacccgtctcaggtaaacgggtcacggaacagcccggatgagtgctccgtggctaaaggcggtaaaatggtcggcagccccgacactgttgggatgaactatggcagctatatggaagagaaacatatgcccccaccaaacatgaccacgaatgaaagacgtgtgatcgtgccagcagatcctacactgtggtcaactgaccatgtgaggcaatggttggagtgggctgtgaaagaatatgggttgcccgacgtcaatatactcctctttcagaacattgatggaaaagagctgtgcaagatgacgaaggacgacttccagcgcttaactccttcttataacgccgacatactgctgtctcacctgcactacctccgggagacccccctgccacatctcacatccgatgatgtggataaagccctgcagaattcgccaaggctgatgcatgcaagaaatacaggcggagctgcattcatctttcccaatacatccgtctatcccgaagctacacagcggatcactacccgaccagacctgccctacgagccaccccgaagaagtgcctggacaggccatggacaccccacgcctcagtctaaggcggctcagcccagcccatcaacagtgcccaagaccgaagatcagcggcctcagctggacccttaccagattttaggacccacgtcgtcacgcttggcaaacccgggaagtggccagattcagttgtggcaattcctgcttgagctcctctctgattcttccaatagcagttgtatcacttgggaggggactaacggggagttcaaaatgaccgacccagatgaggttgccaggagatggggtgagcggaagtcaaagcccaacatgaattacgataaactgagcagagccctgagatactactatgacaagaatattatgacgaaagtgcacggcaagaggtacgcctataaattcgacttccatggtatcgcacaggctcttcagcctcatccaccagagtcatccctttacaaataccccagcgatctgccctacatggggtcataccatgcacatccccagaaaatgaactttgtcgcccctcatccaccagctctgcccgttaccagctcctcgttcttcgcagctccaaatccttattggaactcaccaacaggcggaatctaccccaataccaggctgccaacctctcacatgccttctcacctcgggacatattattag

SEQ ID NO: 52069 - DNA, 1461 bp, Artificial Sequence
  derived and/or modified sequence
atgattcagacagtgcccgatcctgccgctcacataaaagaagccctaagtgtcgtgagtgaggaccaatccctctttgaatgcgcttatggcacgccacacctggcaaagaccgagatgaccgctagtagttcctctgactacggacagacctctaagatgtccccaagggtgcctcagcaagattggttgagtcagcctcccgctcgggtgaccatcaagatggagtgtaacccgagtcaggttaacggttcccgcaactcccccgatgagtgttccgtcgctaaaggaggaaagatggtaggcagccctgatacagtgggcatgaactacggatcctatatggaagaaaagcatatgccccctcctaatatgactactaacgagcgaagagttatcgtgcctgcagatcctactctgtggtccactgaccatgtgcggcaatggctggagtgggctgttaaagaatacggcttacccgatgtgaatatcctactgttccaaaatatcgacgggaaggaactgtgtaagatgactaaggacgactttcaacgtctcaccccatcttataacgcagatatcctcttgagtcatcttcattatttgcgcgagacaccccttccccacctcacctccgacgatgtggataaagcactacaaaatagtcccagactgatgcacgcccgaaacacagggggagcagcctttatctttccaaacacctctgtgtacccggaggccacacagagaatcacgacgagacctgacctgccctacgaacctcctcgccgatcagcatggacggggcacggccaccctacaccacaatcaaaagccgctcagccttccccaagtacagtgcctaagactgaggatcagagacctcaactcgatccatatcagattttgggtccaacatctagtcggctggccaaccccggtagtggccaaatccagctgtggcagttcctgcttgagctgcttagcgacagttctaactcctcttgcattacgtgggaggggacgaacggggagtttaaaatgactgaccctgacgaagttgctcgacgctggggcgagaggaagagcaagcccaatatgaactatgacaagctgtcacgcgcactgaggtactactacgataagaatatcatgacaaaggttcatggcaaacgctacgcctataagtttgacttccacggaattgctcaggccctccagccacaccctccggaatcctccttgtacaaatatccgtcagaccttccatatatgggctcctaccacgctcaccctcaaaaaatgaactttgtcgcaccacacccgccagccctacctgtgaccagttccagcttctttgcggcacccaacccatactggaactctccaaccgggggaatttaccccaatacgaggttgcccacatcacacatgccaagccacctcgggacatactactag

SEQ ID NO: 52070 - DNA, 1868 bp, Artificial Sequence
  derived and/or modified sequence
gctgagcccgtcggcgccgagggagttagtgcgacccggctcggcgcgcacggccaaggcacgcgcgctggcacacgcgggcgcggacacgcgcggacacacacgtgcgggacacgccctcccccgacggcggcgctaacctctcggttattccaggatctttggagacccgaggaaagccgtgttgaccaaaagcaagacaaatgactcacagagaaaaaagatggcagaaccaagggcaactaaagccgtcaggttctgaacagctggtagatgggctggcttactgaaggacatgattcagactgtcccggacccagcagctcatatcaaggaagccttatcagttgtgagtgaggaccagtcgttgtttgagtgtgcctacggaacgccacacctggctaagacagagatgaccgcgtcctcctccagcgactatggacagacttccaagatgagcccacgcgtccctcagcaggattggctgtctcaacccccagccagggtcaccatcaaaatggaatgtaaccctagccaggtgaatggctcaaggaactctcctgatgaatgcagtgtggccaaaggcgggaagatggtgggcagcccagacaccgttgggatgaactacggcagctacatggaggagaagcacatgccacccccaaacatgaccacgaacgagcgcagagttatcgtgccagcagatcctacgctatggagtacagaccatgtgcggcagtggctggagtgggcggtgaaagaatatggccttccagacgtcaacatcttgttattccagaacatcgatgggaaggaactgtgcaagatgaccaaggacgacttccagaggctcacccccagctacaacgccgacatccttctctcacatctccactacctcagagagactcctcttccacatttgacttcagatgatgttgataaagccttacaaaactctccacggttaatgcatgctagaaacacagggggtgcagcttttattttcccaaatacttcagtatatcctgaagctacgcaaagaattacaactaggccagatttaccatatgagccccccaggagatcagcctggaccggtcacggccaccccacgccccagtcgaaagctgctcaaccatctccttccacagtgcccaaaactgaagaccagcgtcctcagttagatccttatcagattcttggaccaacaagtagccgccttgcaaatccaggcagtggccagatccagctttggcagttcctcctggagctcctgtcggacagctccaactccagctgcatcacctgggaaggcaccaacggggagttcaagatgacggatcccgacgaggtggcccggcgctggggagagcggaagagcaaacccaacatgaactacgataagctcagccgcgccctccgttactactatgacaagaacatcatgaccaaggtccatgggaagcgctacgcctacaagttcgacttccacgggatcgcccaggccctccagccccaccccccggagtcatctctgtacaagtacccctcagacctcccgtacatgggctcctatcacgcccacccacagaagatgaactttgtggcgccccaccctccagccctccccgtgacatcttccagtttttttgctgccccaaacccatactggaattcaccaactgggggtatataccccaacactaggctccccaccagccatatgccttctcatctgggcacttactactaaagacctggcggaggcttttcccatcagcgtgcattcaccagcccatcgccacaaactctatcggagaacatgaatcaaaagtgcctcaagaggaatgaaaaaagctttactg

SEQ ID NO: 52071 - DNA, 5023 bp, Artificial Sequence
  derived and/or modified sequence
cccccgagggacatgagagaagaggagcggcgctcaggttattccaggatctttggagacccgaggaaagccgtgttgaccaaaagcaagacaaatgactcacagagaaaaaagatggcagaaccaagggcaactaaagccgtcaggttctgaacagctggtagatgggctggcttactgaaggacatgattcagactgtcccggacccagcagctcatatcaaggaagccttatcagttgtgagtgaggaccagtcgttgtttgagtgtgcctacggaacgccacacctggctaagacagagatgaccgcgtcctcctccagcgactatggacagacttccaagatgagcccacgcgtccctcagcaggattggctgtctcaacccccagccagggtcaccatcaaaatggaatgtaaccctagccaggtgaatggctcaaggaactctcctgatgaatgcagtgtggccaaaggcgggaagatggtgggcagcccagacaccgttgggatgaactacggcagctacatggaggagaagcacatgccacccccaaacatgaccacgaacgagcgcagagttatcgtgccagcagatcctacgctatggagtacagaccatgtgcggcagtggctggagtgggcggtgaaagaatatggccttccagacgtcaacatcttgttattccagaacatcgatgggaaggaactgtgcaagatgaccaaggacgacttccagaggctcacccccagctacaacgccgacatccttctctcacatctccactacctcagagagactcctcttccacatttgacttcagatgatgttgataaagccttacaaaactctccacggttaatgcatgctagaaacacagggggtgcagcttttattttcccaaatacttcagtatatcctgaagctacgcaaagaattacaactaggccagatttaccatatgagccccccaggagatcagcctggaccggtcacggccaccccacgccccagtcgaaagctgctcaaccatctccttccacagtgcccaaaactgaagaccagcgtcctcagttagatccttatcagattcttggaccaacaagtagccgccttgcaaatccaggcagtggccagatccagctttggcagttcctcctggagctcctgtcggacagctccaactccagctgcatcacctgggaaggcaccaacggggagttcaagatgacggatcccgacgaggtggcccggcgctggggagagcggaagagcaaacccaacatgaactacgataagctcagccgcgccctccgttactactatgacaagaacatcatgaccaaggtccatgggaagcgctacgcctacaagttcgacttccacgggatcgcccaggccctccagccccaccccccggagtcatctctgtacaagtacccctcagacctcccgtacatgggctcctatcacgcccacccacagaagatgaactttgtggcgccccaccctccagccctccccgtgacatcttccagtttttttgctgccccaaacccatactggaattcaccaactgggggtatataccccaacactaggctccccaccagccatatgccttctcatctgggcacttactactaaagacctggcggaggcttttcccatcagcgtgcattcaccagcccatcgccacaaactctatcggagaacatgaatcaaaagtgcctcaagaggaatgaaaaaagctttactggggctggggaaggaagccggggaagagatccaaagactcttgggagggagttactgaagtcttactacagaaatgaggaggatgctaaaaatgtcacgaatatggacatatcatctgtggactgaccttgtaaaagacagtgtatgtagaagcatgaagtcttaaggacaaagtgccaaagaaagtggtcttaagaaatgtataaactttagagtagagtttggaatcccactaatgcaaactgggatgaaactaaagcaatagaaacaacacagttttgacctaacataccgtttataatgccattttaaggaaaactacctgtatttaaaaatagaaacatatcaaaaacaagagaaaagacacgagagagactgtggcccatcaacagacgttgatatgcaactgcatggcatgtgctgttttggttgaaatcaaatacattccgtttgatggacagctgtcagctttctcaaactgtgaagatgacccaaagtttccaactcctttacagtattaccgggactatgaactaaaaggtgggactgaggatgtgtatagagtgagcgtgtgattgtagacagaggggtgaagaaggaggaggaagaggcagagaaggaggagaccagggctgggaaagaaacttctcaagcaatgaagactggactcaggacatttggggactgtgtacaatgagttatggagactcgagggttcatgcagtcagtgttataccaaacccagtgttaggagaaaggacacagcgtaatggagaaaggggaagtagtagaattcagaaacaaaaatgcgcatctctttctttgtttgtcaaatgaaaattttaactggaattgtctgatatttaagagaaacattcaggacctcatcattatgtgggggctttgttctccacagggtcaggtaagagatggccttcttggctgccacaatcagaaatcacgcaggcattttgggtaggcggcctccagttttcctttgagtcgcgaacgctgtgcgtttgtcagaatgaagtatacaagtcaatgtttttccccctttttatataataattatataacttatgcatttatacactacgagttgatctcggccagccaaagacacacgacaaaagagacaatcgatataatgtggccttgaattttaactctgtatgcttaatgtttacaatatgaagttattagttcttagaatgcagaatgtatgtaataaaataagcttggcctagcatggcaaatcagatttatacaggagtctgcatttgcactttttttagtgactaaagttgcttaatgaaaacatgtgctgaatgttgtggattttgtgttataatttactttgtccaggaacttgtgcaagggagagccaaggaaataggatgtttggcacccaaatggcgtcagcctctccaggtccttcttgcctcccctcctgtcttttatttctagccccttttggaacagaaggaccccgggtttcacattggagcctccatatttatgcctggaatggaaagaggcctatgaagctggggttgtcattgagaaattctagttcagcacctggtcacaaatcacccttaattcctgctatgattaaaatacatttgttgaacagtgaacaagctaccactcgtaaggcaaactgtattattactggcaaataaagcgtcatggatagctgcaatttctcactttacagaaacaagggataacgtctagatttgctgcggggtttctctttcaggagctctcactaggtagacagctttagtcctgctacatcagagttacctgggcactgtggcttgggattcactagccctgagcctgatgttgctggctatcccttgaagacaatgtttatttccataatctagagtcagtttccctgggcatcttttctttgaatcacaaatgctgccaaccttggtccaggtgaaggcaactcaaaaggtgaaaatacaaggtgaccgtgcgaaggcgctagccgaaacatcttagctgaataggtttctgaactggcccttttcatagctgtttcagggcctgtttttttcacgttgcagtccttttgctatgattatgtgaagttgccaaacctctgtgctgtggatgttttggcagtgggctttgaagtcggcaggacacgattaccaatgctcctgacaccccgtgtcatttggattagacggagcccaaccatccatcattttgcagcagcctgggaaggcccacaaagtgcccgtatctccttagggaaaataaataaatacaatcatgaaagctggcagttaggctgacccaaactgtgctaatggaaaagatcagtcatttttattttggaatgcaaagtcaagacacacctacattcttcatagaaatacacatttacttggataatcactcagttctctcttcaagactgtctcatgagcaagatcataaaaacaagacatgattatcatattcaattttaacagatgttttccattagatccctcaaccctccacccccagtccaggttattagcaagtcttatgagcaactgggataattttggataacatgataatactgagttccttcaaatacataattcttaaattgtttcaaaatggcattaactctctgttactgttgtaatctaattccaaagccccctccaggtcatattcataattgcatgaaccttttctctctgtttgtccctgtctcttggcttgccctgatgtatactcagactcctgtacaatcttactcctgctggcaagagatttgtcttcttttcttgtcttcaattggctttcgggccttgtatgtggtaaaatcaccaaatcacagtcaagactgtgtttttgttcctagtttgatgcccttatgtcccggaggggttcacaaagtgctttgtcaggactgctgcagttagaaggctcactgcttctcctaagccttctgcacagatgtggcacctgcaacccaggagcaggagccggaggagctgccctctgacagcaggtgcagcagagatggctacagctcaggagctgggaaggtgatggggcacagggaaagcacagatgttctgcagcgccccaaagtgacccattgcctggagaaagagaagaaaatattttttaaaaagctagtttatttagcttctcattaattcattcaaataaagtcgtgaggtgactaattagagaataaaaattactttggactactcaaaaatacaccaaa

SEQ ID NO: 52072 - DNA, 1164 bp, Artificial Sequence
  derived and/or modified sequence
atggtgggcagccccgacaccgtgggcatgaactacggcagctacatggaggagaagcacatgcccccccccaacatgaccaccaacgagagaagagtgatcgtgcccgccgaccccaccctgtggagcaccgaccacgtgagacagtggctggagtgggccgtgaaggagtacggcctgcccgacgtgaacatcctgctgttccagaacatcgacggcaaggagctgtgcaagatgaccaaggacgacttccagagactgacccccagctacaacgccgacatcctgctgagccacctgcactacctgagagagacccccctgccccacctgaccagcgacgacgtggacaaggccctgcagaacagccccagactgatgcacgccagaaacaccggcggcgccgccttcatcttccccaacaccagcgtgtaccccgaggccacccagagaatcaccaccagacccgacctgccctacgagccccccagaagaagcgcctggaccggccacggccaccccaccccccagagcaaggccgcccagcccagccccagcaccgtgcccaagaccgaggaccagagaccccagctggacccctaccagatcctgggccccaccagcagcagactggccaaccccggcagcggccagatccagctgtggcagttcctgctggagctgctgagcgacagcagcaacagcagctgcatcacctgggagggcaccaacggcgagttcaagatgaccgaccccgacgaggtggccagaagatggggcgagagaaagagcaagcccaacatgaactacgacaagctgagcagagccctgagatactactacgacaagaacatcatgaccaaggtgcacggcaagagatacgcctacaagttcgacttccacggcatcgcccaggccctgcagccccacccccccgagagcagcctgtacaagtaccccagcgacctgccctacatgggcagctaccacgcccacccccagaagatgaacttcgtggccccccacccccccgccctgcccgtgaccagcagcagcttcttcgccgcccccaacccctactggaacagccccaccggcggcatctaccccaacaccagactgcccaccagccacatgcccagccacctgggcacctactactag

SEQ ID NO: 52073 - DNA, 1164 bp, Artificial Sequence
  derived and/or modified sequence
atggtcggcagcccagataccgtcggcatgaattacggaagctacatggaagaaaaacatatgccccctccaaatatgacgaccaacgagcggagggtaattgtcccagcagatcccaccctgtggtcaacggaccatgtgagacaatggctcgagtgggccgtaaaagagtatggcctgcccgacgtgaatatcctcctctttcagaatatcgatgggaaagagctgtgcaagatgacaaaggacgacttccagagactgacgcctagttataatgctgatatactcttgagtcatcttcactatctcagggaaactcccctgcctcacctgacatctgacgatgtagacaaggcactacaaaactcacctagactaatgcacgcccgcaatactggtggcgcggcctttatattccctaatacgtctgtgtaccccgaagccacccagaggataacaactcggccggacttaccgtacgagcccccaagaagaagcgcttggactggacacgggcaccctactccacagagcaaggccgcccagcccagcccctcaaccgttcctaagactgaagatcagcggcctcagctcgacccctatcaaatcctggggcctacaagttcccggctggcgaaccccgggtcgggccaaatacagctgtggcagttcctgctggaactgttgtcagactcttcaaactcatcctgtataacatgggagggaacaaacggtgagtttaaaatgactgatcccgacgaagtggcgagaaggtggggggagagaaaatcaaaaccaaacatgaattacgacaagttaagccgagccctccggtattattatgacaaaaacattatgactaaggtccacggtaagcgttacgcttacaagtttgactttcatggcattgctcaggcactgcagcctcatccccccgagtcttctctttacaagtatccttcagatctcccctatatggggtcatatcacgcccacccccagaagatgaattttgtggcgccccacccccctgccttacctgtcacatcttcaagcttctttgcagcccctaacccctactggaatagtcccacaggaggcatctaccccaacacccgcttgccaactagtcatatgccaagtcatctggggacatattactag

SEQ ID NO: 52074 - DNA, 1164 bp, Artificial Sequence
  derived and/or modified sequence
atggtgggcagcccagacacagtgggcatgaactacggcagctacatggaggagaagcacatgcccccacccaacatgaccaccaatgaaagaagagtcatcgtgcctgctgaccccaccctgtggagcacagaccacgtgcggcagtggctggagtgggccgtgaaggagtatggcctgcctgatgtgaacatcctgctcttccagaacattgatggcaaggagctgtgcaagatgaccaaggatgacttccagaggctgacccccagctacaatgctgacatcctgctgagccacctgcactacctgcgggagacccccctgccccacctgaccagtgatgatgtggacaaggccctgcagaacagcccccggctgatgcacgccaggaacacaggaggagctgccttcatcttccccaacacctctgtgtacccagaggccacccagaggatcaccaccaggccagacctgccctatgagcccccccggcgcagcgcctggacaggccacggccaccccaccccccagagcaaggccgcccagcccagccccagcacagtgcccaagacagaggaccagaggccccagctggacccctaccagatcctgggccccaccagcagccggctggccaaccctggcagcggccagatccagctgtggcagttcctgctggagctgctgagtgacagcagcaacagcagctgcatcacctgggagggcaccaacggggagttcaagatgacagatcctgatgaggtggcccggcgctggggcgagaggaagagcaagcccaacatgaactatgacaagctgagccgggccctgcgctactactatgacaagaacatcatgaccaaggtgcacggcaagagatatgcctacaagtttgacttccatggaattgcccaggccctgcagccccaccccccagagagcagcctgtacaagtaccccagcgacctgccctacatgggcagctaccacgcccacccccagaagatgaactttgtggccccccaccccccagccctgcctgtgaccagcagcagcttctttgctgcccccaacccctactggaacagccccactggaggcatctaccccaacacccggctgcccaccagccacatgcccagccacctgggcacctactactag

SEQ ID NO: 52075 - DNA, 1164 bp, Artificial Sequence
  derived and/or modified sequence
atggtgggcagccccgacaccgtgggcatgaactacggcagctacatggaggaaaagcatatgccccctccaaatatgacaactaacgaaaggcgtgtgattgtaccagctgatccaaccctgtggtctaccgatcatgtccgccagtggttggagtgggcggtgaaggagtacggcttgccagatgttaacatcctgttgttccagaatatcgatggaaaagagttgtgcaaaatgactaaggatgatttccagcgactcacaccttcgtataacgcagatattctgcttagccatcttcactatctccgcgagactccgctgccacatctgacttcggacgatgtggacaaagcactgcaaaactcacctaggttgatgcacgcacgtaacaccggtggcgccgcctttatctttccaaacacaagcgtgtatcccgaagccacacagcgcatcacaacgcgacccgacctcccgtatgagccacctcgcagaagcgcctggacaggccatgggcaccccactcctcagtccaaagccgcacagccgagcccttctaccgtacccaaaactgaagatcagaggccccagctggatccctaccagattctgggcccaacaagctcccgattggctaacccaggaagcggacagatccaactgtggcagtttctcctcgaactgctatccgacagttctaatagctcttgtatcacttgggagggcacaaatggcgagtttaaaatgactgatcctgacgaggtggcccgtaggtggggggaaaggaaatccaagcctaatatgaactatgacaaactctcccgggcccttaggtactattacgacaagaacattatgaccaaagttcatggtaaacgatatgcatataagttcgattttcatggcatcgcgcaggcccttcagccccatcccccagaatccagtctttataagtatccttcggacctgccttacatgggaagctaccatgcacatcctcaaaaaatgaattttgtggcccctcacccacccgcccttcccgtgacttcttcctcattttttgcagctccaaatccatactggaactctccaacaggcgggatttatcctaacacgaggcttccaacaagccatatgccgtcgcatttaggtacgtactattag

SEQ ID NO: 52076 - DNA, 1164 bp, Artificial Sequence
  derived and/or modified sequence
atggtaggctctccagatacggttggcatgaattatggctcctatatggaagagaagcacatgcctccaccaaacatgacgaccaacgagcgaagggtaatcgtgccagcagaccctacgctctggtcaacagaccacgttaggcagtggctggagtgggccgtcaaagagtatggtctcccggatgtcaacattctgctcttccagaatattgacggcaaggagctatgcaagatgactaaagacgactttcagcggctgactccttcgtataacgccgacatcttactctctcatttgcattacctgagggaaacccctttgccccacctcaccagcgatgacgtcgataaagctctgcagaactcaccaagattaatgcacgccagaaacacaggaggagctgcttttatcttccctaacacctcggtttatccggaggccacacaaagaattaccaccaggcctgatctgccatatgagcccccaaggagatccgcttggacagggcacggacaccccacaccgcagtcgaaagcagcccaaccttccccctctaccgtgcccaagactgaggaccagagaccacagctggacccttatcagatcctgggacccacaagctccaggctggccaatcctggatccggtcaaatccagctctggcagttcctgctggaattactgtcggattcttccaacagctcttgtattacttgggaaggcacgaacggcgaattcaaaatgaccgacccagatgaggtggccagacgatggggcgaaagaaaatcgaagccaaacatgaattatgataagttgagtagggctctgagatactactacgacaagaacattatgactaaggtgcatggtaaaaggtatgcctacaaatttgacttccatggaatcgcgcaggcactacagccacacccacccgagagctccctgtataagtaccctagcgatcttccgtacatgggtagttaccacgctcacccccagaagatgaacttcgtggccccacaccccccagcactgccggtgacctcctcctccttctttgctgcccctaacccgtactggaacagcccaaccgggggaatctaccctaacacccgactgccaacaagccacatgccttctcacttgggcacatactactag

SEQ ID NO: 52077 - protein, 953 aa, Artificial Sequence
  derived and/or modified sequence
MEESSSVAMLVPDIGEQEAILTAESIISPSLEIDEQRKTKPDPLIHVIQKLSKIVENEKSQKCLLIGKKRPRSSAATHSLETQELCEIPAKVIQSPAADTRRAEMSQTNFTPDTLAQNEGKAMSYQCSLCKFLSSSFSVLKDHIKQHGQQNEVILMCSECHITSRSQEELEAHVVNDHDNDANIHTQSKAQQCVSPSSSLCRKTTERNETIPDIPVSVDNLQTHTVQTASVAEMGRRKWYAYEQYGMYRCLFCSYTCGQQRMLKTHAWKHAGEVDCSYPIFENENEPLGLLDSSAAAAPGGVDAVVIAIGESELSIHNGPSVQVQICSSEQLSSSSPLEQSAERGVHLSQSVTLDPNEEEMLEVISDAEENLIPDSLLTSAQKIISSSPNKKGHVNVIVERLPSAEETLSQKRFLMNTEMEEGKDLSLTEAQIGREGMDDVYRADKCTVDIGGLIIGWSSSEKKDELMNKGLATDENAPPGRRRTNSESLRLHSLAAEALVTMPIRAAELTRANLGHYGDINLLDPDTSQRQVDSTLAAYSKMMSPLKNSSDGLTSLNQSNSTLVALPEGRQELSDGQVKTGISMSLLTVIEKLRERTDQNASDDDILKELQDNAQCQPNSDTSLSGNNVVEYIPNAERPYRCRLCHYTSGNKGYIKQHLRVHRQRQPYQCPICEHIADNSKDLESHMIHHCKTRIYQCKQCEESFHYKSQLRNHEREQHSLPDTLSIATSNEPRISSDTADGKCVQEGNKSSVQKQYRCDVCDYTSTTYVGVRNHRRIHNSDKPYRCSLCGYVCSHPPSLKSHMWKHASDQNYNYEQVNKAINDAISQSGRVLGKSPGKTQLKSSEESADPVTGSSENAVSSSELMSQTPSEVLGTNENEKLSPTSNTSYSLEKISSLAPPSMEYCVLLFCCCICGFESTSKENLLDHMKEHEGEIVNIILNKDHNTALNTN

SEQ ID NO: 52078 - protein, 957 aa, Artificial Sequence
  derived and/or modified sequence
MEESSSVAMLVPDIGEQEAILTAESIISPSLEIDEQRKTKPDPLIHVIQKLSKIVENEKSQKCLLIGKKRPRSSAATHSLETQELCEIPAKVIQSPAADTRRAEMSQTNFTPDTLAQNEGKAMSYQCSLCKFLSSSFSVLKDHIKQHGQQNEVILMCSECHITSRSQEELEAHVVNDHDNDANIHTQSKAQQCVSPSSSLCRKTTERNETIPDIPVSVDNLQTHTVQTASVAEMGRRKWYAYEQYGMYRCLFCSYTCGQQRMLKTHAWKHAGEVDCSYPIFENENEPLGLLDSSAAAAPGGVDAVVIAIGESELSIHNGPSVQVQICSSEQLSSSSPLEQSAERGVHLSQSVTLDPNEEEMLEVISDAEENLIPDSLLTSAQKIISSSPNKKGHVNVIVERLPSAEETLSQKRFLMNTEMEEGKDLSLTEAQIGREGMDDVYRADKCTVDIGGLIIGWSSSEKKDELMNKGLATDENAPPGRRRTNSESLRLHSLAAEALVTMPIRAAELTRANLGHYGDINLLDPDTSQRQVDSTLAAYSKMMSPLKNSSDGLTSLNQSNSTLVALPEGRQELSDGQVKTGISMSLLTVIEKLRERTDQNASDDDILKELQDNAQCQPNSDTSLSGNNVVEYIPNAERPYRCRLCHYTSGNKGYIKQHLRVHRQRQPYQCPICEHIADNSKDLESHMIHHCKTRIYQCKQCEESFHYKSQLRNHEREQHSLPDTLSIATSNEPRISSDTADGKCVQEGNKSSVQKQYRCDVCDYTSTTYVGVRNHRRIHNSDKPYRKEFRCSLCGYVCSHPPSLKSHMWKHASDQNYNYEQVNKAINDAISQSGRVLGKSPGKTQLKSSEESADPVTGSSENAVSSSELMSQTPSEVLGTNENEKLSPTSNTSYSLEKISSLAPPSMEYCVLLFCCCICGFESTSKENLLDHMKEHEGEIVNIILNKDHNTALNTN

SEQ ID NO: 52079 - DNA, 2862 bp, Artificial Sequence
  derived and/or modified sequence
atggaggagagcagcagcgtggccatgctggtgcccgacatcggcgagcaggaggccatcctgaccgccgagagcatcatcagccccagcctggagatcgacgagcagagaaagaccaagcccgaccccctgatccacgtgatccagaagctgagcaagatcgtggagaacgagaagagccagaagtgcctgctgatcggcaagaagagacccagaagcagcgccgccacccacagcctggagacccaggagctgtgcgagatccccgccaaggtgatccagagccccgccgccgacaccagaagagccgagatgagccagaccaacttcacccccgacaccctggcccagaacgagggcaaggccatgagctaccagtgcagcctgtgcaagttcctgagcagcagcttcagcgtgctgaaggaccacatcaagcagcacggccagcagaacgaggtgatcctgatgtgcagcgagtgccacatcaccagcagaagccaggaggagctggaggcccacgtggtgaacgaccacgacaacgacgccaacatccacacccagagcaaggcccagcagtgcgtgagccccagcagcagcctgtgcagaaagaccaccgagagaaacgagaccatccccgacatccccgtgagcgtggacaacctgcagacccacaccgtgcagaccgccagcgtggccgagatgggcagaagaaagtggtacgcctacgagcagtacggcatgtacagatgcctgttctgcagctacacctgcggccagcagagaatgctgaagacccacgcctggaagcacgccggcgaggtggactgcagctaccccatcttcgagaacgagaacgagcccctgggcctgctggacagcagcgccgccgccgcccccggcggcgtggacgccgtggtgatcgccatcggcgagagcgagctgagcatccacaacggccccagcgtgcaggtgcagatctgcagcagcgagcagctgagcagcagcagccccctggagcagagcgccgagagaggcgtgcacctgagccagagcgtgaccctggaccccaacgaggaggagatgctggaggtgatcagcgacgccgaggagaacctgatccccgacagcctgctgaccagcgcccagaagatcatcagcagcagccccaacaagaagggccacgtgaacgtgatcgtggagagactgcccagcgccgaggagaccctgagccagaagagattcctgatgaacaccgagatggaggagggcaaggacctgagcctgaccgaggcccagatcggcagagagggcatggacgacgtgtacagagccgacaagtgcaccgtggacatcggcggcctgatcatcggctggagcagcagcgagaagaaggacgagctgatgaacaagggcctggccaccgacgagaacgccccccccggcagaagaagaaccaacagcgagagcctgagactgcacagcctggccgccgaggccctggtgaccatgcccatcagagccgccgagctgaccagagccaacctgggccactacggcgacatcaacctgctggaccccgacaccagccagagacaggtggacagcaccctggccgcctacagcaagatgatgagccccctgaagaacagcagcgacggcctgaccagcctgaaccagagcaacagcaccctggtggccctgcccgagggcagacaggagctgagcgacggccaggtgaagaccggcatcagcatgagcctgctgaccgtgatcgagaagctgagagagagaaccgaccagaacgccagcgacgacgacatcctgaaggagctgcaggacaacgcccagtgccagcccaacagcgacaccagcctgagcggcaacaacgtggtggagtacatccccaacgccgagagaccctacagatgcagactgtgccactacaccagcggcaacaagggctacatcaagcagcacctgagagtgcacagacagagacagccctaccagtgccccatctgcgagcacatcgccgacaacagcaaggacctggagagccacatgatccaccactgcaagaccagaatctaccagtgcaagcagtgcgaggagagcttccactacaagagccagctgagaaaccacgagagagagcagcacagcctgcccgacaccctgagcatcgccaccagcaacgagcccagaatcagcagcgacaccgccgacggcaagtgcgtgcaggagggcaacaagagcagcgtgcagaagcagtacagatgcgacgtgtgcgactacaccagcaccacctacgtgggcgtgagaaaccacagaagaatccacaacagcgacaagccctacagatgcagcctgtgcggctacgtgtgcagccacccccccagcctgaagagccacatgtggaagcacgccagcgaccagaactacaactacgagcaggtgaacaaggccatcaacgacgccatcagccagagcggcagagtgctgggcaagagccccggcaagacccagctgaagagcagcgaggagagcgccgaccccgtgaccggcagcagcgagaacgccgtgagcagcagcgagctgatgagccagacccccagcgaggtgctgggcaccaacgagaacgagaagctgagccccaccagcaacaccagctacagcctggagaagatcagcagcctggccccccccagcatggagtactgcgtgctgctgttctgctgctgcatctgcggcttcgagagcaccagcaaggagaacctgctggaccacatgaaggagcacgagggcgagatcgtgaacatcatcctgaacaaggaccacaacaccgccctgaacaccaactag

SEQ ID NO: 52080 - DNA, 2874 bp, Artificial Sequence
  derived and/or modified sequence
atggaggagagcagcagcgtggccatgctggtgcccgacatcggcgagcaggaggccatcctgaccgccgagagcatcatcagccccagcctggagatcgacgagcagagaaagaccaagcccgaccccctgatccacgtgatccagaagctgagcaagatcgtggagaacgagaagagccagaagtgcctgctgatcggcaagaagagacccagaagcagcgccgccacccacagcctggagacccaggagctgtgcgagatccccgccaaggtgatccagagccccgccgccgacaccagaagagccgagatgagccagaccaacttcacccccgacaccctggcccagaacgagggcaaggccatgagctaccagtgcagcctgtgcaagttcctgagcagcagcttcagcgtgctgaaggaccacatcaagcagcacggccagcagaacgaggtgatcctgatgtgcagcgagtgccacatcaccagcagaagccaggaggagctggaggcccacgtggtgaacgaccacgacaacgacgccaacatccacacccagagcaaggcccagcagtgcgtgagccccagcagcagcctgtgcagaaagaccaccgagagaaacgagaccatccccgacatccccgtgagcgtggacaacctgcagacccacaccgtgcagaccgccagcgtggccgagatgggcagaagaaagtggtacgcctacgagcagtacggcatgtacagatgcctgttctgcagctacacctgcggccagcagagaatgctgaagacccacgcctggaagcacgccggcgaggtggactgcagctaccccatcttcgagaacgagaacgagcccctgggcctgctggacagcagcgccgccgccgcccccggcggcgtggacgccgtggtgatcgccatcggcgagagcgagctgagcatccacaacggccccagcgtgcaggtgcagatctgcagcagcgagcagctgagcagcagcagccccctggagcagagcgccgagagaggcgtgcacctgagccagagcgtgaccctggaccccaacgaggaggagatgctggaggtgatcagcgacgccgaggagaacctgatccccgacagcctgctgaccagcgcccagaagatcatcagcagcagccccaacaagaagggccacgtgaacgtgatcgtggagagactgcccagcgccgaggagaccctgagccagaagagattcctgatgaacaccgagatggaggagggcaaggacctgagcctgaccgaggcccagatcggcagagagggcatggacgacgtgtacagagccgacaagtgcaccgtggacatcggcggcctgatcatcggctggagcagcagcgagaagaaggacgagctgatgaacaagggcctggccaccgacgagaacgccccccccggcagaagaagaaccaacagcgagagcctgagactgcacagcctggccgccgaggccctggtgaccatgcccatcagagccgccgagctgaccagagccaacctgggccactacggcgacatcaacctgctggaccccgacaccagccagagacaggtggacagcaccctggccgcctacagcaagatgatgagccccctgaagaacagcagcgacggcctgaccagcctgaaccagagcaacagcaccctggtggccctgcccgagggcagacaggagctgagcgacggccaggtgaagaccggcatcagcatgagcctgctgaccgtgatcgagaagctgagagagagaaccgaccagaacgccagcgacgacgacatcctgaaggagctgcaggacaacgcccagtgccagcccaacagcgacaccagcctgagcggcaacaacgtggtggagtacatccccaacgccgagagaccctacagatgcagactgtgccactacaccagcggcaacaagggctacatcaagcagcacctgagagtgcacagacagagacagccctaccagtgccccatctgcgagcacatcgccgacaacagcaaggacctggagagccacatgatccaccactgcaagaccagaatctaccagtgcaagcagtgcgaggagagcttccactacaagagccagctgagaaaccacgagagagagcagcacagcctgcccgacaccctgagcatcgccaccagcaacgagcccagaatcagcagcgacaccgccgacggcaagtgcgtgcaggagggcaacaagagcagcgtgcagaagcagtacagatgcgacgtgtgcgactacaccagcaccacctacgtgggcgtgagaaaccacagaagaatccacaacagcgacaagccctacagaaaggagttcagatgcagcctgtgcggctacgtgtgcagccacccccccagcctgaagagccacatgtggaagcacgccagcgaccagaactacaactacgagcaggtgaacaaggccatcaacgacgccatcagccagagcggcagagtgctgggcaagagccccggcaagacccagctgaagagcagcgaggagagcgccgaccccgtgaccggcagcagcgagaacgccgtgagcagcagcgagctgatgagccagacccccagcgaggtgctgggcaccaacgagaacgagaagctgagccccaccagcaacaccagctacagcctggagaagatcagcagcctggccccccccagcatggagtactgcgtgctgctgttctgctgctgcatctgcggcttcgagagcaccagcaaggagaacctgctggaccacatgaaggagcacgagggcgagatcgtgaacatcatcctgaacaaggaccacaacaccgccctgaacaccaactag

SEQ ID NO: 52081 - DNA, 2862 bp, Artificial Sequence
  derived and/or modified sequence
atggaggagtcctcctcagtggcaatgctggtacctgatattggcgaacaggaggccattctcacggccgaatccatcattagtccaagcctggaaattgacgagcaaagaaagactaagccagatcccttgatacatgtcatccagaagcttagtaaaattgttgaaaacgagaagtcccagaaatgccttcttattggaaagaagaggccccgcagttccgcagcaacacattctctcgaaacgcaggaactctgtgagattcccgccaaagtcatccagtcccctgccgcggacacccgacgggctgaaatgtcccaaacaaactttactcctgacaccttggcccaaaatgaagggaaggcaatgtcctaccagtgtagcctctgtaagttcctgtccagttcattttccgttctcaaagatcacataaaacagcacggacagcagaacgaagtgattttaatgtgcagcgagtgtcacataacgtcccggtctcaggaggagctcgaagcacacgtggtgaatgatcatgacaatgacgcgaatatccacactcaatccaaagctcagcagtgcgtgtccccatcctcctcactgtgtagaaagacaactgagagaaatgaaacaatccctgatatccccgtgtccgtcgataatttgcaaactcataccgtgcaaacagcttcagttgcagagatgggacggaggaagtggtacgcttacgagcagtatggaatgtacaggtgtctgttctgcagctacacttgcggacaacagcgcatgctgaagacacacgcttggaaacacgcaggagaagtggactgctcctacccaatatttgaaaatgagaacgagccccttggacttttggattcttccgccgccgccgccccggggggggtcgacgccgtggtgattgccattggcgagagcgagctgtctattcacaacggtcctagtgtgcaagtacagatctgctcctccgagcagctgtcaagttccagccccctggagcagagtgcggagcggggcgtgcacctgtctcaaagtgttactctggaccctaacgaagaggaaatgttggaagtgatatctgacgctgaagagaacctcattcccgactccttactgacctctgcgcaaaagataatttcttcttcgcctaacaaaaagggccacgtgaacgtcattgttgagcgattgcccagtgcagaggagacgctcagccaaaaacggtttttgatgaacacagagatggaggaagggaaagatctgtcactcacagaagctcagataggccgggaaggaatggatgacgtgtaccgagccgataaatgtaccgtggatataggggggctcataatcggctggtcctcgtccgagaagaaggatgagctcatgaataagggactggcaaccgacgaaaacgcccctcctggacgacgaaggacaaacagtgagagtcttcggttacattccttagccgcagaagctctagtcacgatgccgatccgtgcggctgagctcacgagagcaaacctggggcactatggtgacattaacctcctggaccctgacacctctcagcgccaggttgacagtactctagctgcttattctaagatgatgtcgcctctcaagaactcttctgatggccttacatctctcaatcagagcaactctactttggtcgccctccccgagggcaggcaggagttatccgatggacaggtcaagactggtatcagcatgtctcttcttacagtgatagagaaattacgcgaacggacggaccagaatgccagcgatgatgacatactgaaggagttgcaggataacgcccagtgccaaccaaattccgatacctctctgtctggtaataatgttgtagaatacatcccaaacgccgagaggccatacaggtgccggctgtgtcactacaccagcggtaataaggggtatatcaagcagcatctgcgagtacaccgccagaggcagccttaccaatgtcccatttgtgaacacattgccgacaactctaaggacctagaaagtcacatgattcaccattgcaagacccgcatctaccagtgtaagcaatgtgaagaaagcttccactataaatctcaactgcgcaaccatgaacgagagcaacactccttgcctgacaccctgtctattgcaacaagcaatgagccgaggataagtagtgacactgccgatggaaaatgtgttcaggaaggaaacaagtccagcgtgcagaagcagtaccggtgcgatgtctgcgactatacgagtaccacgtacgtaggcgtccgcaatcaccgacgcatccacaatagcgacaaaccgtatagatgctcgctgtgcggctacgtgtgctctcacccccccagccttaagtctcatatgtggaagcacgctagcgatcagaattacaattacgaacaagttaataaggcaatcaacgatgccatttcccagtctggaagagtcctcggcaagtctcccggcaagacccagctgaagtcatcagaggaatccgctgacccggtgaccggatcctctgaaaatgctgttagctccagcgaactgatgtctcaaacgccatcagaagtgctggggaccaacgagaatgaaaagctgagccccacaagtaacacttcttattccctggaaaagattagcagtctggctcctccttccatggagtactgcgtgctgctcttttgctgctgtatttgcggctttgaatcaaccagtaaggaaaatctgctggaccacatgaaagagcacgagggagagatagtgaacattattcttaacaaagaccataatactgccctgaacactaactag

SEQ ID NO: 52082 - DNA, 2862 bp, Artificial Sequence
  derived and/or modified sequence
atggaagaatccagttcagtcgccatgcttgtgcccgatattggcgaacaggaggcaattctcacagctgagagcatcatttcccccagtctggaaatcgatgagcagcgaaagaccaagcccgatcctctgatccacgtgattcagaagttaagtaagattgttgagaatgagaaatcgcaaaaatgtttgttgatcgggaaaaagcgcccccgctcttccgctgccacacatagcctcgaaactcaggagctgtgcgaaattccagctaaagtgatccagtcacctgccgccgacacacggagggcagaaatgtcccagacaaactttacaccagacaccttagcccagaatgaggggaaggctatgagctaccagtgctccctctgcaagttcctgtcctctagcttttcggtgctgaaggatcatattaaacagcacggacaacagaacgaggttattctcatgtgtagtgagtgccacataacctcaagatctcaggaggagctggaagctcacgtggtgaacgaccacgacaatgacgctaatattcatacacagtccaaagcgcagcagtgcgtgagcccctcatcctccttgtgtcgaaaaactaccgaacggaacgagactatacctgacatccccgtgtctgtcgacaatttacagacccatacagtgcaaaccgcgtctgtagccgaaatgggacgtagaaagtggtacgcatacgaacagtacggcatgtatcggtgtctgttctgcagctacacttgcggccagcagagaatgctgaagacacacgcctggaagcacgccggtgaggtggactgtagttaccctatctttgaaaacgaaaacgagccactggggctgctagacagctcagctgctgccgctccagggggcgttgatgctgtggtcattgccataggggagagtgaactgagcatccacaacggaccatccgtacaggtgcaaatctgcagttcagagcaactcagctcttcctccccgctggagcagtcagcagaaaggggagtgcatctgagccaatctgtgaccctggaccctaatgaagaagaaatgctggaggtgatctctgacgctgaagagaacttgatccccgatagtttgctgacaagcgcacaaaagataatctctagctccccaaataagaaaggtcatgtaaacgttatagtggaacggctgccttctgcagaggagacactctcacagaagcgctttctgatgaacacagagatggaggagggcaaggacctctcgcttacagaagctcagattgggagggagggcatggacgatgtttaccgtgccgacaaatgcactgtggatattggtggcttaatcatcgggtggtccagctccgaaaagaaggatgaactgatgaataaggggcttgccactgacgaaaacgctccccctggtcgaaggagaaccaatagcgaatctctccgactccatagtctcgccgccgaagcgctggtaaccatgcctattagggctgctgagttgacgcgggccaacctcggtcattatggagacatcaacctgctagatccagacacatcacagcggcaggttgatagtactctggctgcttatagcaagatgatgagccccctgaagaattcatccgatggcctgacatccctcaatcagtcgaactcaacccttgtggccttgccagaaggcaggcaggagctgtccgacggtcaggtcaagactggaatttctatgtctttgttgaccgtaatcgagaagctgagagagcgcaccgaccaaaatgccagcgacgatgatatcctgaaggaactccaggacaacgctcagtgccagcctaactccgacacatcattgtcggggaataatgtagttgagtacatccctaatgcagaaagaccctatagatgtcggctatgccattacaccagcggaaataaaggctacataaaacagcacctgcgggtgcaccggcagaggcagccataccaatgtcccatttgcgagcatatagccgacaatagcaaagacctggagtcccatatgatacaccattgcaagaccaggatctatcaatgtaagcagtgtgaggagtcatttcactacaagagtcagctgaggaaccacgagagggaacaacacagcctgcctgatacactgtcaatcgcaacatcaaacgagccccgtatctcaagtgatacagccgacgggaagtgtgtgcaggaagggaacaaatcctccgtgcaaaaacagtacagatgcgacgtgtgtgactacacgagtacaacttatgtcggagtacgcaaccacaggcggatccataattcagataaaccatataggtgctctctgtgtgggtacgtctgttcccatccacctagcctgaaatcccacatgtggaaacacgctagcgatcagaactacaactacgaacaagtgaataaagcaattaatgatgcgatttcacagtccggacgagttctaggtaagtcacccggtaaaactcagttaaagtcatctgaagaaagcgccgaccccgtgacgggctcaagtgaaaatgctgtttcatcatccgaactcatgtcacagacacccagtgaagttttaggtactaatgaaaacgagaagttatcgccaacatcaaatacttcctactcactcgagaagatcagttctttggcgcccccctctatggaatactgcgtgttgttgttctgctgctgtatctgcggcttcgagtcaacctctaaggagaatcttttagatcacatgaaggaacacgagggggagatcgtgaacattatcctgaataaggaccataacacggccctgaacactaactag

SEQ ID NO: 52083 - DNA, 2874 bp, Artificial Sequence
  derived and/or modified sequence
atggaagagtcttctagtgtagcaatgctggtacccgacattggcgagcaggaggctatccttactgccgagtccattattagccccagcctggaaattgacgagcagcgaaagactaagcccgaccctctcattcacgtcattcaaaagttgtccaaaatagtcgagaatgaaaaatcacagaagtgtcttctcatcggcaaaaaaagacctcgttctagtgctgccactcacagtctcgaaacacaggagttgtgtgagatcccggctaaggttatacagtctccagccgcggacactcgcagggctgagatgtcccagaccaacttcacacccgacacattagcccagaatgagggcaaggccatgagctatcaatgcagcctgtgtaaatttttgtcctcctccttctctgttctgaaggatcatattaagcagcatggacagcagaatgaagtcattctgatgtgttcagaatgccatattacatcaaggtcccaagaggaactggaagcccacgtcgttaacgatcatgacaacgacgcgaatattcatacacaatcaaaggctcagcaatgcgtaagtccatctagctctctctgcaggaagaccacggagcgcaacgagaccatccccgacattcctgtgagcgtcgacaatctccagacgcatacggtgcagacggcctctgtggcagaaatgggaagacgtaaatggtacgcctatgaacagtacggcatgtacaggtgcctgttctgcagctacacgtgcggccaacaacgtatgctaaagacccacgcctggaaacatgccggcgaggtggattgcagttatccgatcttcgaaaacgagaatgaacccctgggtttgttggacagcagtgccgcagccgcccccggtggggtagatgctgtggttatagccatcggcgaaagcgagctttctattcacaatggaccttctgttcaagtacagatctgctcctcagagcaactgagctccagtagccccctggaacaaagcgcagaacggggagtgcacttgtctcaatctgtaaccctcgatcccaatgaggaggaaatgctggaggtcatttcagacgccgaggagaacctaatacccgattcactccttacatccgcacaaaaaatcatatcttccagccctaataagaaagggcacgtgaatgtgattgtagaacgactgcccagtgccgaagagacattgtctcagaaacgcttcctgatgaatactgagatggaggagggcaaggatcttagcctgacggaggcccaaattggcagggagggcatggacgatgtgtaccgagctgataaatgcaccgtggacatcggtggcctcataatcggttggtcttcatcggaaaaaaaggatgagcttatgaacaaaggcctggcaaccgacgagaacgcccctcctggcaggcggagaaccaacagcgagtcattgcgcctgcattctctggccgcagaagccctagtaaccatgcctattagggctgccgagctgacccgcgccaatctcgggcactacggtgacatcaatctacttgaccccgatacctcacagcggcaagtggactcaactctggcagcctatagtaagatgatgagccctctcaaaaacagttctgacgggctgacctccctgaatcaaagtaactccacactagtcgctttgcccgagggccggcaggagctgtccgacggccaggtaaagacaggcattagtatgtcattgctgacagtgatagagaaactacgcgagagaacagatcaaaatgcctccgatgacgatattctgaaagagctccaggacaatgctcaatgccaaccgaactcggatacatctcttagtggtaataacgtcgttgagtacatacctaatgcggaacgaccttaccgatgtcgcctatgccactacacgtccggtaataaaggatatatcaagcagcatctgagggtacacagacaacggcaaccgtatcaatgccccatctgcgaacatatagctgacaactctaaagacctggaatctcacatgatccaccactgcaagacgagaatttaccagtgtaagcagtgcgaagaaagtttccattataagagtcagttaaggaaccacgagagggaacaacactccctgcccgataccctatcaatcgctacatcaaacgaacctagaatctcttccgacactgccgatggaaagtgtgtgcaggagggaaacaaatcctctgtacagaaacagtacaggtgcgatgtctgcgactacacttcgaccacatacgtcggggttagaaatcatagacgaattcacaatagcgataagccctatagaaaagagttcaggtgctccctgtgcgggtacgtgtgctcccacccccccagtctaaaatctcacatgtggaagcacgctagcgatcagaactacaactacgagcaggtaaacaaggccatcaacgacgctatcagccagtccggccgtgttctgggcaagtctcctggaaaaactcagctcaagtcgtccgaggagagcgcggacccggtaactggtagcagcgaaaacgctgttagcagttccgaactcatgtcacagaccccatcggaggtgctggggactaacgagaatgagaaactgagccccacctcaaacacttcttattctctggagaaaataagcagccttgctcctccttctatggagtattgtgtgctcctgttttgttgttgtatttgcgggttcgagtcaacgtcaaaagagaatctgctcgaccacatgaaggaacatgaaggggagatcgttaacattatcttgaacaaagatcataacactgccttaaacactaactag

SEQ ID NO: 52084 - DNA, 2862 bp, Artificial Sequence
  derived and/or modified sequence
atggaggagagcagctctgtggccatgctggtgcctgacatcggggagcaggaggccatcctgacagctgagagcatcatcagccccagcctggagattgatgagcagaggaagaccaagccagaccccctcatccacgtgatccagaagctgagcaagatcgtggagaatgagaagagccagaagtgcctgctgattggcaagaagaggcccaggagcagcgctgccacccacagcctggagacccaggagctgtgtgagatcccagccaaggtgatccagagccctgctgctgacaccaggagagctgagatgagccagaccaacttcaccccagacaccctggcccagaatgaaggcaaggccatgagctaccagtgcagcctgtgcaagttcctgagcagcagcttctctgtgctgaaggaccacatcaagcagcacggccagcagaatgaagtcatcctgatgtgcagcgagtgccacatcaccagccgcagccaggaggagctggaggcccacgtggtgaatgaccatgacaatgatgccaacatccacacccagagcaaggcccagcagtgtgtgagccccagcagcagcctgtgcaggaagaccacagaaagaaatgagaccatcccagacatccctgtgtctgtggacaacctgcagacccacacagtgcagacagcctctgtggccgagatgggccgcaggaagtggtacgcctatgagcagtatggcatgtaccgctgcctcttctgcagctacacctgtggccagcagaggatgctgaagacccacgcctggaagcatgctggggaggtggactgcagctaccccatctttgaaaatgaaaatgagcccctgggcctgctggacagcagcgctgctgctgcccctggaggagtggatgctgtggtgattgccatcggggagagcgagctgagcatccacaacggccccagcgtgcaggtgcagatctgcagcagcgagcagctgagcagcagcagccccctggagcagagcgctgagcggggcgtgcacctgagccagagcgtgaccctggaccccaatgaggaggagatgctggaggtgatcagtgatgctgaggagaacctgatcccagacagcctgctgaccagcgcccagaagatcatcagcagcagccccaacaagaagggccacgtgaatgtcatcgtggagcggctgcccagcgctgaggagaccctgagccagaagcgcttcctgatgaacacagagatggaggagggcaaggacctgagcctgacagaggcccagatcggccgggagggcatggatgatgtgtacagagctgacaagtgcaccgtggacattggaggcctcatcatcggctggagcagcagcgagaagaaggatgagctgatgaacaagggcctggccacagatgaaaatgcccctcctggaagaagaaggaccaacagcgagagcctgcggctgcacagcctggccgctgaggccctggtgaccatgcccatccgggctgctgagctgacccgggccaacctgggccactacggggacatcaacctgctggaccctgacaccagccagaggcaggtggacagcaccctggccgcctacagcaagatgatgagccccctgaagaacagcagtgatggcctgaccagcctgaaccagagcaacagcaccctggtggccctgcctgagggccggcaggagctgagtgatggccaggtgaagacaggcatctccatgagcctgctgactgtgattgagaagctgcgggagaggacagaccagaatgccagtgatgatgacatcctgaaggagctgcaggacaatgcccagtgccagcccaacagcgacaccagcctgagcggcaacaacgtggtggagtacatccccaatgctgagcggccctaccgctgccgcctgtgccactacaccagcggcaacaagggctacatcaagcagcacctgcgggtgcaccggcagaggcagccctaccagtgccccatctgtgagcacatcgctgacaacagcaaggacctggagagccacatgatccaccactgcaagacccgcatctaccagtgcaagcagtgtgaggagagcttccactacaagagccagctgagaaatcatgagcgggagcagcacagcctgcctgacaccctgagcatcgccaccagcaatgagccccgcatcagcagtgacacagcagatggaaaatgtgtgcaggagggcaacaagagctctgtgcagaagcagtaccgctgtgatgtgtgtgactacaccagcaccacctacgtgggcgtgaggaaccaccggcgcatccacaacagcgacaagccctaccgctgcagcctgtgtggctacgtgtgcagccacccccccagcctgaagagccacatgtggaagcacgccagtgaccagaactacaactatgagcaggtgaacaaggccatcaatgatgccatcagccagagcggccgggtgctgggcaagagccctgggaagacccagctgaagagcagcgaggagagcgctgaccctgtgacaggcagcagtgaaaatgctgtgagcagcagcgagctgatgagccagacccccagcgaggtgctgggcaccaatgaaaatgagaagctgagccccaccagcaacaccagctacagcctggagaagatcagcagcctggcccctccttccatggagtactgtgtgctgctcttctgctgctgcatctgtggctttgagagcaccagcaaggagaacctgctggaccacatgaaggagcatgaaggagaaattgtgaacatcatcctgaacaaggaccacaacacagccctgaacaccaactag

SEQ ID NO: 52085 - DNA, 2874 bp, Artificial Sequence
  derived and/or modified sequence
atggaggagagcagctctgtggccatgctggtgcctgacatcggggagcaggaggccatcctgacagctgagagcatcatcagccccagcctggagattgatgagcagaggaagaccaagccagaccccctcatccacgtgatccagaagctgagcaagatcgtggagaatgagaagagccagaagtgcctgctgattggcaagaagaggcccaggagcagcgctgccacccacagcctggagacccaggagctgtgtgagatcccagccaaggtgatccagagccctgctgctgacaccaggagagctgagatgagccagaccaacttcaccccagacaccctggcccagaatgaaggcaaggccatgagctaccagtgcagcctgtgcaagttcctgagcagcagcttctctgtgctgaaggaccacatcaagcagcacggccagcagaatgaagtcatcctgatgtgcagcgagtgccacatcaccagccgcagccaggaggagctggaggcccacgtggtgaatgaccatgacaatgatgccaacatccacacccagagcaaggcccagcagtgtgtgagccccagcagcagcctgtgcaggaagaccacagaaagaaatgagaccatcccagacatccctgtgtctgtggacaacctgcagacccacacagtgcagacagcctctgtggccgagatgggccgcaggaagtggtacgcctatgagcagtatggcatgtaccgctgcctcttctgcagctacacctgtggccagcagaggatgctgaagacccacgcctggaagcatgctggggaggtggactgcagctaccccatctttgaaaatgaaaatgagcccctgggcctgctggacagcagcgctgctgctgcccctggaggagtggatgctgtggtgattgccatcggggagagcgagctgagcatccacaacggccccagcgtgcaggtgcagatctgcagcagcgagcagctgagcagcagcagccccctggagcagagcgctgagcggggcgtgcacctgagccagagcgtgaccctggaccccaatgaggaggagatgctggaggtgatcagtgatgctgaggagaacctgatcccagacagcctgctgaccagcgcccagaagatcatcagcagcagccccaacaagaagggccacgtgaatgtcatcgtggagcggctgcccagcgctgaggagaccctgagccagaagcgcttcctgatgaacacagagatggaggagggcaaggacctgagcctgacagaggcccagatcggccgggagggcatggatgatgtgtacagagctgacaagtgcaccgtggacattggaggcctcatcatcggctggagcagcagcgagaagaaggatgagctgatgaacaagggcctggccacagatgaaaatgcccctcctggaagaagaaggaccaacagcgagagcctgcggctgcacagcctggccgctgaggccctggtgaccatgcccatccgggctgctgagctgacccgggccaacctgggccactacggggacatcaacctgctggaccctgacaccagccagaggcaggtggacagcaccctggccgcctacagcaagatgatgagccccctgaagaacagcagtgatggcctgaccagcctgaaccagagcaacagcaccctggtggccctgcctgagggccggcaggagctgagtgatggccaggtgaagacaggcatctccatgagcctgctgactgtgattgagaagctgcgggagaggacagaccagaatgccagtgatgatgacatcctgaaggagctgcaggacaatgcccagtgccagcccaacagcgacaccagcctgagcggcaacaacgtggtggagtacatccccaatgctgagcggccctaccgctgccgcctgtgccactacaccagcggcaacaagggctacatcaagcagcacctgcgggtgcaccggcagaggcagccctaccagtgccccatctgtgagcacatcgctgacaacagcaaggacctggagagccacatgatccaccactgcaagacccgcatctaccagtgcaagcagtgtgaggagagcttccactacaagagccagctgagaaatcatgagcgggagcagcacagcctgcctgacaccctgagcatcgccaccagcaatgagccccgcatcagcagtgacacagcagatggaaaatgtgtgcaggagggcaacaagagctctgtgcagaagcagtaccgctgtgatgtgtgtgactacaccagcaccacctacgtgggcgtgaggaaccaccggcgcatccacaacagcgacaagccctacaggaaggagttccgctgcagcctgtgtggctacgtgtgcagccacccccccagcctgaagagccacatgtggaagcacgccagtgaccagaactacaactatgagcaggtgaacaaggccatcaatgatgccatcagccagagcggccgggtgctgggcaagagccctgggaagacccagctgaagagcagcgaggagagcgctgaccctgtgacaggcagcagtgaaaatgctgtgagcagcagcgagctgatgagccagacccccagcgaggtgctgggcaccaatgaaaatgagaagctgagccccaccagcaacaccagctacagcctggagaagatcagcagcctggcccctccttccatggagtactgtgtgctgctcttctgctgctgcatctgtggctttgagagcaccagcaaggagaacctgctggaccacatgaaggagcatgaaggagaaattgtgaacatcatcctgaacaaggaccacaacacagccctgaacaccaactag

SEQ ID NO: 52086 - DNA, 2862 bp, Artificial Sequence
  derived and/or modified sequence
atggaggagagcagcagcgtggccatgctggtgcccgacatcggcgagcaggaggctatcctcaccgccgaatctatcatttccccctcccttgaaattgacgaacagcggaagacaaagcccgaccccctcattcatgtcatacaaaagctcagtaaaatcgtggagaacgagaagtcacagaagtgtctgctcataggtaagaagagaccaagatctagtgctgccacacactcacttgagactcaggagctctgcgagatccccgcaaaagtgatccaatcccctgcagcagacacccgcagagcggaaatgtcacaaaccaattttactccagacacgcttgctcaaaacgaaggcaaagcgatgagctatcagtgtagcctgtgtaaattcctgtcttcaagctttagtgtcctgaaagaccacatcaaacagcacgggcaacagaacgaggttatcttaatgtgctctgagtgtcacattactagtcggtctcaggaagagctcgaagctcacgtggtgaatgaccatgataacgacgccaatatccacacacagtcaaaggcacagcagtgtgttagcccatcctcctccctgtgtcggaaaactaccgagaggaacgagacaattcccgacattcctgtgagcgtcgataacctgcagacacacacggtgcagacagcttctgtggcagagatgggtaggcgcaaatggtacgcctatgaacagtatggtatgtacaggtgcctcttctgttcctatacttgcgggcagcagcgcatgctcaaaacacacgcatggaaacacgccggcgaagtggattgttcgtacccaatttttgagaatgaaaacgaacccttgggactcctggactctagcgctgcagcagcccctggcggcgtcgatgccgtcgtaattgcaatcggagaaagcgagctctccatccataatggcccgtctgttcaagtgcaaatttgttctagcgagcaactatcctcctcatcacctctcgaacagtccgccgagaggggggtccacctctcgcagagcgtgaccctggatcctaatgaagaggagatgctcgaggtgatcagtgacgccgaagaaaacctgatccccgactccctgctgactagcgcgcagaaaattatttccagctcaccaaataaaaagggccatgtcaatgttattgtggaaaggttgcccagtgcagaggagaccctatctcagaagagattcctaatgaatactgagatggaggagggaaaagacctatcactgactgaagcccaaatagggcgagagggcatggacgacgtgtaccgcgccgataagtgcactgtggatatcggagggttgattattggatggtcgagcagtgaaaagaaagatgaattaatgaacaagggccttgccactgacgagaatgccccccctggcagacggcgcaccaatagcgaatctctgcggcttcattctttggccgccgaggcgctggtcaccatgcccataagggctgctgagctgacaagggcgaacctgggacactacggcgatattaacctgctggaccctgatacgtcccagagacaggttgattccacactggcggcctattccaaaatgatgtcaccactcaaaaatagtagtgacggtcttacctctcttaaccagagcaatagcactctcgtggctctaccagagggaagacaagagctcagcgacgggcaggtgaagactggaatctccatgagtctgttgactgtaattgagaaactaagagaacgaacagaccaaaacgcttccgatgacgacatcctgaaggaattgcaggataacgcccagtgtcagccaaattccgatacttctttgtctggcaacaacgtggtggagtacatccctaatgctgaaaggccctaccgctgcaggttgtgccattatacctccgggaacaagggttatatcaagcagcatctgcgggttcaccgacaacggcagccttatcaatgccctatatgtgaacacattgccgataattctaaggatcttgaaagccacatgattcatcactgcaaaacaagaatctatcagtgcaagcaatgcgaggagtccttccattataagagccagctccggaatcatgaaagggagcagcactcgctgcccgacactttgagcattgcaaccagcaacgaaccccgaatttcttctgacaccgccgatggaaagtgcgttcaagaggggaacaaatcttctgtgcagaaacagtaccggtgtgatgtgtgcgattacaccagtactacatacgtgggggtgcgaaatcaccgaagaattcataacagcgataaaccctaccggtgctcattgtgcggctacgtttgtagtcacccaccctcactgaagagtcacatgtggaaacatgcttctgatcagaattacaattacgagcaggtgaacaaggctatcaacgacgcgattagtcagtctggacgagtccttggtaaatcacccggcaagactcaactgaaatcgtccgaggagagcgccgatcccgtgacaggctcttcagaaaacgctgtcagttcatcagagctgatgagccagacccctagtgaggtgctgggaaccaatgagaatgaaaagctttctccgacaagcaataccagctattctctcgaaaaaatctcgtctctagccccaccttccatggaatattgcgtgctgttgttctgttgttgtatttgcggatttgagtccacatccaaggaaaatctgttagaccatatgaaggagcacgagggggagattgtgaacatcatcctgaataaagaccacaacacagctctgaacaccaattag

SEQ ID NO: 52087 - DNA, 2862 bp, Artificial Sequence
  derived and/or modified sequence
atggaggagagcagcagcgtggccatgctggtgcccgacatcggcgagcaggaggcgattctgaccgcagagtccatcatcagtccttcgctggagatcgatgaacagcggaagacaaaacctgacccactgatccacgtaatccaaaagttatccaaaatagtggaaaacgagaaatctcagaagtgccttctgatcggaaagaagcgaccacgtagcagtgccgcaacccacagtctggaaacccaagagctttgtgaaattccagctaaggttatccagagcccggcagctgacactcggcgcgcggagatgagccaaaccaacttcacacccgacacactagctcagaacgagggcaaagccatgtcctatcagtgcagtctgtgtaaatttcttagtagcagcttttcagtgctaaaggaccatatcaagcagcacggccagcagaatgaagtcatactgatgtgctcagagtgtcatattacttctaggtcccaggaggagcttgaagcacacgtggtcaatgatcatgataacgatgccaatatacacactcagtccaaagcccagcagtgtgtcagtcctagctcatccttgtgtaggaaaactaccgaaagaaacgagaccatcccggacattccagtgtctgtggacaatctgcaaacccataccgtccaaactgcctcagtggccgagatgggacgaagaaagtggtacgcgtatgagcagtacgggatgtaccgctgtctcttctgttcatacacctgcggacagcagcggatgctgaagactcatgcctggaaacatgcaggagaggtggattgcagctatcctatattcgaaaatgagaacgagccactgggccttctagattcaagtgccgcagcggcacctggaggagtagatgccgtcgtgatcgcaatcggggagtccgagttgagtattcacaacggtccttctgttcaggttcagatttgttcctcagaacagctatcatcaagttctcccctggagcaaagtgccgagaggggcgtccatctctcgcaatctgtgaccctggaccctaacgaggaggagatgcttgaagtgatcagcgatgctgaggaaaacctcatccccgactccctgctcacttcagcccagaagatcatcagcagttcgcccaacaagaaaggacacgttaacgtgatagtggagagactcccttcagccgaagaaacattaagccagaaaagatttttgatgaacactgagatggaagaggggaaggatctttcacttacagaggctcagatcggcagggaaggcatggacgatgtgtaccgagccgacaaatgtactgtcgacattggtggcctcatcattgggtggtccagtagtgaaaagaaggacgaactgatgaacaaaggcctggctacagatgagaacgctccccccgggaggagacgcacaaactccgaatctctccgactgcatagcctcgccgcagaagccctcgtaacaatgcctatcagggcggcagaattaacacgggccaacctggggcattacggggacatcaacctgcttgatcccgacacgagtcagcgccaggtggacagtaccctcgctgcctatagtaagatgatgagcccgctcaagaactcctcagatggactaacatccttaaaccagtctaattcgacactggtagcactacccgagggccgtcaggagctgagcgatggacaggtgaaaaccggaatctcgatgtccttactgaccgtgatcgagaagctgcgcgaacgaaccgaccagaatgcctcagatgacgatatcttaaaggagctgcaggacaacgctcagtgccagcccaactctgacacatctctctcaggcaataacgttgttgaatatatccccaatgccgagcgaccctaccgctgtagactgtgtcattatacaagcggcaacaagggctacatcaaacagcatcttagggttcaccgtcagcgccagccgtaccagtgccccatatgcgagcatatcgccgacaatagcaaagacctagagtcccacatgatccaccactgcaagacaaggatctaccagtgtaagcagtgtgaggagtcctttcactataagagtcagctgaggaatcacgagcgcgagcagcatagcctcccagacaccttgagtattgccacctccaatgagcctcggatttcaagcgatactgcggacggcaagtgtgtgcaagaagggaataagagctccgttcagaagcagtatcggtgcgacgtgtgtgattatacaagcactacctatgtgggagttagaaatcatagaaggattcataatagcgacaagccttatagatgtagcctatgcgggtacgtctgcagccatcccccaagtctcaagagtcacatgtggaaacatgcctccgaccagaattataactatgagcaggttaacaaggccataaacgacgctatatctcagtcagggagagtcctgggcaagtctcctggaaagacacagcttaagtcttccgaggagagtgctgacccagttacaggctcctccgagaatgctgtgtcctctagcgaattgatgagtcagaccccgagtgaggtcttaggtaccaatgaaaacgaaaagctcagcccaacgagtaacacaagctactccctcgaaaagatcagctctctggccccaccaagcatggagtactgcgtactgctgttctgttgttgtatatgtggattcgagagtacaagcaaagagaacctgctcgaccatatgaaggaacacgagggagaaattgttaatataattcttaacaaggatcataataccgcactcaacaccaactag

SEQ ID NO: 52088 - DNA, 2874 bp, Artificial Sequence
  derived and/or modified sequence
atggaggagagcagcagcgtggccatgctggtgcccgacatcggcgagcaagaagcaattttaacagctgagagcataatctcaccatccctcgagattgatgagcagcggaagacgaaacctgaccccctgatccatgtaattcagaagctatccaagattgttgaaaatgagaagtcacaaaagtgcctgcttattgggaagaaaagaccacgctccagcgcggctacacactctctggagacacaggaattatgcgaaatcccggcaaaagtcatccaatcccctgccgcagacacccggagagcagagatgtcccagactaacttcacacctgacacactggcccagaatgagggcaaggccatgagttatcaatgctcactgtgcaagtttttgagctcatcatttagtgtactcaaggaccacattaagcagcatggacagcaaaatgaagtaattctgatgtgctctgagtgccatataacttctaggtcacaggaagaactggaggcacatgttgtcaatgatcacgataacgacgcaaacattcatacacaaagcaaggctcagcagtgcgtgtcacctagttcctccctttgtagaaagacaaccgaaagaaatgagacgattcccgacattccagtgtctgtggataatttacaaacacataccgttcagacagcctcagtggctgaaatgggaaggcgtaaatggtacgcctatgaacaatacggaatgtacaggtgcttattctgttcctacacatgcggccagcagcggatgctgaaaacccacgcttggaagcatgccggcgaggtggattgctcgtaccctatcttcgagaatgaaaacgagcctctgggattgctggacagtagcgccgcggctgctccaggtggagtggacgctgtcgtgattgcaattggagagtctgagctctccattcataatgggccctccgtccaggtgcagatctgctcttctgagcaactcagctcttcgtctcccctggagcagtccgccgagcggggcgtccatcttagtcaaagtgtcaccctggaccctaatgaagaggagatgttggaggttatcagcgacgccgaggagaacctgattcctgactcccttctcacaagtgcacagaagataatttcctcaagcccaaacaagaagggccatgtgaacgtgattgtggagcggctgccctccgctgaagagactctaagccagaagcggttcctgatgaatacagagatggaagagggtaaggacctgtctctgacagaagcacaaatcggacgggagggaatggatgacgtctaccgggcagacaagtgcactgtggacatcggtggactgatcatagggtggtctagctcggagaaaaaagatgagttgatgaacaagggcctggcaaccgacgaaaatgccccaccaggacgccgcagaacaaatagcgagtccctccgtctccactctctagccgcagaagccctggtgactatgccaatccgcgccgctgaattgaccagagctaacctgggacactacggagacattaacctgttggatcccgatacatcccaaagacaggtcgacagcaccctggcagcttactccaaaatgatgagccctcttaagaactctagtgatggactaacttcactcaatcagagcaactcgactctggttgcacttccagaaggaagacaggagctgagcgacggccaagtgaaaactggcatctctatgagcctcctgactgtgatcgagaaacttcgcgaacgcacagatcagaatgccagtgacgacgacatcctgaaggagctacaagataacgctcagtgccagccaaactctgacaccagtctaagtgggaacaacgttgttgagtacattcctaacgccgaacggccctatcgatgtaggctctgccactacacgagcgggaacaagggctatatcaagcagcacctgcgcgtgcaccgacaacggcagccatatcagtgtcccatttgtgaacatattgcggacaattctaaagacctggagagccacatgattcaccattgtaaaacccgcatctaccaatgcaaacagtgcgaagaatccttccattataagtcgcagctgcgaaaccacgaacgcgaacagcattccttacccgataccttatctattgctacaagcaatgagccacggatttcaagcgataccgcagatggcaagtgcgtccaggagggtaataagtcttcagttcagaagcagtacaggtgcgatgtctgcgattatacatcaacaacatatgtgggcgtacggaaccatagacggatccacaatagcgacaaaccctaccgcaaggaatttcgttgtagtctgtgtggatatgtatgtagtcatccaccttccctgaaatcccatatgtggaagcatgcctctgaccagaactacaattacgaacaggtcaataaagcaatcaacgacgccatctcacagtccggcagggtgttaggcaaatccccgggaaagactcagctcaaaagctcagaagaaagtgcagaccccgttacaggctcttcggagaatgccgtgtcttcatccgaactgatgagtcagaccccgagcgaggtcctgggcaccaatgagaatgagaagctctcccccacctcaaacacgtcatattcattggaaaaaatctcttcactggcccccccctctatggaatactgcgtgcttttgttctgttgttgtatatgcggtttcgagtcaacttctaaagagaatctgctggaccatatgaaggaacacgaaggcgagatcgtgaatattatcttgaacaaggatcataatacagcacttaacaccaactag

SEQ ID NO: 52089 - DNA, 2862 bp, Artificial Sequence
  derived and/or modified sequence
atggaggaatcctcctcagtggcaatgctcgtgcctgacatcggcgagcaggaagctatactcacggccgagagcatcataagcccttcgctggaaatagacgaacagcgaaaaacaaagcccgatcccttgatccacgttattcagaagctcagcaagattgtggagaacgaaaagagtcaaaaatgcctgttgattggtaagaagagacctcgaagctccgctgccacacattctctggaaacgcaggagctctgcgaaattcccgcaaaggtgatccagagcccagccgctgataccaggagagccgaaatgtcccagaccaatttcactccggacactcttgcccaaaacgagggaaaagctatgtcctatcaatgttccctgtgcaagttcctctcctccagttttagcgtgttgaaagaccatatcaagcagcatggccagcaaaacgaggtcatccttatgtgtagtgagtgccacatcacatcaaggtcccaggaggagctcgaggcacacgtggtgaacgatcatgataatgatgcaaacatacacacccagtccaaagctcagcagtgcgtctctccctccagtagcctgtgccgcaaaaccacagagaggaacgaaactattcctgatattccggtgagcgtcgataaccttcaaacccacaccgtccaaacagccagcgtagccgaaatgggtaggagaaagtggtacgcctatgagcagtacggaatgtaccgctgcttgttttgctcttatacctgtggtcagcagagaatgttaaagacacacgcttggaaacacgctggggaagttgattgctcgtaccccatattcgaaaatgaaaacgaaccactcgggctgctggattcttcggctgccgcagccccaggtggcgttgatgccgttgtgatcgccattggagagagcgaattgagcattcacaatggaccgtccgtacaagttcagatctgctccagcgaacagctatccagcagctcgccccttgagcagtccgccgaaagaggagtccacctctcccagtcagtgacactggatccgaatgaggaggaaatgctggaggtcatatccgatgccgaggagaacctcatcccagacagcctcctgacctccgcccaaaaaattatttcctcaagtcccaacaaaaaaggtcatgtgaacgtgatcgtagaaagactgccaagcgccgaggagacactgtcccagaaacgcttcctgatgaacacagagatggaggagggcaaagatctctccctgaccgaggcccagataggtagagaggggatggatgacgtgtacagggctgataagtgtaccgttgatatcgggggactaattattggttggagcagttccgagaaaaaagatgagctgatgaacaaggggctggccaccgatgagaatgctccgcctggtcgacgtcggaccaattctgaatccctgcgactacatagcctcgctgccgaggccctcgtaaccatgccaattagggccgcagagctgaccagggctaacctgggacactatggagatatcaatctcctggacccggatacgagccagcgccaggtagactccactctcgcagcctattctaagatgatgtctcctctcaagaattctagtgacggactgacatccttaaaccagtctaactccacactcgtcgcgctgcccgagggccgacaagaactgtctgatggccaggtcaaaactggcatcagtatgagtctcctgacagtgatagagaaattgcgggagagaaccgaccaaaacgcttcagacgatgatatactgaaagagctgcaggacaatgcccagtgccagcctaattccgatacttccctgtccggtaataacgttgttgaatatattcctaatgctgaacggccataccgctgccgcctttgccactacacatcaggcaataaaggatatatcaaacagcatctaagagtgcacaggcagaggcagccatatcagtgccccatctgcgagcacatcgccgacaactccaaggacctagagagtcacatgatccatcattgtaaaaccaggatttatcagtgtaagcagtgcgaagagtcctttcactacaagtcccagctgcgtaaccatgaacgtgaacaacatagcttgcccgacaccttgagcatcgccacaagtaatgaaccgcgtatttcgagcgataccgccgacggtaaatgcgtgcaagagggaaacaaatcaagcgtgcagaagcaatatcgttgcgacgtctgcgattatacaagtaccacttacgttggagttaggaatcatcgaaggatccataacagcgataaaccctaccggtgttccctatgtggatacgtgtgtagtcatccaccctcattaaagtcccatatgtggaaacacgcctccgaccagaactacaactacgaacaagtgaacaaggctattaatgatgcaattagtcaatccggtagagtcctgggcaaatcacccggaaagacacagctgaaaagttctgaagaaagtgcagatcctgtcacggggtccagtgagaatgcagtctcctcgagcgaactcatgagtcagactccctcagaagttctcggcacaaatgagaatgaaaagctctctccaacatctaacacttcttactccctggagaaaattagcagcctagcccctccaagtatggaatattgcgtgctcctattctgctgttgtatatgcgggttcgagagcacatctaaagaaaacctgctggatcacatgaaggagcatgagggggaaatcgtgaatattatcctgaataaagatcataacaccgccctcaatacaaactag

SEQ ID NO: 52090 - DNA, 2862 bp, Artificial Sequence
  derived and/or modified sequence
atggaggaatccagcagtgtcgctatgcttgtgccggatatcggagagcaagaagccatcctaactgcagaatccatcatttctccttcacttgagatagatgagcagcggaaaacgaaaccggatcctctgatccacgtaatccagaagctgtctaagatcgtagaaaacgaaaagagccagaagtgccttctcataggtaagaagcgacccagatccagcgccgctacacattcactggagacacaagagctctgcgaaattcccgctaaggtgatccaaagtccagcggctgataccagacgggcagagatgagtcagactaatttcacgcctgacactttggcgcagaatgagggaaaggcaatgagctaccagtgttctctgtgcaagtttctctcaagctcgttcagtgttttaaaggaccacattaagcagcatggccagcagaacgaggtgatactgatgtgtagcgaatgccacatcactagccgcagccaggaagagctggaagcccatgtggtaaatgaccatgataatgacgccaatatccacactcagagtaaggcacagcagtgcgtatccccttcctcgagcttatgtcgcaaaacaacagagcgtaacgaaacaatcccggatatccccgtgtccgtggataacctccagacccacacagtgcagactgcatccgttgccgaaatggggaggcgcaaatggtatgcatatgaacagtacggtatgtacaggtgtctcttttgttcctatacttgcgggcagcagcgcatgctcaagacccacgcatggaagcacgccggtgaagtggactgctcttatccaatcttcgagaacgagaatgaaccgcttggccttctggacagcagcgcagccgctgcgccagggggagtggatgcggttgtaatcgccattggagagagcgagctgtccattcataatggcccttcagtccaggtccaaatttgcagcagtgagcagctttcttcctcctcccccctggaacagtcagctgaacggggagtgcatctgagccaatccgtaacattggatcctaacgaggaagagatgctagaggtcatctccgatgcagaggagaacctcatccctgattcactgctcacgtctgcccagaaaattatctcttcttcacccaacaagaaaggacacgtgaatgtcattgtggaaagactgccttccgccgaggaaactctgagccagaagagattcctgatgaacaccgagatggaggaaggcaaagacctgagtctaactgaggctcaaatcgggagggagggcatggacgacgtgtacagggccgacaagtgcaccgtggacataggcggattgatcattgggtggtcctcaagtgagaagaaagacgaactgatgaataagggacttgctacggatgagaacgcaccgccaggacgcaggagaaccaattcggagagcctgcgcctgcactccttggcagcggaagctcttgtgaccatgcctatccgagccgctgaattgacgcgagccaacttggggcactatggggacatcaatctgctagatcccgatacgtctcaacggcaggtggatagcacgctggccgcatattcaaagatgatgtcccctttgaagaactctagtgatggcctgaccagcctcaatcaaagcaattctacactggttgctctcccggaagggagacaggaactttctgatggtcaggtgaagacgggtatctccatgagcctactgacggtgatcgaaaagttacgggagcgaacagaccagaacgcttccgatgatgacattttaaaagagctccaggataatgcacagtgtcagcctaactccgataccagcctctctggcaataatgtggtcgagtatattcctaatgctgagagaccctaccgttgcaggctgtgtcattacacaagtggtaacaagggatatatcaagcagcaccttagagtgcataggcagaggcagccctatcagtgccccatctgcgaacatattgctgacaatagtaaggacctcgagtctcatatgatacaccattgcaaaacaaggatttatcagtgcaaacagtgtgaggaaagctttcattataagtcccagctgagaaaccacgaacgcgaacagcattcattaccggacaccctgagtattgcgaccagcaacgagcccaggatatcttcagacacagccgacggaaaatgtgttcaggaagggaacaagagctcagttcagaaacagtaccgttgcgatgtgtgcgactacaccagcaccacctatgtaggtgttaggaatcatcgaaggatacacaacagtgataaaccctaccgctgttctctgtgcggctatgtttgtagccaccctccttccctgaaatctcacatgtggaaacacgcctctgatcagaactacaattacgagcaggtcaacaaagccatcaatgacgcaatttcccagtcaggtcgggtattaggtaaatctccagggaaaacacagctgaagagcagtgaagagtctgcagatccggtcacaggctcatccgagaatgcagtctcatcctccgaactgatgagtcagaccccgtctgaggtgctcgggaccaacgagaatgaaaaactctcccccacatcgaatacatcgtacagtctggagaaaatttcaagcctcgcccctccgagtatggagtactgcgtgctcctgttttgttgttgcatctgtggattcgagtctacttccaaggagaatctgctcgaccacatgaaggaacatgagggcgaaatagttaatatcatcctgaataaagatcacaacaccgctctgaacactaactag

SEQ ID NO: 52091 - DNA, 2874 bp, Artificial Sequence
  derived and/or modified sequence
atggaggagtcctcttcagtggcgatgctagttccagacataggagagcaagaggcgatcctcaccgctgaatcaatcatcagtccttctctggagattgacgagcaacggaaaacaaagcccgatccattaatacacgtgatacagaagctgtccaagatcgtggagaatgaaaagagccaaaaatgcctccttatcgggaagaagcggccacggagcagtgccgcaacccacagcctcgaaacccaggaactctgtgaaatcccagccaaggtaatccaatctcccgcagcagataccaggcgcgctgagatgtcacagaccaatttcactccagataccctcgcacagaatgagggaaaagccatgtcttatcagtgttcattgtgtaaattcttgagctcctcatttagcgtattgaaagatcatatcaaacaacatggtcaacaaaacgaagtcatactgatgtgtagtgaatgtcacataacaagtaggagccaagaagagctggaggcacacgtggtgaatgatcacgataacgatgcaaatattcacacccaaagtaaggcgcaacagtgcgtgtctccctccagttcgttgtgcaggaaaacaaccgaacgaaacgaaactatacccgatatccctgtttccgtggataacctccagacccatacagtgcagaccgcgagcgtggctgaaatgggcaggagaaagtggtatgcttacgaacaatatggaatgtatcgatgccttttctgttcctatacctgcggacagcagcgtatgcttaagactcacgcctggaaacacgccggagaggtcgattgctcatatccgatcttcgagaatgagaatgagcccctcggactactcgatagcagtgcagcagctgcaccaggaggagtcgacgcagttgtgatcgctatcggcgagtcagaactgtctattcacaacggccctagtgtgcaagtccagatctgttcctctgagcagctctcaagcagctcccccctggagcagtctgctgaacgcggagtccatctgagccagtcagttacactcgaccccaacgaagaggaaatgttagaagttatttcggatgccgaggagaacctgattcctgatagcctgctgaccagcgcccagaagatcatcagcagctccccaaacaagaagggccatgttaacgtgatcgtggaacgccttccatccgctgaggagaccttgagccagaaacgtttcctgatgaataccgaaatggaggagggtaaggacctgtcactgacagaagcccagatcggaagggaggggatggatgatgtgtaccgggctgataagtgcaccgtcgacattggaggtctcataataggatggagttcctccgaaaaaaaggacgaactgatgaacaagggtcttgccacggatgaaaatgcgccacctggtcgaaggcgcaccaattctgaaagccttaggctccactctctggctgctgaagcgctggtgaccatgcccatccgagcggcagaactaactagagcgaaccttggtcactacggcgatattaacttgctagatccagatacgagccaaagacaggttgactctactctggccgcatattctaagatgatgtctcctctgaagaatagctccgatgggctgacgtctcttaatcaatcaaactctacattagtagcacttccagagggccgacaagaactctcagatggacaggtgaaaactggcatatctatgtcgctcctgacggtcatcgaaaagctcagggagaggaccgaccagaatgcgtcagatgatgatatcctaaaggagctgcaggacaatgctcagtgccagccaaactccgatacctctctctccgggaataacgtcgtagagtacattcccaatgcagaacggccataccggtgcaggctatgtcactatacctccggaaacaaagggtatatcaagcaacacctgagggtacatcggcagagacagccctaccagtgccctatatgtgaacatattgccgataactcaaaggacctagaaagccacatgatccatcattgcaaaactcggatctaccagtgcaagcagtgcgaggaatccttccactataaaagtcagctgcggaatcatgaaagggaacagcatagcttgcctgacactttaagcatcgctacctccaacgaaccaaggatttcctccgacactgctgacggcaaatgcgtccaggaaggaaacaaaagctccgtgcagaagcagtacagatgtgacgtctgcgattacactagcactacctacgtgggggtcagaaaccaccggaggattcacaatagtgacaaaccttacaggaaggaattccgctgctcgctatgcggatacgtttgtagccatccaccatcactgaagagccacatgtggaagcacgcgagcgaccaaaactacaattatgagcaggtaaacaaagccatcaacgatgcaattagccagtctgggagggtgctgggcaagtctcccggtaaaactcagctgaaaagctccgaagaatcggcagaccccgtgaccggcagctcagaaaatgccgttagctcctccgaactcatgtcacaaactccaagcgaggtgctgggaacaaatgagaacgagaaactgtcgcccacatcaaatactagttacagcttagagaagatctcatctctggcgccaccctctatggaatactgcgttctgttgttctgctgttgtatctgcgggtttgaaagtacctcaaaagagaatctgttagatcatatgaaggagcacgaaggagagattgtgaatattatactgaataaagatcacaacacagccttaaacacgaactag

SEQ ID NO: 52092 - DNA, 7623 bp, Artificial Sequence
  derived and/or modified sequence
tcacgtgatccgtccccagcgccgccattttggagctccggatgaggagggggaaaccgggggaaaagagggaaaagagccgggagagaggtgggcaaggacgagggcgagggcacggccgggtcctggctggccaaacgaggctcgcggaagcagcagccgccgcctgaccgcagatatggaagaaagtagcagtgttgccatgttggtgccagatattggggaacaggaagctatactgactgctgaaagtatcatcagtccttcattggaaattgatgaacaaagaaaaactaaaccagatccattaatccatgttatccagaagttaagcaagatagtggaaaatgaaaagtcacaaaaatgtcttttaattgggaagaaacgcccacgttcaagtgctgcaacacactctcttgaaacccaagaactttgtgagattccggctaaagtaatccagtcacctgctgctgatactagaagggctgagatgtcacaaacaaattttacccctgacactcttgcccagaatgaagggaaggctatgtcttatcagtgtagcctttgtaagtttctatcatcatccttttccgtgttaaaagatcatattaagcaacatggtcagcaaaatgaagtgatactgatgtgctcagagtgccatattacatctagaagccaggaggaacttgaagcccacgtggtgaatgaccatgacaatgatgccaatatccacacccaatccaaagcccaacagtgcgtaagcccctccagctctttgtgtcggaaaaccacagaaagaaatgaaaccattccagatatcccagtaagtgtggacaatctacagactcatactgtccaaactgcatctgtggcagaaatgggtaggaggaaatggtatgcatacgaacagtacggcatgtatcgatgcttgttttgtagttatacttgtggccagcagagaatgttgaaaacacacgcttggaaacatgctggggaggttgattgctcctatccaatctttgaaaatgaaaatgaacccctaggcctgctggattcttcagcagctgctgcgcctggtggggtcgatgcagtcgtcattgctattggagagagtgaactgagtatccacaatgggccatcagtgcaagtgcagatttgcagctcagaacagttatcatcttcatctcctttagaacagagtgcagaaagaggagtacacctaagtcagtcagttaccctggaccccaatgaggaagaaatgctagaagtgatttctgatgcagaggagaatctgattcctgatagcctgcttacatcagcacagaaaatcatcagcagcagccccaataaaaaagggcatgttaacgtgatagtggagcgattgccaagtgctgaagaaaccctttcacagaagcgcttcctcatgaacactgaaatggaagaagggaaggacctgagcctgacagaagctcagattgggcgcgaaggaatggatgatgtttatcgtgctgataaatgtactgttgatattgggggattgatcataggctggagcagttcagagaaaaaagacgagttaatgaataaaggcctggctactgatgagaatgccccaccaggccggagaaggacaaattctgagtctcttcgattacactcattagctgcagaagcccttgtcacaatgcctataagagctgcagagttgacaagagccaacctggggcactatggagatataaaccttttagatccagatactagtcaaaggcaagtagatagtacattggcagcgtactcaaaaatgatgtcgccacttaaaaactcttcagatggattaactagtcttaaccaaagcaactccaccttggtagcactcccagagggtaggcaggaattgtcagatgggcaggttaagacaggcatcagcatgtccttactcaccgtcattgaaaaattgagagaaaggacagaccaaaacgcttcagacgatgacattttgaaagagttgcaggacaacgcccagtgccaacccaacagcgatacaagtttgtccggaaacaatgtggtggaatacatcccgaatgctgaacgaccctaccgttgccgcctgtgtcactacacaagtggcaacaagggctacatcaagcagcacttacgagtccatcgacagagacagccttatcagtgtcctatctgcgagcacatagcggacaacagcaaagatttggagagtcacatgatccaccactgtaagacaagaatataccagtgcaagcagtgtgaagaatccttccattataagagtcaattgaggaaccatgagagagaacagcacagtcttccagataccttgtcaatagcaacttctaatgagccaagaatttccagtgatacagctgatggaaaatgtgtccaggaagggaataagtcttcagtccagaaacaatatagatgtgatgtgtgtgattatacaagtacaacatatgttggtgtcagaaaccacaggcgaatccataactctgataagccgtacagatgctctctgtgtgggtatgtgtgtagccatcctccttctttgaagtctcatatgtggaaacatgcaagtgaccaaaattacaactacgaacaagtaaacaaggctattaacgacgcgatttcacaaagtggcagagttctggggaaatcccctggaaagactcaattaaagagcagtgaagagagtgcagatcccgtcactggaagttcagaaaatgcagtgtcatcttcagaactgatgtcccagactcccagtgaagttctgggtaccaacgagaatgagaaactgagccctacaagtaatacctcatatagtttagaaaaaatctccagtctggcccctcctagcatggagtactgcgttttactcttctgctgttgtatttgtggttttgaatcaaccagcaaagaaaacctcttggatcatatgaaagagcacgagggtgaaattgtaaacatcatcctgaataaggaccacaatacagctctaaacacaaattaggtggaataatgactcgagcaggaaagcagtagaagaggattccttcaccacagtttcacctttacgctgtcagacaacttcctgccacagaagaagtcgttgatgtgatttttgaggaaatgacagatgtgactttggaaccaaacttgtaataaaaggaattccaaatggacaagcagtaatgatatttaaatattttgagtgagggggagtgggtcaaagaggaagtagaggtgtaatcctgtattaaccctctgtcaccccttcttagtgtcgagtgtatttattaataaaagcttattagagtgtagaaatgccagcaagagttaagaaagggcttttcaggaactattctaaaagtcataaaagggtcacagtcttaagcagagcttagttttcttctcacttgtcaaatgcagactgtgaggcctccagtgagaaatgggaggcagttctgggagggggttttttcagtgtcaccaacagagtcaacaaggaaacataattagagggctttgaaatgatctactgaaatacctaaattgatagaaattaatcatactcaatctaggacatgttcctttactccttaaaaaagaaaggaaagatctctaaattcaaagctagattgtaaataggcattcaagaagtattgtcttaaatttacgatgaatttcttgtgagcagaggacgaaacaggtgaattctcaccagactcaaaccagatctcaattcgtagtaatgctaaatcgtcttccgtgttctcagaggttcttttcagtgtctgtcagaacttggcatactttctccatagtacgtagaccttctaatactctgctaaatgaaaccacacttgttatctgaaagtgtgtgaaagaaacaatgtatgaaaatttacatttgatcatccggcattggaaatagtttgaactatttccaaaaatcccttaggggatgaggggtgaaatttaaaagctcctgaaaatgagtactgctgtgttgagcttttctttcctggggtatattaatttagttatatttagcagaagaggaatataaccaaatgtgactaaaatatagcagaaattcaggttgtttgtaaaaattttaataacaaatagcatttggcaagtctataggattcttcctatctggaaattctattttgttagagtgcgataggacatatggaaaaccaacacaaagtgctttagcattaaaactcaccatcaaatagatgtaatcttattaattacacattttgtattttaattatttcaaggagtgaagaaaacagggtgtttttgtttttgtagttctgattactcatttatgcattgttttgtttaagtaaattctgcctacaagtgaaaaggtcggtgcgctcttctgtgcaccatcctcacggtgctatttccgaatatctgaatattgatttctaacacctggatgaggctgtgaccgatcaacttggaacactgtaaaggttttcgaatgggatacgctgtaggcacgttttaagaagtattctgttcctaaagtccaggtatgattggattaatatttataaaattattattaggaattatttaagtggggccaggcatcttgcaacattttctgatttttttttctttctttctaatctcattttggtgatatttaaacaaacataaatgattgtaactttgcagcttttttatttaggtagctttaatttatttatgaaagttaatccatttctgatacgtggtttttaaaaatatgaaatggatttatatatactatattcctcaaatccactgtatgtggacttatattcattttctccttttttcggaattgaaacattttaatttcaaattcaaatagaacatttaaaatgatttcattattattacccatactgttgccactcatattgtaagtcagttttttcattgctggtacaatgactcagtatttctttataaaaatctgttgttctgaaaatcaacaaccttagaaggattttgtcttagaaaatttccttggctttagttttatatcatatttagaaaataataatgaaaagcatccccaaaatttcaatgatgtgaatttttaaattacctttatttctttaaactaattccattgattgttacttaaattttccacctggaatcatggatttaaaatttccccacctcatggggaaaaaactaacccagaagttcaaagcctttaaagtttcatctgattctggccttagaattgtccttaaaagctttctcctggccgataggaggaagcatatatcaaggaggttctttcccttcccattatcattttgtggcaagccttaagttaacaatgtgtctaccaagaacaattgagttttctaaaagtaataatgaagattatgcaattctaactgtagaagagatagctattaaaataatcagtagcctgggcatagtggctcacacctgtaatcccaatactttagaaggccaaggctggaggactgcttgagtccagaagtttaagaccagcctgggcaacacggggagaccctgtctctacaagaaattaaaaattagccaggcatagttggcacgtgcctgtagcaccagctacttgggaggttaaggtgggaggatcacttgagcctgggagatagaggcttgcagtgagccgtgatggcaccattgcactccaaccggggtgacagatgaggtcctctgtttacctccccccccaaaaaaaaaattcagtaggaattccttcatagaataacatgttatttattggtattgacttcttattagacagagctcatagtatttgttttctgctccgaacacttaaaaaatactaagacgtgatagtgaaaatagctttgaaaagaaactacatatggcaaaggtggggaggggggaagatgatgcattctgatcattataaagaatacttttcagggctctatcattttctccctttctctaatcatccagaatatggcgggtgtcccagtgttcaacagtatcatgctaatattccatttgatcggtagtccaagttctttggccagatagtgcaatgttgtgacaccgaccgaagcctttgttctggatctttcttcctattgaaggtggctgctggtggcttcataattttctgttttttttctcacaaagtaaatggtgggcatccatgtttacattgcaccttcccgtgctgtaattggcttgacaaagacaagcaggcttctctgttgagacttattgtgtttttagttttcatagacacttatttaatctttttaaattgtacagcaaggtgctctaagtaatattcgataaaatatatttaatagaaatttgcgtttgatattcatgaacatgaatacatgtatttttttaagaaataagtattgtgtaacactatggcattgcttctatagccaaagtataaaaatttctggaatactgacatgtaaagactacagttaattctgacactgtatcttattaaaataggatgatttgcattttgtaaaattatcctgcacatcaagctgcatgccttaaagcggaaactctaggactgtgttcatgggagagcagttcatctgttcagaacagtgaggcaaggtctgtagtgcttctttaactacctttggaaatactgtacaatgttagaataatttattttgctttacaggagtttgtcatgtattgactttaatattgtattttggtaataaattttttgttaaaaaaaacttggctccaagttctattaaccacaggttgtgttcattcttttcctggaaatgatgactttattgcttagaaagttgtaaataattaaaagcttcccaagagttaaatgaaggttatgatgactcttgataacttgttaatctgttgctgactagcattagactgttacacgaagataaactgaataagcatttagctttttaaatcattttaaaaattaagtctaattttgaagcttttttccttgctacccagttcagtttctcttccaaatgtgacacgcttatatgctttcaattctgatatagtcaaagtgctaaagactagttctgctattgacgaaggaattagcattccttagtgaaggccaaaaactacagtgatatgttcacaccttgatcactctgtcgtctatacagacagctattgacatatttgttgcattgacgaagctaacatcatctgactgtatcgtgggtctggttatccatttgtgccctagaatcctgggtcacctcagttgaaagtgaccaaggccaaatatttcgtcccatgcttcccagggacaacataatcatatcccctgtctttgaaaaacccaatctgaaactgtgtcactaacctccaaattaaagaatccgagcatggaagctctagaacgtatggtccagtgtggcagccactataatatctaagtgtaaaatacatagcagttgcaaagacttagtacaaaaagaatggaaatgtattaacagttttttatattgattacatgttgaaatgatattttggtttaaataaaatattaaaatt

SEQ ID NO: 52093 - DNA, 7717 bp, Artificial Sequence
  derived and/or modified sequence
tcacgtgatccgtccccagcgccgccattttggagctccggatgaggagggggaaaccgggggaaaagagggaaaagagccgggagagaggtgggcaaggacgagggcgagggcacggccgggtcctggctggccaaacgaggctcgcggaagcagcagccgccgcctgaccgcagctggattttgaagattgatccaagggactgtattaatttcaggaattgatttgaaagacactggctctgccacttaacagccatgtaaccttggatatggaagaaagtagcagtgttgccatgttggtgccagatattggggaacaggaagctatactgactgctgaaagtatcatcagtccttcattggaaattgatgaacaaagaaaaactaaaccagatccattaatccatgttatccagaagttaagcaagatagtggaaaatgaaaagtcacaaaaatgtcttttaattgggaagaaacgcccacgttcaagtgctgcaacacactctcttgaaacccaagaactttgtgagattccggctaaagtaatccagtcacctgctgctgatactagaagggctgagatgtcacaaacaaattttacccctgacactcttgcccagaatgaagggaaggctatgtcttatcagtgtagcctttgtaagtttctatcatcatccttttccgtgttaaaagatcatattaagcaacatggtcagcaaaatgaagtgatactgatgtgctcagagtgccatattacatctagaagccaggaggaacttgaagcccacgtggtgaatgaccatgacaatgatgccaatatccacacccaatccaaagcccaacagtgcgtaagcccctccagctctttgtgtcggaaaaccacagaaagaaatgaaaccattccagatatcccagtaagtgtggacaatctacagactcatactgtccaaactgcatctgtggcagaaatgggtaggaggaaatggtatgcatacgaacagtacggcatgtatcgatgcttgttttgtagttatacttgtggccagcagagaatgttgaaaacacacgcttggaaacatgctggggaggttgattgctcctatccaatctttgaaaatgaaaatgaacccctaggcctgctggattcttcagcagctgctgcgcctggtggggtcgatgcagtcgtcattgctattggagagagtgaactgagtatccacaatgggccatcagtgcaagtgcagatttgcagctcagaacagttatcatcttcatctcctttagaacagagtgcagaaagaggagtacacctaagtcagtcagttaccctggaccccaatgaggaagaaatgctagaagtgatttctgatgcagaggagaatctgattcctgatagcctgcttacatcagcacagaaaatcatcagcagcagccccaataaaaaagggcatgttaacgtgatagtggagcgattgccaagtgctgaagaaaccctttcacagaagcgcttcctcatgaacactgaaatggaagaagggaaggacctgagcctgacagaagctcagattgggcgcgaaggaatggatgatgtttatcgtgctgataaatgtactgttgatattgggggattgatcataggctggagcagttcagagaaaaaagacgagttaatgaataaaggcctggctactgatgagaatgccccaccaggccggagaaggacaaattctgagtctcttcgattacactcattagctgcagaagcccttgtcacaatgcctataagagctgcagagttgacaagagccaacctggggcactatggagatataaaccttttagatccagatactagtcaaaggcaagtagatagtacattggcagcgtactcaaaaatgatgtcgccacttaaaaactcttcagatggattaactagtcttaaccaaagcaactccaccttggtagcactcccagagggtaggcaggaattgtcagatgggcaggttaagacaggcatcagcatgtccttactcaccgtcattgaaaaattgagagaaaggacagaccaaaacgcttcagacgatgacattttgaaagagttgcaggacaacgcccagtgccaacccaacagcgatacaagtttgtccggaaacaatgtggtggaatacatcccgaatgctgaacgaccctaccgttgccgcctgtgtcactacacaagtggcaacaagggctacatcaagcagcacttacgagtccatcgacagagacagccttatcagtgtcctatctgcgagcacatagcggacaacagcaaagatttggagagtcacatgatccaccactgtaagacaagaatataccagtgcaagcagtgtgaagaatccttccattataagagtcaattgaggaaccatgagagagaacagcacagtcttccagataccttgtcaatagcaacttctaatgagccaagaatttccagtgatacagctgatggaaaatgtgtccaggaagggaataagtcttcagtccagaaacaatatagatgtgatgtgtgtgattatacaagtacaacatatgttggtgtcagaaaccacaggcgaatccataactctgataagccgtacagatgctctctgtgtgggtatgtgtgtagccatcctccttctttgaagtctcatatgtggaaacatgcaagtgaccaaaattacaactacgaacaagtaaacaaggctattaacgacgcgatttcacaaagtggcagagttctggggaaatcccctggaaagactcaattaaagagcagtgaagagagtgcagatcccgtcactggaagttcagaaaatgcagtgtcatcttcagaactgatgtcccagactcccagtgaagttctgggtaccaacgagaatgagaaactgagccctacaagtaatacctcatatagtttagaaaaaatctccagtctggcccctcctagcatggagtactgcgttttactcttctgctgttgtatttgtggttttgaatcaaccagcaaagaaaacctcttggatcatatgaaagagcacgagggtgaaattgtaaacatcatcctgaataaggaccacaatacagctctaaacacaaattaggtggaataatgactcgagcaggaaagcagtagaagaggattccttcaccacagtttcacctttacgctgtcagacaacttcctgccacagaagaagtcgttgatgtgatttttgaggaaatgacagatgtgactttggaaccaaacttgtaataaaaggaattccaaatggacaagcagtaatgatatttaaatattttgagtgagggggagtgggtcaaagaggaagtagaggtgtaatcctgtattaaccctctgtcaccccttcttagtgtcgagtgtatttattaataaaagcttattagagtgtagaaatgccagcaagagttaagaaagggcttttcaggaactattctaaaagtcataaaagggtcacagtcttaagcagagcttagttttcttctcacttgtcaaatgcagactgtgaggcctccagtgagaaatgggaggcagttctgggagggggttttttcagtgtcaccaacagagtcaacaaggaaacataattagagggctttgaaatgatctactgaaatacctaaattgatagaaattaatcatactcaatctaggacatgttcctttactccttaaaaaagaaaggaaagatctctaaattcaaagctagattgtaaataggcattcaagaagtattgtcttaaatttacgatgaatttcttgtgagcagaggacgaaacaggtgaattctcaccagactcaaaccagatctcaattcgtagtaatgctaaatcgtcttccgtgttctcagaggttcttttcagtgtctgtcagaacttggcatactttctccatagtacgtagaccttctaatactctgctaaatgaaaccacacttgttatctgaaagtgtgtgaaagaaacaatgtatgaaaatttacatttgatcatccggcattggaaatagtttgaactatttccaaaaatcccttaggggatgaggggtgaaatttaaaagctcctgaaaatgagtactgctgtgttgagcttttctttcctggggtatattaatttagttatatttagcagaagaggaatataaccaaatgtgactaaaatatagcagaaattcaggttgtttgtaaaaattttaataacaaatagcatttggcaagtctataggattcttcctatctggaaattctattttgttagagtgcgataggacatatggaaaaccaacacaaagtgctttagcattaaaactcaccatcaaatagatgtaatcttattaattacacattttgtattttaattatttcaaggagtgaagaaaacagggtgtttttgtttttgtagttctgattactcatttatgcattgttttgtttaagtaaattctgcctacaagtgaaaaggtcggtgcgctcttctgtgcaccatcctcacggtgctatttccgaatatctgaatattgatttctaacacctggatgaggctgtgaccgatcaacttggaacactgtaaaggttttcgaatgggatacgctgtaggcacgttttaagaagtattctgttcctaaagtccaggtatgattggattaatatttataaaattattattaggaattatttaagtggggccaggcatcttgcaacattttctgatttttttttctttctttctaatctcattttggtgatatttaaacaaacataaatgattgtaactttgcagcttttttatttaggtagctttaatttatttatgaaagttaatccatttctgatacgtggtttttaaaaatatgaaatggatttatatatactatattcctcaaatccactgtatgtggacttatattcattttctccttttttcggaattgaaacattttaatttcaaattcaaatagaacatttaaaatgatttcattattattacccatactgttgccactcatattgtaagtcagttttttcattgctggtacaatgactcagtatttctttataaaaatctgttgttctgaaaatcaacaaccttagaaggattttgtcttagaaaatttccttggctttagttttatatcatatttagaaaataataatgaaaagcatccccaaaatttcaatgatgtgaatttttaaattacctttatttctttaaactaattccattgattgttacttaaattttccacctggaatcatggatttaaaatttccccacctcatggggaaaaaactaacccagaagttcaaagcctttaaagtttcatctgattctggccttagaattgtccttaaaagctttctcctggccgataggaggaagcatatatcaaggaggttctttcccttcccattatcattttgtggcaagccttaagttaacaatgtgtctaccaagaacaattgagttttctaaaagtaataatgaagattatgcaattctaactgtagaagagatagctattaaaataatcagtagcctgggcatagtggctcacacctgtaatcccaatactttagaaggccaaggctggaggactgcttgagtccagaagtttaagaccagcctgggcaacacggggagaccctgtctctacaagaaattaaaaattagccaggcatagttggcacgtgcctgtagcaccagctacttgggaggttaaggtgggaggatcacttgagcctgggagatagaggcttgcagtgagccgtgatggcaccattgcactccaaccggggtgacagatgaggtcctctgtttacctccccccccaaaaaaaaaattcagtaggaattccttcatagaataacatgttatttattggtattgacttcttattagacagagctcatagtatttgttttctgctccgaacacttaaaaaatactaagacgtgatagtgaaaatagctttgaaaagaaactacatatggcaaaggtggggaggggggaagatgatgcattctgatcattataaagaatacttttcagggctctatcattttctccctttctctaatcatccagaatatggcgggtgtcccagtgttcaacagtatcatgctaatattccatttgatcggtagtccaagttctttggccagatagtgcaatgttgtgacaccgaccgaagcctttgttctggatctttcttcctattgaaggtggctgctggtggcttcataattttctgttttttttctcacaaagtaaatggtgggcatccatgtttacattgcaccttcccgtgctgtaattggcttgacaaagacaagcaggcttctctgttgagacttattgtgtttttagttttcatagacacttatttaatctttttaaattgtacagcaaggtgctctaagtaatattcgataaaatatatttaatagaaatttgcgtttgatattcatgaacatgaatacatgtatttttttaagaaataagtattgtgtaacactatggcattgcttctatagccaaagtataaaaatttctggaatactgacatgtaaagactacagttaattctgacactgtatcttattaaaataggatgatttgcattttgtaaaattatcctgcacatcaagctgcatgccttaaagcggaaactctaggactgtgttcatgggagagcagttcatctgttcagaacagtgaggcaaggtctgtagtgcttctttaactacctttggaaatactgtacaatgttagaataatttattttgctttacaggagtttgtcatgtattgactttaatattgtattttggtaataaattttttgttaaaaaaaacttggctccaagttctattaaccacaggttgtgttcattcttttcctggaaatgatgactttattgcttagaaagttgtaaataattaaaagcttcccaagagttaaatgaaggttatgatgactcttgataacttgttaatctgttgctgactagcattagactgttacacgaagataaactgaataagcatttagctttttaaatcattttaaaaattaagtctaattttgaagcttttttccttgctacccagttcagtttctcttccaaatgtgacacgcttatatgctttcaattctgatatagtcaaagtgctaaagactagttctgctattgacgaaggaattagcattccttagtgaaggccaaaaactacagtgatatgttcacaccttgatcactctgtcgtctatacagacagctattgacatatttgttgcattgacgaagctaacatcatctgactgtatcgtgggtctggttatccatttgtgccctagaatcctgggtcacctcagttgaaagtgaccaaggccaaatatttcgtcccatgcttcccagggacaacataatcatatcccctgtctttgaaaaacccaatctgaaactgtgtcactaacctccaaattaaagaatccgagcatggaagctctagaacgtatggtccagtgtggcagccactataatatctaagtgtaaaatacatagcagttgcaaagacttagtacaaaaagaatggaaatgtattaacagttttttatattgattacatgttgaaatgatattttggtttaaataaaatattaaaatt

SEQ ID NO: 52094 - DNA, 5764 bp, Artificial Sequence
  derived and/or modified sequence
aaagagggaaaagagccgggagagaggtgggcaaggacgagggcgagggcacggccgggtcctggctggccaaacgaggctcgcggaagcagcagccgccgcctgaccgcagctggattttgaagattgatccaagggactgtattaatttcaggaattgatttgaaagacactggctctgccacttaacagccatgtaaccttggatatggaagaaagtagcagtgttgccatgttggtgccagatattggggaacaggaagctatactgactgctgaaagtatcatcagtccttcattggaaattgatgaacaaagaaaaactaaaccagatccattaatccatgttatccagaagttaagcaagatagtggaaaatgaaaagtcacaaaaatgtcttttaattgggaagaaacgcccacgttcaagtgctgcaacacactctcttgaaacccaagaactttgtgagattccggctaaagtaatccagtcacctgctgctgatactagaagggctgagatgtcacaaacaaattttacccctgacactcttgcccagaatgaagggaaggctatgtcttatcagtgtagcctttgtaagtttctatcatcatccttttccgtgttaaaagatcatattaagcaacatggtcagcaaaatgaagtgatactgatgtgctcagagtgccatattacatctagaagccaggaggaacttgaagcccacgtggtgaatgaccatgacaatgatgccaatatccacacccaatccaaagcccaacagtgcgtaagcccctccagctctttgtgtcggaaaaccacagaaagaaatgaaaccattccagatatcccagtaagtgtggacaatctacagactcatactgtccaaactgcatctgtggcagaaatgggtaggaggaaatggtatgcatacgaacagtacggcatgtatcgatgcttgttttgtagttatacttgtggccagcagagaatgttgaaaacacacgcttggaaacatgctggggaggttgattgctcctatccaatctttgaaaatgaaaatgaacccctaggcctgctggattcttcagcagctgctgcgcctggtggggtcgatgcagtcgtcattgctattggagagagtgaactgagtatccacaatgggccatcagtgcaagtgcagatttgcagctcagaacagttatcatcttcatctcctttagaacagagtgcagaaagaggagtacacctaagtcagtcagttaccctggaccccaatgaggaagaaatgctagaagtgatttctgatgcagaggagaatctgattcctgatagcctgcttacatcagcacagaaaatcatcagcagcagccccaataaaaaagggcatgttaacgtgatagtggagcgattgccaagtgctgaagaaaccctttcacagaagcgcttcctcatgaacactgaaatggaagaagggaaggacctgagcctgacagaagctcagattgggcgcgaaggaatggatgatgtttatcgtgctgataaatgtactgttgatattgggggattgatcataggctggagcagttcagagaaaaaagacgagttaatgaataaaggcctggctactgatgagaatgccccaccaggccggagaaggacaaattctgagtctcttcgattacactcattagctgcagaagcccttgtcacaatgcctataagagctgcagagttgacaagagccaacctggggcactatggagatataaaccttttagatccagatactagtcaaaggcaagtagatagtacattggcagcgtactcaaaaatgatgtcgccacttaaaaactcttcagatggattaactagtcttaaccaaagcaactccaccttggtagcactcccagagggtaggcaggaattgtcagatgggcaggttaagacaggcatcagcatgtccttactcaccgtcattgaaaaattgagagaaaggacagaccaaaacgcttcagacgatgacattttgaaagagttgcaggacaacgcccagtgccaacccaacagcgatacaagtttgtccggaaacaatgtggtggaatacatcccgaatgctgaacgaccctaccgttgccgcctgtgtcactacacaagtggcaacaagggctacatcaagcagcacttacgagtccatcgacagagacagccttatcagtgtcctatctgcgagcacatagcggacaacagcaaagatttggagagtcacatgatccaccactgtaagacaagaatataccagtgcaagcagtgtgaagaatccttccattataagagtcaattgaggaaccatgagagagaacagcacagtcttccagataccttgtcaatagcaacttctaatgagccaagaatttccagtgatacagctgatggaaaatgtgtccaggaagggaataagtcttcagtccagaaacaatatagatgtgatgtgtgtgattatacaagtacaacatatgttggtgtcagaaaccacaggcgaatccataactctgataagccgtacaggaaagagttcagatgctctctgtgtgggtatgtgtgtagccatcctccttctttgaagtctcatatgtggaaacatgcaagtgaccaaaattacaactacgaacaagtaaacaaggctattaacgacgcgatttcacaaagtggcagagttctggggaaatcccctggaaagactcaattaaagagcagtgaagagagtgcagatcccgtcactggaagttcagaaaatgcagtgtcatcttcagaactgatgtcccagactcccagtgaagttctgggtaccaacgagaatgagaaactgagccctacaagtaatacctcatatagtttagaaaaaatctccagtctggcccctcctagcatggagtactgcgttttactcttctgctgttgtatttgtggttttgaatcaaccagcaaagaaaacctcttggatcatatgaaagagcacgagggtgaaattgtaaacatcatcctgaataaggaccacaatacagctctaaacacaaattaggtggaataatgactcgagcaggaaagcagtagaagaggattccttcaccacagtttcacctttacgctgtcagacaacttcctgccacagaagaagtcgttgatgtgatttttgaggaaatgacagatgtgactttggaaccaaacttgtaataaaaggaattccaaatggacaagcagtaatgatatttaaatattttgagtgagggggagtgggtcaaagaggaagtagaggtgtaatcctgtattaaccctctgtcaccccttcttagtgtcgagtgtatttattaataaaagcttattagagtgtagaaatgccagcaagagttaagaaagggcttttcaggaactattctaaaagtcataaaagggtcacagtcttaagcagagcttagttttcttctcacttgtcaaatgcagactgtgaggcctccagtgagaaatgggaggcagttctgggagggggttttttcagtgtcaccaacagagtcaacaaggaaacataattagagggctttgaaatgatctactgaaatacctaaattgatagaaattaatcatactcaatctaggacatgttcctttactccttaaaaaagaaaggaaagatctctaaattcaaagctagattgtaaataggcattcaagaagtattgtcttaaatttacgatgaatttcttgtgagcagaggacgaaacaggtgaattctcaccagactcaaaccagatctcaattcgtagtaatgctaaatcgtcttccgtgttctcagaggttcttttcagtgtctgtcagaacttggcatactttctccatagtacgtagaccttctaatactctgctaaatgaaaccacacttgttatctgaaagtgtgtgaaagaaacaatgtatgaaaatttacatttgatcatccggcattggaaatagtttgaactatttccaaaaatcccttaggggatgaggggtgaaatttaaaagctcctgaaaatgagtactgctgtgttgagcttttctttcctggggtatattaatttagttatatttagcagaagaggaatataaccaaatgtgactaaaatatagcagaaattcaggttgtttgtaaaaattttaataacaaatagcatttggcaagtctataggattcttcctatctggaaattctattttgttagagtgcgataggacatatggaaaaccaacacaaagtgctttagcattaaaactcaccatcaaatagatgtaatcttattaattacacattttgtattttaattatttcaaggagtgaagaaaacagggtgtttttgtttttgtagttctgattactcatttatgcattgttttgtttaagtaaattctgcctacaagtgaaaaggtcggtgcgctcttctgtgcaccatcctcacggtgctatttccgaatatctgaatattgatttctaacacctggatgaggctgtgaccgatcaacttggaacactgtaaaggttttcgaatgggatacgctgtaggcacgttttaagaagtattctgttcctaaagtccaggtatgattggattaatatttataaaattattattaggaattatttaagtggggccaggcatcttgcaacattttctgatttttttttctttctttctaatctcattttggtgatatttaaacaaacataaatgattgtaactttgcagcttttttatttaggtagctttaatttatttatgaaagttaatccatttctgatacgtggtttttaaaaatatgaaatggatttatatatactatattcctcaaatccactgtatgtggacttatattcattttctccttttttcggaattgaaacattttaatttcaaattcaaatagaacatttaaaatgatttcattattattacccatactgttgccactcatattgtaagtcagttttttcattgctggtacaatgactcagtatttctttataaaaatctgttgttctgaaaatcaacaaccttagaaggattttgtcttagaaaatttccttggctttagttttatatcatatttagaaaataataatgaaaagcatccccaaaatttcaatgatgtgaatttttaaattacctttatttctttaaactaattccattgattgttacttaaattttccacctggaatcatggatttaaaatttccccacctcatggggaaaaaactaacccagaagttcaaagcctttaaagtttcatctgattctggccttagaattgtccttaaaagctttctcctggccgataggaggaagcatatatcaaggaggttctttcccttcccattatcattttgtggcaagccttaagttaacaatgtgtctaccaagaacaattgagttttctaaaagtaataatgaagattatgcaattctaactgtagaagagatagctattaaaataatcagtagcctgggcatagtggctcacacctgtaatcccaatactttagaaggccaaggctggaggactgcttgagtccagaagtttaagaccagcctgggcaacacggggagaccctgtctctacaagaaattaaaaattagccaggcatagttggcacgtgcctgtagcaccagctacttgggaggttaaggtgggaggatcacttgagcctgggagatagaggcttgcagtgagccg

SEQ ID NO: 52095 - protein, 476 aa, Artificial Sequence
  derived and/or modified sequence
MMTAKAVDKIPVTLSGFVHQLSDNIYPVEDLAATSVTIFPNAELGGPFDQMNGVAGDGMINIDMTGEKRSLDLPYPSSFAPVSAPRNQTFTYMGKFSIDPQYPGASCYPEGIINIVSAGILQGVTSPASTTASSSVTSASPNPLATGPLGVCTMSQTQPDLDHLYSPPPPPPPYSGCAGDLYQDPSAFLSAATTSTSSSLAYPPPPSYPSPKPATDPGLFPMIPDYPGFFPSQCQRDLHGTAGPDRKPFPCPLDTLRVPPPLTPLSTIRNFTLGGPSAGVTGPGASGGSEGPRLPGSSSAAAAAAAAAAYNPHHLPLRPILRPRKYPNRPSKTPVHERPYPCPAEGCDRRFSRSDELTRHIRIHTGHKPFQCRICMRNFSRSDHLTTHIRTHTGEKPFACDYCGRKFARSDERKRHTKIHLRQKERKSSAPSASVPAPSTASCSGGVQPGGTLCSSNSSSLGGGPLAPCSSRTRTP

SEQ ID NO: 52096 - protein, 426 aa, Artificial Sequence
  derived and/or modified sequence
MNGVAGDGMINIDMTGEKRSLDLPYPSSFAPVSAPRNQTFTYMGKFSIDPQYPGASCYPEGIINIVSAGILQGVTSPASTTASSSVTSASPNPLATGPLGVCTMSQTQPDLDHLYSPPPPPPPYSGCAGDLYQDPSAFLSAATTSTSSSLAYPPPPSYPSPKPATDPGLFPMIPDYPGFFPSQCQRDLHGTAGPDRKPFPCPLDTLRVPPPLTPLSTIRNFTLGGPSAGVTGPGASGGSEGPRLPGSSSAAAAAAAAAAYNPHHLPLRPILRPRKYPNRPSKTPVHERPYPCPAEGCDRRFSRSDELTRHIRIHTGHKPFQCRICMRNFSRSDHLTTHIRTHTGEKPFACDYCGRKFARSDERKRHTKIHLRQKERKSSAPSASVPAPSTASCSGGVQPGGTLCSSNSSSLGGGPLAPCSSRTRTP

SEQ ID NO: 52097 - DNA, 2992 bp, Artificial Sequence
  derived and/or modified sequence
aactgagcgaggagcaattgattaatagctcggcgaggggactcactgactgttataataacactacaccagcaactcctggcttcccagcagccggaacacagacaggagagagtcagtggcaaatagacatttttcttatttcttaaaaaacagcaacttgtttgctacttttatttctgttgatttttttttcttggtgtgtgtggtggttgtttttaagtgtggagggcaaaaggagataccatcccaggctcagtccaacccctctccaaaacggcttttctgacactccaggtagcgagggagttgggtctccaggttgtgcgaggagcaaatgatgaccgccaaggccgtagacaaaatcccagtaactctcagtggttttgtgcaccagctgtctgacaacatctacccggtggaggacctcgccgccacgtcggtgaccatctttcccaatgccgaactgggaggcccctttgaccagatgaacggagtggccggagatggcatgatcaacattgacatgactggagagaagaggtcgttggatctcccatatcccagcagctttgctcccgtctctgcacctagaaaccagaccttcacttacatgggcaagttctccattgaccctcagtaccctggtgccagctgctacccagaaggcataatcaatattgtgagtgcaggcatcttgcaaggggtcacttccccagcttcaaccacagcctcatccagcgtcacctctgcctcccccaacccactggccacaggacccctgggtgtgtgcaccatgtcccagacccagcctgacctggaccacctgtactctccgccaccgcctcctcctccttattctggctgtgcaggagacctctaccaggacccttctgcgttcctgtcagcagccaccacctccacctcttcctctctggcctacccaccacctccttcctatccatcccccaagccagccacggacccaggtctcttcccaatgatcccagactatcctggattctttccatctcagtgccagagagacctacatggtacagctggcccagaccgtaagccctttccctgcccactggacaccctgcgggtgccccctccactcactccactctctacaatccgtaactttaccctggggggccccagtgctggggtgaccggaccaggggccagtggaggcagcgagggaccccggctgcctggtagcagctcagcagcagcagcagccgccgccgccgccgcctataacccacaccacctgccactgcggcccattctgaggcctcgcaagtaccccaacagacccagcaagacgccggtgcacgagaggccctacccgtgcccagcagaaggctgcgaccggcggttctcccgctctgacgagctgacacggcacatccgaatccacactgggcataagcccttccagtgtcggatctgcatgcgcaacttcagccgcagtgaccacctcaccacccatatccgcacccacaccggtgagaagcccttcgcctgtgactactgtggccgaaagtttgcccggagtgatgagaggaagcgccacaccaagatccacctgagacagaaagagcggaaaagcagtgccccctctgcatcggtgccagccccctctacagcctcctgctctgggggcgtgcagcctgggggtaccctgtgcagcagtaacagcagcagtcttggcggagggccgctcgccccttgctcctctcggacccggacaccttgagatgagactcaggctgatacaccagctcccaaaggtcccggaggccctttgtccactggagctgcacaacaaacactaccaccctttcctgtccctctctccctttgttgggcaaagggctttggtggagctagcactgccccctttccacctagaagcaggttcttcctaaaacttagcccattctagtctctcttaggtgagttgactatcaacccaaggcaaaggggaggctcagaaggaggtggtgtggggacccctggccaagagggctgaggtctgaccctgctttaaagggttgtttgactaggttttgctaccccacttccccttattttgacccatcacaggtttttgaccctggatgtcagagttgatctaagacgttttctacaataggttgggagatgctgatcccttcaagtggggacagcaaaaagacaagcaaaactgatgtgcactttatggcttgggactgatttgggggacattgtacagtgagtgaagtatagcctttatgccacactctgtggccctaaaatggtgaatcagagcatatctagttgtctcaacccttgaagcaatatgtattataaactcagagaacagaagtgcaatgtgatgggaggaacatagcaatatctgctccttttcgagttgtttgagaaatgtaggctattttttcagtgtatatccactcagattttgtgtatttttgatgtacactgttctctaaattctgaatctttgggaaaaaatgtaaagcatttatgatctcagaggttaacttatttaagggggatgtacatatattctctgaaactaggatgcatgcaattgtgttggaagtgtccttggtgccttgtgtgatgtagacaatgttacaaggtctgcatgtaaatgggttgccttattatggagaaaaaaatcactccctgagtttagtatggctgtatatttctgcctattaatatttggaattttttttagaaagtatatttttgtatgctttgttttgtgacttaaaagtgttacctttgtagtcaaatttcagataagaatgtacataatgttaccggagctgatttgtttggtcattagctcttaatagttgtgaaaaaataaatctattctaacgcaaaaccactaactgaagttcagataatggatggtttgtgactatagtgtaaataaatacttttcaacaataaaaaaaaaaaaaaa

SEQ ID NO: 52098 - DNA, 1431 bp, Artificial Sequence
  derived and/or modified sequence
atgatgactgcaaaagccgtggataaaatcccggtgaccttgtcgggattcgtacaccagctttcagacaacatatacccggtggaggatcttgccgctacaagcgtgacaatcttcccgaatgccgagcttggaggcccatttgatcagatgaatggggtcgccggggacggcatgatcaacattgacatgaccggcgaaaaaagaagcctcgacctgccctacccttcgtcgtttgcacccgtctctgccccgcgcaatcagaccttcacatatatgggcaaatttagtatagaccctcagtacccgggcgcaagttgttatccagaaggaatcattaatatcgtcagcgctggcattttacaaggcgtgactagcccggcttccacgacagcctctagcagcgtgaccagcgccagccctaacccactggcaaccgggcctctcggagtctgcaccatgtcacagacacagcctgacctggatcacctatatagccctccaccccccccccctccatacagcggatgtgcaggtgatctctatcaggacccatccgctttcctgagtgccgcgactacaagcacaagcagcagtctggcctatcccccccccccaagttacccctctcccaaacccgccacagacccaggtctctttcctatgatcccggactaccccggcttttttccatcccaatgtcagcgagacttacacggcaccgccggaccggatcgcaaacctttcccatgtccactggacacgctacgggttcccccccctttgaccccactgtcaacaataaggaattttaccctagggggcccatcagctggggtgacaggccccggtgcgtctggcggcagcgaagggcctaggctgccaggctccagttctgctgcagctgcagcggccgccgcagctgcctacaacccacaccacctcccactcagacccatactgagaccccgcaagtacccgaatcgcccaagtaagacccccgtccatgagaggccctacccatgccccgcagagggctgcgatcggagattttcccgatccgatgagctgactaggcacataagaatccatacaggacacaagccgttccagtgccggatttgcatgcgcaatttcagccggtctgatcatctgaccactcatattaggacccatactggtgaaaaacctttcgcctgcgattactgcgggcggaaatttgctagatcggacgagcgcaagcgtcatacaaaaattcatctgcggcagaaggaaaggaagagctcagctccatctgccagcgtgcccgcgcccagcactgcctcttgcagtgggggcgttcagcccggaggcaccctctgttcctccaattccagtagtttgggcggggggcctctggctccgtgcagctctaggacccggacaccttag

SEQ ID NO: 52099 - DNA, 1431 bp, Artificial Sequence
  derived and/or modified sequence
atgatgactgccaaagcagtggataagattccagttacgttgtctggcttcgtccaccagctatcagacaatatttatccagtggaggacctcgcggcaacatcggtgactatcttcccaaatgcagaactaggcgggccatttgatcagatgaacggagttgcaggcgacggcatgataaacatcgatatgactggcgagaaaaggagtttggacttgccctatccatcgtcttttgcgcctgtttccgcaccgagaaaccaaacctttacctacatgggtaagtttagcatcgacccccagtatcccggcgcgtcttgctaccctgagggcattatcaatatcgtttcagcaggcatcctgcagggcgtcaccagccctgcctccacgacggcctcctctagcgttacttcggcctcaccaaacccattggctacggggcctcttggcgtgtgcaccatgagccaaacccagcccgacctggatcatctgtactctccgccacctccaccccccccatattccggatgtgctggtgacctctatcaggaccccagtgccttcctgagcgccgcgacaacatctacatcatcttcccttgcatatcccccccctccgtcataccccagtccaaagcccgcaactgatcccggtctcttccccatgattccagattaccccgggttcttccctagtcaatgtcagcgggacctgcacggcaccgccggccccgatcggaagcccttcccgtgtcctttggatacactacgcgttccccccccattgacacccttgtcaactattagaaatttcacattagggggcccttccgccggcgtgactggcccaggggcaagcggcggcagcgaaggccctaggctgccgggctcaagcagtgctgctgctgccgccgcagccgccgctgcctataaccctcaccacctccctcttaggcctatcctccggcctaggaaataccctaaccgcccctctaagacacctgtccatgaaaggccatacccctgccctgctgaggggtgtgatcgccgattttccaggtccgatgagctcactaggcacatccgcatccatactggacataagccatttcagtgcaggatctgtatgcgtaatttctcccggtctgatcacctcaccacccatatccgcactcacactggcgaaaagcctttcgcgtgcgattattgtggccggaaattcgctcggtcagatgagagaaagcgccataccaagatccacttgcgccaaaaagagcgaaagtctagcgccccttccgcttcagtgccagccccttcaacagcttcttgttccgggggggtccagccaggcgggactctgtgttcatccaacagttcctcactgggtggggggccgctagctccctgctcctccagaaccagaaccccatag

SEQ ID NO: 52100 - DNA, 1431 bp, Artificial Sequence
  derived and/or modified sequence
atgatgacagccaaggctgtggacaagatccctgtgaccctgagcggctttgtgcaccagctgagtgacaacatctaccctgtggaggacctggccgccacctctgtgaccatcttccccaatgctgagctgggcggcccctttgaccagatgaatggagtggccggagatggcatgatcaacatcgacatgactggagagaagaggagcctggacctgccctaccccagcagctttgcccctgtgtctgcccccaggaaccagaccttcacctacatgggcaagttcagcattgacccccagtacccaggggccagctgctacccagagggcatcatcaacatcgtgtctgctggcatcctgcagggcgtgaccagccctgccagcaccacagccagcagctctgtgaccagcgccagccccaaccccctggccaccggccccctgggcgtgtgcaccatgagccagacccagcctgacctggaccacctgtacagccccccacctcctcctccaccctacagcggctgtgccggggacctgtaccaggaccccagcgccttcctgtctgctgccaccaccagcaccagcagcagcctggcctacccacctcctccttcctaccccagccccaagccagccacagatcctggcctcttccccatgatcccagactacccaggcttcttccccagccagtgccagagggacctgcatggaacagctggccctgacaggaagcccttcccctgccccctggacaccctgcgggtgcccccacccctgacccccctgagcaccatccggaacttcaccctgggcggccccagcgctggggtgactggacctggggccagcggcggcagcgagggcccccggctgcccggcagcagcagcgctgctgctgctgctgctgctgctgctgcctacaacccccaccacctgcccctgcggcccatcctgcggcccaggaagtaccccaaccggcccagcaagacccctgtgcatgagcggccctacccctgcccagctgagggctgtgaccggcgcttcagcagaagtgatgagctgaccaggcacatccgcatccacacaggccacaagcccttccagtgccgcatctgcatgaggaacttcagcagaagtgaccacctgaccacccacatccgcacccacactggagagaagccctttgcctgtgactactgcggcaggaagtttgcccggagtgatgagaggaagaggcacaccaagatccacctgcggcagaaggagaggaagagcagcgcccccagcgcctctgtgcctgcccccagcacagccagctgcagcggcggcgtgcagcccggcggcaccctgtgcagcagcaacagcagcagcctgggcggcggccccctggccccctgcagcagcaggaccaggaccccctag

SEQ ID NO: 52101 - DNA, 1431 bp, Artificial Sequence
  derived and/or modified sequence
atgatgaccgccaaggccgtggacaagatccccgtgaccctgagcggattcgtgcaccagctgtcggacaatatttaccccgtggaggatctggcggctacatccgtaaccatcttcccaaacgcagagctaggcggcccctttgaccagatgaatggcgtcgccggggacgggatgattaacattgatatgaccggagagaagcgctctcttgatttgccctaccccagctcctttgcacctgtgagcgcgccccggaatcagacgtttacctacatgggtaaattcagcattgacccacagtaccctggggcaagctgctatcctgaaggaattattaatatcgtcagtgctggcatcctgcaaggggtcacctctcccgcaagcactactgcctcatcttccgtgaccagcgccagtcctaatcctttggcgactgggccactcggcgtatgcaccatgtcccagacacagccggatctcgaccacctttactctccccccccacccccaccgccttatagtggttgtgccggcgacttataccaagatccttccgcctttctctccgccgccaccacaagtaccagtagctcactggcctatcccccgcctccctcttacccttcacccaaacctgctacagatcccggattatttcctatgatccccgattaccccggcttcttcccttcacaatgccagcgcgacctccacggcacagctgggcctgatcgcaagcccttcccatgccccctggacaccttgagggtgccacctccgttgacccccctgagcacgatcaggaactttacacttggcggaccttcggccggcgtcactggacctggcgcctccggcggcagtgaaggacctaggcttccaggcagcagctcggcggccgccgcagccgccgctgctgcagcttacaatccgcaccacctgcctttgcgtcctattctgaggcccagaaaatacccaaatagaccatcaaaaactccagtgcatgagagaccttacccatgccctgctgagggatgcgatagaaggttcagtcgatcagacgagttgactcggcacatcagaatccacactggacataagcctttccaatgtcggatttgcatgagaaacttttcacggagtgatcatttgactacccacattcggacccataccggggagaaacctttcgcgtgcgactactgcgggcgaaagtttgcccggtccgacgagcgaaagcggcacactaagatccacttacggcaaaaggaaagaaaatcctccgctccgtctgccagcgtcccagcaccatcaactgcatcatgttccggcggcgtacaacccggcggcaccctgtgttccagcaactccagcagcctggggggcggcccactggctccctgttcctctcgaacacggacaccttag

SEQ ID NO: 52102 - DNA, 1431 bp, Artificial Sequence
  derived and/or modified sequence
atgatgaccgccaaggccgtggacaagatccccgtgaccctgagcggttttgttcatcagctgtctgacaacatttaccccgtcgaagacctggccgcgacctccgttaccatcttcccgaacgccgagctggggggaccttttgatcaaatgaatggagttgccggagacggtatgattaacatcgacatgacaggcgagaagcgaagcttggatctgccctacccctcttcttttgcccccgtgtctgccccaaggaatcagactttcacctatatgggaaaattttccatcgacccgcagtacccaggcgcttcgtgctatccagagggaattattaatatcgtgtccgccggcattcttcagggtgtgacttctccagctagcaccactgcttcgtcaagcgtcacatctgccagcccaaatcccctcgccactggccccttgggtgtctgcaccatgtcgcagactcagcccgatctagaccacctctatagcccccctcctcctccgccaccttactcgggctgcgctggcgacttatatcaggatccttctgcgtttctcagcgctgccaccactagcacttctagtagcctcgcttatccacccccaccgagttacccatctccaaagcccgctacggaccccgggttattccccatgataccagattatcctggcttctttccaagtcagtgtcagcgagatctgcatggcactgccggacccgacagaaagcccttcccttgcccactcgacaccttgcgggtcccacctccattgacacccctttctactatcagaaatttcactctcggcggcccgtcagccggtgtgaccgggcccggagcctctggaggtagcgagggtccgcgcttgcccggatctagttcagccgcggctgccgcggccgctgccgcggcatacaacccgcatcacctgcccctgcggcctattttgaggcccaggaagtatccaaacagaccttcgaagacgcctgttcacgaacgcccatatccgtgccctgcggaggggtgtgatagacgcttctctagatccgacgaactgacccggcatatccggatccataccggacacaaaccgttccagtgtcggatctgtatgagaaacttctctcgtagtgaccacctgacaacgcacattagaacacacactggcgagaaaccattcgcctgtgattactgtgggaggaagtttgctagatctgatgaacgcaaacggcacaccaaaattcacctgcgccagaaggagcggaagagtagcgcgccgagcgcctcagtccccgctccatccaccgcttcgtgttctggcggggtacaacctggcgggaccctttgcagcagcaacagtagcagcctgggcggtggaccgctcgccccttgtagctccaggacaaggacaccatag

SEQ ID NO: 52103 - DNA, 1431 bp, Artificial Sequence
  derived and/or modified sequence
atgatgacagccaaagctgtggacaaaatccccgtcacactgagtgggtttgtacaccagcttagcgacaacatttacccggtggaggatctggcagcaacctccgtcacgatcttccctaacgctgaattgggtggtccatttgatcaaatgaatggggtggctggcgacggtatgatcaacattgacatgaccggggaaaagagaagtttggatcttccatatcccagcagcttcgcgcctgtgtccgcacctcgcaaccaaaccttcacgtatatggggaagttttccattgaccctcagtatccaggcgctagttgctacccggaaggaatcattaacatcgtgagcgcagggatattgcaaggggttaccagcccagcctccaccacagcctccagcagcgtgacatctgccagcccaaaccccctggccactgggcctctgggcgtctgtaccatgtctcagactcaacctgatctcgatcacttgtacagccccccaccgcctccaccaccctattcaggatgtgccggtgatctgtatcaagatccctcagccttcctgagtgccgcaactacttcaactagctcatccctggcataccctccgccacccagctacccatccccaaaacccgctaccgatcctggactgttccccatgattccggactaccctggtttcttccctagtcagtgccagagggacctacacggcacagccggaccagatcgtaagcctttcccgtgtcccctggatacccttagagtaccccctccattgaccccactatccaccatccgcaactttaccttgggtgggcctagcgccggtgtgacagggccaggagctagtggagggtccgagggccctcggctgcctgggtcctcttcagctgctgcagctgctgccgcagccgctgcctataatccccatcatttacctcttcggccaattcttcgaccgcgaaaatatccaaatcgcccttctaagacgcctgtacatgagaggccttacccttgtcctgctgaaggctgtgaccgacgattcagtaggagcgacgagctgacccgccacattcggatccacacgggccataagcctttccagtgcagaatttgcatgcggaacttttcgaggagtgatcatttaacaacacatattcgcacacacaccggcgagaaaccgtttgcttgcgattactgtggacggaaattcgcccgatcagacgagaggaagcgtcatacgaaaattcacttaaggcagaaggaacgcaagtcctcggcaccttcggctagcgtgcctgccccatctaccgccagttgctccgggggagtacagccagggggtactttatgttctagtaatagttcctctctgggagggggacccctggctccctgttctagccgcacccgtacgccgtag

SEQ ID NO: 52104 - DNA, 1431 bp, Artificial Sequence
  derived and/or modified sequence
atgatgacggctaaagctgtcgataaaatcccggtgacactctctggatttgtgcaccagctcagtgacaacatctatccggttgaggatcttgcagcgacttccgtgaccatatttccaaatgccgagttgggagggccttttgatcagatgaatggcgtcgccggtgacgggatgattaacattgatatgacaggtgagaagaggagcctggatttgccctacccatcatctttcgccccagtatcagcacccagaaaccagacctttacttatatgggaaagtttagtatcgacccacaataccccggagcttcgtgctaccccgaggggattatcaatatagtatcagctggtattctccaaggagtgacaagtccggcatccaccacagccagctcctcagtgacaagtgcatccccaaatccacttgctaccggccctctcggagtgtgtactatgagccaaacacagcccgacttagaccacttgtacagtccacctcccccacctccaccctacagtgggtgtgcaggagacctttaccaggatcctagtgctttcctgagcgccgcaacaaccagcacatcctcaagtctggcatatccacctcctccatcataccctagtccgaaacccgcaacagacccgggtctgtttccaatgataccagattatcctggtttttttccatcacagtgccaaagggatttacatggtacggccggacctgaccgaaaacctttcccgtgcccactggatacgcttagagtccctccccctcttacccccctctccactataaggaatttcacacttggagggccatccgcaggcgtcaccggcccaggagcctccggaggcagcgaaggcccaaggctcccgggatcatctagcgccgcagcagcagcggctgctgccgctgcatacaatccgcaccatcttcctctccggcctatactccggcctcgcaagtacccaaataggcccagcaaaacccccgtacacgaaagaccttatccatgtcccgctgaaggatgcgaccgaagattctccagaagtgacgagctcacccgccatattcgtatccatacaggtcataagccatttcagtgtcggatatgcatgagaaacttctcacgaagtgatcatctgacaacacatattcgcacccataccggtgaaaaaccattcgcctgtgactactgtggcagaaagttcgcgaggagcgatgaaaggaagcgacatactaagatccacctgcgtcagaaggagcgaaagagcagcgccccttccgcctctgtgccagctccttcgaccgcctcatgtagtgggggagtgcaaccgggagggactctgtgctcatctaactcctcctcacttggcggaggtccgctcgctccttgctcttctagaactaggacgccttag

SEQ ID NO: 52105 - DNA, 1431 bp, Artificial Sequence
  derived and/or modified sequence
atgatgaccgccaaggccgtggacaagatccccgtgaccctgagcggcttcgtgcaccagctgagcgacaacatctaccccgtggaggacctggccgccaccagcgtgaccatcttccccaacgccgagctgggcggccccttcgaccagatgaacggcgtggccggcgacggcatgatcaacatcgacatgaccggcgagaagagaagcctggacctgccctaccccagcagcttcgcccccgtgagcgcccccagaaaccagaccttcacctacatgggcaagttcagcatcgacccccagtaccccggcgccagctgctaccccgagggcatcatcaacatcgtgagcgccggcatcctgcagggcgtgaccagccccgccagcaccaccgccagcagcagcgtgaccagcgccagccccaaccccctggccaccggccccctgggcgtgtgcaccatgagccagacccagcccgacctggaccacctgtacagcccccccccccccccccccccctacagcggctgcgccggcgacctgtaccaggaccccagcgccttcctgagcgccgccaccaccagcaccagcagcagcctggcctacccccccccccccagctaccccagccccaagcccgccaccgaccccggcctgttccccatgatccccgactaccccggcttcttccccagccagtgccagagagacctgcacggcaccgccggccccgacagaaagcccttcccctgccccctggacaccctgagagtgcccccccccctgacccccctgagcaccatcagaaacttcaccctgggcggccccagcgccggcgtgaccggccccggcgccagcggcggcagcgagggccccagactgcccggcagcagcagcgccgccgccgccgccgccgccgccgccgcctacaacccccaccacctgcccctgagacccatcctgagacccagaaagtaccccaacagacccagcaagacccccgtgcacgagagaccctacccctgccccgccgagggctgcgacagaagattcagcagaagcgacgagctgaccagacacatcagaatccacaccggccacaagcccttccagtgcagaatctgcatgagaaacttcagcagaagcgaccacctgaccacccacatcagaacccacaccggcgagaagcccttcgcctgcgactactgcggcagaaagttcgccagaagcgacgagagaaagagacacaccaagatccacctgagacagaaggagagaaagagcagcgcccccagcgccagcgtgcccgcccccagcaccgccagctgcagcggcggcgtgcagcccggcggcaccctgtgcagcagcaacagcagcagcctgggcggcggccccctggccccctgcagcagcagaaccagaaccccctag

SEQ ID NO: 52106 - DNA, 2968 bp, Artificial Sequence
  derived and/or modified sequence
gagcaattgattaatagctcggcgaggggactcactgactgttataataacactacaccagcaactcctggcttcccagcagccggaacacagacaggagagagtcagtggcaaatagacatttttcttatttcttaaaaaacagcaacttgtttgctacttttatttctgttgatttttttttcttggtgtgtgtggtggttgtttttaagtgtggagggcaaaaggagataccatcccaggctcagtccaacccctctccaaaacggcttttctgacactccaggtagcgagggagttgggtctccaggttgtgcgaggagcaaatgatgaccgccaaggccgtagacaaaatcccagtaactctcagtggttttgtgcaccagctgtctgacaacatctacccggtggaggacctcgccgccacgtcggtgaccatctttcccaatgccgaactgggaggcccctttgaccagatgaacggagtggccggagatggcatgatcaacattgacatgactggagagaagaggtcgttggatctcccatatcccagcagctttgctcccgtctctgcacctagaaaccagaccttcacttacatgggcaagttctccattgaccctcagtaccctggtgccagctgctacccagaaggcataatcaatattgtgagtgcaggcatcttgcaaggggtcacttccccagcttcaaccacagcctcatccagcgtcacctctgcctcccccaacccactggccacaggacccctgggtgtgtgcaccatgtcccagacccagcctgacctggaccacctgtactctccgccaccgcctcctcctccttattctggctgtgcaggagacctctaccaggacccttctgcgttcctgtcagcagccaccacctccacctcttcctctctggcctacccaccacctccttcctatccgtcccccaagccagccacggacccaggtctcttcccaatgatcccagactatcctggattctttccatctcagtgccagagagacctacatggtacagctggcccagaccgtaagccctttccctgcccactggacaccctgcgggtgccccctccactcactccactctctacaatccgtaactttaccctggggggccccagtgctggggtgaccggaccaggggccagtggaggcagcgagggaccccggctgcctggtagcagctcagcagcagcagcagccgccgccgccgccgcctataacccacaccacctgccactgcggcccattctgaggcctcgcaagtaccccaacagacccagcaagacgccggtgcacgagaggccctacccgtgcccagcagaaggctgcgaccggcggttctcccgctctgacgagctgacacggcacatccgaatccacactgggcataagcccttccagtgtcggatctgcatgcgcaacttcagccgcagtgaccacctcaccacccatatccgcacccacaccggtgagaagcccttcgcctgtgactactgtggccgaaagtttgcccggagtgatgagaggaagcgccacaccaagatccacctgagacagaaagagcggaaaagcagtgccccctctgcatcggtgccagccccctctacagcctcctgctctgggggcgtgcagcctgggggtaccctgtgcagcagtaacagcagcagtcttggcggagggccgctcgccccttgctcctctcggacccggacaccttgagatgagactcaggctgatacaccagctcccaaaggtcccggaggccctttgtccactggagctgcacaacaaacactaccaccctttcctgtccctctctccctttgttgggcaaagggctttggtggagctagcactgccccctttccacctagaagcaggttcttcctaaaacttagcccattctagtctctcttaggtgagttgactatcaacccaaggcaaaggggaggctcagaaggaggtggtgtggggacccctggccaagagggctgaggtctgaccctgctttaaagggttgtttgactaggttttgctaccccacttccccttattttgacccatcacaggtttttgaccctggatgtcagagttgatctaagacgttttctacaataggttgggagatgctgatcccttcaagtggggacagcaaaaagacaagcaaaactgatgtgcactttatggcttgggactgatttgggggacattgtacagtgagtgaagtatagcctttatgccacactctgtggccctaaaatggtgaatcagagcatatctagttgtctcaacccttgaagcaatatgtattataaactcagagaacagaagtgcaatgtgatgggaggaacatagcaatatctgctccttttcgagttgtttgagaaatgtaggctattttttcagtgtatatccactcagattttgtgtatttttgatgtacactgttctctaaattctgaatctttgggaaaaaatgtaaagcatttatgatctcagaggttaacttatttaagggggatgtacatatattctctgaaactaggatgcatgcaattgtgttggaagtgtccttggtgccttgtgtgatgtagacaatgttacaaggtctgcatgtaaatgggttgccttattatggagaaaaaaaatcactccctgagtttagtatggctgtatatttctgcctattaatatttggaattttttttagaaagtatatttttgtatgctttgttttgtgacttaaaagtgttacctttgtagtcaaatttcagataagaatgtacataatgttaccggagctgatttgtttggtcattagctcttaatagttgtgaaaaaataaatctattctaacgcaaaaccactaactgaagttcagataatggatggtttgtgactatagtgtaaataaatacttttcaacaata

SEQ ID NO: 52107 - DNA, 2844 bp, Artificial Sequence
  derived and/or modified sequence
gatgcagcgtagctcttagggggaggtgtgagtccttggaaagctcacaagaatttcagaggggcccgagatgcgagtcggactcccttccgaggcgtcgtcttgcccatggtcagcgcgggggccgcgggacccgccagagcgcaggcggagtgggctggcgcacgtggtagcgagggagttgggtctccaggttgtgcgaggagcaaatgatgaccgccaaggccgtagacaaaatcccagtaactctcagtggttttgtgcaccagctgtctgacaacatctacccggtggaggacctcgccgccacgtcggtgaccatctttcccaatgccgaactgggaggcccctttgaccagatgaacggagtggccggagatggcatgatcaacattgacatgactggagagaagaggtcgttggatctcccatatcccagcagctttgctcccgtctctgcacctagaaaccagaccttcacttacatgggcaagttctccattgaccctcagtaccctggtgccagctgctacccagaaggcataatcaatattgtgagtgcaggcatcttgcaaggggtcacttccccagcttcaaccacagcctcatccagcgtcacctctgcctcccccaacccactggccacaggacccctgggtgtgtgcaccatgtcccagacccagcctgacctggaccacctgtactctccgccaccgcctcctcctccttattctggctgtgcaggagacctctaccaggacccttctgcgttcctgtcagcagccaccacctccacctcttcctctctggcctacccaccacctccttcctatccgtcccccaagccagccacggacccaggtctcttcccaatgatcccagactatcctggattctttccatctcagtgccagagagacctacatggtacagctggcccagaccgtaagccctttccctgcccactggacaccctgcgggtgccccctccactcactccactctctacaatccgtaactttaccctggggggccccagtgctggggtgaccggaccaggggccagtggaggcagcgagggaccccggctgcctggtagcagctcagcagcagcagcagccgccgccgccgccgcctataacccacaccacctgccactgcggcccattctgaggcctcgcaagtaccccaacagacccagcaagacgccggtgcacgagaggccctacccgtgcccagcagaaggctgcgaccggcggttctcccgctctgacgagctgacacggcacatccgaatccacactgggcataagcccttccagtgtcggatctgcatgcgcaacttcagccgcagtgaccacctcaccacccatatccgcacccacaccggtgagaagcccttcgcctgtgactactgtggccgaaagtttgcccggagtgatgagaggaagcgccacaccaagatccacctgagacagaaagagcggaaaagcagtgccccctctgcatcggtgccagccccctctacagcctcctgctctgggggcgtgcagcctgggggtaccctgtgcagcagtaacagcagcagtcttggcggagggccgctcgccccttgctcctctcggacccggacaccttgagatgagactcaggctgatacaccagctcccaaaggtcccggaggccctttgtccactggagctgcacaacaaacactaccaccctttcctgtccctctctccctttgttgggcaaagggctttggtggagctagcactgccccctttccacctagaagcaggttcttcctaaaacttagcccattctagtctctcttaggtgagttgactatcaacccaaggcaaaggggaggctcagaaggaggtggtgtggggacccctggccaagagggctgaggtctgaccctgctttaaagggttgtttgactaggttttgctaccccacttccccttattttgacccatcacaggtttttgaccctggatgtcagagttgatctaagacgttttctacaataggttgggagatgctgatcccttcaagtggggacagcaaaaagacaagcaaaactgatgtgcactttatggcttgggactgatttgggggacattgtacagtgagtgaagtatagcctttatgccacactctgtggccctaaaatggtgaatcagagcatatctagttgtctcaacccttgaagcaatatgtattataaactcagagaacagaagtgcaatgtgatgggaggaacatagcaatatctgctccttttcgagttgtttgagaaatgtaggctattttttcagtgtatatccactcagattttgtgtatttttgatgtacactgttctctaaattctgaatctttgggaaaaaatgtaaagcatttatgatctcagaggttaacttatttaagggggatgtacatatattctctgaaactaggatgcatgcaattgtgttggaagtgtccttggtgccttgtgtgatgtagacaatgttacaaggtctgcatgtaaatgggttgccttattatggagaaaaaaaatcactccctgagtttagtatggctgtatatttctgcctattaatatttggaattttttttagaaagtatatttttgtatgctttgttttgtgacttaaaagtgttacctttgtagtcaaatttcagataagaatgtacataatgttaccggagctgatttgtttggtcattagctcttaatagttgtgaaaaaataaatctattctaacgcaaaaccactaactgaagttcagataatggatggtttgtgactatagtgtaaataaatacttttc

SEQ ID NO: 52108 - protein, 382 aa, Artificial Sequence
  derived and/or modified sequence
MRSHFLQWALATSRNKDQITNIFSGFAGLLAILLVVAVFCILWNWNKRKKRQVPYLRVTVMPLLTLPQTRQRAKNIYDILPWRQEDLGRHESRSMRIFSTESLLSRNSESPEHVPSQAGNAFQEHTAHIHATEYAVGIYDNAMVPQMCGNLTPSAHCINVRASRDCASISSEDSHDYVNVPTAEEIAETLASTKSPSRNLFVLPSTQKLEFTEERDEGCGDAGDCTSLYSPGAEDSDSLSNGEGSSQISNDYVNMTGLDLSAIQERQLWVAFQCCRDYENVPAADPSGSQQQAEKDVPSSNIGHVEDKTDDPGTHVQCVKRTFLASGDYADFQPFTQSEDSQMKHREEMSNEDSSDYENVLTAKLGGRDSEQGPGTQLLPDE

SEQ ID NO: 52109 - DNA, 1149 bp, Artificial Sequence
  derived and/or modified sequence
atgagaagccacttcctgcagtgggccctggccaccagcagaaacaaggaccagatcaccaacatcttcagcggcttcgccggcctgctggccatcctgctggtggtggccgtgttctgcatcctgtggaactggaacaagagaaagaagagacaggtgccctacctgagagtgaccgtgatgcccctgctgaccctgccccagaccagacagagagccaagaacatctacgacatcctgccctggagacaggaggacctgggcagacacgagagcagaagcatgagaatcttcagcaccgagagcctgctgagcagaaacagcgagagccccgagcacgtgcccagccaggccggcaacgccttccaggagcacaccgcccacatccacgccaccgagtacgccgtgggcatctacgacaacgccatggtgccccagatgtgcggcaacctgacccccagcgcccactgcatcaacgtgagagccagcagagactgcgccagcatcagcagcgaggacagccacgactacgtgaacgtgcccaccgccgaggagatcgccgagaccctggccagcaccaagagccccagcagaaacctgttcgtgctgcccagcacccagaagctggagttcaccgaggagagagacgagggctgcggcgacgccggcgactgcaccagcctgtacagccccggcgccgaggacagcgacagcctgagcaacggcgagggcagcagccagatcagcaacgactacgtgaacatgaccggcctggacctgagcgccatccaggagagacagctgtgggtggccttccagtgctgcagagactacgagaacgtgcccgccgccgaccccagcggcagccagcagcaggccgagaaggacgtgcccagcagcaacatcggccacgtggaggacaagaccgacgaccccggcacccacgtgcagtgcgtgaagagaaccttcctggccagcggcgactacgccgacttccagcccttcacccagagcgaggacagccagatgaagcacagagaggagatgagcaacgaggacagcagcgactacgagaacgtgctgaccgccaagctgggcggcagagacagcgagcagggccccggcacccagctgctgcccgacgagtag

SEQ ID NO: 52110 - DNA, 1149 bp, Artificial Sequence
  derived and/or modified sequence
atgaggtcccacttcctgcagtgggctctggctaccagccggaacaaggatcagataacaaatatttttagtgggttcgccggcttactcgcaatcctcttggtcgtagccgtattttgtatcctctggaactggaataagagaaagaagagacaggtgccgtacttacgagtaacggtcatgcctctgttgacccttccccagactcggcagcgcgccaagaatatctatgatattctgccatggcgccaggaggatctcgggcgccacgaatctaggtccatgcggattttctccaccgagagtcttctctctcgcaactcggagtctccagagcacgtgccctcccaggctggcaacgcctttcaggagcacacggctcatattcacgcgacagagtacgctgttggcatatatgataacgccatggtcccacagatgtgtgggaatttgacgccatctgcccactgcataaatgtgagagcttctcgggattgcgctagcatctcatctgaggattcccatgactacgtgaacgtgccgaccgcagaagagatcgcagaaaccctggcttctactaagtccccttccagaaacttatttgtactcccgtccacacagaagctggaattcacagaagagagagatgaggggtgcggtgacgccggcgattgcacctccctgtacagccccggggccgaagattctgactccctcagtaatggggagggatcctcccagatcagtaatgattacgtcaatatgactggtctggatctctcggctattcaagaaagacagctgtgggtggcgtttcagtgctgcagggattacgagaacgtgccggccgcggatccctcaggttcccagcaacaggctgagaaagacgtgcccagctcgaacatcggacacgttgaggacaaaaccgatgatcctggcacacatgttcaatgcgtgaagcgcactttcctggcgtcaggcgattacgctgactttcagccctttacacaatcggaggattctcagatgaagcacagagaggaaatgagcaacgaggatagctccgattacgagaatgtcctgaccgccaagttgggggggcgagactcagagcagggtcctgggactcaactgcttcctgacgagtag

SEQ ID NO: 52111 - DNA, 1356 bp, Artificial Sequence
  derived and/or modified sequence
cttttcactctgctttgggtgttgaaggaagacgagcttctcacggagcctctcttgagcctcttggcagtttccccctctgtgcccctcacgtttccaccagaaacgtgaaggcagaggccacagattctccctgagccacctcacttggaagcaccatgtccggatgagatcgcacttcctgcagtgggcattagccacgtccagaaataaagaccagatcaccaacatcttttccgggtttgcgggactcctcgccatcctcctggtcgttgcggttttctgcatcttgtggaattggaataaacggaagaagcgacaagttccttacctccgagttaccgtcatgcccttgctgactttgccacaaaccagacaaagagccaaaaatatttatgacatcttgccttggcgacaggaagacctggggagacatgagtcgaggagtatgcgcattttcagtactgagagcctcctctccagaaattctgagagcccggagcatgtgccctcccaagcaggcaatgccttccaggagcatacagcccacatccatgccacagagtacgcggtgggtatctatgacaacgccatggtcccccagatgtgtgggaacctcactccctcggcacactgcatcaatgtcagagcttccagagactgcgcaagcatttcttcagaggattcgcatgattatgtcaatgtccccacagcagaagagattgctgagactctagcttctaccaaaagcccttccagaaatctctttgttcttcccagtacccagaagctggagtttactgaggaaagagatgagggctgtggagatgctggtgactgcaccagtttgtattctccaggagctgaggacagtgattcactcagcaatggagaaggttcttctcagatctcaaatgactatgtcaacatgacagggttggatctcagtgccatccaggaaaggcagctctgggtggcttttcagtgctgcagagactatgaaaatgttccagcagcagatcccagtggaagccagcagcaggctgagaaagatgtgccatcctcaaacataggtcatgtcgaggacaagacagatgatcccgggacccatgtccaatgtgtcaaaaggacattccttgcttcaggggattatgcagactttcagccattcacacagagtgaggacagtcagatgaaacatagagaagagatgtcaaatgaggactccagtgactatgaaaatgtgctaactgccaagttaggaggcagggactctgagcaggggcctggcactcagctccttcctgatgaatgaagacccaggtacccagccataaagccacattgagtagtcta

SEQ ID NO: 52112 - DNA, 1149 bp, Artificial Sequence
  derived and/or modified sequence
atgaggagccacttcctgcagtgggccctggccaccagcaggaacaaggaccagatcaccaacatcttcagcggctttgctggcctgctggccatcctgctggtggtggccgtgttctgcatcctgtggaactggaacaagaggaagaagaggcaggtgccctacctgcgggtgacagtgatgcccctgctgaccctgccccagacccggcagagggccaagaacatctatgacatcctgccctggaggcaggaggacctgggcagacatgagagccgctccatgaggatcttcagcacagagagcctgctgagcaggaacagcgagagccctgagcacgtgcccagccaggccggaaatgccttccaggagcacacagcccacatccacgccacagaatatgctgtgggcatctatgacaatgccatggtgccccagatgtgtggcaacctgacccccagcgcccactgcatcaacgtgcgggccagccgggactgtgccagcatcagcagcgaggacagccatgactatgtgaatgtgcccacagctgaggagattgctgagaccctggccagcaccaagagccccagcaggaacctgtttgtgctgcccagcacccagaagctggagttcacagaggagagagatgagggctgtggagatgctggggactgcaccagcctgtacagccctggagctgaggacagcgacagcctgagcaatggagagggcagcagccagatcagcaatgactatgtgaacatgacaggcctggacctgagcgccatccaggagcggcagctgtgggtggccttccagtgctgccgggactatgaaaatgtgcctgctgctgaccccagcggcagccagcagcaggccgagaaggatgtgcccagcagcaacatcggccacgtggaggacaagacagatgaccccggcacccacgtgcagtgtgtgaagaggaccttcctggccagcggggactatgctgacttccagcccttcacccagagcgaggacagccagatgaagcaccgggaggagatgagcaatgaagacagcagtgactatgaaaatgtgctgacagccaagctgggcggccgggacagcgagcagggccctggcacccagctgctgcctgatgaatag

SEQ ID NO: 52113 - DNA, 1149 bp, Artificial Sequence
  derived and/or modified sequence
atgcggagccacttcctgcagtgggccctggccaccagccggaacaaggaccaaatcaccaatatatttagcggcttcgccggactgctggcgatcctcttggtcgttgcagtgttttgcatcctttggaattggaataaacgaaagaagaggcaggttccatatcttcgggttacagtgatgcctctgcttactctccctcagactcgccaacgcgccaaaaacatctacgacatcctcccatggcgacaggaggacttaggccgccacgaaagcagaagtatgaggatcttctccactgagtctcttctgagcagaaacagtgagagcccggagcatgttccctcccaggccggaaacgccttccaggagcacactgcacatatacatgcaacagagtatgctgtcggcatctatgacaatgccatggtgcctcagatgtgtggaaacctgaccccttccgcccactgtatcaatgtacgggcttccagagactgtgcgagcatttcatctgaggacagccacgactatgttaatgtccctaccgccgaagagatagccgagaccctcgccagcaccaaatcacctagcaggaacctgtttgtgcttccctccacacaaaaactggaattcactgaagaacgcgacgagggatgtggggacgctggtgattgcacatcactttactcaccaggcgccgaggatagtgatagcttgagcaatggtgaaggctcgagccagatctccaacgattacgtaaatatgacaggtctggatttgtctgcgatacaggagagacagctctgggtggcctttcagtgttgccgagattacgagaacgtgccagccgctgaccccagtggctcacaacagcaggcagaaaaagacgttccctccagcaatataggacacgtggaagacaagacagacgaccccggcacgcatgtccagtgcgtgaagcgcactttccttgcttctggagactacgcagactttcagccttttacccagtccgaggactctcaaatgaagcatcgcgaggaaatgtccaatgaggactcatcggactatgagaatgttcttaccgccaagctcggaggccgggatagcgagcagggacctggtacccagctgctgcctgacgaatag

SEQ ID NO: 52114 - DNA, 1149 bp, Artificial Sequence
  derived and/or modified sequence
atgagatcacatttcctgcaatgggcattggctaccagccggaacaaggaccagatcaccaatatcttctctggattcgcgggactccttgcgattctgttagtggtggccgtgttctgcatcctgtggaattggaacaaaagaaagaaaaggcaggttccgtacctcagggtgactgtgatgcccctgttaacactcccccagacacgacagcgggctaaaaatatttatgacattctcccatggcgccaggaggacctaggaaggcatgaaagtagaagcatgcgaatatttagtaccgaaagcctactgtcacgaaattccgagtcccccgaacacgtcccatcacaggcgggtaatgccttccaggagcacactgcacacatacacgcgactgagtatgccgtcggaatttatgacaatgctatggtgccccaaatgtgcggtaacttaaccccgtcagcccactgtatcaatgtgagggcctcaagggactgtgcgagtatatcatcggaggacagccatgactatgtcaacgttccgaccgccgaagaaatcgcggagaccctggccagcacaaaatccccctccagaaacctcttcgtgcttccgtccactcaaaagctggagttcacagaggagagagacgaagggtgtggcgacgctggtgactgcacttccctgtactcccctggcgctgaagactcggacagtctcagcaacggggaaggttcatcccaaatttccaacgactacgtcaacatgacgggcctggaccttagcgccatccaggagcgacagttgtgggtggccttccagtgttgtcgtgactatgaaaatgtgcccgctgctgatccctctggttcacagcagcaagcggagaaggatgtgccaagctcaaatatcggtcacgtcgaagataagaccgacgatcccggtactcatgtgcagtgcgttaaacgcacattcctggcgtccggtgactatgccgactttcagccctttacccagagtgaggactcccaaatgaagcatagggaagagatgagtaacgaagactcctctgactatgagaacgtgctcaccgctaaactaggtggccgtgattctgaacaaggtcccggtacccagttgctgcctgatgagtag

SEQ ID NO: 52115 - protein, 851 aa, Artificial Sequence
  derived and/or modified sequence
MAQVLHVPAPFPGTPGPASPPAFPAKDPDPPYSVETPYGYRLDLDFLKYVDDIEKGHTLRRVAVQRRPRLSSLPRGPGSWWTSTESLCSNASGDSRHSAYSYCGRGFYPQYGALETRGGFNPRVERTLLDARRRLEDQAATPTGLGSLTPSAAGSTASLVGVGLPPPTPRSSGLSTPVPPSAGHLAHVREQMAGALRKLRQLEEQVKLIPVLQVKLSVLQEEKRQLTVQLKSQKFLGHPTAGRGRSELCLDLPDPPEDPVALETRSVGTWVRERDLGMPDGEAALAAKVAVLETQLKKALQELQAAQARQADPQPQAWPPPDSPVRVDTVRVVEGPREVEVVASTAAGAPAQRAQSLEPYGTGLRALAMPGRPESPPVFRSQEVVETMCPVPAAATSNVHMVKKISITERSCDGAAGLPEVPAESSSSPPGSEVASLTQPEKSTGRVPTQEPTHREPTRQAASQESEEAGGTGGPPAGVRSIMKRKEEVADPTAHRRSLQFVGVNGGYESSSEDSSTAENISDNDSTENEAPEPRERVPSVAEAPQLRPAGTAAAKTSRQECQLSRESQHIPTAEGASGSNTEEEIRMELSPDLISACLALEKYLDNPNALTERELKVAYTTVLQEWLRLACRSDAHPELVRRHLVTFRAMSARLLDYVVNIADSNGNTALHYSVSHANFPVVQQLLDSGVCKVDKQNRAGYSPIMLTALATLKTQDDIETVLQLFRLGNINAKASQAGQTALMLAVSHGRVDVVKALLACEADVNVQDDDGSTALMCACEHGHKEIAGLLLAVPSCDISLTDRDGSTALMVALDAGQSEIASMLYSRMNIKCSFAPMSDDESPTSSSAEE

SEQ ID NO: 52116 - DNA, 2556 bp, Artificial Sequence
  derived and/or modified sequence
atggcccaggtgctgcacgtgcccgcccccttccccggcacccccggccccgccagcccccccgccttccccgccaaggaccccgaccccccctacagcgtggagaccccctacggctacagactggacctggacttcctgaagtacgtggacgacatcgagaagggccacaccctgagaagagtggccgtgcagagaagacccagactgagcagcctgcccagaggccccggcagctggtggaccagcaccgagagcctgtgcagcaacgccagcggcgacagcagacacagcgcctacagctactgcggcagaggcttctacccccagtacggcgccctggagaccagaggcggcttcaaccccagagtggagagaaccctgctggacgccagaagaagactggaggaccaggccgccacccccaccggcctgggcagcctgacccccagcgccgccggcagcaccgccagcctggtgggcgtgggcctgcccccccccacccccagaagcagcggcctgagcacccccgtgccccccagcgccggccacctggcccacgtgagagagcagatggccggcgccctgagaaagctgagacagctggaggagcaggtgaagctgatccccgtgctgcaggtgaagctgagcgtgctgcaggaggagaagagacagctgaccgtgcagctgaagagccagaagttcctgggccaccccaccgccggcagaggcagaagcgagctgtgcctggacctgcccgacccccccgaggaccccgtggccctggagaccagaagcgtgggcacctgggtgagagagagagacctgggcatgcccgacggcgaggccgccctggccgccaaggtggccgtgctggagacccagctgaagaaggccctgcaggagctgcaggccgcccaggccagacaggccgacccccagccccaggcctggcccccccccgacagccccgtgagagtggacaccgtgagagtggtggagggccccagagaggtggaggtggtggccagcaccgccgccggcgcccccgcccagagagcccagagcctggagccctacggcaccggcctgagagccctggccatgcccggcagacccgagagcccccccgtgttcagaagccaggaggtggtggagaccatgtgccccgtgcccgccgccgccaccagcaacgtgcacatggtgaagaagatcagcatcaccgagagaagctgcgacggcgccgccggcctgcccgaggtgcccgccgagagcagcagcagcccccccggcagcgaggtggccagcctgacccagcccgagaagagcaccggcagagtgcccacccaggagcccacccacagagagcccaccagacaggccgccagccaggagagcgaggaggccggcggcaccggcggcccccccgccggcgtgagaagcatcatgaagagaaaggaggaggtggccgaccccaccgcccacagaagaagcctgcagttcgtgggcgtgaacggcggctacgagagcagcagcgaggacagcagcaccgccgagaacatcagcgacaacgacagcaccgagaacgaggcccccgagcccagagagagagtgcccagcgtggccgaggccccccagctgagacccgccggcaccgccgccgccaagaccagcagacaggagtgccagctgagcagagagagccagcacatccccaccgccgagggcgccagcggcagcaacaccgaggaggagatcagaatggagctgagccccgacctgatcagcgcctgcctggccctggagaagtacctggacaaccccaacgccctgaccgagagagagctgaaggtggcctacaccaccgtgctgcaggagtggctgagactggcctgcagaagcgacgcccaccccgagctggtgagaagacacctggtgaccttcagagccatgagcgccagactgctggactacgtggtgaacatcgccgacagcaacggcaacaccgccctgcactacagcgtgagccacgccaacttccccgtggtgcagcagctgctggacagcggcgtgtgcaaggtggacaagcagaacagagccggctacagccccatcatgctgaccgccctggccaccctgaagacccaggacgacatcgagaccgtgctgcagctgttcagactgggcaacatcaacgccaaggccagccaggccggccagaccgccctgatgctggccgtgagccacggcagagtggacgtggtgaaggccctgctggcctgcgaggccgacgtgaacgtgcaggacgacgacggcagcaccgccctgatgtgcgcctgcgagcacggccacaaggagatcgccggcctgctgctggccgtgcccagctgcgacatcagcctgaccgacagagacggcagcaccgccctgatggtggccctggacgccggccagagcgagatcgccagcatgctgtacagcagaatgaacatcaagtgcagcttcgcccccatgagcgacgacgagagccccaccagcagcagcgccgaggagtag

SEQ ID NO: 52117 - DNA, 2556 bp, Artificial Sequence
  derived and/or modified sequence
atggctcaggtcctccacgtccccgcaccctttccaggtaccccagggcccgccagcccaccagcgtttccagcgaaggaccctgatcccccctactccgtagaaacgccttatggctaccgcctagatcttgattttttgaagtatgtggacgacattgaaaaagggcatacgctgcgacgcgttgccgtgcagcggaggcccaggctgtcctccctgcccagaggcccagggtcttggtggacaagcacagagtcattatgttccaatgcctcaggggattcccggcattcagcctattcctattgtggacggggcttttacccgcagtacggcgcgttggaaactagaggtggctttaatccgcgcgtggagcggacattgctggacgcacggaggcgcctggaggatcaggctgccacgccaaccggcttgggctcgttaaccccctcggccgcagggtccaccgccagtcttgtaggggtgggactgccacccccaacacctcgctcctccggactcagcacccctgttccgccatccgccggtcacttggcccacgtgagagagcagatggcgggggcactaagaaagcttagacagctggaggaacaggttaaactcatccccgtgctgcaggtcaaactcagcgtcctgcaggaggagaagcgtcagctgaccgtccaattaaagtcccagaaatttcttgggcaccccacagccggccgaggcaggtcagaactttgtctcgacctgcccgacccaccagaggacccagtagctttggagaccaggtctgtgggcacgtgggtgagggagcgggatctcggcatgccagacggtgaagctgccttggccgccaaggtggccgttttagaaacacagcttaaaaaggcattgcaggagctgcaggccgcacaggcacgtcaggcagatccacagccccaggcctggccaccaccagatagtcctgttcgagtggatactgtgagggtggtcgagggaccccgtgaggtcgaagtggtagcgagcacagccgctggagcgcccgcccagagggcacaaagcttagagccatatggtacaggactccgagcccttgccatgcctggcaggcctgagagcccgccagtgtttcgctctcaagaagtggtggagaccatgtgccctgttcctgcggccgccacaagcaacgtacacatggttaagaagatctccattaccgagcgaagttgcgatggtgcggccggcctccccgaagtgccagccgagtcgtcttcctcgccccccggctccgaagtggcctccctgactcaacccgaaaagtcaacaggacgtgtccctactcaggagccgacccaccgtgagccgacccgacaggccgctagccaggagtctgaggaagccggtgggactggaggccctccggctggcgtgaggtcaatcatgaaacgcaaagaggaggtcgccgatcctactgctcacagacggtccttacagttcgttggagtcaacggcgggtatgagtcctccagtgaagatagctcgactgcggaaaatatttccgacaacgattcaactgaaaacgaagcccctgaaccccgggagcgggttccatcggtggccgaagccccacagcttcgaccagcaggcaccgcagccgcaaagacaagtcggcaggaatgccaactgagcagagagtctcagcatattccaacagccgagggggcttctggctcaaacaccgaggaagaaatcaggatggagttgtcccccgatctcattagtgcatgtttggcactcgagaagtatctcgataatccgaatgccctaaccgaaagggagttgaaagttgcatatactactgtactgcaggaatggctcaggctggcttgtagaagcgacgcacatcccgaactcgtgaggcgccacctcgtcaccttccgcgcgatgtctgccaggctgcttgactacgtggtgaacattgccgattccaatggaaataccgcgcttcactatagcgtctcgcacgcaaacttccctgttgtgcagcaactcctcgacagcggcgtttgcaaagtcgataaacagaacagggccggatactcccctattatgctcactgccctagcgactctgaagacacaagacgacatagaaactgtactccaactcttcagattaggaaacattaacgccaaggcgtctcaggccggccagacagccttaatgttagccgtgtcccatggtcgggttgacgtggtcaaggctctgttagcatgtgaggcagatgtcaatgtccaggatgatgacgggtcaacggctctgatgtgcgcctgcgaacacggccataaggagatagccggactgctgttggcagtcccgagttgcgacatatccctcactgatagagacgggtcaactgcactgatggtagccctggatgccggccagagtgagatcgcttctatgctgtacagccggatgaacatcaaatgctcctttgctccgatgagtgatgacgaatcacccacctcgagcagcgccgaagaatag

SEQ ID NO: 52118 - DNA, 2556 bp, Artificial Sequence
  derived and/or modified sequence
atggcccaggtgctgcacgtaccagccccgttccctggaacacccgggcccgcctcccctccagccttccccgccaaagaccccgacccaccttattcggtcgagacgccttacggctacaggctggacctcgacttcctgaagtacgtggacgatattgagaaaggacacaccctgcgccgagtcgccgtgcagcggcgtccaagactaagctccctcccccgtgggccaggcagctggtggacatcgaccgaaagcttgtgtagtaacgcctcgggcgactctcgccacagcgcctattcttattgcggacggggattttatcctcaatatggagcattggaaacgcgcggcggctttaaccctcgggtggagcgcaccctgctagacgcgcggagacggctggaggatcaagctgcaacgcctacagggcttggaagcctgactcctagcgcagccggctcaactgctagtctggtaggcgtggggttaccccccccaaccccccgatcatccgggctgtcaacacccgttccaccctcagcagggcacctggctcatgtaagggagcaaatggcaggcgccctccgcaagctgagacaactggaggagcaggtgaaacttatacccgtgttgcaggttaagctctcagtgcttcaggaagaaaaaagacagctcactgttcagctcaaaagtcagaagttcctcggccatccgacagccggtcgcgggcgcagtgaattgtgtctggatctgcccgacccgcctgaggatccggtggccctggagactcgctcagtcggcacctgggttcgtgagcgcgacttaggcatgcccgacggggaggcggccctggccgccaaggtggcagtcttggaaacacagctaaaaaaggccttgcaagagcttcaggcggctcaggcgcggcaggccgacccccagccacaggcttggcccccacccgactctccggttcgcgtcgatacagtccgagtcgtggagggccctcgggaggttgaggtggtggctagtacagccgcaggcgccccggcgcagagggcccagtcgctggagccatacgggactggcctcagggcactggccatgcccggccggcccgaatcacctcctgtcttcaggtcccaagaggtggtagagacaatgtgtcccgtgcccgctgccgctacctctaatgtacatatggtgaaaaagatttcgatcacagagcgatcatgtgatggagccgcggggctgcctgaggttccagccgaatcttcttctagccctccgggcagcgaagtagcttcgttgactcagcccgagaaaagcaccggcagggtgccaacacaggaaccaacacaccgagagccaaccaggcaggctgcttctcaagaaagcgaagaggctgggggaacaggcggacccccagccggggttcggtctatcatgaagcgcaaagaggaggtggcagaccccactgctcacaggagaagtttgcagtttgtcggggtgaacggcgggtacgaatcatctagcgaggacagctctacagctgaaaacatctcagacaatgactccaccgagaacgaggcaccagagccacgggagcgggtgcctagtgtggccgaggccccacagttgcgacctgcagggacagctgccgcaaagacgtctcggcaagagtgccagctgagccgggaatctcagcacattcctactgccgaaggggcttctggaagcaacaccgaggaggagattcgcatggagctcagtcccgacttgatcagcgcatgcttagccctggagaagtatttggacaaccctaacgccttaacagagcgggagttgaaggtggcatacactacagtgttgcaggagtggttgcggctggcgtgcagatcagatgcccaccccgagctagtgcgccggcaccttgttactttccgagctatgtccgccaggctgcttgattacgtggtgaacattgcagactcaaatggcaatacagctctgcactactccgtgtcccacgccaacttcccagtcgtacaacagttactcgacagtggagtgtgtaaggtcgacaagcagaatcgggcaggctattccccaatcatgttgacagcactggctacgctgaagacacaagatgatatagagacagtgttgcagttgttccgcctgggcaatatcaatgcaaaagcctcccaggctggccagaccgctctcatgctcgccgtctctcacggtcgggtggacgttgtgaaagccctgctcgcctgtgaggccgatgtcaatgtacaggacgacgacggttcaactgcactgatgtgcgcatgtgagcacgggcataaagagatcgccggcctgttgctggccgtgcctagctgcgacatctcactcactgaccgggacggaagtactgccctgatggtagcactggatgcgggtcagagtgagatcgcatccatgctgtactctcgtatgaacatcaagtgttctttcgcgcccatgtcggacgatgaatcacccacctcttcatcggccgaggaatag

SEQ ID NO: 52119 - DNA, 2556 bp, Artificial Sequence
  derived and/or modified sequence
atggcccaggtgctgcacgtgcctgcccccttccctggcaccccaggccctgccagccccccagccttccctgccaaggaccctgaccccccctacagcgtggagaccccctacggctaccgcctggacctggacttcctgaagtatgtggatgacatcgagaagggccacaccctgcggcgggtggccgtgcagaggcggccccggctgagcagcctgccccggggccctggctcctggtggaccagcacagagagcctgtgcagcaatgccagcggggacagccgccacagcgcctacagctactgcggccggggcttctacccccagtatggagccctggagacccggggcggcttcaacccccgggtggagaggaccctgctggatgcccggcggcggctggaggaccaggccgccacccccaccggcctgggcagcctgaccccatctgctgctggcagcacagccagcctggtgggcgtgggcctgcccccacccacccccaggagcagcggcctgagcacccctgtgcccccatctgctggccacctggcccacgtgcgggagcagatggccggggccctgaggaagctgcggcagctggaggagcaggtgaagctgatccctgtgctgcaggtgaagctgtctgtgctgcaggaggagaagaggcagctgactgtgcagctgaagagccagaagttcctgggccaccccacagctggccggggccgctctgagctgtgcctggacctgcctgaccccccagaagatcctgtggccctggagaccaggtctgtgggcacctgggtgcgggagcgggacctgggcatgccagatggagaggccgccctggccgccaaggtggccgtgctggagacccagctgaagaaggccctgcaggagctgcaggccgcccaggcccggcaggccgacccccagccccaggcctggcccccaccagacagccctgtgcgggtggacacagtgcgggtggtggagggcccccgggaggtggaggtggtggccagcacagctgctggggccccagcccagagggcccagagcctggagccctacggcaccggcctgcgggccctggccatgcctggccggcctgagagcccccctgtgttccgcagccaggaggtggtggagaccatgtgccctgtgcctgctgctgccaccagcaatgtgcacatggtgaagaagatcagcatcacagagaggagctgtgatggagctgctggcctgcctgaggtgcctgctgagagcagcagcagccccccaggcagcgaggtggccagcctgacccagcctgagaagagcacaggccgggtgcccacccaggagcccacccaccgggagcccacccggcaggccgccagccaggagagcgaggaggccggcggcaccggcggccccccagctggggtgcgcagcatcatgaagaggaaggaggaggtggccgaccccacagcccaccggcgcagcctgcagtttgtgggcgtgaatggaggctatgagagcagcagcgaggacagcagcacagctgagaacatcagtgacaatgacagcacagaaaatgaggcccctgagccccgggagcgggtgcccagcgtggccgaggccccccagctgcggcctgctggaacagctgctgccaagaccagccggcaggagtgccagctgagccgggagagccagcacatccccacagctgagggcgccagcggcagcaacacagaggaggagatccgcatggagctgagcccagacctgatcagcgcctgcctggccctggagaagtacctggacaaccccaatgccctgacagagcgggagctgaaggtggcctacaccaccgtgctgcaggagtggctgcggctggcctgccgcagtgatgcccaccctgagctggtgcggcggcacctggtgaccttccgggccatgtctgcccggctgctggactatgtggtgaacattgctgacagcaatggaaacacagccctgcactacagcgtgtcccatgccaacttccctgtggtgcagcagctgctggacagcggcgtgtgcaaggtggacaagcagaacagagctggctacagccccatcatgctgacagccctggccaccctgaagacccaggatgacattgaaacagtgctgcagctgttccggctgggcaacatcaatgccaaggccagccaggccggccagacagccctgatgctggccgtgagccacggccgggtggatgtggtgaaggccctgctggcctgtgaggctgatgtgaatgtgcaggatgatgatggcagcacagccctgatgtgtgcctgtgagcacggccacaaggagattgctggcctgctgctggccgtgcccagctgtgacatcagcctgacagacagagatggcagcacagccctgatggtggccctggatgctggccagagcgagatcgcctccatgctgtacagcaggatgaacatcaagtgcagctttgcccccatgtctgatgatgagagccccaccagcagcagcgctgaggagtag

SEQ ID NO: 52120 - DNA, 4925 bp, Artificial Sequence
  derived and/or modified sequence
gtaagcctcagccggtgctgcaggcagtctgactcgcagtccctcaagtgacttccaaggagcatctgtagaaaagaagatggcccaggtcctgcacgtgcctgctcccttcccagggacccctggcccagcctccccacctgccttccctgccaaggaccccgatccaccctactccgtggagaccccctatggctaccgcctggacctggacttcctcaagtacgtggatgacatcgagaagggccacacgctgcgacgcgtggcagtgcagcgccgcccccgcctgagctcgctgccccgtggccctggctcctggtggacgtccactgagtcgctgtgctccaatgccagtggggacagccgccactcagcctattcctactgcggccgtggcttctaccctcagtatggtgctctggagacccgcggtggcttcaatccgcgggtggagcgcacgctgctggatgcccgtcgccgtctcgaggaccaggcggccacacccaccggcctgggctccctgacccccagtgcggccggctcgacagcctccctggtgggcgtggggttgccacccccgacaccacggagttcaggactgtccacaccggtgcctcccagtgccgggcacctggcccacgtgcgggagcagatggcgggtgccctgcggaagctgcggcagctggaggagcaggtgaagctgatccctgtgctccaggtgaagctctcggtgctccaggaggaaaagcggcagctcacagtacaacttaagagccagaagttcctgggccaccccacagcgggccggggtcgcagcgagctctgcctggacctccccgatcccccagaggacccagtggcactggagacccggagtgtgggcacctgggttcgagaacgggacttgggcatgcctgatggggaggctgccctcgccgccaaggtcgctgtgctggagacccagctcaagaaggcgctgcaggagctgcaggcagctcaggcccggcaggctgacccccagccccaggcctggccaccgccggacagcccggtccgcgtggatacagtccgggtggtagaagggccacgggaggtggaggtggtggccagcacagccgctggcgcccccgcacagcgggcccagagcctggagccttacggcacagggctgagggccctggcaatgcctggtaggcctgagagcccacctgtgttccgcagccaggaggtggtggagacaatgtgcccagtgcccgctgcagctaccagcaacgtccatatggtgaagaagattagcatcacagagcgaagctgcgatggagcagcaggcctcccagaagttcctgccgaatcgtcttcgtcacccccggggtccgaggtagcctcccttacacagcctgagaagagcacaggccgagtgcccacccaggagcccacccacagggagcccaccaggcaagcagcctcccaagagtccgaggaggccgggggcaccggcgggcccccggcaggcgtgcgatctatcatgaaacggaaagaggaggttgcagaccccacggcccaccggaggagcctccagttcgtgggggtcaacggcgggtatgagtcgtcatccgaggactccagcacagcagagaacatctcagacaacgacagcacagagaacgaggccccagagccgagggagagggttccgagtgtggccgaagccccccagctcaggcctgcagggacggcagcggccaagaccagccggcaggagtgtcagctgtctcgagaatctcagcacatacccactgctgagggggcatcaggatcaaacacggaggaggagatcaggatggagctaagccctgacctcatctcagcctgcttggccctggaaaagtacctggacaatcccaacgccctcacagagcgggagctgaaagtggcctacaccacagtgctgcaggagtggctgcgcctggcctgccgcagcgacgcacaccccgagctggtgcggcggcacctggtcacgttccgggccatgtctgcgcggctgctggactacgtggtcaacatcgccgacagcaacggcaacacagccctgcactactccgtgtctcatgccaacttccccgtggtgcagcagctgctcgacagcggtgtctgcaaggtggacaaacagaaccgtgctggctacagccctattatgctcaccgccctggccaccctgaagacccaggacgacatcgagactgtccttcagctcttccggcttggcaacatcaatgccaaagccagccaggcaggacagacggccctgatgctggccgtcagccacgggcgggtggacgttgtcaaagccctgctggcctgtgaggcagatgtcaacgtgcaagatgatgacggctccacggccctcatgtgcgcctgtgagcacggccacaaggagatcgcggggctgctgctggccgtgcccagctgtgacatctcactcacagatcgcgatgggagcacagctctgatggtggccttggacgcagggcagagtgagattgcgtccatgctgtattcccgcatgaacatcaagtgctcgtttgccccaatgtcagatgacgagagccctacatcatcctcggcagaagagtagccgtgagggaggcggggaccagccagaccgggagcaaaccgtcccttgtccccgtctcctccctgttcccgttcctccctggcccaccccactcacactccccaaggcccacggctcaaaggcaagcgagctctccctctgcttccctgggggagccccgacggccacaggactccagctccaagtgggttttcttggctcccctgttcaaagtggccacagcgcagaccgaagcaaaattcttgtatacattggcgccagggctgatgctggggtgtgggttttatgaagaacattgagaacaatcagctggtaattatggatggaggaagagggagaggaaaaaaatattgtatttttgaatcattgttgcaggagggggtgggaatcttaggatttgttgccagatttgaaagtcactggaacttgcatattttcattttaatcctaagtgttattacgcaccagttggggttcacccttcatcccccacatttaattgtctgatatagaatagtgttgtgtccactgccccgctagacggctttcttaggggaattttcttctggttgtttcacaagacagattctgtccttgtcacccgggacagaaaactcagtcttttcaccctcattcagatgaagggactcaggacaggctctgtgacttacagggacccaatcaattcacaatgagaaattaccggccaggcgtggtgactcacgtctgtaatcccagcactttgggagggcaaggcaagagcttgagcttgagcctagacgttaaagaccagcctgggcaacacagcaagacccatctctacaagaaatttaaaaactagccaggcgtggtggtgcgcgcctgtagtcccagctacttgggaggctgagccctggaggtcgaggctacagtgagctatgatcacaccattgcacttcagcctgggcgacacagcgagaccctgtctcaagaaagaaaagaaaaagagacaaattacccagaaacccctcccttccccacatggaggccttggcaaatgttaattttcctagaaaatccttcagacctgaagacgcaggaaaagaatctggctctcagggtggcttctgcgtccccgccgccaggccccagactatggtcacagggccgtcctgttcctccccgggactccagaatttctctcctcaaaggaaagaaaacagggcatgcgcttgttggcaaaacgcagggccggctcccaaaaaccccatgtgtgtacgattaaaagttggccgtccccaggcctcccagcgcaaacttcaagagacagggctttgctgaaaaccaaacatgggccagctgggctttttaacaacctagagactttccggagctgcctggaacagagcctgcgggaaacggggcttgccagagacactcacagtttccttcatggcctgttttggtcccctaagaatctccacatcattgtctttcttgtgccttttccttggtgagcaacagaaagggaagggttccaagcctctaaaaatgtgctttgtgatcaggagtgcgctccaaaccaaatacgcgcgctgccctttcgaggccagtgagctcagcctccaaggctttaaagccacatttcagcaagagaaagcgctgagagctcgcaggttcattaaagaaggcaaagcactggtttctctccttagaaaagtaggtttcttggcttgatgtagactggcttgctttgatttttagtgaagggaatgtacgtaaaacaaaatagggcttggctggtcaaaggagacaagcaggatggatggatggatggatggatggatggatggatggatggatggatgaatagatagatggtgtttgcatgtaaattgcagagaaaacaaaaccaaagctgattggaaacaattaattgtgggtgtctgagggggaaggtcgcagctttgggcagctttgagaagcggtacaagagttctgtgcctgtgtgtccagccctggagccagccagtgcatttattttaagctcttagaagcaactccttggcccaggaatgcgtgacccctgagatgggtccacgcatctctctacacttccttctctccgtgggatactggactcgtgcctctgcgcccattctcttctcacgcatatccatgagctttaatttcactttctgatcacggtacgtccataaagccagtattacacttaaatgaagtattcttttttgtaatcgttttttttagaaggtaaacaaatttaataaagctaccaataatgttgatg

SEQ ID NO: 52121 - DNA, 5162 bp, Artificial Sequence
  derived and/or modified sequence
gcgggacccagggaaggcagcggccggagcgcgcaaggtgttgaaagacagagaagcgaagacagagacgtggaaagacagggagagagacacggagagagacgcagaaggacagagacgtggagagagacgcagagagacagagacgtggagagacacagagagacgtggagagacacagagagacttggagagagacaaagcaagacaggacgggagaacaaggacaagctcaggtaagcctcagccggtgctgcaggcagtctgactcgcagtccctcaagtgacttccaaggagcatctgtagaaaagaagatggcccaggtcctgcacgtgcctgctcccttcccagggacccctggcccagcctccccacctgccttccctgccaaggaccccgatccaccctactccgtggagaccccctatggctaccgcctggacctggacttcctcaagtacgtggatgacatcgagaagggccacacgctgcgacgcgtggcagtgcagcgccgcccccgcctgagctcgctgccccgtggccctggctcctggtggacgtccactgagtcgctgtgctccaatgccagtggggacagccgccactcagcctattcctactgcggccgtggcttctaccctcagtatggtgctctggagacccgcggtggcttcaatccgcgggtggagcgcacgctgctggatgcccgtcgccgtctcgaggaccaggcggccacacccaccggcctgggctccctgacccccagtgcggccggctcgacagcctccctggtgggcgtggggttgccacccccgacaccacggagttcaggactgtccacaccggtgcctcccagtgccgggcacctggcccacgtgcgggagcagatggcgggtgccctgcggaagctgcggcagctggaggagcaggtgaagctgatccctgtgctccaggtgaagctctcggtgctccaggaggaaaagcggcagctcacagtacaacttaagagccagaagttcctgggccaccccacagcgggccggggtcgcagcgagctctgcctggacctccccgatcccccagaggacccagtggcactggagacccggagtgtgggcacctgggttcgagaacgggacttgggcatgcctgatggggaggctgccctcgccgccaaggtcgctgtgctggagacccagctcaagaaggcgctgcaggagctgcaggcagctcaggcccggcaggctgacccccagccccaggcctggccaccgccggacagcccggtccgcgtggatacagtccgggtggtagaagggccacgggaggtggaggtggtggccagcacagccgctggcgcccccgcacagcgggcccagagcctggagccttacggcacagggctgagggccctggcaatgcctggtaggcctgagagcccacctgtgttccgcagccaggaggtggtggagacaatgtgcccagtgcccgctgcagctaccagcaacgtccatatggtgaagaagattagcatcacagagcgaagctgcgatggagcagcaggcctcccagaagttcctgccgaatcgtcttcgtcacccccggggtccgaggtagcctcccttacacagcctgagaagagcacaggccgagtgcccacccaggagcccacccacagggagcccaccaggcaagcagcctcccaagagtccgaggaggccgggggcaccggcgggcccccggcaggcgtgcgatctatcatgaaacggaaagaggaggttgcagaccccacggcccaccggaggagcctccagttcgtgggggtcaacggcgggtatgagtcgtcatccgaggactccagcacagcagagaacatctcagacaacgacagcacagagaacgaggccccagagccgagggagagggttccgagtgtggccgaagccccccagctcaggcctgcagggacggcagcggccaagaccagccggcaggagtgtcagctgtctcgagaatctcagcacatacccactgctgagggggcatcaggatcaaacacggaggaggagatcaggatggagctaagccctgacctcatctcagcctgcttggccctggaaaagtacctggacaatcccaacgccctcacagagcgggagctgaaagtggcctacaccacagtgctgcaggagtggctgcgcctggcctgccgcagcgacgcacaccccgagctggtgcggcggcacctggtcacgttccgggccatgtctgcgcggctgctggactacgtggtcaacatcgccgacagcaacggcaacacagccctgcactactccgtgtctcatgccaacttccccgtggtgcagcagctgctcgacagcggtgtctgcaaggtggacaaacagaaccgtgctggctacagccctattatgctcaccgccctggccaccctgaagacccaggacgacatcgagactgtccttcagctcttccggcttggcaacatcaatgccaaagccagccaggcaggacagacggccctgatgctggccgtcagccacgggcgggtggacgttgtcaaagccctgctggcctgtgaggcagatgtcaacgtgcaagatgatgacggctccacggccctcatgtgcgcctgtgagcacggccacaaggagatcgcggggctgctgctggccgtgcccagctgtgacatctcactcacagatcgcgatgggagcacagctctgatggtggccttggacgcagggcagagtgagattgcgtccatgctgtattcccgcatgaacatcaagtgctcgtttgccccaatgtcagatgacgagagccctacatcatcctcggcagaagagtagccgtgagggaggcggggaccagccagaccgggagcaaaccgtcccttgtccccgtctcctccctgttcccgttcctccctggcccaccccactcacactccccaaggcccacggctcaaaggcaagcgagctctccctctgcttccctgggggagccccgacggccacaggactccagctccaagtgggttttcttggctcccctgttcaaagtggccacagcgcagaccgaagcaaaattcttgtatacattggcgccagggctgatgctggggtgtgggttttatgaagaacattgagaacaatcagctggtaattatggatggaggaagagggagaggaaaaaaatattgtatttttgaatcattgttgcaggagggggtgggaatcttaggatttgttgccagatttgaaagtcactggaacttgcatattttcattttaatcctaagtgttattacgcaccagttggggttcacccttcatcccccacatttaattgtctgatatagaatagtgttgtgtccactgccccgctagacggctttcttaggggaattttcttctggttgtttcacaagacagattctgtccttgtcacccgggacagaaaactcagtcttttcaccctcattcagatgaagggactcaggacaggctctgtgacttacagggacccaatcaattcacaatgagaaattaccggccaggcgtggtgactcacgtctgtaatcccagcactttgggagggcaaggcaagagcttgagcttgagcctagacgttaaagaccagcctgggcaacacagcaagacccatctctacaagaaatttaaaaactagccaggcgtggtggtgcgcgcctgtagtcccagctacttgggaggctgagccctggaggtcgaggctacagtgagctatgatcacaccattgcacttcagcctgggcgacacagcgagaccctgtctcaagaaagaaaagaaaaagagacaaattacccagaaacccctcccttccccacatggaggccttggcaaatgttaattttcctagaaaatccttcagacctgaagacgcaggaaaagaatctggctctcagggtggcttctgcgtccccgccgccaggccccagactatggtcacagggccgtcctgttcctccccgggactccagaatttctctcctcaaaggaaagaaaacagggcatgcgcttgttggcaaaacgcagggccggctcccaaaaaccccatgtgtgtacgattaaaagttggccgtccccaggcctcccagcgcaaacttcaagagacagggctttgctgaaaaccaaacatgggccagctgggctttttaacaacctagagactttccggagctgcctggaacagagcctgcgggaaacggggcttgccagagacactcacagtttccttcatggcctgttttggtcccctaagaatctccacatcattgtctttcttgtgccttttccttggtgagcaacagaaagggaagggttccaagcctctaaaaatgtgctttgtgatcaggagtgcgctccaaaccaaatacgcgcgctgccctttcgaggccagtgagctcagcctccaaggctttaaagccacatttcagcaagagaaagcgctgagagctcgcaggttcattaaagaaggcaaagcactggtttctctccttagaaaagtaggtttcttggcttgatgtagactggcttgctttgatttttagtgaagggaatgtacgtaaaacaaaatagggcttggctggtcaaaggagacaagcaggatggatggatggatggatggatggatggatggatggatggatggatgaatagatagatggtgtttgcatgtaaattgcagagaaaacaaaaccaaagctgattggaaacaattaattgtgggtgtctgagggggaaggtcgcagctttgggcagctttgagaagcggtacaagagttctgtgcctgtgtgtccagccctggagccagccagtgcatttattttaagctcttagaagcaactccttggcccaggaatgcgtgacccctgagatgggtccacgcatctctctacacttccttctctccgtgggatactggactcgtgcctctgcgcccattctcttctcacgcatatccatgagctttaatttcactttctgatcacggtacgtccataaagccagtattacacttaaatgaagtattcttttttgtaatcgttttttttagaaggtaaacaaatttaataaagctaccaataatgttgatga

SEQ ID NO: 52122 - DNA, 2556 bp, Artificial Sequence
  derived and/or modified sequence
atggcccaggtgctgcacgtgcccgcccccttccccggcacccccgggccggcatccccccctgcattcccggcgaaagatccagaccccccttacagcgtagaaaccccgtatggctacaggcttgacctagatttcctgaagtacgtggacgacatcgagaagggccataccctgcgccgcgtggctgtgcaacgtagacctagactgtcaagcttgccccgagggcctggatcctggtggacgtccaccgaatccctatgtagcaatgcctccggtgatagccgacatagcgcctatagctactgtggtaggggattttaccctcagtatggggctctggagaccagaggcggctttaaccctcgcgtcgagcgtaccctgctcgatgccaggcgtagactggaagatcaagccgctactccgactggtttgggcagtctcacaccatccgctgccgggtctacggcttctttggtcggcgtgggcctgcccccacctactccccgctccagtggtctgtccacccctgtaccaccatcggccggacatttggctcacgtgcgggagcagatggccggcgcacttcgcaagctaaggcagctagaggaacaggtgaagcttatcccagtcctccaggttaagctctcagtgctgcaggaggagaaaaggcagcttacagtgcagctcaagtctcagaaatttctggggcatcctactgcagggcgtggtaggagtgaactgtgcttggatctgccagacccacctgaggatccagtggcactggagacacggagtgtgggcacctgggttagagagcgggatctgggcatgcccgatggggaggctgctttagcagcaaaggttgcagttctcgagacacaactaaaaaaggccttgcaggaactgcaggctgcccaagcccgtcaggcagatcctcagccccaggcctggcccccacctgactctccagtcagagtagacaccgtgagggttgtcgaaggccctagggaggtagaggtcgtggccagcactgccgcaggggcacctgcgcaaagagcacagtccctggagccctacggcaccggccttcgtgcgctggccatgccgggccgccctgagtcgccccctgtattccggagccaggaggtggttgagacaatgtgccccgtacccgccgcggcgacctccaacgtgcacatggtaaaaaagatcagcatcacagagagatcctgtgacggagcagcgggactcccagaagtgcccgcagagtcctctagtagcccccccggttcagaagtggccagcttgactcagcccgaaaaaagcactgggcgagtgcctacccaggagcctacccaccgcgagccgactaggcaggctgccagccaggaatcagaggaggctggcgggacagggggcccgcccgccggagtacggtctatcatgaaaaggaaggaagaggtggcagaccccacagcccaccgcaggagtctgcagttcgtgggtgtgaacggaggctacgaaagtagcagtgaggacagtagcacagccgaaaacatttccgacaacgacagtaccgaaaatgaagctcctgagccgcgagagcgcgtgcccagcgtggcagaggccccccagttgagaccagccggaactgctgcagccaaaacctctagacaggagtgtcagctgagtcgcgagagccagcacataccaaccgccgaaggcgcctccgggtctaacactgaggaggaaatccgaatggaactctctcctgatcttatttctgcctgcttggcactagagaagtatctggataatccaaacgccctcaccgagagagagctgaaggtggcgtataccaccgtgctgcaggagtggctccgcctcgcctgccgcagcgatgcacacccagagctagtgcgaaggcatctggttacatttagagctatgtcagctcgcctgttggattacgttgtgaacatcgccgattccaatggaaataccgccttgcactacagtgtcagtcatgcgaactttcccgtcgtgcagcaactcctcgattccggcgtgtgcaaggtggacaaacagaaccgggccgggtactcccccattatgcttaccgctctggccacactcaagacccaggatgatatcgagaccgtcttacagctgttccgcctggggaatatcaacgctaaggccagccaggccggtcagacagccctcatgttggccgtgtcacacggtagagtagacgtggtgaaagccctactggcctgcgaagctgacgtcaatgtgcaggacgacgacggctccaccgcccttatgtgcgcatgtgagcacgggcacaaggaaatcgccgggttactcctggccgtaccttcctgtgatatcagcctaacggatcgggacgggtctacagcccttatggtcgctctggacgctggtcagagcgagattgccagtatgttatacagccgtatgaatatcaagtgttcctttgcccccatgtctgatgatgagtctcccacttcatcctccgccgaggaatag

SEQ ID NO: 52123 - DNA, 2556 bp, Artificial Sequence
  derived and/or modified sequence
atggcccaggtgctgcacgtgcccgcccccttccccggcacccccggcccggcaagccctcccgcttttccagccaaggaccccgaccctccctacagtgtggagacgccatatggatatcgtctggacctagacttcctgaagtatgtagacgacatagaaaagggccacaccctgcgacgggttgcagttcaacgacggccccggctgtcgagtctgccacgaggaccagggagctggtggacatctacagaatccctgtgttctaacgcctcaggcgatagtcgtcattcagcttatagctattgtggcagaggattttaccctcagtacggcgccctggaaactagaggtgggtttaaccccagggtggagcgtaccctgcttgacgctaggcgtcgcctcgaggaccaagcagctactcctaccggattggggagtctaacaccttctgccgctggaagcaccgcatccctcgtcggagtgggcctccctccgccgacaccgcgttcgtccgggttgagcacacctgtaccccctagcgcaggccacctggcccacgtaagagagcagatggcgggggccctgagaaagctcagacagctggaagaacaggtcaaattgatcccagtgctgcaagtgaaactcagtgtgctccaggaagaaaaacgacagcttacggtgcagctaaaatctcagaaattcctggggcacccaactgccggaaggggccgctctgagttgtgcctggatctccctgacccgcctgaagatcctgttgcacttgaaacaaggagtgtggggacatgggttcgggagcgagaccttggcatgccagatggcgaagcagccctcgctgccaaagtcgctgttctcgaaacccaacttaagaaggcattacaggaattacaggccgcccaagctaggcaggccgatcctcagcctcaggcttggcctcccccggacagcccagtgcgtgtggacaccgtccgcgtggtggaaggtccccgtgaggtagaagtggtggcctctaccgctgccggggcacctgcccagcgcgcccaatctctggagccctatggcacaggcttgagagcgctggctatgcccggccggccagaatcaccacctgtattcaggagtcaggaagtagtagagaccatgtgccctgttccagccgccgccacatccaatgtccacatggtgaaaaagatttccattacagagagatcatgtgatggtgcagccgggttgcctgaggtgcccgctgagtcttcttccagtccacccggctccgaagtggccagcctgacccagccagaaaaatccactggccgagttccaacccaggagcctactcaccgagaacccacacggcaagccgcctcccaggagtctgaggaagcgggaggaacaggagggccccctgctggtgtgaggagcattatgaagcgcaaggaggaggttgccgacccaacagcacacagacgaagcctacagttcgtaggagtgaatggggggtacgagagctcatcagaagacagtagcacagccgagaacatttccgacaatgatagtacagagaatgaagctccagagccgcgagagagggtacccagtgtagccgaggcccctcagctccgcccggccggcactgcggcagctaaaacgtctcgacaggagtgtcagttatctcgggagtcgcagcatatccccactgctgaaggggcgtctggaagcaacactgaagaggaaatccgcatggaactgtctcctgatttaatctctgcttgcctcgcgctggagaaatacctggacaaccccaacgccttgactgaacgggagcttaaggtagcttacacgactgtacttcaggagtggctaagactcgcctgcagaagtgacgcacacccagaactcgtgcgacggcacttagtaacctttcgtgccatgtccgccaggcttctcgattacgtggtcaatattgctgattcaaacggtaatacagccttgcactattctgtgtctcacgccaacttccctgtggtgcagcagctgttggactcaggcgtttgcaaagtcgacaaacagaatcgtgcgggatattccccgattatgctcaccgcactggccacgcttaagacccaagacgacatagagacagtgctgcagttatttcgactcggcaatatcaacgccaaagcctcccaagccggacagaccgcactcatgctcgcggtgtcccatgggcgtgtggacgtggtcaaggctttgctggcttgcgaagcggacgtcaacgtccaagacgacgatggatcaactgcccttatgtgcgcctgcgaacacggccataaagaaatagctggcttgcttttagccgtcccctcatgtgatatcagtttgactgatagggatgggagcaccgcactcatggttgcactcgacgctgggcagagcgagatcgctagcatgctttactcccggatgaacatcaagtgcagctttgcccctatgagcgacgacgaatctccgacatcgtcaagcgccgaggaatag

SEQ ID NO: 52124 - DNA, 2556 bp, Artificial Sequence
  derived and/or modified sequence
atggctcaggtgctgcacgtaccagccccatttcctgggacacccggtccggctagcccaccagccttccctgctaaggaccctgacccgccatactccgtcgaaacaccctacggctataggctcgatctggactttctgaagtatgtcgacgatattgaaaaggggcatacactgcgaagggtggccgtgcagcgcagacccagactttctagcttgccacgcggtcctggatcctggtggacctcaaccgagagcctgtgttctaatgcctctggcgattcccgacactccgcttactcctactgcggacggggattctacccgcagtacggagcacttgaaacacgaggcggtttcaaccccagggtagaaaggactctcctcgatgcccgtaggagactcgaggaccaagccgctacgccgactggtctcggatcactgacaccgagcgctgctggctcaaccgcgtctctggtgggcgttggactcccacctccgaccccgagatcttccggactcagcacccccgtgccacccagcgctgggcatctggcccatgttagagaacagatggccggagccctccgtaagttgaggcaactggaggaacaggtgaagctgattccggtcctgcaggtcaagttatctgtattgcaggaagaaaaacgccagttgactgttcagctgaagagccagaagtttctggggcatccaacagccggaagaggcagatccgaactgtgcctcgacctgcctgaccccccagaggacccagttgcactggaaacaagatccgtgggtacctgggtccgagagcgcgacttaggcatgcccgacggggaagccgctctcgccgctaaggtggccgttctggaaacccagctcaagaaagctctgcaggagctgcaggcagcccaggcacggcaggcggaccctcagccccaagcctggccgcctcctgattcacctgtgcgggtcgacacagtgcgcgtggtagaggggcctcgggaagtcgaggttgtggcctcgacagctgcaggcgctcctgctcagcgggctcagtctctggagccttatgggacggggctgcgggcattagctatgcccggtaggcccgagtcaccccctgtgtttcgcagccaggaggtagtcgagacaatgtgcccagtacccgctgcagccacatcaaacgtgcatatggtgaaaaaaatcagtattaccgagcggtcttgtgatggggcagccggattacctgaagtgcctgccgaatcttcttcttccccgcctgggtccgaggtagcctcgctgacccagccagagaaatcaactggacgggtgcctacacaggaacccactcaccgcgagcccacacgacaagccgcaagccaagaatcagaggaggccggagggactggaggacctcccgctggtgtgaggagcattatgaagcggaaagaagaagtagcagaccccaccgctcacaggaggtctctgcagtttgtgggggttaatggtgggtacgaatcctcgagtgaagacagctccactgccgagaacatcagcgataatgactctacagaaaatgaagcacccgagccacgggaacgggtcccctctgtggccgaggccccacagttgaggcctgcgggaaccgccgcagctaaaacttccagacaggaatgccagctgtcccgcgaaagccaacacattcccacagccgagggagcttccggatccaacacagaagaagagattaggatggagctgtcacctgatctgataagtgcatgtctggctctggagaaatatctagacaatccaaacgctctgactgaacgggagctgaaggtggcgtatactacagtgctgcaggaatggctgagattggcatgtaggagcgatgcacatccggagctggttcggagacacctcgttaccttccgtgccatgtctgctcggctcctggattatgtggtcaatatcgccgacagcaacgggaatacagctctgcactatagtgttagtcacgctaattttcccgttgttcagcagttactggattcaggagtgtgtaaggtggacaaacagaaccgcgcaggctactcccctataatgctgaccgcgctggccaccctcaagacacaggatgacatcgagactgtgctccaattattccgcttgggaaacattaatgcaaaagcttctcaagctggccagaccgccctcatgctggccgtgagccacggtcgggtggacgtagtgaaggcccttctggcctgcgaggccgatgtcaatgtgcaggacgacgatgggtcaacagctttgatgtgtgcttgtgaacatgggcataaagagatagcgggactcttgctcgccgttccatcatgcgatattagcctgactgatcgggacggctccacagccctgatggtggcactggatgctggtcagtctgagatcgccagtatgttatacagtcgaatgaatatcaaatgcagtttcgccccaatgtctgatgatgaaagcccgacgagttctagtgctgaggaatag

SEQ ID NO: 52125 - DNA, 2556 bp, Artificial Sequence
  derived and/or modified sequence
atggcccaggtgctgcacgttcctgcccctttcccgggaactcctggcccagctagccccccagcttttccggcaaaagatcccgatcctccttactcggttgagaccccttatggatatcgattggacctggactttctgaagtacgttgatgatatcgaaaagggccataccttgcgtagagtggctgtgcagcggagaccacgtctgtcctcactgcccagaggtccagggtcttggtggacatctactgagtccttatgtagcaacgcctcaggtgacagcagacatagtgcctatagttactgcgggagaggcttttaccctcaatatggcgctctcgagacaaggggtgggtttaatcccagagtggaacgcaccctgctggatgcacgacggaggcttgaagatcaggccgctacacccactggcttgggttccttaacaccatccgctgcaggcagcaccgcctcccttgtaggggtgggactacccccacctactcccagatccagtggcctgtccactcccgtgcctccatctgccggacatttggcccacgtccgggaacagatggctggagctctgcgcaaacttcggcagctggaagaacaggtcaagctgatcccagtcctgcaggtgaagctgtccgtgctccaggaagagaaacgtcaactgacagtccaactaaaatcccaaaagttcctggggcacccaacagcaggcagagggaggagcgagctttgtctcgatttgcctgatccccctgaggatcccgtcgcactcgagactcggtccgtgggaacttgggtgcgggagcgcgatctcgggatgcccgacggcgaggctgctctcgcagcgaaggtggccgtgttggaaacacagctcaagaaagccctgcaggagttgcaagccgctcaggcaagacaagcagaccctcagccccaggcttggccccctcccgatagcccggtgagagtggataccgtcagggtagtagagggcccaagggaggtagaggtggtggcttcgactgcggctggtgcccctgcgcaacgggcacaatcactggaaccatatggtacaggcctgagggctctcgctatgcccggtcgccctgagagtcccccagtgtttcgttcccaggaggtcgttgaaactatgtgccccgtgcctgccgctgcgacctctaacgtccatatggtgaagaaaatcagcattacagagcgttcctgcgacggcgctgcaggtttacctgaagtacctgccgagtcaagcagcagtcctcccggttccgaggttgcttcactgacgcagcccgagaagtctactggcagggtgcctacgcaggagccgacacatagagagccgacccgccaggctgcatcacaggaatccgaggaagccggaggaactgggggtccacctgccggtgtgagatctataatgaaacggaaagaagaggtagccgacccaaccgcccatcgaagaagcttacagtttgtcggagttaacgggggatacgagagtagttccgaagacagcagcacagccgagaacataagcgacaacgactctaccgagaacgaggcacctgagccaagggagcgtgtgccatcagtcgcagaggcacctcagctgcggcctgcgggaacagccgctgccaagacatccaggcaagaatgccagctgagtagagaaagccagcacatcccgacggctgagggggcatctggaagtaatactgaggaggagattcggatggagctgtccccggacttaatcagcgcatgtctggccctggagaaatatctagataacccaaacgcccttacagagcgggaactgaaggttgcttacacaactgtactgcaggagtggctcaggctcgcatgtagatccgatgcccatcctgaactcgtcagaaggcatttggtcacatttagagccatgagtgcgcgattgcttgattatgtagtaaacattgctgacagcaacggcaatacagcactgcactattccgtgtctcatgcgaattttcccgtcgtacagcaattgctggactccggagtgtgtaaggtcgataaacagaaccgtgccggttacagcccaattatgttaacggccctggctacgctcaaaacacaagatgatattgagacagtgttgcaattgttccgccttgggaacattaacgccaaagcgtcacaggcaggtcagactgcattaatgctggctgtaagccacgggcgagtcgacgtcgtgaaggccctgctggcgtgcgaagccgacgtgaacgtccaagatgatgatgggtcaacggccctgatgtgtgcgtgtgaacacggccacaaagagattgcgggattactcctagctgtgccatcttgtgacatctcactgacagacagagacggctctactgccctgatggtggctttggacgcaggacagagcgagatcgcctctatgctctacagccgtatgaacataaagtgcagttttgccccaatgagcgatgatgagtcgcccacttcgagcagcgctgaggaatag

SEQ ID NO: 52126 - protein, 887 aa, Artificial Sequence
  derived and/or modified sequence
MDWQPDEQGLQQVLQLLKDSQSPNTATQRIVQDKLKQLNQFPDFNNYLIFVLTRLKSEDEPTRSLSGLILKNNVKAHYQSFPPPVADFIKQECLNNIGDASSLIRATIGILITTIASKGELQMWPELLPQLCNLLNSEDYNTCEGAFGALQKICEDSSELLDSDALNRPLNIMIPKFLQFFKHCSPKIRSHAIACVNQFIMDRAQALMDNIDTFIEHLFALAVDDDPEVRKNVCRALVMLLEVRIDRLIPHMHSIIQYMLQRTQDHDENVALEACEFWLTLAEQPICKEVLASHLVQLIPILVNGMKYSEIDIILLKGDVEEDEAVPDSEQDIKPRFHKSRTVTLPHEAERPDGSEDAEDDDDDDALSDWNLRKCSAAALDVLANVFREELLPHLLPLLKGLLFHPEWVVKESGILVLGAIAEGCMQGMVPYLPELIPHLIQCLSDKKALVRSIACWTLSRYAHWVVSQPPDMHLKPLMTELLKRILDGNKRVQEAACSAFATLEEEACTELVPYLSYILDTLVFAFGKYQHKNLLILYDAIGTLADSVGHHLNQPEYIQKLMPPLIQKWNELKDEDKDLFPLLECLSSVATALQSGFLPYCEPVYQRCVTLVQKTLAQAMMYTQHPEQYEAPDKDFMIVALDLLSGLAEGLGGHVEQLVARSNIMTLLFQCMQDSMPEVRQSSFALLGDLTKACFIHVKPCIAEFMPILGTNLNPEFISVCNNATWAIGEICMQMGAEMQPYVQMVLNNLVEIINRPNTPKTLLENTAITIGRLGYVCPQEVAPMLQQFIRPWCTSLRNIRDNEEKDSAFRGICMMIGVNPGGVVQDFIFFCDAVASWVSPKDDLRDMFYKILHGFKDQVGEDNWQQFSEQFPPLLKERLAAFYGV

SEQ ID NO: 52127 - protein, 699 aa, Artificial Sequence
  derived and/or modified sequence
MDWQPDEQGLQQVLQLLKDSQSPNTATQRIVQDKLKQLNQFPDFNNYLIFVLTRLKSEDEPTRSLSGLILKNNVKAHYQSFPPPVADFIKQECLNNIGDASSLIRATIGILITTIASKGELQMWPELLPQLCNLLNSEDYNTCEGAFGALQKICEDSSELLDSDALNRPLNIMIPKFLQFFKHCSPKIRSHAIACVNQFIMDRAQALMDNIDTFIEHLFALAVDDDPEVRKNVCRALVMLLEVRIDRLIPHMHSIIQYMLQRTQDHDENVALEACEFWLTLAEQPICKEVLASHLVQLIPILVNGMKYSEIDIILLKGDVEEDEAVPDSEQDIKPRFHKSRTVTLPHEAERPDGSEDAEDDDDDDALSDWNLRKCSAAALDVLANVFREELLPHLLPLLKGLLFHPEWVVKESGILVLGAIAEGCMQGMVPYLPELIPHLIQCLSDKKALVRSIACWTLSRYAHWVVSQPPDMHLKPLMTELLKRILDGNKRVQEAACSAFATLEEEACTELVPYLSYILDTLVFAFGKYQHKNLLILYDAIGTLADSVGHHLNQPEYIQKLMPPLIQKWNELKDEDKDLFPLLECLSSVATALQSGFLPYCEPVYQRCVTLVQKTLAQAMMYTQHPEQYEAPDKDFMIVALDLLSGLAEGLGGHVEQLVAHSPSFPPHPLPPAGSRVCPFVTVLCWGLAPRWREIPLV

SEQ ID NO: 52128 - protein, 1051 aa, Artificial Sequence
  derived and/or modified sequence
GQSVGGRGLFRDCACIEETTGAGALSRSGAGPLDVEAAGPSPSRCEGGGSLRARSRGQRHGPPWDEGSSLGPMRIRRAPPPPPVARFHIPPPALPSPRLRGRGWRSWRGPRTWAGVDRRPPPVRRGRSRRHAATAASGAPPGSHTEPQRPSADPGPYLRSLPCAMDWQPDEQGLQQVLQLLKDSQSPNTATQRIVQDKLKQLNQFPDFNNYLIFVLTRLKSEDEPTRSLSGLILKNNVKAHYQSFPPPVADFIKQECLNNIGDASSLIRATIGILITTIASKGELQMWPELLPQLCNLLNSEDYNTCEGAFGALQKICEDSSELLDSDALNRPLNIMIPKFLQFFKHCSPKIRSHAIACVNQFIMDRAQALMDNIDTFIEHLFALAVDDDPEVRKNVCRALVMLLEVRIDRLIPHMHSIIQYMLQRTQDHDENVALEACEFWLTLAEQPICKEVLASHLVQLIPILVNGMKYSEIDIILLKGDVEEDEAVPDSEQDIKPRFHKSRTVTLPHEAERPDGSEDAEDDDDDDALSDWNLRKCSAAALDVLANVFREELLPHLLPLLKGLLFHPEWVVKESGILVLGAIAEGCMQGMVPYLPELIPHLIQCLSDKKALVRSIACWTLSRYAHWVVSQPPDMHLKPLMTELLKRILDGNKRVQEAACSAFATLEEEACTELVPYLSYILDTLVFAFGKYQHKNLLILYDAIGTLADSVGHHLNQPEYIQKLMPPLIQKWNELKDEDKDLFPLLECLSSVATALQSGFLPYCEPVYQRCVTLVQKTLAQAMMYTQHPEQYEAPDKDFMIVALDLLSGLAEGLGGHVEQLVARSNIMTLLFQCMQDSMPEVRQSSFALLGDLTKACFIHVKPCIAEFMPILGTNLNPEFISVCNNATWAIGEICMQMGAEMQPYVQMVLNNLVEIINRPNTPKTLLENTAITIGRLGYVCPQEVAPMLQQFIRPWCTSLRNIRDNEEKDSAFRGICMMIGVNPGGVVQDFIFFCDAVASWVSPKDDLRDMFYKILHGFKDQVGEDNWQQFSEQFPPLLKERLAAFYGV

SEQ ID NO: 52129 - DNA, 2664 bp, Artificial Sequence
  derived and/or modified sequence
atggactggcagcccgacgagcagggcctgcagcaggtgctgcagctgctgaaggacagccagagccccaacaccgccacccagagaatcgtgcaggacaagctgaagcagctgaaccagttccccgacttcaacaactacctgatcttcgtgctgaccagactgaagagcgaggacgagcccaccagaagcctgagcggcctgatcctgaagaacaacgtgaaggcccactaccagagcttccccccccccgtggccgacttcatcaagcaggagtgcctgaacaacatcggcgacgccagcagcctgatcagagccaccatcggcatcctgatcaccaccatcgccagcaagggcgagctgcagatgtggcccgagctgctgccccagctgtgcaacctgctgaacagcgaggactacaacacctgcgagggcgccttcggcgccctgcagaagatctgcgaggacagcagcgagctgctggacagcgacgccctgaacagacccctgaacatcatgatccccaagttcctgcagttcttcaagcactgcagccccaagatcagaagccacgccatcgcctgcgtgaaccagttcatcatggacagagcccaggccctgatggacaacatcgacaccttcatcgagcacctgttcgccctggccgtggacgacgaccccgaggtgagaaagaacgtgtgcagagccctggtgatgctgctggaggtgagaatcgacagactgatcccccacatgcacagcatcatccagtacatgctgcagagaacccaggaccacgacgagaacgtggccctggaggcctgcgagttctggctgaccctggccgagcagcccatctgcaaggaggtgctggccagccacctggtgcagctgatccccatcctggtgaacggcatgaagtacagcgagatcgacatcatcctgctgaagggcgacgtggaggaggacgaggccgtgcccgacagcgagcaggacatcaagcccagattccacaagagcagaaccgtgaccctgccccacgaggccgagagacccgacggcagcgaggacgccgaggacgacgacgacgacgacgccctgagcgactggaacctgagaaagtgcagcgccgccgccctggacgtgctggccaacgtgttcagagaggagctgctgccccacctgctgcccctgctgaagggcctgctgttccaccccgagtgggtggtgaaggagagcggcatcctggtgctgggcgccatcgccgagggctgcatgcagggcatggtgccctacctgcccgagctgatcccccacctgatccagtgcctgagcgacaagaaggccctggtgagaagcatcgcctgctggaccctgagcagatacgcccactgggtggtgagccagccccccgacatgcacctgaagcccctgatgaccgagctgctgaagagaatcctggacggcaacaagagagtgcaggaggccgcctgcagcgccttcgccaccctggaggaggaggcctgcaccgagctggtgccctacctgagctacatcctggacaccctggtgttcgccttcggcaagtaccagcacaagaacctgctgatcctgtacgacgccatcggcaccctggccgacagcgtgggccaccacctgaaccagcccgagtacatccagaagctgatgccccccctgatccagaagtggaacgagctgaaggacgaggacaaggacctgttccccctgctggagtgcctgagcagcgtggccaccgccctgcagagcggcttcctgccctactgcgagcccgtgtaccagagatgcgtgaccctggtgcagaagaccctggcccaggccatgatgtacacccagcaccccgagcagtacgaggcccccgacaaggacttcatgatcgtggccctggacctgctgagcggcctggccgagggcctgggcggccacgtggagcagctggtggccagaagcaacatcatgaccctgctgttccagtgcatgcaggacagcatgcccgaggtgagacagagcagcttcgccctgctgggcgacctgaccaaggcctgcttcatccacgtgaagccctgcatcgccgagttcatgcccatcctgggcaccaacctgaaccccgagttcatcagcgtgtgcaacaacgccacctgggccatcggcgagatctgcatgcagatgggcgccgagatgcagccctacgtgcagatggtgctgaacaacctggtggagatcatcaacagacccaacacccccaagaccctgctggagaacaccgccatcaccatcggcagactgggctacgtgtgcccccaggaggtggcccccatgctgcagcagttcatcagaccctggtgcaccagcctgagaaacatcagagacaacgaggagaaggacagcgccttcagaggcatctgcatgatgatcggcgtgaaccccggcggcgtggtgcaggacttcatcttcttctgcgacgccgtggccagctgggtgagccccaaggacgacctgagagacatgttctacaagatcctgcacggcttcaaggaccaggtgggcgaggacaactggcagcagttcagcgagcagttcccccccctgctgaaggagagactggccgccttctacggcgtgtag

SEQ ID NO: 52130 - DNA, 2100 bp, Artificial Sequence
  derived and/or modified sequence
atggactggcagcccgacgagcagggcctgcagcaggtgctgcagctgctgaaggacagccagagccccaacaccgccacccagagaatcgtgcaggacaagctgaagcagctgaaccagttccccgacttcaacaactacctgatcttcgtgctgaccagactgaagagcgaggacgagcccaccagaagcctgagcggcctgatcctgaagaacaacgtgaaggcccactaccagagcttccccccccccgtggccgacttcatcaagcaggagtgcctgaacaacatcggcgacgccagcagcctgatcagagccaccatcggcatcctgatcaccaccatcgccagcaagggcgagctgcagatgtggcccgagctgctgccccagctgtgcaacctgctgaacagcgaggactacaacacctgcgagggcgccttcggcgccctgcagaagatctgcgaggacagcagcgagctgctggacagcgacgccctgaacagacccctgaacatcatgatccccaagttcctgcagttcttcaagcactgcagccccaagatcagaagccacgccatcgcctgcgtgaaccagttcatcatggacagagcccaggccctgatggacaacatcgacaccttcatcgagcacctgttcgccctggccgtggacgacgaccccgaggtgagaaagaacgtgtgcagagccctggtgatgctgctggaggtgagaatcgacagactgatcccccacatgcacagcatcatccagtacatgctgcagagaacccaggaccacgacgagaacgtggccctggaggcctgcgagttctggctgaccctggccgagcagcccatctgcaaggaggtgctggccagccacctggtgcagctgatccccatcctggtgaacggcatgaagtacagcgagatcgacatcatcctgctgaagggcgacgtggaggaggacgaggccgtgcccgacagcgagcaggacatcaagcccagattccacaagagcagaaccgtgaccctgccccacgaggccgagagacccgacggcagcgaggacgccgaggacgacgacgacgacgacgccctgagcgactggaacctgagaaagtgcagcgccgccgccctggacgtgctggccaacgtgttcagagaggagctgctgccccacctgctgcccctgctgaagggcctgctgttccaccccgagtgggtggtgaaggagagcggcatcctggtgctgggcgccatcgccgagggctgcatgcagggcatggtgccctacctgcccgagctgatcccccacctgatccagtgcctgagcgacaagaaggccctggtgagaagcatcgcctgctggaccctgagcagatacgcccactgggtggtgagccagccccccgacatgcacctgaagcccctgatgaccgagctgctgaagagaatcctggacggcaacaagagagtgcaggaggccgcctgcagcgccttcgccaccctggaggaggaggcctgcaccgagctggtgccctacctgagctacatcctggacaccctggtgttcgccttcggcaagtaccagcacaagaacctgctgatcctgtacgacgccatcggcaccctggccgacagcgtgggccaccacctgaaccagcccgagtacatccagaagctgatgccccccctgatccagaagtggaacgagctgaaggacgaggacaaggacctgttccccctgctggagtgcctgagcagcgtggccaccgccctgcagagcggcttcctgccctactgcgagcccgtgtaccagagatgcgtgaccctggtgcagaagaccctggcccaggccatgatgtacacccagcaccccgagcagtacgaggcccccgacaaggacttcatgatcgtggccctggacctgctgagcggcctggccgagggcctgggcggccacgtggagcagctggtggcccacagccccagcttccccccccaccccctgccccccgccggcagcagagtgtgccccttcgtgaccgtgctgtgctggggcctggcccccagatggagagagatccccctggtgtag

SEQ ID NO: 52131 - DNA, 3156 bp, Artificial Sequence
  derived and/or modified sequence
ggccagagcgtgggcggcagaggcctgttcagagactgcgcctgcatcgaggagaccaccggcgccggcgccctgagcagaagcggcgccggccccctggacgtggaggccgccggccccagccccagcagatgcgagggcggcggcagcctgagagccagaagcagaggccagagacacggccccccctgggacgagggcagcagcctgggccccatgagaatcagaagagcccccccccccccccccgtggccagattccacatccccccccccgccctgcccagccccagactgagaggcagaggctggagaagctggagaggccccagaacctgggccggcgtggacagaagacccccccccgtgagaagaggcagaagcagaagacacgccgccaccgccgccagcggcgccccccccggcagccacaccgagccccagagacccagcgccgaccccggcccctacctgagaagcctgccctgcgccatggactggcagcccgacgagcagggcctgcagcaggtgctgcagctgctgaaggacagccagagccccaacaccgccacccagagaatcgtgcaggacaagctgaagcagctgaaccagttccccgacttcaacaactacctgatcttcgtgctgaccagactgaagagcgaggacgagcccaccagaagcctgagcggcctgatcctgaagaacaacgtgaaggcccactaccagagcttccccccccccgtggccgacttcatcaagcaggagtgcctgaacaacatcggcgacgccagcagcctgatcagagccaccatcggcatcctgatcaccaccatcgccagcaagggcgagctgcagatgtggcccgagctgctgccccagctgtgcaacctgctgaacagcgaggactacaacacctgcgagggcgccttcggcgccctgcagaagatctgcgaggacagcagcgagctgctggacagcgacgccctgaacagacccctgaacatcatgatccccaagttcctgcagttcttcaagcactgcagccccaagatcagaagccacgccatcgcctgcgtgaaccagttcatcatggacagagcccaggccctgatggacaacatcgacaccttcatcgagcacctgttcgccctggccgtggacgacgaccccgaggtgagaaagaacgtgtgcagagccctggtgatgctgctggaggtgagaatcgacagactgatcccccacatgcacagcatcatccagtacatgctgcagagaacccaggaccacgacgagaacgtggccctggaggcctgcgagttctggctgaccctggccgagcagcccatctgcaaggaggtgctggccagccacctggtgcagctgatccccatcctggtgaacggcatgaagtacagcgagatcgacatcatcctgctgaagggcgacgtggaggaggacgaggccgtgcccgacagcgagcaggacatcaagcccagattccacaagagcagaaccgtgaccctgccccacgaggccgagagacccgacggcagcgaggacgccgaggacgacgacgacgacgacgccctgagcgactggaacctgagaaagtgcagcgccgccgccctggacgtgctggccaacgtgttcagagaggagctgctgccccacctgctgcccctgctgaagggcctgctgttccaccccgagtgggtggtgaaggagagcggcatcctggtgctgggcgccatcgccgagggctgcatgcagggcatggtgccctacctgcccgagctgatcccccacctgatccagtgcctgagcgacaagaaggccctggtgagaagcatcgcctgctggaccctgagcagatacgcccactgggtggtgagccagccccccgacatgcacctgaagcccctgatgaccgagctgctgaagagaatcctggacggcaacaagagagtgcaggaggccgcctgcagcgccttcgccaccctggaggaggaggcctgcaccgagctggtgccctacctgagctacatcctggacaccctggtgttcgccttcggcaagtaccagcacaagaacctgctgatcctgtacgacgccatcggcaccctggccgacagcgtgggccaccacctgaaccagcccgagtacatccagaagctgatgccccccctgatccagaagtggaacgagctgaaggacgaggacaaggacctgttccccctgctggagtgcctgagcagcgtggccaccgccctgcagagcggcttcctgccctactgcgagcccgtgtaccagagatgcgtgaccctggtgcagaagaccctggcccaggccatgatgtacacccagcaccccgagcagtacgaggcccccgacaaggacttcatgatcgtggccctggacctgctgagcggcctggccgagggcctgggcggccacgtggagcagctggtggccagaagcaacatcatgaccctgctgttccagtgcatgcaggacagcatgcccgaggtgagacagagcagcttcgccctgctgggcgacctgaccaaggcctgcttcatccacgtgaagccctgcatcgccgagttcatgcccatcctgggcaccaacctgaaccccgagttcatcagcgtgtgcaacaacgccacctgggccatcggcgagatctgcatgcagatgggcgccgagatgcagccctacgtgcagatggtgctgaacaacctggtggagatcatcaacagacccaacacccccaagaccctgctggagaacaccgccatcaccatcggcagactgggctacgtgtgcccccaggaggtggcccccatgctgcagcagttcatcagaccctggtgcaccagcctgagaaacatcagagacaacgaggagaaggacagcgccttcagaggcatctgcatgatgatcggcgtgaaccccggcggcgtggtgcaggacttcatcttcttctgcgacgccgtggccagctgggtgagccccaaggacgacctgagagacatgttctacaagatcctgcacggcttcaaggaccaggtgggcgaggacaactggcagcagttcagcgagcagttcccccccctgctgaaggagagactggccgccttctacggcgtgtag

SEQ ID NO: 52132 - DNA, 2316 bp, Artificial Sequence
  derived and/or modified sequence
atggactggcagcccgacgagcagggcctgcagcaggtgctgcagctgctgaaggacagccagagccccaacaccgccacccagagaatcgtgcaggacaagctgaagcagctgaaccagttccccgacttcaacaactacctgatcttcgtgctgaccagactgaagagcgaggacgagcccaccagaagcctgagcggcctgatcctgaagaacaacgtgaaggcccactaccagagcttccccccccccgtggccgacttcatcaagcaggagtgcctgaacaacatcggcgacgccagcagcctgatcagagccaccatcggcatcctgatcaccaccatcgccagcaagggcgagctgcagatgtggcccgagctgctgccccagctgtgcaacctgctgaacagcgaggactacaacacctgcgagggcgccttcggcgccctgcagaagatctgcgaggacagcagcgagctgctggacagcgacgccctgaacagacccctgaacatcatgatccccaagttcctgcagttcttcaagcactgcagccccaagatcagaagccacgccatcgcctgcgtgaaccagttcatcatggacagagcccaggccctgatggacaacatcgacaccttcatcgagcacctgttcgccctggccgtggacgacgaccccgaggtgagaaagaacgtgtgcagagccctggtgatgctgctggaggtgagaatcgacagactgatcccccacatgcacagcatcatccagtacatgctgcagagaacccaggaccacgacgagaacgtggccctggaggcctgcgagttctggctgaccctggccgagcagcccatctgcaaggaggtgctggccagccacctggtgcagctgatccccatcctggtgaacggcatgaagtacagcgagatcgacatcatcctgctgaagggcgacgtggaggaggacgaggccgtgcccgacagcgagcaggacatcaagcccagattccacaagagcagaaccgtgaccctgccccacgaggccgagagacccgacggcagcgaggacgccgaggacgacgacgacgacgacgccctgagcgactggaacctgagaaagtgcagcgccgccgccctggacgtgctggccaacgtgttcagagaggagctgctgccccacctgctgcccctgctgaagggcctgctgttccaccccgagtgggtggtgaaggagagcggcatcctggtgctgggcgccatcgccgagggctgcatgcagggcatggtgccctacctgcccgagctgatcccccacctgatccagtgcctgagcgacaagaaggccctggtgagaagcatcgcctgctggaccctgagcagatacgcccactgggtggtgagccagccccccgacatgcacctgaagcccctgatgaccgagctgctgaagagaatcctggacggcaacaagagagtgcaggaggccgcctgcagcgccttcgccaccctggaggaggaggcctgcaccgagctggtgccctacctgagctacatcctggacaccctggtgttcgccttcggcaagtaccagcacaagaacctgctgatcctgtacgacgccatcggcaccctggccgacagcgtgggccaccacctgaaccagcccgagtacatccagaagctgatgccccccctgatccagaagtggaacgagctgaaggacgaggacaaggacctgttccccctgctggagtgcctgagcagcgtggccaccgccctgcagagcggcttcctgccctactgcgagcccgtgtaccagagatgcgtgaccctggtgcagaagaccctggcccaggccatgatgtacacccagcaccccgagcagtacgaggcccccgacaaggacttcatgatcgtggccctggacctgctgagcggcctggccgagggcctgggcggccacgtggagcagctggtggccagaagcaacatcatgaccctgctgttccagtgcatgcaggacagcatgcccgaggtgagacagagcagcttcgccctgctgggcgacctgaccaaggcctgcttcatccacgtgaagccctgcatcgccgagttcatgcccatcctgggcaccaacctgaaccccgagttcatcagcgtgtgcaacaacgccacctgggccatcggcgagatctgcatgcagatgggcgccgagatgcagccctacgtgcagatggtgctgaacaacctggtggagatcatcaacagacccacccccagccagaagcagaacaagaccaagaagaacaagtag

SEQ ID NO: 52133 - DNA, 2664 bp, Artificial Sequence
  derived and/or modified sequence
atggactggcagccggatgagcagggcctgcaacaggtgctccagctgcttaaagacagccagtcgcctaacaccgctactcagagaatcgtacaggacaagttaaagcaactgaatcaatttccagacttcaataactacctgatcttcgtgctaacccgtctgaaaagcgaagatgaaccaacaaggtctcttagtggcctgattcttaagaataatgtgaaagcccactaccagtctttccccccacccgtagctgacttcatcaaacaggagtgcctgaataatatcggcgatgcttcctccctgattcgcgctactatcggaatcttaattaccaccatagcttctaagggggagctgcagatgtggccagagctattacctcagctgtgcaacttgcttaatagtgaagactataacacttgcgagggggcgttcggcgctcttcaaaagatatgcgaggattcttccgaactgctcgattcagacgcgcttaatcggcccctgaacattatgattcccaagttcctgcagttcttcaagcactgctctcccaagatccgtagccacgccatcgcttgcgtgaaccagttcatcatggatagggcccaagcgctgatggataacatcgataccttcatcgagcatctgtttgcgttggcggttgacgatgatcccgaggtgaggaaaaacgtgtgccgcgcattggtcatgttattggaggtaagaatcgatcgcctcattccacacatgcactcgataatccagtacatgctgcagaggacccaggatcatgatgagaacgtggccttggaagcctgcgagttctggctgactctagccgaacagcccatttgcaaagaggtgctcgctagccacttggttcagcttatccccatcctggtaaatggtatgaaatactccgaaattgatatcatccttctgaaaggagacgtggaagaagatgaagcggttcctgacagtgaacaggacataaaacccaggtttcacaagtcacgtaccgtgactctcccccatgaagccgagcgccccgatggatcagaagacgcagaggatgacgatgatgacgatgctctaagtgattggaacttacgtaagtgctcggccgccgccctcgacgtgctggcaaacgttttccgggaggagctgcttccccatctgctaccgttactgaaaggacttctcttccatccagagtgggtcgttaaagagagtgggattctggtcctgggtgccatagccgagggttgtatgcagggaatggtgccgtacctgcctgaactgatccctcatctgatccagtgcctttcggacaagaaagctctagtgagaagcatagcttgttggaccctgtcaaggtacgcacattgggtggttagccagcccccagacatgcatctaaaacctctgatgaccgagctcttaaagcgcattttagatggcaacaagcgggttcaggaagctgcctgttcagcatttgccacgttagaagaggaggcctgcacagaattggtcccttatctgagttacattctagacaccctagtctttgcctttggaaaatatcagcacaaaaacctcctgattctctacgacgccattggcactctcgctgactccgtcggacatcacctaaaccagcccgagtacatccagaagctgatgcctccactcattcagaaatggaatgaactcaaggatgaggacaaggatctgtttcccctgcttgagtgcctgtcatcagtggcaacagccctccagagcggttttcttccctattgtgaacccgtttatcaaaggtgtgtgacactggttcagaaaactctcgcccaagcaatgatgtatacacagcaccccgagcagtacgaggctcccgataaggacttcatgatcgtggccctggacttactttctggacttgccgagggcttgggagggcatgtagagcagctggtcgctcgctcgaacatcatgacactgctgtttcagtgcatgcaggatagtatgcctgaagtgcggcaaagctcattcgcactgctcggcgacctgacaaaagcgtgctttatacacgtgaagccttgtatcgccgagtttatgcccattctcggcactaatctgaaccccgaatttatctccgtgtgcaacaacgccacctgggctattggagagatatgcatgcaaatgggcgctgaaatgcagccatacgtgcaaatggtcctgaacaacctggtggagatcatcaataggcctaacacaccaaagacactcctagaaaataccgcaataacgatcgggaggttaggctacgtatgtcctcaggaagtcgcccccatgctgcagcagttcattcgcccttggtgcacaagcttgaggaacattcgagacaacgaggaaaaggacagcgcatttcgcggcatctgcatgatgataggagtgaacccaggaggcgtagttcaagacttcatattcttctgtgacgcagtagcaagctgggtttccccaaaggacgacctccgcgatatgttttacaagattcttcatggcttcaaggaccaagtcggagaagataattggcaacaattctctgaacagtttcctcctctattaaaagagagactcgcagcattttacggggtgtag

SEQ ID NO: 52134 - DNA, 2100 bp, Artificial Sequence
  derived and/or modified sequence
atggactggcagcccgacgaacaggggctacagcaggtgttgcaactactcaaggacagtcagtctccgaataccgccacacaaagaattgtccaggataaactcaagcagttgaaccagtttccagactttaacaactacttgatatttgtcctgacacgcttgaaatctgaggacgaacccacccgcagtctaagcggattgattcttaaaaacaatgtcaaggctcactaccagagcttccccccgccagtggccgacttcataaaacaggagtgtcttaacaatattggcgatgcttccagccttatccgcgcaacaattgggattctcatcaccactatagcctccaagggtgagctccagatgtggcctgagctgctgccccagctctgcaacttactcaactctgaagactacaacacatgtgaaggggccttcggcgctctccagaagatctgtgaggattcctctgagttgttggattcagacgccctgaataggcctctgaacattatgatcccaaagtttttgcagtttttcaaacattgcagtccaaaaatcagatcacacgcgattgcctgcgtgaaccagtttattatggatagggcccaggcgcttatggacaacattgacacgttcattgagcatctgtttgcattggcggtggacgatgacccagaagtgagaaaaaacgtctgtcgagcacttgtgatgctactggaagtccgcatagatcggttaattccccatatgcattcaattatccagtacatgctgcagcggacccaggaccacgatgaaaacgtggcactcgaagcttgcgagttttggctgaccctcgcagagcagcccatttgtaaggaggtgctcgcaagtcacctagttcaactgatcccaattttggtcaatggcatgaagtacagcgagatcgatattatcctacttaaaggtgatgttgaagaagacgaagcagtcccggactccgagcaagacatcaagccccgctttcacaaaagcaggaccgtgacattaccccatgaggcggagaggccagacggatcagaggacgccgaagatgacgatgatgacgacgccctctccgattggaacttacgcaagtgtagcgctgctgcgctggatgtcttggccaatgttttcagggaagaactgcttccacacctgctccccctgctgaaaggtctccttttccaccctgaatgggtcgtcaaagagtccggaattctggtactcggggctattgctgagggctgcatgcagggcatggtgccctacttgccggaactgatccctcatctaattcagtgcctctcagacaaaaaggcgctagtccgctccattgcctgctggactttgagcagatacgctcattgggtggtcagtcaaccccctgatatgcacctgaagccactgatgaccgaactgctgaagcgcatccttgacggcaataagcgggtccaggaagcagcttgttcagcctttgctactttagaagaggaggcctgcacggaactcgttccttatctgtcttacattctggacacactggtgtttgcgttcggcaagtaccagcataagaacctgctgatcctatacgacgccattggaactctggcggactccgtgggtcatcaccttaatcagccagagtacattcaaaagctcatgcctccgctgatacaaaaatggaacgagctcaaggatgaagacaaggaccttttcccgctcctcgaatgcctctccagtgtagccactgccctccaaagtggttttcttccatattgcgaacctgtgtaccagaggtgcgtcactctcgtgcaaaaaactttagctcaagccatgatgtacacccagcatccagagcagtatgaggccccagacaaggatttcatgatcgtagcattagacttattaagcggtcttgccgaagggctagggggccacgtggagcagctcgtagcccacagcccttcattccctccccaccctctccccccagcgggcagcagagtctgtccttttgtgactgttctgtgttggggattggctcctcggtggcgcgagattcccttagtttag

SEQ ID NO: 52135 - DNA, 2664 bp, Artificial Sequence
  derived and/or modified sequence
atggattggcaacctgacgagcaggggttgcaacaggtgctacaactcttaaaagattcccagtctccaaacacagcaacacaacggatcgtgcaagataaactgaaacaattaaatcaatttcccgacttcaataactatctcatcttcgtgctaaccagacttaaatccgaagatgagcctacaaggagcctgagcggcctcatcctaaaaaataacgtgaaggcccattatcagtcgttcccccctcccgtagctgacttcattaaacaggagtgtctcaacaatatcggtgacgccagctcgcttattcgcgcgactattgggatcttgatcacgactattgcctcaaaaggggaactgcagatgtggccagagcttttgccacagttatgcaatctcctcaacagtgaagactacaacacatgcgagggtgcctttggcgcactgcaaaaaatctgtgaagactcttctgaactgttagactcagatgcactgaataggccactgaacattatgataccaaagttcttgcagtttttcaaacattgttctccaaagatcagaagccacgcaattgcatgtgtgaatcaattcataatggatcgagcccaggccctgatggacaacatcgataccttcatcgagcatctctttgccttggctgtggacgatgacccagaagtgagaaaaaatgtctgcagagccctggtcatgctgctggaagttcgtatcgacagactcatccctcacatgcattctataattcagtatatgttgcagaggactcaggaccatgacgaaaatgtcgccctcgaggcgtgtgagttttggctgaccttggccgagcagcctatttgcaaggaagtgctggcctctcacctggtgcagttaatacccatcctcgtgaatggaatgaagtattcagaaatcgacatcatactgctgaagggtgacgtggaggaggatgaagccgtccccgattctgaacaggacatcaaacccaggttccacaagtctcgcactgtgaccttaccacacgaggctgaaaggcctgacgggagtgaagacgccgaggacgacgacgacgatgatgccctatcagattggaatctgagaaagtgctccgccgccgccctggacgtgctcgctaacgtctttagagaggagctcttgcctcacctgctgcccctgctgaagggtcttttgtttcatcctgagtgggtggtcaaggagagtggcatcctcgtgctaggggctattgctgaagggtgtatgcagggcatggtgccttatctgccagagctaatacctcatctgatacagtgtcttagtgacaaaaaagccctggttcgatccatcgcctgctggacgctgagcagatacgcacattgggtggtctcccaaccacccgatatgcatctgaagccactcatgactgaactactgaaacggattctggatggaaacaagcgggttcaggaagccgcctgtagtgccttcgccaccctggaggaagaggcctgcaccgagctggtcccctacctgagctatattcttgatactttggtgtttgcttttggtaagtaccaacacaagaacctgctcatattatacgacgcaatcggaaccctggccgactctgtaggacaccatctgaaccagcctgaatacatccagaaattgatgccgccactgattcaaaagtggaatgaactgaaggacgaagataaggatctgtttccattgctggaatgtctgagtagtgtcgcaaccgccctccagagcgggtttctgccttattgtgagccggtttatcagcggtgtgttaccctggttcagaagacattggctcaagccatgatgtatacacagcaccccgagcagtatgaggctcccgataaagactttatgatcgttgctttagatctactctctggcctggctgaagggcttggcggacatgttgaacagcttgtggcacgctccaatattatgactctactatttcagtgcatgcaagactcaatgcctgaggtgcgccaaagcagtttcgctcttctgggcgacctaacaaaggcatgtttcatacacgttaagccatgtatcgccgaatttatgcctatcctgggcactaaccttaatccagagtttatttctgtgtgtaataacgcgacatgggcaatcggggaaatttgtatgcagatgggtgctgagatgcagccctacgttcagatggtcctgaacaatctggtggaaatcatcaatcgccccaacacacccaagactctgttagaaaacactgctatcaccatcggccgactggggtacgtctgcccccaagaagtcgccccaatgctgcagcaatttattaggccgtggtgtacctctctccgcaatatacgtgacaacgaagagaaggactccgccttccgcggaatatgtatgatgatcggggtcaatcccgggggtgtcgtgcaagattttatcttcttctgcgacgccgtggcatcttgggtgagccccaaggatgatttaagggacatgttctataagatactgcatggcttcaaagaccaggtcggcgaggataactggcagcagttttccgagcagttcccccccctacttaaagagagactcgcggcgttttacggcgtgtag

SEQ ID NO: 52136 - DNA, 3156 bp, Artificial Sequence
  derived and/or modified sequence
ggacagtctgtcggtggccgaggacttttccgcgactgtgcttgcatcgaggagacgacgggtgcgggcgctctctcacgaagtggggcaggtccgctggacgttgaggcagctgggccatctccttcgcgctgcgaaggtggtggctcacttagagccagaagtcgcggtcagaggcatgggccgccatgggacgagggttcgtcactcggaccaatgcgcatccggcgggctcctccgcctcctccagtggcccgattccatattccccctcctgccctgccttcccccagactgagaggccggggctggcggtcttggagaggaccacgaacatgggcgggggttgatcgccggcctccgcctgtgcgccgcgggaggtctagacggcatgctgcgactgccgcctctggcgcgccccctggttcccatactgagcctcagcgcccatctgctgatccaggcccttacttgcgtagcctgccttgtgctatggattggcagccagacgaacagggtctgcagcaagttctgcaacttctcaaagatagccagagtccaaacacagcaacgcagagaatcgtccaggacaagctgaagcagttgaaccaattcccagatttcaacaattacctgatcttcgtcctgaccagactgaagtctgaagatgagcccacacgttcgctgtccggtctcatactgaaaaataacgtgaaagctcattatcaatctttcccaccaccagtggcagacttcattaagcaggagtgcctcaataacataggagacgccagcagtttaatccgagccactataggcatactaataacgacaatcgcgtccaagggcgagttgcaaatgtggcctgagctgcttccgcagctgtgtaatctgctgaactcagaagattataacacctgtgagggtgcgttcggcgccctgcaaaaaatctgcgaagatagttccgaactgctagattccgatgcccttaatcggcctctgaatataatgattcccaagtttctacaattttttaagcactgtagtcccaagatacgaagccacgctatcgcatgtgtcaaccagttcataatggatcgagctcaggctttaatggataacatcgacacgttcatcgaacatttgttcgctctggcagtggatgatgacccagaagtccggaagaacgtttgtcgcgccctggttatgctgctcgaggtgcgcatagaccgcctcattcctcatatgcactctattattcagtacatgctccagaggacacaggatcacgacgaaaacgtggcactcgaggcctgcgagttttggcttacccttgcggaacaaccaatttgtaaagaggtgctggcttcacacctggtacagcttatccccatattggtcaatggcatgaagtacagcgaaatagatataatactgcttaaaggagacgtggaggaggacgaagctgtgcctgattctgaacaggacatcaaaccacggttccacaaatctcggacggtcacgctgcctcatgaggctgagcgcccagacgggtcagaagacgcggaggatgacgatgacgatgacgctctgtccgactggaacctccgtaagtgttcagcagcggctttagacgtactcgccaatgtttttcgggaggagttacttccccacctgctgccactgctgaaagggctgttgtttcatccagagtgggtagtcaaagagtctggcattctggtcttaggtgccatcgcagaagggtgcatgcaaggcatggtcccgtacctgcctgagttgattcctcatttgatccagtgtctgagcgacaaaaaggcgctcgtcagatccatcgcttgttggactttgtcaagatacgctcattgggtcgttagtcagcctcctgacatgcaccttaagcctctcatgaccgagctcctgaagcggatcctagatggtaacaaacgcgtccaggaagcagcctgtagcgcatttgcaacattggaggaagaagcctgtacagaacttgtgccttatctgtcttacattttggacacgctcgtctttgctttcggcaagtaccagcacaagaatctgcttattttgtacgatgctatcggaaccctggccgatagcgtggggcaccacctcaatcagcccgaatatatccagaagctcatgccgcccttgattcagaaatggaacgagctgaaagacgaagacaaggacctcttccccctgctcgagtgtctttcctcagtggccaccgctcttcagagcggattccttccatactgtgagcccgtgtaccagcgatgcgtaactcttgttcagaagaccttggctcaagccatgatgtacacacagcaccccgaacaatacgaagctcccgacaaggactttatgatcgttgctctggatctgctgtcgggtctggctgagggtctcggcggacatgtcgagcagctggtggccaggtccaacatcatgaccctgctgtttcagtgcatgcaagactctatgccagaggtgagacaatccagttttgccctgcttggggatctgacaaaggcctgcttcattcatgtgaaaccctgcatagctgagtttatgcctatcctcggcactaatttgaacccagagttcatcagcgtttgtaataacgctacctgggccattggcgaaatctgcatgcaaatgggagctgaaatgcagccatacgtccagatggttctaaacaatctcgtcgagatcatcaatagacctaacacccccaaaaccttgttggagaatactgcaatcacaattggacggttgggttacgtttgtccccaggaggtcgcccccatgcttcagcagtttattcgaccctggtgcacctccctcagaaatattagagacaacgaagaaaaagactccgcttttagaggcatttgtatgatgattggcgttaaccccggcggagtggtacaagacttcatttttttttgcgatgcagttgccagctgggtgagccctaaggacgacctcagggacatgttttacaagatcctgcacgggtttaaggaccaggttggagaagacaactggcagcagttctccgagcagttccccccgcttttgaaggagagattggcagcattctatggcgtttag

SEQ ID NO: 52137 - DNA, 2316 bp, Artificial Sequence
  derived and/or modified sequence
atggattggcagccagatgagcaggggctccaacaggttcttcagctgctgaaagatagtcagagccctaatacggccacacagaggatagttcaggacaaacttaagcagctaaatcaatttcctgatttcaacaattacctcattttcgtcttgacacgcctcaagtccgaagacgagcccacccggtccttgtctggactgattctcaaaaacaacgtgaaagcacactatcagtcttttccaccaccggtggccgacttcatcaagcaagagtgtctgaataacatcggcgacgcttcgagcctgatacgggccaccattggaattcttataaccaccattgcttctaagggggagctgcaaatgtggcccgagctgcttccacagctgtgcaacctgttgaattctgaagactacaacacttgcgagggtgcctttggggccctgcaaaagatttgtgaggattcttctgaactcctcgactccgacgctcttaatcgtccattgaacatcatgattcctaaattcctccaattttttaagcattgttctccaaagattcggtcccatgctattgcctgcgtgaatcagttcatcatggaccgagcacaggcattgatggataacattgacacgttcatagaacacttgtttgctcttgccgtcgatgatgatcccgaggtccggaaaaatgtctgccgagctctcgtcatgcttctggaggttcgcattgatagattgatcccacacatgcacagcattatccagtacatgctccagcgaacgcaggatcatgacgaaaatgtggcactcgaggcgtgtgaattctggctgacactagccgaacagccgatctgcaaggaagttctggcaagccacctggtccagctcatccccatccttgttaacggtatgaagtacagcgagatcgatatcattttacttaagggggacgtggaggaggacgaggctgtacccgattcagagcaagatatcaagccgagatttcacaagtctcgcaccgtcactctgcctcatgaggcagaacggccagacggctcagaagatgcagaggatgacgatgatgacgatgccctgagtgattggaatctgagaaagtgctcggctgctgcgttggacgttttggcaaacgtcttcagggaagagctgctgccccacctactccctcttctgaaagggctcctttttcaccccgagtgggttgtgaaagaatcaggcattcttgtgcttggagccatagcagagggttgtatgcaaggaatggtaccatatctgccagagctaatcccacacctgatccagtgcctgtccgataaaaaagcgctggtccgctccattgcctgttggacactctccaggtacgcccattgggtagtgtctcagcctcctgatatgcatctgaagccactgatgaccgagctgctcaaaaggatactggacgggaacaaacgagtgcaggaagccgcttgttcagcatttgcaactttggaggaagaagcctgtaccgagctcgttccatatctgagctacatactggatacactggttttcgctttcgggaaatatcaacacaagaacctcctcatactgtatgatgcaatcggaacgcttgccgactcagtgggtcaccacttgaaccagccagagtacatccaaaagcttatgcccccattgatccagaagtggaacgagcttaaggatgaggacaaggacctctttcctctcttagagtgtctgtcctctgtggctacggctctgcagtccgggttcctgccctactgcgagcctgtgtaccagagatgtgtcacgctggtgcaaaagactcttgcccaggccatgatgtatacccagcatcccgaacagtacgaggcccctgacaaggatttcatgatcgttgccctggacctgctctccgggcttgcagaggggctgggcgggcacgtagagcagctggtcgcccggtcaaatatcatgactttgctgttccagtgcatgcaggattctatgccagaagtccggcagtcttcgtttgccctgctgggagaccttactaaggcatgcttcatccatgtgaagccatgcatcgccgagttcatgcctatattaggaaccaatctgaatcccgagttcatttctgtctgtaacaacgctacctgggcaattggggagatatgtatgcagatgggcgctgaaatgcagccatacgtgcaaatggtactgaacaacttggtggaaattattaaccgtcctacgccgtctcagaaacagaataagactaagaagaacaagtag

SEQ ID NO: 52138 - DNA, 2664 bp, Artificial Sequence
  derived and/or modified sequence
atggactggcagccagatgagcagggcctgcagcaggtgctgcagctgctgaaggacagccagagccccaacacagccacccagagaattgtgcaggacaagctgaagcagctgaaccagttcccagacttcaacaactacctgatctttgtgctgacccggctgaagtcagaagatgagcccaccaggagcctgagcggcctcatcctgaagaacaacgtgaaggcccactaccagagcttccccccacctgtggccgacttcatcaagcaggagtgcctgaacaacattggagatgccagcagcctcatccgggccaccatcggcatcctgatcaccaccatcgccagcaagggggagctgcagatgtggccagagctgctgccccagctgtgcaacctgctgaacagcgaggactacaacacctgtgagggcgcctttggagccctgcagaagatctgtgaggacagcagcgagctgctggacagtgatgccctgaaccggcccctgaacatcatgatccccaagttcctgcagttcttcaagcactgcagccccaagatccgcagccacgccatcgcctgtgtgaaccagttcatcatggaccgggcccaggccctgatggacaacatcgacaccttcatcgagcacctgtttgccctggccgtggatgatgatcctgaggtgaggaagaatgtgtgccgggccctggtgatgctgctggaggtgagaattgacaggctcatcccccacatgcacagcatcatccagtacatgctgcagaggacccaggaccatgatgaaaatgtggccctggaggcctgtgagttctggctgaccctggccgagcagcccatctgcaaggaggtgctggccagccacctggtgcagctgatccccatcctggtgaatggcatgaagtacagcgagattgacatcatcctgctgaagggagatgtggaggaggatgaagctgtgcctgattctgagcaggacatcaagccccgcttccacaagagcaggacagtgaccctgccccatgaagctgagaggccagatggctctgaagatgctgaagatgatgatgatgatgatgccctgagtgactggaacctgaggaagtgcagcgctgctgccctggatgtgctggccaacgtgttccgggaggagctgctgccccacctgctgcccctgctgaagggcctgctcttccaccctgagtgggtggtgaaggagagcggcatcctggtgctgggcgccatcgccgagggctgcatgcagggcatggtgccctacctgcctgagctgatcccccacctgatccagtgcctgagtgacaagaaggccctggtgcgcagcatcgcctgctggaccctgagccgctatgcccactgggtggtgtcccagcccccagacatgcacctgaagcccctgatgacagagctgctgaagaggatcctggatggcaacaagagggtgcaggaggccgcctgcagcgcctttgccaccctggaggaggaggcctgcacagagctggtgccctacctgagctacatcctggacaccctggtgtttgccttcggcaagtaccagcacaagaacctgctgatcctgtatgatgccatcggcaccctggccgacagcgtgggccaccacctgaaccagcctgagtacatccagaagctgatgccacccctcatccagaagtggaatgagctgaaggatgaggacaaggacctcttccccctgctggagtgcctgagctctgtggccacagccctgcagagcggcttcctgccctactgtgagcctgtgtaccagagatgtgtgaccctggtgcagaagaccctggcccaggccatgatgtacacccagcaccctgagcagtatgaggccccagacaaggacttcatgattgtggccctggacctgctgagcggcctggccgagggcctgggcggccacgtggagcagctggtggcccggagcaacatcatgaccctgctcttccagtgcatgcaggacagcatgcctgaggtgcggcagagcagctttgccctgctgggggacctgaccaaggcctgcttcatccacgtgaagccctgcatcgccgagttcatgcccatcctgggcaccaacctgaaccctgagttcatctctgtgtgcaacaatgccacctgggccatcggggagatctgcatgcagatgggcgctgagatgcagccctacgtgcagatggtgctgaacaacctggtggagatcatcaaccggcccaacacccccaagaccctgctggagaacacagccatcaccatcggccgcctgggctacgtgtgcccccaggaggtggcccccatgctgcagcagttcatccggccctggtgcaccagcctgaggaacatccgggacaatgaggagaaggacagcgccttccggggcatctgcatgatgattggagtgaaccctgggggcgtggtgcaggacttcatcttcttctgtgatgctgtggcctcctgggtgagccccaaggatgacctgcgggacatgttctacaagatcctgcacggcttcaaggaccaggtgggggaggacaactggcagcagttcagcgagcagttcccccccctgctgaaggagcggctggccgccttctatggagtgtag

SEQ ID NO: 52139 - DNA, 2100 bp, Artificial Sequence
  derived and/or modified sequence
atggactggcagccagatgagcagggcctgcagcaggtgctgcagctgctgaaggacagccagagccccaacacagccacccagagaattgtgcaggacaagctgaagcagctgaaccagttcccagacttcaacaactacctgatctttgtgctgacccggctgaagtcagaagatgagcccaccaggagcctgagcggcctcatcctgaagaacaacgtgaaggcccactaccagagcttccccccacctgtggccgacttcatcaagcaggagtgcctgaacaacattggagatgccagcagcctcatccgggccaccatcggcatcctgatcaccaccatcgccagcaagggggagctgcagatgtggccagagctgctgccccagctgtgcaacctgctgaacagcgaggactacaacacctgtgagggcgcctttggagccctgcagaagatctgtgaggacagcagcgagctgctggacagtgatgccctgaaccggcccctgaacatcatgatccccaagttcctgcagttcttcaagcactgcagccccaagatccgcagccacgccatcgcctgtgtgaaccagttcatcatggaccgggcccaggccctgatggacaacatcgacaccttcatcgagcacctgtttgccctggccgtggatgatgatcctgaggtgaggaagaatgtgtgccgggccctggtgatgctgctggaggtgagaattgacaggctcatcccccacatgcacagcatcatccagtacatgctgcagaggacccaggaccatgatgaaaatgtggccctggaggcctgtgagttctggctgaccctggccgagcagcccatctgcaaggaggtgctggccagccacctggtgcagctgatccccatcctggtgaatggcatgaagtacagcgagattgacatcatcctgctgaagggagatgtggaggaggatgaagctgtgcctgattctgagcaggacatcaagccccgcttccacaagagcaggacagtgaccctgccccatgaagctgagaggccagatggctctgaagatgctgaagatgatgatgatgatgatgccctgagtgactggaacctgaggaagtgcagcgctgctgccctggatgtgctggccaacgtgttccgggaggagctgctgccccacctgctgcccctgctgaagggcctgctcttccaccctgagtgggtggtgaaggagagcggcatcctggtgctgggcgccatcgccgagggctgcatgcagggcatggtgccctacctgcctgagctgatcccccacctgatccagtgcctgagtgacaagaaggccctggtgcgcagcatcgcctgctggaccctgagccgctatgcccactgggtggtgtcccagcccccagacatgcacctgaagcccctgatgacagagctgctgaagaggatcctggatggcaacaagagggtgcaggaggccgcctgcagcgcctttgccaccctggaggaggaggcctgcacagagctggtgccctacctgagctacatcctggacaccctggtgtttgccttcggcaagtaccagcacaagaacctgctgatcctgtatgatgccatcggcaccctggccgacagcgtgggccaccacctgaaccagcctgagtacatccagaagctgatgccacccctcatccagaagtggaatgagctgaaggatgaggacaaggacctcttccccctgctggagtgcctgagctctgtggccacagccctgcagagcggcttcctgccctactgtgagcctgtgtaccagagatgtgtgaccctggtgcagaagaccctggcccaggccatgatgtacacccagcaccctgagcagtatgaggccccagacaaggacttcatgattgtggccctggacctgctgagcggcctggccgagggcctgggcggccacgtggagcagctggtggcccacagccccagcttccccccccaccccctgcccccagctggcagccgggtgtgcccctttgtgacagtgctgtgctggggcctggccccccgctggagggagatccccctggtgtag

SEQ ID NO: 52140 - DNA, 3156 bp, Artificial Sequence
  derived and/or modified sequence
ggccagagcgtgggcggccggggcctcttccgggactgtgcctgcatcgaggagaccaccggggccggggccctgagccgcagcggggccggccccctggatgtggaggccgccggccccagccccagccgctgtgagggcggcggcagcctgcgggcccggagccggggccagagacatggccccccctgggatgagggcagcagcctgggccccatgaggatccggcgggcccctcctcctcctcctgtggcccgcttccacatccccccaccagccctgcccagcccccggctgcggggccggggctggaggtcctggaggggccccaggacctgggccggcgtggaccggcggcccccacctgtgcggcggggccgcagcagaagacatgctgccacagctgccagcggggcccctcctggcagccacacagagccccagaggccttctgctgaccccggcccctacctgcggagcctgccctgtgccatggactggcagccagatgagcagggcctgcagcaggtgctgcagctgctgaaggacagccagagccccaacacagccacccagagaattgtgcaggacaagctgaagcagctgaaccagttcccagacttcaacaactacctgatctttgtgctgacccggctgaagtcagaagatgagcccaccaggagcctgagcggcctcatcctgaagaacaacgtgaaggcccactaccagagcttccccccacctgtggccgacttcatcaagcaggagtgcctgaacaacattggagatgccagcagcctcatccgggccaccatcggcatcctgatcaccaccatcgccagcaagggggagctgcagatgtggccagagctgctgccccagctgtgcaacctgctgaacagcgaggactacaacacctgtgagggcgcctttggagccctgcagaagatctgtgaggacagcagcgagctgctggacagtgatgccctgaaccggcccctgaacatcatgatccccaagttcctgcagttcttcaagcactgcagccccaagatccgcagccacgccatcgcctgtgtgaaccagttcatcatggaccgggcccaggccctgatggacaacatcgacaccttcatcgagcacctgtttgccctggccgtggatgatgatcctgaggtgaggaagaatgtgtgccgggccctggtgatgctgctggaggtgagaattgacaggctcatcccccacatgcacagcatcatccagtacatgctgcagaggacccaggaccatgatgaaaatgtggccctggaggcctgtgagttctggctgaccctggccgagcagcccatctgcaaggaggtgctggccagccacctggtgcagctgatccccatcctggtgaatggcatgaagtacagcgagattgacatcatcctgctgaagggagatgtggaggaggatgaagctgtgcctgattctgagcaggacatcaagccccgcttccacaagagcaggacagtgaccctgccccatgaagctgagaggccagatggctctgaagatgctgaagatgatgatgatgatgatgccctgagtgactggaacctgaggaagtgcagcgctgctgccctggatgtgctggccaacgtgttccgggaggagctgctgccccacctgctgcccctgctgaagggcctgctcttccaccctgagtgggtggtgaaggagagcggcatcctggtgctgggcgccatcgccgagggctgcatgcagggcatggtgccctacctgcctgagctgatcccccacctgatccagtgcctgagtgacaagaaggccctggtgcgcagcatcgcctgctggaccctgagccgctatgcccactgggtggtgtcccagcccccagacatgcacctgaagcccctgatgacagagctgctgaagaggatcctggatggcaacaagagggtgcaggaggccgcctgcagcgcctttgccaccctggaggaggaggcctgcacagagctggtgccctacctgagctacatcctggacaccctggtgtttgccttcggcaagtaccagcacaagaacctgctgatcctgtatgatgccatcggcaccctggccgacagcgtgggccaccacctgaaccagcctgagtacatccagaagctgatgccacccctcatccagaagtggaatgagctgaaggatgaggacaaggacctcttccccctgctggagtgcctgagctctgtggccacagccctgcagagcggcttcctgccctactgtgagcctgtgtaccagagatgtgtgaccctggtgcagaagaccctggcccaggccatgatgtacacccagcaccctgagcagtatgaggccccagacaaggacttcatgattgtggccctggacctgctgagcggcctggccgagggcctgggcggccacgtggagcagctggtggcccggagcaacatcatgaccctgctcttccagtgcatgcaggacagcatgcctgaggtgcggcagagcagctttgccctgctgggggacctgaccaaggcctgcttcatccacgtgaagccctgcatcgccgagttcatgcccatcctgggcaccaacctgaaccctgagttcatctctgtgtgcaacaatgccacctgggccatcggggagatctgcatgcagatgggcgctgagatgcagccctacgtgcagatggtgctgaacaacctggtggagatcatcaaccggcccaacacccccaagaccctgctggagaacacagccatcaccatcggccgcctgggctacgtgtgcccccaggaggtggcccccatgctgcagcagttcatccggccctggtgcaccagcctgaggaacatccgggacaatgaggagaaggacagcgccttccggggcatctgcatgatgattggagtgaaccctgggggcgtggtgcaggacttcatcttcttctgtgatgctgtggcctcctgggtgagccccaaggatgacctgcgggacatgttctacaagatcctgcacggcttcaaggaccaggtgggggaggacaactggcagcagttcagcgagcagttcccccccctgctgaaggagcggctggccgccttctatggagtgtag

SEQ ID NO: 52141 - DNA, 2316 bp, Artificial Sequence
  derived and/or modified sequence
atggactggcagccagatgagcagggcctgcagcaggtgctgcagctgctgaaggacagccagagccccaacacagccacccagagaattgtgcaggacaagctgaagcagctgaaccagttcccagacttcaacaactacctgatctttgtgctgacccggctgaagtcagaagatgagcccaccaggagcctgagcggcctcatcctgaagaacaacgtgaaggcccactaccagagcttccccccacctgtggccgacttcatcaagcaggagtgcctgaacaacattggagatgccagcagcctcatccgggccaccatcggcatcctgatcaccaccatcgccagcaagggggagctgcagatgtggccagagctgctgccccagctgtgcaacctgctgaacagcgaggactacaacacctgtgagggcgcctttggagccctgcagaagatctgtgaggacagcagcgagctgctggacagtgatgccctgaaccggcccctgaacatcatgatccccaagttcctgcagttcttcaagcactgcagccccaagatccgcagccacgccatcgcctgtgtgaaccagttcatcatggaccgggcccaggccctgatggacaacatcgacaccttcatcgagcacctgtttgccctggccgtggatgatgatcctgaggtgaggaagaatgtgtgccgggccctggtgatgctgctggaggtgagaattgacaggctcatcccccacatgcacagcatcatccagtacatgctgcagaggacccaggaccatgatgaaaatgtggccctggaggcctgtgagttctggctgaccctggccgagcagcccatctgcaaggaggtgctggccagccacctggtgcagctgatccccatcctggtgaatggcatgaagtacagcgagattgacatcatcctgctgaagggagatgtggaggaggatgaagctgtgcctgattctgagcaggacatcaagccccgcttccacaagagcaggacagtgaccctgccccatgaagctgagaggccagatggctctgaagatgctgaagatgatgatgatgatgatgccctgagtgactggaacctgaggaagtgcagcgctgctgccctggatgtgctggccaacgtgttccgggaggagctgctgccccacctgctgcccctgctgaagggcctgctcttccaccctgagtgggtggtgaaggagagcggcatcctggtgctgggcgccatcgccgagggctgcatgcagggcatggtgccctacctgcctgagctgatcccccacctgatccagtgcctgagtgacaagaaggccctggtgcgcagcatcgcctgctggaccctgagccgctatgcccactgggtggtgtcccagcccccagacatgcacctgaagcccctgatgacagagctgctgaagaggatcctggatggcaacaagagggtgcaggaggccgcctgcagcgcctttgccaccctggaggaggaggcctgcacagagctggtgccctacctgagctacatcctggacaccctggtgtttgccttcggcaagtaccagcacaagaacctgctgatcctgtatgatgccatcggcaccctggccgacagcgtgggccaccacctgaaccagcctgagtacatccagaagctgatgccacccctcatccagaagtggaatgagctgaaggatgaggacaaggacctcttccccctgctggagtgcctgagctctgtggccacagccctgcagagcggcttcctgccctactgtgagcctgtgtaccagagatgtgtgaccctggtgcagaagaccctggcccaggccatgatgtacacccagcaccctgagcagtatgaggccccagacaaggacttcatgattgtggccctggacctgctgagcggcctggccgagggcctgggcggccacgtggagcagctggtggcccggagcaacatcatgaccctgctcttccagtgcatgcaggacagcatgcctgaggtgcggcagagcagctttgccctgctgggggacctgaccaaggcctgcttcatccacgtgaagccctgcatcgccgagttcatgcccatcctgggcaccaacctgaaccctgagttcatctctgtgtgcaacaatgccacctgggccatcggggagatctgcatgcagatgggcgctgagatgcagccctacgtgcagatggtgctgaacaacctggtggagatcatcaaccggcccacccccagccagaagcagaacaagaccaagaagaacaagtag

SEQ ID NO: 52142 - DNA, 2664 bp, Artificial Sequence
  derived and/or modified sequence
atggactggcagcccgacgagcagggcctgcagcaggtgctgcagctcttaaaggattcccagtcacccaatactgccacgcaacgaatcgtccaggataaactgaagcaattaaaccagtttccggacttcaacaactacttaatatttgtcttaacccgattgaagagcgaggacgagcccaccaggagcctgtcagggttgatcctgaagaataacgttaaggcccattaccaaagttttccacccccggtggctgatttcattaaacaagaatgcctcaacaacatcggcgatgcatcatccctgattcgtgcgactatagggattctgattaccaccattgcatccaagggcgagctccaaatgtggcccgaactgctgccgcaactctgtaacctgctgaatagcgaagattataatacttgcgagggcgccttcggagcgttgcaaaaaatctgcgaagactcctcggagctccttgattccgatgctttgaatagaccactgaatatcatgatacccaaattcctgcagttttttaagcactgttcccctaagatcaggtcgcacgctatcgcctgtgtaaaccaattcataatggaccgagcacaggctctcatggataacatagacacctttatcgaacatctattcgccctcgctgttgatgacgacccagaggtgcgtaaaaatgtgtgccgtgctctggtaatgctccttgaagtaaggatagaccgactcatcccacacatgcactcaatcatccagtatatgcttcagaggacgcaagatcacgacgagaacgtggctctggaggcttgcgagttttggttaacacttgccgagcagccaatctgtaaagaggtgcttgcgagccacttagtacagctgattcctattctagtgaacggcatgaaatactcagaaattgatataatactgctcaagggtgatgtcgaggaggatgaggcagtccccgattccgaacaggatatcaaaccccgtttccacaagtctcgaacagttaccctcccccacgaagcagaaaggcctgacggttcagaagatgccgaggacgatgacgatgatgatgcgctttccgattggaatctccgtaagtgcagtgcagctgctctcgatgttcttgctaatgtttttagggaagaacttctcccccatctgctgcccctgctgaaaggcctactctttcaccctgaatgggtggttaaggaatcaggaatcctagtgctcggagcaattgccgaaggctgtatgcagggaatggtgccttatctccccgaactgattccccatttaatccagtgtctatctgacaaaaaggctttggtccgaagcattgcttgttggaccctgtccagatacgcccactgggtcgtcagccagccgccagatatgcatctgaaaccacttatgactgagctcttaaaaaggatactcgacggaaacaagcgagtgcaggaggcagcctgctctgccttcgcaacccttgaggaggaggcttgcaccgagcttgtgccctacctttcgtacatactggatacgctggtcttcgctttcggaaagtatcagcacaaaaacctgctcatcctgtatgatgctatcggcacgctagcagattccgttgggcatcacttgaaccaaccggaatatatccagaagctgatgcctcccctaatccagaaatggaacgaattaaaagatgaggataaggatctattcccactccttgagtgtctgagctctgtcgcaactgcccttcagagtggcttcctgccttactgtgaaccagtgtaccagcgttgcgtgaccctggtgcagaaaactcttgctcaagcaatgatgtacacccagcaccctgaacagtacgaagcaccggataaggattttatgattgtggccctggatcttctgagcggtctcgccgaaggactcggaggtcacgtagagcagctcgtagcacgctccaacataatgacactgctgttccagtgcatgcaggacagcatgccagaagttcgacagagctccttcgcgctacttggtgacttgactaaggcttgcttcattcatgtcaagccctgtatcgctgaatttatgccaatcttgggtacaaacctgaaccctgagtttatctccgtttgtaacaatgctacatgggccataggcgagatctgtatgcagatgggtgctgaaatgcagccgtatgtgcagatggtgctgaacaacttagtagagattatcaatcgacccaacactcctaaaaccctcttagagaacaccgcaattaccatcggccgactggggtatgtttgccctcaggaagttgcccctatgctgcagcagtttattaggccatggtgcacgtccctgaggaacatccgtgacaatgaggagaaggactcagcattccggggaatttgtatgatgatcggggtcaaccccggaggagttgtgcaggactttatctttttctgtgatgctgttgcttcttgggtgagccccaaggacgacctgagagacatgttttacaagatactacacggatttaaagaccaggtaggagaggacaattggcaacaatttagcgagcagttccctccattgttgaaggagaggttggccgcattctatggggtctag

SEQ ID NO: 52143 - DNA, 2100 bp, Artificial Sequence
  derived and/or modified sequence
atggactggcagcccgacgagcagggcctgcagcaggtgctgcagctgctgaaagactctcagagtcccaacaccgcaacccagaggatcgtacaggataaattaaaacagctaaaccagttccccgattttaacaattacctcatattcgttctcaccagattaaagtcggaagacgaaccaactcgctctctgagtggcctgatcctcaaaaataacgtcaaggcgcattaccagagcttccctccgccggtggcagactttatcaaacaggagtgtctgaataatattggcgatgcatccagcctgatacgcgccaccatcggtattctgatcactactatcgcctccaaaggcgagcttcagatgtggccagagttactgccacagctgtgtaatctgttgaactccgaggactataacacatgcgagggggcgttcggggctctccagaaaatctgtgaggactccagcgaactgctcgatagcgacgccctgaaccggcctctcaacatcatgatccccaaatttttgcaattcttcaaacattgttctcccaagatcaggtctcacgcaatcgcctgtgtcaatcaatttatcatggatagggcacaagccttgatggacaacatcgatacgttcatcgaacacctcttcgcactcgcggtagacgacgatcctgaggttcgcaaaaacgtgtgtcgggcgcttgttatgcttctggaagtacggatcgatcgactgattcctcacatgcactctatcattcagtacatgctgcaaaggactcaagaccacgatgaaaatgtcgcacttgaagcctgcgagttctggctcaccttagctgaacagcccatttgtaaggaggtgctcgccagccacctagtgcagttgattcccattttggtgaatggcatgaaatattctgagattgacattatccttcttaagggagacgtggaagaggatgaggctgtcccagattcagagcaagacatcaagccccgcttccataagtccagaactgtcacactgccgcatgaagcagaacggcctgacgggagcgaagacgcagaagatgacgatgatgacgatgcactgtccgattggaatctcagaaaatgttcagccgccgcacttgatgtgctcgcaaatgtgtttcgcgaggagctcctacctcacttactgcctctcctaaaaggactcctgttccatcccgaatgggtggtgaaagaatcaggaattctggtgctgggggcgattgccgagggttgtatgcagggcatggttccttatctgccggaactgataccacacctaattcagtgtttgtcggacaagaaagctttagtaagaagcatcgcatgctggaccttgtccagatacgcacactgggttgtgagtcagccccccgacatgcatctaaaaccgttgatgacagaacttctgaaaagaattctggatgggaacaagcgcgttcaggaggcggcctgtagcgctttcgccaccctggaggaggaggcgtgcacagagcttgtgccatatctgtcctacatcctggacaccctcgtgttcgcctttggaaaataccagcacaagaacctgcttatcttatacgatgccattggtacacttgcggacagcgtaggtcaccacctgaaccaacctgaatatatccaaaagctgatgcctcctctaattcagaagtggaatgaattgaaagacgaggacaaggatctttttcccctcttggaatgcctgagtagtgtcgctactgctcttcaaagcggattcctgccctattgtgagcccgtttatcagcgctgcgtaactctggtacagaagacactcgcccaggcaatgatgtacacacaacacccagaacaatacgaagctcccgataaagacttcatgattgtggctctggatctgctttccggactggcagaaggcctgggcggacatgttgagcagctcgtggcacacagcccctcatttccacctcacccactgccaccggcaggatcccgggtgtgcccattcgtgaccgtcctttgttgggggctggctcccaggtggagagagattccgctagtttag

SEQ ID NO: 52144 - DNA, 2664 bp, Artificial Sequence
  derived and/or modified sequence
atggactggcagcccgacgagcagggcctgcagcaggtgctgcagcttctgaaagattcccaaagcccgaatactgccacacaaagaattgtacaagacaagttaaaacaactgaatcagttccccgatttcaacaattaccttatttttgtgctgacaagattgaaaagcgaagatgaaccaacacgcagcctgagcggcctgatactgaagaacaacgtaaaggcacattaccaatcatttccaccacctgtcgcagattttattaagcaggagtgccttaataatattggtgatgcctcttccctcataagagcgactatcggaatcctgattacgactattgcctctaaaggagaactgcagatgtggcctgagctcctgccccagctctgtaatcttctgaacagtgaagactataacacttgcgaaggcgccttcggagctctgcagaagatctgtgaagattcctccgaactgctggattcagatgcgcttaatcggcctcttaatatcatgatcccaaagtttcttcaatttttcaagcattgcagccccaagatccgctcccacgcaatagcatgcgtaaaccagttcatcatggacagggcacaggccctgatggacaacatcgatacctttatagaacacctgttcgccttagccgttgacgacgatcccgaagtccgaaaaaacgtgtgtcgcgcactggtgatgctgctggaggttcgaatcgatcggcttatccctcacatgcatagcattattcagtacatgctgcaaagaacccaggatcacgatgagaatgttgcactagaagcctgtgagttctggctcactctggctgaacagccaatatgtaaagaggtgctcgcctcccacctggtgcaactgattccaatcctagtgaatggcatgaagtactcagaaatcgacatcattctgctgaagggcgatgtggaggaggatgaggctgttccagatagcgagcaggacatcaaaccaaggttccacaaatctagaactgtaacgctgccccatgaggctgagcgtcctgatggctccgaggatgcagaagacgacgacgatgacgatgccctgtccgactggaacctccgcaagtgcagtgctgctgcactggacgtcctggcaaatgtgttccgcgaggagctcctgcctcatttgctaccgctactgaaaggactgctgttccatcccgagtgggtggtaaaggagtctggtatcctggtcctgggcgctattgcagagggttgtatgcaggggatggtgccttaccttcccgaactcattccacacctgatccagtgcctgtcagataaaaaggcccttgtcaggtcaatagcctgttggactttgtctcggtacgcgcattgggtagtatcccagcctcctgacatgcatctgaagcctttaatgaccgagctgctgaagcggattttagacggaaataaacgggtgcaggaggccgcatgtagcgcgtttgctaccttggaggaggaagcttgcacagagctggtgccctacttgagttatattctggataccctcgtcttcgcattcgggaaatatcaacataagaacctcctcattctctacgatgcaattgggacactcgctgactcagtgggtcatcatctgaatcagcccgaatatatccaaaagttgatgccccccttgatccagaagtggaatgagctgaaggacgaggataaggatctgttcccattgctagaatgcctgtcatctgtagcgaccgcattacagagcggattcctgccctattgcgagcctgtttaccagcggtgcgttactcttgtgcaaaaaactctcgcccaggcaatgatgtatacccaacatccagagcagtatgaagcacctgacaaagatttcatgatcgtcgccctcgacctgctgtcgggcttagccgaggggctgggtggacacgtggagcaactggtagcccgctccaacatcatgactttgttgtttcagtgcatgcaggacagcatgccagaagtgcgccagagcagctttgccttgctcggcgacctcacaaaggcctgcttcattcacgtcaagccctgtatcgccgagtttatgcctatacttggaaccaatctgaatccggagttcatcagtgtctgcaacaatgctacatgggcaatcggagagatatgcatgcagatgggcgccgagatgcaaccttatgtacagatggtcctgaacaacctggtcgagattattaatcggccaaacacccctaaaactttactggagaatacagccatcacgattggtagactcgggtacgtttgccctcaggaagttgctcccatgctacagcagtttatacgcccttggtgtacgtctctgaggaacattagagataatgaggagaaggattccgccttccggggcatctgtatgatgattggggtgaatcctggaggggtggtccaggactttatcttcttttgtgatgcagttgcatcctgggtgtccccgaaggacgatctgagggatatgttctacaaaatcctgcacggcttcaaagaccaggtgggcgaagacaattggcagcagttcagcgagcagttcccccctctactgaaggagcgtctggcagctttttacggggtgtag

SEQ ID NO: 52145 - DNA, 3156 bp, Artificial Sequence
  derived and/or modified sequence
ggccagagcgtgggcggccggggcctgttccgggactgcgcctgcatcgaagaaacaaccggcgcgggggcactttctcggtctggggccgggccgctggatgtggaggctgctggacctagcccgtctcgttgtgaaggcggaggatccctgcgcgccaggagcaggggccagcgacatgggcctccctgggacgaaggatcatcactggggcctatgcgcattaggagggccccaccaccaccccccgtcgctcggtttcacatcccccctccagccctcccaagtccacgacttcggggaaggggatggcgcagttggaggggacctcgcacctgggctggcgttgacaggagacccccaccagtgcgccgtggccgaagtagaaggcacgcagcgaccgctgctagcggagctccaccaggatcacataccgagcctcagaggccatctgctgacccaggaccgtacctgcgctcattaccgtgcgctatggactggcaacctgatgaacagggcctgcagcaggtactccaacttctcaaagatagccaatcgcccaataccgctacacagagaatcgtgcaggacaaattgaagcaactgaatcagtttcccgacttcaataactacctcatctttgtcctgacacggcttaaatccgaggacgaaccaacacgctctctgtctgggctgattctgaaaaacaatgttaaggcacattaccagagcttccctcctcccgtggccgattttatcaagcaggagtgtttgaacaacatcggggacgcaagcagtctcatacgcgcaacaattggcatactgataaccacaatcgctagcaagggagaattgcaaatgtggccggaactcctgccacagctgtgtaacttgctgaattctgaggactataatacctgtgaaggcgctttcggtgccttgcagaagatctgtgaggactccagcgagctacttgactcagacgcactcaacagacctctgaatatcatgattccaaaattcttacagttcttcaagcactgttctccaaagattcggtcacatgctatagcctgtgttaatcagttcatcatggacagggcccaggcactgatggataatattgatacattcatcgaacatctgttcgcactggctgtcgacgacgatcctgaagtcaggaaaaacgtgtgccgtgccctggtgatgctgctcgaggtgcggattgatagattgatccctcacatgcactcaataattcagtacatgctgcaaagaactcaggatcacgatgaaaacgtggctctggaggcatgcgaattctggttaacgcttgccgagcaaccaatctgcaaggaagtgcttgcaagtcacttggtccagctcattcccatcctcgtaaatgggatgaagtacagtgagatcgacatcattttgttgaagggagacgtggaagaagatgaagccgtccccgatagtgagcaggacattaaacctcgcttccacaaatccaggaccgtgacgctcccgcacgaagcagaacgacctgacgggagcgaggatgcagaagacgacgacgatgatgacgccctgtccgattggaatctacgcaagtgttctgcagcagccttagacgtgttagctaatgtatttagggaggaattgctacctcacctgttgccactgctcaagggtctgctgtttcatccagaatgggtcgttaaggagtcaggcatcctcgttctgggtgccattgcggaaggctgcatgcagggaatggtgccttatttgccggagctgattcctcatcttattcagtgcctctccgataagaaagccctggtcaggagcattgcatgttggaccctgtctaggtatgctcattgggtcgtttctcagccccccgatatgcacctcaagccactgatgactgagctactgaagcggatcttagacgggaacaaacgggtgcaggaggcagcttgttcggcatttgccaccctcgaggaagaggcctgcaccgagctagtgccttacctctcgtatatcctggataccttggtgttcgcatttgggaaatatcagcacaaaaatttgctgatattatacgacgccatcgggacactggcagattctgtgggccatcatctcaatcagccagaatacatccagaaactcatgcccccattgatccaaaaatggaatgagctgaaagatgaggacaaggatctgttcccactgctggagtgcctctccagtgtcgccacagctctgcaaagtggattcctgccatattgtgagcccgtttaccaaaggtgcgtgaccctagtccagaagactctggcccaagctatgatgtatactcaacaccccgaacagtacgaggcacccgataaggattttatgatcgttgcccttgacctactttcagggcttgcggagggccttgggggccatgtggagcaactggtggccagatctaatatcatgactcttttgttccaatgtatgcaagacagcatgcctgaagtaaggcagagttctttcgctttgctgggagatctgaccaaggcctgtttcatccacgtgaaaccttgtattgctgaatttatgccaatattgggcactaacctgaatcccgagtttataagtgtctgcaacaacgccacatgggctatcggagagatctgcatgcagatgggggccgagatgcagccttatgtccagatggtgctgaacaatctggttgagatcatcaatagacctaacactcctaagaccctattagaaaatacagccattacaattggaaggctcggttacgtgtgcccacaggaagtggcccccatgctacagcagtttatacgtccctggtgcactagtctgagaaacatccgtgacaacgaagaaaaagactctgcttttcgcggcatctgcatgatgattggcgtgaaccccgggggcgtggtccaggactttattttcttctgtgatgcagtcgcctcctgggtatctcccaaggatgacctgagggacatgttttacaagatcctgcacggattcaaggaccaggtgggggaagacaattggcagcagttttcagagcaattcccaccattgctaaaggagcgactggccgctttttacggcgtttag

SEQ ID NO: 52146 - DNA, 2316 bp, Artificial Sequence
  derived and/or modified sequence
atggactggcagcccgacgagcagggcctgcagcaggtgctgcagctgctcaaagacagccagagtcccaacactgccacccaaaggatagttcaggataaactgaaacagctgaatcagttcccagactttaacaactatctgatttttgtcctgactaggctgaagtctgaggacgaaccgacgcgctccctctccggtttgattttaaagaacaatgttaaggcccattatcaaagttttcccccaccagtggctgactttatcaagcaagagtgtctcaataatattggggatgcgagctcacttatacgtgcaaccatcggtatccttataacgaccattgcatctaaaggagagctccaaatgtggccagaattgcttccccagctttgtaacctcctgaactccgaggattacaacacttgcgagggagctttcggagctctgcagaagatctgtgaagactcttccgagctcctggactcagatgccctcaacagacctttgaacattatgattcctaaattcctgcagttttttaaacattgttctcctaaaatcaggagccatgccatcgcttgcgtgaaccagttcattatggacagggctcaggcactcatggataacatcgacaccttcattgagcatttatttgcactggctgtcgacgatgacccggaggtaagaaagaatgtgtgccgcgccctcgtgatgctactcgaggtgagaatcgaccggttgatcccacacatgcacagcataatccaatatatgcttcagagaacccaagaccacgatgaaaatgtggccctggaagcctgcgagttttggttgaccctagcggagcaacctatttgtaaagaggtgctcgctagccatttggtgcagctgatccccatcctcgtgaacggtatgaagtacagtgaaattgatattatcctgcttaaaggcgatgtggaagaggacgaagccgtgccagattccgaacaggacatcaagccccggttccataagagtaggacggttactctcccacacgaagccgagagaccagacgggagtgaggatgccgaagacgacgacgacgatgacgccctgagcgattggaatcttagaaaatgttccgccgccgcgctggacgtgcttgctaatgtgtttagagaggagctcctgccccatcttctccctctgctgaagggactcctctttcatcccgagtgggtggttaaggaatccggcatcctggttttgggggccatagctgagggatgtatgcagggtatggtgccctatctgccggaactgatcccccatctgattcagtgtttatctgataagaaggctcttgtccgtagcattgcctgctggaccctctctcgctatgctcattgggttgtttctcagccacccgacatgcacctgaagccactaatgactgagctactgaagagaatactggatggaaacaaacgcgtgcaggaggccgcatgctccgcttttgcgacactggaggaagaggcgtgcacagaactggttccatatctctcttacatcttggacactctagtgttcgctttcggcaaataccagcacaagaatttgcttatactctacgatgcgattggcaccctcgcagactccgttggacaccatcttaaccaacctgagtatattcaaaaactcatgcctcctcttatccaaaagtggaatgagctcaaagatgaagataaagacctgttcccactcctggagtgtctgtcgagcgtggccaccgctctgcagagcggttttctgccttactgcgagcctgtttatcagagatgtgtcactctcgtgcaaaagactctagctcaggccatgatgtacacccagcacccagaacagtacgaggcccctgataaggacttcatgattgtggcacttgacctcttgagcgggcttgccgaggggcttggaggccacgtagagcagttggttgctcgcagcaacattatgactctgctatttcagtgcatgcaggacagcatgcccgaggtgagacaaagtagtttcgccctcctcggagacctgactaaagcttgttttatccacgtgaagccatgtatcgccgagttcatgccgattctcggcacgaacctgaaccctgagtttatttctgtttgcaacaatgcaacctgggctatcggtgagatctgcatgcaaatgggtgccgagatgcaaccatatgtacagatggtcctgaataacctggttgagatcatcaaccgccccacaccaagtcaaaagcagaataagacaaagaagaataagtag

SEQ ID NO: 52147 - DNA, 2664 bp, Artificial Sequence
  derived and/or modified sequence
atggactggcagcccgacgagcagggcctgcagcaggtacttcagctgctaaaagattcacagtctcctaacacagccactcagaggattgtacaggataaactcaagcaacttaaccagttccccgatttcaacaactacttgatatttgtattgactcgattgaagtccgaagacgagccgactagatcactcagtgggctgatacttaagaataacgtgaaagcccactaccagagctttcctccccctgtggccgactttattaagcaagagtgcttgaacaatattggcgatgctagttctttgatcagggccaccatcgggattctgatcacgacaatagcatccaaaggagagttacagatgtggccagagctactgccccagctgtgcaatctgcttaactccgaggattataatacctgcgaaggagccttcggcgctctgcagaaaatttgcgaagactcgagtgagctccttgattcagatgccttgaaccgccctctgaatataatgatccccaagttcctgcagttctttaagcactgttctcctaaaatacgctcccacgcgattgcctgcgtgaatcagtttatcatggatagagcacaggcccttatggataatatcgatacgtttatcgagcatttgtttgctctggcagtggacgatgatccagaggttcgcaaaaatgtgtgccgtgccctggtgatgctgctggaagtcaggatagatagattgatcccacatatgcactcaatcattcagtacatgctgcagcggacacaggatcacgacgagaacgtcgccctggaagcctgcgagttctggctaacactcgcggagcaaccaatctgcaaagaagtgctggcttctcatctggtacagttgataccaattctggtaaatggaatgaagtactccgagattgatattatactgctcaagggagatgtcgaagaggatgaagccgttcctgattcagagcaagacattaaaccacgattccataagtcccgaactgtcaccctgccgcatgaagcagaacgacctgatggtagtgaggatgctgaagacgatgacgatgatgacgctttgtctgattggaacctgcggaaatgcagcgcggctgctctggatgtactcgccaacgtgttcagggaggaactgctcccacaccttctaccacttttaaaagggctgttatttcaccccgagtgggtggtgaaagagagtggcattctcgtgctaggagccattgctgaagggtgtatgcagggaatggttccttatcttcctgagctcattccacacctaattcaatgcctcagcgacaagaaagcactggtacggagtatcgcttgctggacattgtcccggtacgctcactgggtggtcagccagccaccagacatgcatttgaaacccctgatgacagaacttctgaagcgaatattggatggaaacaagagagtgcaagaggccgcatgctctgcctttgctacactggaggaggaagcttgcaccgaactggttccttatttatcttacatccttgacacactcgtgttcgcctttggaaagtaccagcataagaacctgctcattctctatgacgcaatcgggactctagccgactctgtggggcaccacctgaaccagcccgagtacattcaaaaactgatgccaccgctgattcaaaaatggaatgagctaaaggatgaagataaagacctgttcccactgctggagtgcttgtcatctgtggcaacagccctccagtctggattcctcccctactgcgaaccggtttatcaaagatgtgtgacacttgtgcaaaagacattggcccaagccatgatgtacacccagcatcctgagcagtatgaagctcctgacaaggatttcatgatcgtggccttggacttgttgtccggtctcgcagaggggcttggaggccatgttgagcaactcgttgccaggagcaacattatgactttgctgtttcagtgtatgcaagactctatgcccgaagtgcggcagtcttcttttgctctgctgggtgatctcacaaaggcttgcttcatccacgttaagccctgcattgccgagtttatgcccattctaggcactaacctcaaccccgaattcatttcagtgtgcaacaacgctacatgggccattggagagatctgtatgcaaatgggtgccgaaatgcagccttatgtccagatggtcctgaacaacctagtggaaattatcaataggccaaacactccaaaaaccctgctcgagaataccgcaataacaatcggcagactgggctatgtatgtcctcaagaagtagcgcctatgctgcagcaatttattcggccttggtgcacctcgctacggaacatccgagacaatgaggagaaagactctgcgtttcgcggaatctgcatgatgattggcgttaatcctggaggggtcgtgcaggatttcatctttttttgtgacgctgtggcctcatgggtgtcaccaaaggacgatttgcgtgatatgttttataagattctacacgggttcaaggatcaagtcggagaggacaactggcagcagttttccgagcagtttcctcctcttttgaaggaaaggctggccgctttctacggagtatag

SEQ ID NO: 52148 - DNA, 2100 bp, Artificial Sequence
  derived and/or modified sequence
atggattggcagccagacgagcagggccttcagcaagtgcttcagctgctgaaggattcgcagagcccaaataccgccacccagcgaatcgtgcaggacaagttgaaacagctgaaccagttcccagattttaacaactacctgatcttcgtcctgacgcgtctgaagagcgaggacgagcccacacgtagtctgtctggccttatattgaaaaacaacgtgaaagcacattaccagtcatttccaccccctgtggcagacttcatcaaacaggaatgcctaaataatatcggagacgctagcagtctgattcgagccacaatcggaatactgattacaacaattgcaagtaaaggagagctccagatgtggcctgaactactaccgcagctgtgtaaccttttaaacagtgaggactacaatacgtgtgaaggggcattcggagccttgcagaaaatatgtgaggattcatctgagttacttgatagcgatgctctgaacaggccccttaacattatgattccgaaattcctccagttttttaagcactgttcaccaaagatccgttcacatgctatcgcatgcgtaaaccagtttattatggatcgcgctcaggcactgatggataacattgacacctttattgagcacctgtttgcactggccgtggatgacgacccagaggtgaggaaaaatgtttgccgcgctttggtgatgcttctggaggtacgaatagatcggctgatccctcacatgcactcgataatccagtatatgcttcagagaacacaagaccacgatgaaaatgtggccttggaagcatgcgagttctggctaactctggccgagcaaccgatttgtaaggaggttttagcttcacatttggtgcaactcattccaattttggtgaatggtatgaaatatagtgagattgacatcattttgttgaagggcgacgtggaggaagacgaggcagtcccggactctgagcaagatataaagcccagatttcataaaagcaggaccgtgaccttaccacacgaggccgaaagacctgacggatccgaggacgctgaagatgacgacgatgatgatgctctgagcgactggaacctgagaaagtgcagtgccgctgccctggacgtcttggcgaatgtatttcgcgaggagctcttaccccaccttttgcccttgctgaaaggcttactttttcatcctgaatgggtggttaaagaatcaggaattctggtgctgggggctattgctgagggctgtatgcaggggatggtgccatacctgcccgaattgatcccacacctgatccagtgtctctctgacaagaaggccttggttaggtccattgcctgttggaccttgagccggtacgctcattgggttgtcagccagcctcctgacatgcatctgaagccattaatgaccgaactgctgaaaaggatacttgatggtaacaagagagtccaagaggctgcgtgttccgctttcgctaccctggaagaagaagcttgcacagagctggttccctatctctcatacatattggataccctcgtatttgcgttcggcaaatatcaacacaagaatttactcattttgtatgatgccataggaacgttggctgacagcgttggccaccatcttaatcagcctgagtacatccagaagctgatgccaccactcatccagaagtggaatgagctgaaagatgaggataaggatttgttccctctgctagaatgtctaagctctgtcgccacagccctccagagcggattcctcccctattgcgagcccgtatatcagaggtgcgtgacccttgttcagaaaacattggcacaggctatgatgtatacacaacaccccgaacaatacgaggctcccgataaagactttatgattgtagccctcgatttacttagcggcctggcggagggcctgggcggacatgtagagcagttggttgctcactccccaagctttcctccccaccctctgcctcccgcaggaagccgagtctgtcccttcgtgactgttctttgttgggggctggcccctagatggcgcgaaatccccctggtgtag

SEQ ID NO: 52149 - DNA, 2664 bp, Artificial Sequence
  derived and/or modified sequence
atggactggcagcctgatgaacaggggctccagcaggtactccagttgctcaaggactcacagtctcccaataccgccacccagcggatcgtgcaggataagttgaagcaattaaaccaattccccgacttcaataactacctgattttcgtgctaaccaggctgaagtctgaggacgaaccgacccgctcacttagtggcctgatcctgaaaaataatgtgaaggctcactatcaaagctttcctccacccgtggccgactttatcaaacaggagtgcctgaacaacattggcgacgcttcaagcctgattcgggctaccattggtatactgatcacaaccatagccagcaaaggggagctccaaatgtggccagaactgctcccacaactgtgtaatctgctgaattccgaggactataatacatgcgaaggcgctttcggagctcttcaaaagatatgcgaggattcaagcgagctactggactcagatgcattaaaccgacccctgaacatcatgatacccaaattcctgcagttttttaagcattgcagccctaaaatcaggagccacgctatcgcgtgtgtgaaccagtttattatggatcgcgcacaagcactcatggacaatatagacactttcattgagcatctgtttgcgttagcggtggacgatgatccagaagtgcgaaagaacgtgtgtcgcgctctggtcatgctgctggaagttaggattgatcggttaatcccccacatgcactcaatcattcagtatatgctgcagcgtactcaggaccatgatgagaatgtggcactcgaagcctgcgagttctggttgactctcgcagagcaaccaatttgtaaagaagtcttggcatcacacctggttcaacttatcccaatacttgtcaatgggatgaaatatagcgaaatcgacatcatcttactgaagggagacgtggaagaggacgaggccgttcctgatagcgagcaggatattaagccgaggtttcacaaatcaaggacagtaaccttacctcatgaggcggagcgcccagacgggtctgaggatgcagaagacgacgatgacgacgacgccctgtcagattggaatctcaggaagtgttcagccgctgctttggacgtgttagcaaatgtttttcgggaggagctgctcccccacctacttccacttctcaaaggcctgctgttccaccccgagtgggtggtgaaagaatcgggaatcctggtgctcggagccatcgccgagggctgcatgcaaggcatggttccttatctccccgagctgatccctcacctgattcagtgcctgagtgacaagaaagccttggtgagaagcatagcttgttggacgttgagccggtatgctcactgggtggtcagtcagccaccggatatgcatttgaagcccttaatgaccgaactgttaaagcggatcctggacggcaacaagcgagttcaggaggcggcttgctcagcatttgccaccctcgaggaggaggcgtgcactgagctggtaccgtatctcagttacattctcgatactctggttttcgccttcggtaagtaccagcataaaaatctgctgatcctttacgacgcaatcggaactttggccgactcagtcggtcaccacttgaaccaacccgagtacatacagaagctgatgccaccactcattcagaagtggaatgaactcaaagatgaggacaaagatctgttcccactgctggaatgtctgagctccgtcgctaccgcattacagtctggatttctcccctactgtgagcccgtgtaccagagatgtgtaacgctggtccagaagaccctagcccaagctatgatgtacacccagcacccagaacagtacgaggccccagataaagactttatgatagtagctcttgacctgctgtccggtctggccgagggcctgggcggacatgtggaacagcttgtggcacggtctaatattatgactctgctgtttcagtgcatgcaggattccatgccagaagtgcgtcagagctcattcgcactactgggcgatctgactaaggcatgcttcatacatgttaagccatgtatagccgagtttatgcccatccttggaacaaacctgaaccccgagtttatcagtgtttgtaataatgccacttgggcgattggcgagatatgcatgcagatgggtgccgagatgcagccttacgtccagatggtgctgaacaatctcgttgaaatcattaacaggcctaacacacctaaaaccctcttggagaacactgctatcaccataggccgattggggtacgtttgtcctcaggaagttgcccctatgttgcagcagttcatcaggccttggtgcacgtccctcagaaatatccgagacaatgaggagaaagacagtgcattcagagggatctgcatgatgatcggagttaatcctggaggggtggtacaggactttatctttttttgcgatgccgtagcctcatgggtgtcgcccaaagacgatttgagagacatgttctacaagatcctgcacggcttcaaagatcaggtcggggaagataattggcagcagttctccgaacagttcccacctctcttgaaggagcgcctcgccgcattttatggcgtgtag

SEQ ID NO: 52150 - DNA, 3156 bp, Artificial Sequence
  derived and/or modified sequence
ggccagagcgtggggggaagggggctttttagagactgcgcatgtatagaagagactacaggtgccggagctctgagcaggtcaggcgcaggcccattggatgtagaggccgcaggtcctagcccaagccggtgtgagggcggagggtctctgcgagcgaggagccggggtcagaggcacggacccccatgggacgaggggtcatctctcgggcctatgcgtatacgtcgagcaccgcctccacccccagtggcgagattccatatcccacctccggcactgccctctcctaggctgcgagggagggggtggaggtcatggcggggaccccgtacttgggccggtgtggaccggcgaccgccacccgtcaggagaggccgttctcgtcgccacgccgcaacagcagctagcggagccccacccggttcacataccgagccgcagcggccatctgcggacccaggcccataccttcgttcgttgccttgcgcaatggactggcagccggacgaacagggcctgcagcaggtgctccagctgcttaaagatagtcaatcacctaatacagccacccagaggatcgtgcaggacaaactgaagcagctcaaccagttcccagattttaataactacctgatttttgtgcttacaagattgaagtccgaggatgaacctacgaggtctctgagtggactgatcctgaagaataatgtcaaggcccactaccagtcattcccaccaccagtcgctgatttcattaagcaggagtgcctcaataatattggagacgcctcttctcttatccgggctactataggaattttgatcacaacaattgcctccaaaggtgaattgcagatgtggcctgaattgttaccccaactgtgcaatctgctgaactctgaggattacaacacttgtgagggcgcttttggcgctctgcagaagatctgcgaggactccagtgaactcctggatagcgacgcactgaatcgaccattgaatataatgattcccaaatttctgcagtttttcaaacactgttctccaaagattcggagccacgcaattgcctgcgtcaatcaatttatcatggaccgggcacaggcactgatggacaatatcgatacttttatcgagcacttgttcgcgctcgcagttgacgatgaccctgaagtgagaaaaaacgtttgccgggcattggtaatgctgttggaggtgcgtatcgacagattaatacctcatatgcacagcattatacaatatatgctccaaagaacgcaagaccacgacgaaaatgtagccttggaagcgtgcgaattttggctgacactcgctgagcaaccaatctgcaaggaggtcttagccagtcacctggttcagctgattcccattttggtgaacggaatgaaatatagcgaaatagacataattttacttaagggcgatgtggaagaggacgaagcagttcccgattccgagcaggatatcaagcctagatttcacaaaagccgcactgttactctgccccatgaagccgagcgacccgacggcagcgaggacgctgaagacgacgacgatgacgacgcactcagcgactggaacctaagaaaatgtagcgctgcagcccttgatgtgcttgctaacgtgttcagagaggagcttcttccacatctgcttccactactgaaaggcttgctcttccacccagagtgggtggttaaggagagtggaattttggttctcggcgctattgctgagggctgcatgcagggcatggtcccctatctgccagagctgatcccgcacctcatccagtgtctctccgacaagaaggctctggtgaggtcaatcgcctgttggaccctcagccgttatgcacactgggtggttagtcagccaccagatatgcatcttaaacccctcatgaccgagctgttgaaaagaatcttggacgggaacaagcgagtgcaggaagcagcctgttctgctttcgctactctggaggaagaagcttgcactgaactggtcccatatctatcatacatcctggacaccctcgtttttgccttcggtaaatatcagcacaagaacctattgatcttatacgacgctatcggcaccctagcagactcagtcggccaccacctgaaccagcctgaatacatacaaaagcttatgccccctttgattcaaaagtggaatgagttgaaagatgaagacaaagatctctttccattacttgagtgtttgagctctgtggccactgcactgcagtcgggcttccttccttactgtgagccagtgtaccagcggtgtgttaccctggtgcagaagactctggcccaagccatgatgtacacacagcaccctgagcagtacgaggctccagacaaggattttatgatagtcgctttagatctgctcagcggactcgcagaaggtctaggaggccacgtcgaacagctggtggcgagaagtaatataatgaccctgttgttccaatgcatgcaggactcaatgccagaagtgaggcagtcaagcttcgctctgctgggcgatttgacaaaggcttgctttattcacgtgaaaccctgcatcgcggagttcatgccaattttgggcacaaacctaaacccggaatttatcagcgtctgtaacaacgctacatgggccattggcgagatatgcatgcaaatgggcgcagaaatgcaaccatacgtgcagatggtgttgaacaacctagtggaaatcatcaacaggcctaataccccgaagaccctgttagaaaatacagcaatcacaataggacgcctcggctacgtgtgtcctcaggaggtcgctccaatgttacagcagtttatccgaccttggtgcacgagtctccgtaacataagagataacgaagagaaagatagcgcatttcggggtatctgtatgatgatcggtgtgaatccagggggtgtggtacaagacttcatatttttttgtgatgccgtggcgtcttgggtgagcccgaaggatgatctgagagatatgttttataaaatcctccacggattcaaggaccaggtgggtgaggataactggcagcaattcagtgagcaattcccacctttgctgaaggaaaggctggctgcattttatggtgtttag

SEQ ID NO: 52151 - DNA, 2316 bp, Artificial Sequence
  derived and/or modified sequence
atggactggcagcctgacgaacagggtctgcaacaagtactgcagctcttaaaggacagccagtctcccaataccgccacacaaaggatcgtacaggacaagctcaagcaactaaaccagtttcctgacttcaacaactacctgattttcgttttgacccgcctaaaatccgaggatgagcccacccgcagtctgtcgggcttaatccttaagaacaacgttaaagcacattaccaaagttttcccccacctgttgctgacttcatcaagcaggaatgtctaaataatatcggggacgcctcgtcccttattcgggctacaatcggtattctgatcacaacaatcgcaagcaagggcgaactccagatgtggccggaacttcttcctcagctctgtaatcttctgaacagcgaggattataatacttgcgagggcgctttcggagccctgcagaaaatttgtgaagatagttctgaactgctggatagcgacgcactgaatagacccttgaatattatgatccctaagttcttgcagttttttaagcattgcagccccaaaattcgctcccacgccattgcttgcgttaatcagtttattatggaccgcgcacaggccctcatggacaacattgacacattcatcgagcatttgttcgcactcgccgtggatgatgatcccgaggtaagaaaaaacgtgtgccgtgcccttgtgatgctgctcgaggtgcgtattgaccgcttaatcccgcacatgcactctatcatccagtacatgctccagcgtacccaagatcacgatgagaacgttgcgctcgaagcttgcgaattctggctcactctggcagagcagcccatctgtaaagaagttctagcttctcatctggtccaacttatcccaatcctggtgaacgggatgaagtactctgagattgatatcatactcctcaaaggagacgtggaagaagacgaagcagtgccagattcagagcaggatattaaacccaggttccataagtctaggactgtgaccctgccccacgaggccgagaggcctgacggttctgaggatgcagaggacgatgacgacgacgatgccttatccgactggaacctcaggaaatgttccgccgctgcacttgatgtcctggcaaatgtattcagagaggagctccttccccacctattacctcttctgaagggattacttttccatccagagtgggtcgtaaaggaaagcgggatcttagtgctcggggctattgccgaagggtgtatgcagggaatggtgccatacttgccggagctgatacctcatttgatccagtgtttatccgacaagaaagctctggtgcgctcaatcgcctgttggacacttagccgttacgctcattgggttgtgtcccagccccctgatatgcatctgaagccactcatgacagagcttttaaagagaatcctggacggtaataaaagagtccaggaggcagcctgcagcgcttttgcgacccttgaagaagaggcctgtaccgagctggtcccttacctttcctacattctggacacactggttttcgcttttggtaagtaccaacataaaaacttgttgattctgtatgatgccatcggtacactagcggatagcgttggacaccacttgaaccaaccagagtacatacaaaaacttatgccgcctctcatccaaaaatggaacgaactgaaggacgaggataaagacctctttcctctgctggagtgccttagctctgtcgcgaccgccctgcagtctggcttcctcccttactgcgaaccagtgtaccaacggtgcgtgacactggtccaaaaaactctcgcccaggccatgatgtacacacagcatccagaacaatatgaggccccagataaagattttatgattgtagccctggacctcctgtcagggttagcggaaggactggggggtcacgtagagcaattggtcgcaaggtcaaacataatgactctgctctttcagtgtatgcaggattcgatgccagaggtgagacagtctagtttcgcgcttctgggcgatctaactaaggcctgtttcatccatgtcaagccttgtattgccgagttcatgccaatcctgggaacgaatttaaatccggagttcataagcgtgtgcaacaatgccacctgggccatcggggaaatctgtatgcagatgggagcagagatgcagccttacgtgcagatggtcctcaataacctggtagagattatcaacaggccaacacctagccagaagcagaacaagaccaagaaaaataaatag

SEQ ID NO: 52152 - DNA, 4905 bp, Artificial Sequence
  derived and/or modified sequence
gagcagagcttagggggtggggcctcggagccaggccatgtcggggctcctcaagaagagggccagtgggactgctggggtcgggctggaggggatctgattgggggaagcgtctggggactgcttggggcctgattgggggacgtcgcgaggatcggcttgccttgcgccatggactggcagccagacgagcagggcctgcagcaggtcctgcagctgctcaaagactcacagtcgcccaacacagccactcagcgcatcgtgcaggataaactcaaacaactcaatcagtttcctgacttcaacaactacctgattttcgtcctgaccagactcaagtcagaagatgagccaacgcgctctctcagtggcctcatcctcaagaacaacgtgaaggcacactatcagagcttcccaccccctgtggcagacttcatcaaacaggagtgtctcaacaacattggcgatgcctcctcgctcatccgagccaccattggcattctcatcaccaccatcgcttccaagggtgagctgcagatgtggcccgagctgctgccccagctctgcaacctgcttaactcggaggattacaacacttgtgagggagcctttggagccctgcagaagatctgtgaagactcatcagagcttctggacagtgacgccctcaacaggcccctcaacatcatgatccccaagttcctgcagttcttcaagcactgcagtcccaagatccggtcccacgccatcgcctgcgtgaaccagttcatcatggaccgggcccaggcgctgatggacaatattgacaccttcatcgagcacctatttgccctggctgtggatgatgaccccgaggtgcggaagaatgtgtgccgtgccctggtgatgcttctggaagtgcggattgacaggctcatcccccacatgcacagcatcatccagtacatgctgcagaggacccaggaccatgatgagaacgttgcccttgaggcctgtgagttctggctgacgctggccgagcagcccatctgcaaggaagtcctggcctcccatctggtccagttgatccccatcttggtgaatgggatgaagtactcggaaattgacatcatcctgctcaagggggatgtggaggaggatgaggctgtccccgacagtgagcaggacatcaagccacgcttccacaagtcacgcacggtcacactgccccacgaggctgagcggcctgatggctccgaggacgcggaggatgacgatgatgatgatgctctgtccgactggaatttgaggaagtgctcagcggctgcactggacgtcctcgccaatgtcttccgggaggaactgctgccccacctactcccactactcaaaggcctcctcttccaccccgagtgggtggtcaaggagtcgggcatcctggtgctgggcgccattgctgagggctgcatgcagggcatggtgccctacctgcctgagctgatcccgcacctgatccagtgcctgtcggataagaaggccttggtccgctccatcgcctgctggacgctgagccgctatgcccactgggtggtcagccagccacccgacatgcacctcaagcccctgatgacagagctgctcaaacgcatcctggatggcaacaagagggtacaggaggcggcctgcagtgcttttgccaccctggaggaagaggcctgcacggagctggtgccctacctcagctacatcctggacacccttgtctttgcctttgggaaataccagcacaagaacctgctcatcctctatgacgccattggcaccctggccgactctgtaggccaccacctcaaccagccggaatacatccagaagctgatgcccccactgatccagaagtggaatgagctcaaggacgaagacaaggacctcttccccctgctggagtgtctgtcatcggtggccaccgccctgcagagtggcttcctgccttactgtgagcccgtctaccagcgctgtgtcaccctggtgcagaagacactggctcaggccatgatgtacacccagcaccctgagcagtatgaggctcccgacaaggacttcatgatcgtagcactggatctgctcagcggcctggccgagggcctgggtggtcacgtggagcagctggtggcccgcagcaacatcatgacattgctgttccagtgcatgcaggactcgatgcctgaggtccggcagagctcctttgccctcctgggagacctcaccaaagcctgcttcatccatgtcaagccctgtatcgccgagttcatgcccattctgggcaccaacctgaacccagagttcatctccgtctgcaacaacgccacctgggccattggtgaaatctgcatgcagatgggggcagagatgcagccttatgtgcagatggtcctcaacaacctggtggaaatcattaaccgacccaacacacccaagacactgctggaaaacacagccatcaccatcggccgcttgggctacgtgtgcccccaggaggtggcacccatgctgcagcagttcatccggccttggtgcacgtccctcaggaacatcagggacaacgaggagaaggactcagccttccgcggcatctgcatgatgatcggtgtcaacccggggggcgttgtgcaggactttattttcttctgcgatgctgtagcctcctgggtgagcccgaaggatgaccttcgggacatgttttataagattctccacggcttcaaagaccaagttggggaagataactggcagcagttctctgagcaattcccgccgctgctcaaggagaggctggcggctttctatggggtctaggtgatcatggagactgccaggtttctgtctgcgtcgtcgtcggagggattactggggagtgcgctgcatccggaagtcgctgtgccctggttgaggggggttagggaggagtgagtgggactcaaatccagatgccttccccgtccgtccgtccgtccgtccatccgtccacttgccctcctggcaggtgggtggggccaccatgctcatcctacaaacggggaggtgggggggacttctggtgggcaagggcccctgggctctaatagggtcatctctggcagcccacttgggccagctacgtgggagggaggaattacacagctgaccgaatccggcttcggatgaggtgagggaggagcaggtcaggaggggggccctcgtagggacgcgtacactcacacggacacacatggccacacgcatgtgcgggtgccataaccggcgaggctgggccagccgctccaccatttccccgactgcatggagacagtagaattagtgaacccctgagttaacccgtaaggccttccgtgtaacctgcatctagagtttaagaagcttctgctgttttgccggaattggcggtgactggggagggctgggtgggtggggggcctcaggcgggatctcggggcggggggaggaggatggtgaccttgggagtcgccctgtcagcacgcacatgcttgggacccactccacacactccctgccagctttgttgcagcctcagctggtggtgtctccgtccttatcctagcctagctcgcagggtgagaaccactggagtggctggggctggccagaggtcaccgtttctccttcctgtgtgctccagtggcttttgaagacactgggttgggacctttttcctgaagagagctgggtgtagccagagctactggcacctaccccgagcatctctctctgtaagcagcttcaggggcagtccgtttctctgtgcttctgaaacccccttctcacgtttcaggccccagttttaactcaaggcctggggcaggggcgtttaattgatgatgacagaggacacaggtttttgccagcaaaaaggaaaaccaaggcttggtggaagggaaaggtggtgtgtcccctgttccctattccatctccctgggacttcctgctcatcatagtacccagtgagcccagagatcctactagactgggtcagcaattctagagaaccttccggaatagtctgggaacatggtcaaggtggaaggggctcccctagagagggtgggggtgtagttacttcccagttggccagaaaactgggccttgcagacccccttagcattttttccctttttttccttccctgctttctacttctttggggagccccttgtgttttggagtctgactggagtctcgcatcctggggcctgctccatccatccctcctgggcgccagaccctccatccaagccctgtgtctttccatagtcagggtcaggccctgcatctattccaaggggcactcagtacacattccataaattagctgggtgtccctgcacgcccaccccatgaaactcgagcaggtctctggaagccatttgttaaaaaaaaaaaaaaaagttttaaaaataccttttaattttctggtaattccagttctttgaagcatcctctgctgggtcttggggtgtgtggatggattggctgtctgatgggattggtaacccctcgctactcaagatggggggatacaaacaccttcagggaaggggagcctggttcttctcgttttcctttttttttttttttttaaaaaaaaactatttaattttttaatttatttttggttgttttttgcacaatgaagtttcagcttctcaaccttctcccctacccagggctgtggacccagactggccttgagccacagtccctctttccctcctcaccctcttccccctgcgggctcccgggtctgtccatttgttactgtgctgtgctggggattggcgccgaggtggcgtgagattccacttgtgtagaactttgttgagtaaagatcagtttcttgtgaactcctta

SEQ ID NO: 52153 - DNA, 2271 bp, Artificial Sequence
  derived and/or modified sequence
gagcagagcttagggggtggggcctcggagccaggccatgtcggggctcctcaagaagagggccagtgggactgctggggtcgggctggaggggatctgattgggggaagcgtctggggactgcttggggcctgattgggggacgtcgcgaggatcggcttgccttgcgccatggactggcagccagacgagcagggcctgcagcaggtcctgcagctgctcaaagactcacagtcgcccaacacagccactcagcgcatcgtgcaggataaactcaaacaactcaatcagtttcctgacttcaacaactacctgattttcgtcctgaccagactcaagtcagaagatgagccaacgcgctctctcagtggcctcatcctcaagaacaacgtgaaggcacactatcagagcttcccaccccctgtggcagacttcatcaaacaggagtgtctcaacaacattggcgatgcctcctcgctcatccgagccaccattggcattctcatcaccaccatcgcttccaagggtgagctgcagatgtggcccgagctgctgccccagctctgcaacctgcttaactcggaggattacaacacttgtgagggagcctttggagccctgcagaagatctgtgaagactcatcagagcttctggacagtgacgccctcaacaggcccctcaacatcatgatccccaagttcctgcagttcttcaagcactgcagtcccaagatccggtcccacgccatcgcctgcgtgaaccagttcatcatggaccgggcccaggcgctgatggacaatattgacaccttcatcgagcacctatttgccctggctgtggatgatgaccccgaggtgcggaagaatgtgtgccgtgccctggtgatgcttctggaagtgcggattgacaggctcatcccccacatgcacagcatcatccagtacatgctgcagaggacccaggaccatgatgagaacgttgcccttgaggcctgtgagttctggctgacgctggccgagcagcccatctgcaaggaagtcctggcctcccatctggtccagttgatccccatcttggtgaatgggatgaagtactcggaaattgacatcatcctgctcaagggggatgtggaggaggatgaggctgtccccgacagtgagcaggacatcaagccacgcttccacaagtcacgcacggtcacactgccccacgaggctgagcggcctgatggctccgaggacgcggaggatgacgatgatgatgatgctctgtccgactggaatttgaggaagtgctcagcggctgcactggacgtcctcgccaatgtcttccgggaggaactgctgccccacctactcccactactcaaaggcctcctcttccaccccgagtgggtggtcaaggagtcgggcatcctggtgctgggcgccattgctgagggctgcatgcagggcatggtgccctacctgcctgagctgatcccgcacctgatccagtgcctgtcggataagaaggccttggtccgctccatcgcctgctggacgctgagccgctatgcccactgggtggtcagccagccacccgacatgcacctcaagcccctgatgacagagctgctcaaacgcatcctggatggcaacaagagggtacaggaggcggcctgcagtgcttttgccaccctggaggaagaggcctgcacggagctggtgccctacctcagctacatcctggacacccttgtctttgcctttgggaaataccagcacaagaacctgctcatcctctatgacgccattggcaccctggccgactctgtaggccaccacctcaaccagccggaatacatccagaagctgatgcccccactgatccagaagtggaatgagctcaaggacgaagacaaggacctcttccccctgctggagtgtctgtcatcggtggccaccgccctgcagagtggcttcctgccttactgtgagcccgtctaccagcgctgtgtcaccctggtgcagaagacactggctcaggccatgatgtacacccagcaccctgagcagtatgaggctcccgacaaggacttcatgatcgtagcactggatctgctcagcggcctggccgagggcctgggtggtcacgtggagcagctggtggcccacagtccctctttccctcctcaccctcttccccctgcgggctcccgggtctgtccatttgttactgtgctgtgctggggattggcgccgaggtggcgtgagattccacttgtgtag

SEQ ID NO: 52154 - DNA, 5092 bp, Artificial Sequence
  derived and/or modified sequence
agagggaggcctttacgcatgccttggtggcggctttctgcacgtgtttctcagcccaggtttcagtccagcggaactggctacctcggaatcccaactgctcctttagggtgtcttccgcgattctccgagtggagttaggcgcctgccgacacttccctaaccttggaggcccgggacttgattttcatgaatgaacggagccgggactgactttgcctacggcaaagaaggaaaaacggtgccctactgtcttcagacgtcgcaaggatcaagaagatttctttcttcatgaccctgcccttgccagaatttcctgcgctgttccacctcattcaacttcagcttgccttgcgccatggactggcagccagacgagcagggcctgcagcaggtcctgcagctgctcaaagactcacagtcgcccaacacagccactcagcgcatcgtgcaggataaactcaaacaactcaatcagtttcctgacttcaacaactacctgattttcgtcctgaccagactcaagtcagaagatgagccaacgcgctctctcagtggcctcatcctcaagaacaacgtgaaggcacactatcagagcttcccaccccctgtggcagacttcatcaaacaggagtgtctcaacaacattggcgatgcctcctcgctcatccgagccaccattggcattctcatcaccaccatcgcttccaagggtgagctgcagatgtggcccgagctgctgccccagctctgcaacctgcttaactcggaggattacaacacttgtgagggagcctttggagccctgcagaagatctgtgaagactcatcagagcttctggacagtgacgccctcaacaggcccctcaacatcatgatccccaagttcctgcagttcttcaagcactgcagtcccaagatccggtcccacgccatcgcctgcgtgaaccagttcatcatggaccgggcccaggcgctgatggacaatattgacaccttcatcgagcacctatttgccctggctgtggatgatgaccccgaggtgcggaagaatgtgtgccgtgccctggtgatgcttctggaagtgcggattgacaggctcatcccccacatgcacagcatcatccagtacatgctgcagaggacccaggaccatgatgagaacgttgcccttgaggcctgtgagttctggctgacgctggccgagcagcccatctgcaaggaagtcctggcctcccatctggtccagttgatccccatcttggtgaatgggatgaagtactcggaaattgacatcatcctgctcaagggggatgtggaggaggatgaggctgtccccgacagtgagcaggacatcaagccacgcttccacaagtcacgcacggtcacactgccccacgaggctgagcggcctgatggctccgaggacgcggaggatgacgatgatgatgatgctctgtccgactggaatttgaggaagtgctcagcggctgcactggacgtcctcgccaatgtcttccgggaggaactgctgccccacctactcccactactcaaaggcctcctcttccaccccgagtgggtggtcaaggagtcgggcatcctggtgctgggcgccattgctgagggctgcatgcagggcatggtgccctacctgcctgagctgatcccgcacctgatccagtgcctgtcggataagaaggccttggtccgctccatcgcctgctggacgctgagccgctatgcccactgggtggtcagccagccacccgacatgcacctcaagcccctgatgacagagctgctcaaacgcatcctggatggcaacaagagggtacaggaggcggcctgcagtgcttttgccaccctggaggaagaggcctgcacggagctggtgccctacctcagctacatcctggacacccttgtctttgcctttgggaaataccagcacaagaacctgctcatcctctatgacgccattggcaccctggccgactctgtaggccaccacctcaaccagccggaatacatccagaagctgatgcccccactgatccagaagtggaatgagctcaaggacgaagacaaggacctcttccccctgctggagtgtctgtcatcggtggccaccgccctgcagagtggcttcctgccttactgtgagcccgtctaccagcgctgtgtcaccctggtgcagaagacactggctcaggccatgatgtacacccagcaccctgagcagtatgaggctcccgacaaggacttcatgatcgtagcactggatctgctcagcggcctggccgagggcctgggtggtcacgtggagcagctggtggcccgcagcaacatcatgacattgctgttccagtgcatgcaggactcgatgcctgaggtccggcagagctcctttgccctcctgggagacctcaccaaagcctgcttcatccatgtcaagccctgtatcgccgagttcatgcccattctgggcaccaacctgaacccagagttcatctccgtctgcaacaacgccacctgggccattggtgaaatctgcatgcagatgggggcagagatgcagccttatgtgcagatggtcctcaacaacctggtggaaatcattaaccgacccaacacacccaagacactgctggaaaacacagccatcaccatcggccgcttgggctacgtgtgcccccaggaggtggcacccatgctgcagcagttcatccggccttggtgcacgtccctcaggaacatcagggacaacgaggagaaggactcagccttccgcggcatctgcatgatgatcggtgtcaacccggggggcgttgtgcaggactttattttcttctgcgatgctgtagcctcctgggtgagcccgaaggatgaccttcgggacatgttttataagattctccacggcttcaaagaccaagttggggaagataactggcagcagttctctgagcaattcccgccgctgctcaaggagaggctggcggctttctatggggtctaggtgatcatggagactgccaggtttctgtctgcgtcgtcgtcggagggattactggggagtgcgctgcatccggaagtcgctgtgccctggttgaggggggttagggaggagtgagtgggactcaaatccagatgccttccccgtccgtccgtccgtccgtccatccgtccacttgccctcctggcaggtgggtggggccaccatgctcatcctacaaacggggaggtgggggggacttctggtgggcaagggcccctgggctctaatagggtcatctctggcagcccacttgggccagctacgtgggagggaggaattacacagctgaccgaatccggcttcggatgaggtgagggaggagcaggtcaggaggggggccctcgtagggacgcgtacactcacacggacacacatggccacacgcatgtgcgggtgccataaccggcgaggctgggccagccgctccaccatttccccgactgcatggagacagtagaattagtgaacccctgagttaacccgtaaggccttccgtgtaacctgcatctagagtttaagaagcttctgctgttttgccggaattggcggtgactggggagggctgggtgggtggggggcctcaggcgggatctcggggcggggggaggaggatggtgaccttgggagtcgccctgtcagcacgcacatgcttgggacccactccacacactccctgccagctttgttgcagcctcagctggtggtgtctccgtccttatcctagcctagctcgcagggtgagaaccactggagtggctggggctggccagaggtcaccgtttctccttcctgtgtgctccagtggcttttgaagacactgggttgggacctttttcctgaagagagctgggtgtagccagagctactggcacctaccccgagcatctctctctgtaagcagcttcaggggcagtccgtttctctgtgcttctgaaacccccttctcacgtttcaggccccagttttaactcaaggcctggggcaggggcgtttaattgatgatgacagaggacacaggtttttgccagcaaaaaggaaaaccaaggcttggtggaagggaaaggtggtgtgtcccctgttccctattccatctccctgggacttcctgctcatcatagtacccagtgagcccagagatcctactagactgggtcagcaattctagagaaccttccggaatagtctgggaacatggtcaaggtggaaggggctcccctagagagggtgggggtgtagttacttcccagttggccagaaaactgggccttgcagacccccttagcattttttccctttttttccttccctgctttctacttctttggggagccccttgtgttttggagtctgactggagtctcgcatcctggggcctgctccatccatccctcctgggcgccagaccctccatccaagccctgtgtctttccatagtcagggtcaggccctgcatctattccaaggggcactcagtacacattccataaattagctgggtgtccctgcacgcccaccccatgaaactcgagcaggtctctggaagccatttgttaaaaaaaaaaaaaaaagttttaaaaataccttttaattttctggtaattccagttctttgaagcatcctctgctgggtcttggggtgtgtggatggattggctgtctgatgggattggtaacccctcgctactcaagatggggggatacaaacaccttcagggaaggggagcctggttcttctcgttttcctttttttttttttttttaaaaaaaaactatttaattttttaatttatttttggttgttttttgcacaatgaagtttcagcttctcaaccttctcccctacccagggctgtggacccagactggccttgagccacagtccctctttccctcctcaccctcttccccctgcgggctcccgggtctgtccatttgttactgtgctgtgctggggattggcgccgaggtggcgtgagattccacttgtgtagaactttgttgagtaaagatcagtttcttgtgaactcctta

SEQ ID NO: 52155 - DNA, 5226 bp, Artificial Sequence
  derived and/or modified sequence
gggcagagtgtcgggggaaggggactcttcagggactgtgcctgcatagaagagaccacgggggccggggcgctatcacggtctggggcggggcccctggatgtggaggcggctgggccctcgcccagccgctgcgagggaggtggaagccttcgggctcggagccggggtcagcggcatgggccaccctgggacgagggctcttcgctgggtcccatgaggatccgccgggccccgccgccgccgcctgtggcccgtttccacatcccccctcccgcgctcccgagcccgcgactgcgcggccgaggatggcgcagctggcggggaccccgcacttgggcgggcgtggatcggaggcctccgcctgtccgccgagggcgttcccgtcgtcatgcggccaccgcggcctcaggggctccacctgggtctcacacggagccccagagacccagcgctgaccccggcccctacctccgcagcttgccttgcgccatggactggcagccagacgagcagggcctgcagcaggtcctgcagctgctcaaagactcacagtcgcccaacacagccactcagcgcatcgtgcaggataaactcaaacaactcaatcagtttcctgacttcaacaactacctgattttcgtcctgaccagactcaagtcagaagatgagccaacgcgctctctcagtggcctcatcctcaagaacaacgtgaaggcacactatcagagcttcccaccccctgtggcagacttcatcaaacaggagtgtctcaacaacattggcgatgcctcctcgctcatccgagccaccattggcattctcatcaccaccatcgcttccaagggtgagctgcagatgtggcccgagctgctgccccagctctgcaacctgcttaactcggaggattacaacacttgtgagggagcctttggagccctgcagaagatctgtgaagactcatcagagcttctggacagtgacgccctcaacaggcccctcaacatcatgatccccaagttcctgcagttcttcaagcactgcagtcccaagatccggtcccacgccatcgcctgcgtgaaccagttcatcatggaccgggcccaggcgctgatggacaatattgacaccttcatcgagcacctatttgccctggctgtggatgatgaccccgaggtgcggaagaatgtgtgccgtgccctggtgatgcttctggaagtgcggattgacaggctcatcccccacatgcacagcatcatccagtacatgctgcagaggacccaggaccatgatgagaacgttgcccttgaggcctgtgagttctggctgacgctggccgagcagcccatctgcaaggaagtcctggcctcccatctggtccagttgatccccatcttggtgaatgggatgaagtactcggaaattgacatcatcctgctcaagggggatgtggaggaggatgaggctgtccccgacagtgagcaggacatcaagccacgcttccacaagtcacgcacggtcacactgccccacgaggctgagcggcctgatggctccgaggacgcggaggatgacgatgatgatgatgctctgtccgactggaatttgaggaagtgctcagcggctgcactggacgtcctcgccaatgtcttccgggaggaactgctgccccacctactcccactactcaaaggcctcctcttccaccccgagtgggtggtcaaggagtcgggcatcctggtgctgggcgccattgctgagggctgcatgcagggcatggtgccctacctgcctgagctgatcccgcacctgatccagtgcctgtcggataagaaggccttggtccgctccatcgcctgctggacgctgagccgctatgcccactgggtggtcagccagccacccgacatgcacctcaagcccctgatgacagagctgctcaaacgcatcctggatggcaacaagagggtacaggaggcggcctgcagtgcttttgccaccctggaggaagaggcctgcacggagctggtgccctacctcagctacatcctggacacccttgtctttgcctttgggaaataccagcacaagaacctgctcatcctctatgacgccattggcaccctggccgactctgtaggccaccacctcaaccagccggaatacatccagaagctgatgcccccactgatccagaagtggaatgagctcaaggacgaagacaaggacctcttccccctgctggagtgtctgtcatcggtggccaccgccctgcagagtggcttcctgccttactgtgagcccgtctaccagcgctgtgtcaccctggtgcagaagacactggctcaggccatgatgtacacccagcaccctgagcagtatgaggctcccgacaaggacttcatgatcgtagcactggatctgctcagcggcctggccgagggcctgggtggtcacgtggagcagctggtggcccgcagcaacatcatgacattgctgttccagtgcatgcaggactcgatgcctgaggtccggcagagctcctttgccctcctgggagacctcaccaaagcctgcttcatccatgtcaagccctgtatcgccgagttcatgcccattctgggcaccaacctgaacccagagttcatctccgtctgcaacaacgccacctgggccattggtgaaatctgcatgcagatgggggcagagatgcagccttatgtgcagatggtcctcaacaacctggtggaaatcattaaccgacccaacacacccaagacactgctggaaaacacagccatcaccatcggccgcttgggctacgtgtgcccccaggaggtggcacccatgctgcagcagttcatccggccttggtgcacgtccctcaggaacatcagggacaacgaggagaaggactcagccttccgcggcatctgcatgatgatcggtgtcaacccggggggcgttgtgcaggactttattttcttctgcgatgctgtagcctcctgggtgagcccgaaggatgaccttcgggacatgttttataagattctccacggcttcaaagaccaagttggggaagataactggcagcagttctctgagcaattcccgccgctgctcaaggagaggctggcggctttctatggggtctaggtgatcatggagactgccaggtttctgtctgcgtcgtcgtcggagggattactggggagtgcgctgcatccggaagtcgctgtgccctggttgaggggggttagggaggagtgagtgggactcaaatccagatgccttccccgtccgtccgtccgtccgtccatccgtccacttgccctcctggcaggtgggtggggccaccatgctcatcctacaaacggggaggtgggggggacttctggtgggcaagggcccctgggctctaatagggtcatctctggcagcccacttgggccagctacgtgggagggaggaattacacagctgaccgaatccggcttcggatgaggtgagggaggagcaggtcaggaggggggccctcgtagggacgcgtacactcacacggacacacatggccacacgcatgtgcgggtgccataaccggcgaggctgggccagccgctccaccatttccccgactgcatggagacagtagaattagtgaacccctgagttaacccgtaaggccttccgtgtaacctgcatctagagtttaagaagcttctgctgttttgccggaattggcggtgactggggagggctgggtgggtggggggcctcaggcgggatctcggggcggggggaggaggatggtgaccttgggagtcgccctgtcagcacgcacatgcttgggacccactccacacactccctgccagctttgttgcagcctcagctggtggtgtctccgtccttatcctagcctagctcgcagggtgagaaccactggagtggctggggctggccagaggtcaccgtttctccttcctgtgtgctccagtggcttttgaagacactgggttgggacctttttcctgaagagagctgggtgtagccagagctactggcacctaccccgagcatctctctctgtaagcagcttcaggggcagtccgtttctctgtgcttctgaaacccccttctcacgtttcaggccccagttttaactcaaggcctggggcaggggcgtttaattgatgatgacagaggacacaggtttttgccagcaaaaaggaaaaccaaggcttggtggaagggaaaggtggtgtgtcccctgttccctattccatctccctgggacttcctgctcatcatagtacccagtgagcccagagatcctactagactgggtcagcaattctagagaaccttccggaatagtctgggaacatggtcaaggtggaaggggctcccctagagagggtgggggtgtagttacttcccagttggccagaaaactgggccttgcagacccccttagcattttttccctttttttccttccctgctttctacttctttggggagccccttgtgttttggagtctgactggagtctcgcatcctggggcctgctccatccatccctcctgggcgccagaccctccatccaagccctgtgtctttccatagtcagggtcaggccctgcatctattccaaggggcactcagtacacattccataaattagctgggtgtccctgcacgcccaccccatgaaactcgagcaggtctctggaagccatttgttaaaaaaaaaaaaaaaagttttaaaaataccttttaattttctggtaattccagttctttgaagcatcctctgctgggtcttggggtgtgtggatggattggctgtctgatgggattggtaacccctcgctactcaagatggggggatacaaacaccttcagggaaggggagcctggttcttctcgttttcctttttttttttttttttaaaaaaaaactatttaattttttaatttatttttggttgttttttgcacaatgaagtttcagcttctcaaccttctcccctacccagggctgtggacccagactggccttgagccacagtccctctttccctcctcaccctcttccccctgcgggctcccgggtctgtccatttgttactgtgctgtgctggggattggcgccgaggtggcgtgagattccacttgtgtagaactttgttgagtaaagatcagtttcttgtgaactcctta

SEQ ID NO: 52156 - DNA, 2671 bp, Artificial Sequence
  derived and/or modified sequence
agagggaggcctttacgcatgccttggtggcggctttctgcacgtgtttctcagcccaggtttcagtccagcggaactggctacctcggaatcccaactgctcctttagggtgtcttccgcgattctccgagtggagttaggcgcctgccgacacttccctaaccttggaggcccgggacttgattttcatgaatgaacggagccgggactgactttgcctacggcaaagaaggaaaaacggtgccctactgtcttcagacgtcgcaaggatcaagaagatttctttcttcatgaccctgcccttgccagaatttcctgcgctgttccacctcattcaacttcagcttgccttgcgccatggactggcagccagacgagcagggcctgcagcaggtcctgcagctgctcaaagactcacagtcgcccaacacagccactcagcgcatcgtgcaggataaactcaaacaactcaatcagtttcctgacttcaacaactacctgattttcgtcctgaccagactcaagtcagaagatgagccaacgcgctctctcagtggcctcatcctcaagaacaacgtgaaggcacactatcagagcttcccaccccctgtggcagacttcatcaaacaggagtgtctcaacaacattggcgatgcctcctcgctcatccgagccaccattggcattctcatcaccaccatcgcttccaagggtgagctgcagatgtggcccgagctgctgccccagctctgcaacctgcttaactcggaggattacaacacttgtgagggagcctttggagccctgcagaagatctgtgaagactcatcagagcttctggacagtgacgccctcaacaggcccctcaacatcatgatccccaagttcctgcagttcttcaagcactgcagtcccaagatccggtcccacgccatcgcctgcgtgaaccagttcatcatggaccgggcccaggcgctgatggacaatattgacaccttcatcgagcacctatttgccctggctgtggatgatgaccccgaggtgcggaagaatgtgtgccgtgccctggtgatgcttctggaagtgcggattgacaggctcatcccccacatgcacagcatcatccagtacatgctgcagaggacccaggaccatgatgagaacgttgcccttgaggcctgtgagttctggctgacgctggccgagcagcccatctgcaaggaagtcctggcctcccatctggtccagttgatccccatcttggtgaatgggatgaagtactcggaaattgacatcatcctgctcaagggggatgtggaggaggatgaggctgtccccgacagtgagcaggacatcaagccacgcttccacaagtcacgcacggtcacactgccccacgaggctgagcggcctgatggctccgaggacgcggaggatgacgatgatgatgatgctctgtccgactggaatttgaggaagtgctcagcggctgcactggacgtcctcgccaatgtcttccgggaggaactgctgccccacctactcccactactcaaaggcctcctcttccaccccgagtgggtggtcaaggagtcgggcatcctggtgctgggcgccattgctgagggctgcatgcagggcatggtgccctacctgcctgagctgatcccgcacctgatccagtgcctgtcggataagaaggccttggtccgctccatcgcctgctggacgctgagccgctatgcccactgggtggtcagccagccacccgacatgcacctcaagcccctgatgacagagctgctcaaacgcatcctggatggcaacaagagggtacaggaggcggcctgcagtgcttttgccaccctggaggaagaggcctgcacggagctggtgccctacctcagctacatcctggacacccttgtctttgcctttgggaaataccagcacaagaacctgctcatcctctatgacgccattggcaccctggccgactctgtaggccaccacctcaaccagccggaatacatccagaagctgatgcccccactgatccagaagtggaatgagctcaaggacgaagacaaggacctcttccccctgctggagtgtctgtcatcggtggccaccgccctgcagagtggcttcctgccttactgtgagcccgtctaccagcgctgtgtcaccctggtgcagaagacactggctcaggccatgatgtacacccagcaccctgagcagtatgaggctcccgacaaggacttcatgatcgtagcactggatctgctcagcggcctggccgagggcctgggtggtcacgtggagcagctggtggcccgcagcaacatcatgacattgctgttccagtgcatgcaggactcgatgcctgaggtccggcagagctcctttgccctcctgggagacctcaccaaagcctgcttcatccatgtcaagccctgtatcgccgagttcatgcccattctgggcaccaacctgaacccagagttcatctccgtctgcaacaacgccacctgggccattggtgaaatctgcatgcagatgggggcagagatgcagccttatgtgcagatggtcctcaacaacctggtggaaatcattaaccgacccactccatctcaaaaacaaaacaaaacaaaaaaaaacaaa

SEQ ID NO: 52157 - protein, 897 aa, Artificial Sequence
  derived and/or modified sequence
MDWQPDEQGLQQVLQLLKDSQSPNTATQRIVQDKLKQLNQFPDFNNYLIFVLTRLKSEDEPTRSLSGLILKNNVKAHYQSFPPPVADFIKQECLNNIGDASSLIRATIGILITTIASKGELQMWPELLPQLCNLLNSEDYNTCEGAFGALQKICEDSSELLDSDALNRPLNIMIPKFLQFFKHCSPKIRSHAIACVNQFIMDRAQALMDNIDTFIEHLFALAVDDDPEVRKNVCRALVMLLEVRIDRLIPHMHSIIQYMLQRTQDHDENVALEACEFWLTLAEQPICKEVLASHLVQLIPILVNGMKYSEIDIILLKGDVEEDEAVPDSEQDIKPRFHKSRTVTLPHEAERPDGSEDAEDDDDDDALSDWNLRKCSAAALDVLANVFREELLPHLLPLLKGLLFHPEWVVKESGILVLGAIAEGCMQGMVPYLPELIPHLIQCLSDKKALVRSIACWTLSRYAHWVVSQPPDMHLKPLMTELLKRILDGNKRVQEAACSAFATLEEEACTELVPYLSYILDTLVFAFGKYQHKNLLILYDAIGTLADSVGHHLNQPEYIQKLMPPLIQKWNELKDEDKDLFPLLECLSSVATALQSGFLPYCEPVYQRCVTLVQKTLAQAMMYTQHPEQYEAPDKDFMIVALDLLSGLAEGLGGHVEQLVARSNIMTLLFQCMQDSMPEVRQSSFALLGDLTKACFIHVKPCIAEFMPILGTNLNPEFISVCNNATWAIGEICMQMGAEMQPYVQMVLNNLVEIINRPNTPKTLLENTGRLTSPSAIPAITIGRLGYVCPQEVAPMLQQFIRPWCTSLRNIRDNEEKDSAFRGICMMIGVNPGGVVQDFIFFCDAVASWVSPKDDLRDMFYKILHGFKDQVGEDNWQQFSEQFPPLLKERLAAFYGV

SEQ ID NO: 52158 - protein, 771 aa, Artificial Sequence
  derived and/or modified sequence
MDWQPDEQGLQQVLQLLKDSQSPNTATQRIVQDKLKQLNQFPDFNNYLIFVLTRLKSEDEPTRSLSGLILKNNVKAHYQSFPPPVADFIKQECLNNIGDASSLIRATIGILITTIASKGELQMWPELLPQLCNLLNSEDYNTCEGAFGALQKICEDSSELLDSDALNRPLNIMIPKFLQFFKHCSPKIRSHAIACVNQFIMDRAQALMDNIDTFIEHLFALAVDDDPEVRKNVCRALVMLLEVRIDRLIPHMHSIIQYMLQRTQDHDENVALEACEFWLTLAEQPICKEVLASHLVQLIPILVNGMKYSEIDIILLKGDVEEDEAVPDSEQDIKPRFHKSRTVTLPHEAERPDGSEDAEDDDDDDALSDWNLRKCSAAALDVLANVFREELLPHLLPLLKGLLFHPEWVVKESGILVLGAIAEGCMQGMVPYLPELIPHLIQCLSDKKALVRSIACWTLSRYAHWVVSQPPDMHLKPLMTELLKRILDGNKRVQEAACSAFATLEEEACTELVPYLSYILDTLVFAFGKYQHKNLLILYDAIGTLADSVGHHLNQPEYIQKLMPPLIQKWNELKDEDKDLFPLLECLSSVATALQSGFLPYCEPVYQRCVTLVQKTLAQAMMYTQHPEQYEAPDKDFMIVALDLLSGLAEGLGGHVEQLVARSNIMTLLFQCMQDSMPEVRQSSFALLGDLTKACFIHVKPCIAEFMPILGTNLNPEFISVCNNATWAIGEICMQMGAEMQPYVQMVLNNLVEIINRPTPSQKQNKTKKNK

SEQ ID NO: 52159 - DNA, 2694 bp, Artificial Sequence
  derived and/or modified sequence
atggactggcagcccgacgagcagggcctgcagcaggtgctgcagctgctgaaggacagccagagccccaacaccgccacccagagaatcgtgcaggacaagctgaagcagctgaaccagttccccgacttcaacaactacctgatcttcgtgctgaccagactgaagagcgaggacgagcccaccagaagcctgagcggcctgatcctgaagaacaacgtgaaggcccactaccagagcttccccccccccgtggccgacttcatcaagcaggagtgcctgaacaacatcggcgacgccagcagcctgatcagagccaccatcggcatcctgatcaccaccatcgccagcaagggcgagctgcagatgtggcccgagctgctgccccagctgtgcaacctgctgaacagcgaggactacaacacctgcgagggcgccttcggcgccctgcagaagatctgcgaggacagcagcgagctgctggacagcgacgccctgaacagacccctgaacatcatgatccccaagttcctgcagttcttcaagcactgcagccccaagatcagaagccacgccatcgcctgcgtgaaccagttcatcatggacagagcccaggccctgatggacaacatcgacaccttcatcgagcacctgttcgccctggccgtggacgacgaccccgaggtgagaaagaacgtgtgcagagccctggtgatgctgctggaggtgagaatcgacagactgatcccccacatgcacagcatcatccagtacatgctgcagagaacccaggaccacgacgagaacgtggccctggaggcctgcgagttctggctgaccctggccgagcagcccatctgcaaggaggtgctggccagccacctggtgcagctgatccccatcctggtgaacggcatgaagtacagcgagatcgacatcatcctgctgaagggcgacgtggaggaggacgaggccgtgcccgacagcgagcaggacatcaagcccagattccacaagagcagaaccgtgaccctgccccacgaggccgagagacccgacggcagcgaggacgccgaggacgacgacgacgacgacgccctgagcgactggaacctgagaaagtgcagcgccgccgccctggacgtgctggccaacgtgttcagagaggagctgctgccccacctgctgcccctgctgaagggcctgctgttccaccccgagtgggtggtgaaggagagcggcatcctggtgctgggcgccatcgccgagggctgcatgcagggcatggtgccctacctgcccgagctgatcccccacctgatccagtgcctgagcgacaagaaggccctggtgagaagcatcgcctgctggaccctgagcagatacgcccactgggtggtgagccagccccccgacatgcacctgaagcccctgatgaccgagctgctgaagagaatcctggacggcaacaagagagtgcaggaggccgcctgcagcgccttcgccaccctggaggaggaggcctgcaccgagctggtgccctacctgagctacatcctggacaccctggtgttcgccttcggcaagtaccagcacaagaacctgctgatcctgtacgacgccatcggcaccctggccgacagcgtgggccaccacctgaaccagcccgagtacatccagaagctgatgccccccctgatccagaagtggaacgagctgaaggacgaggacaaggacctgttccccctgctggagtgcctgagcagcgtggccaccgccctgcagagcggcttcctgccctactgcgagcccgtgtaccagagatgcgtgaccctggtgcagaagaccctggcccaggccatgatgtacacccagcaccccgagcagtacgaggcccccgacaaggacttcatgatcgtggccctggacctgctgagcggcctggccgagggcctgggcggccacgtggagcagctggtggccagaagcaacatcatgaccctgctgttccagtgcatgcaggacagcatgcccgaggtgagacagagcagcttcgccctgctgggcgacctgaccaaggcctgcttcatccacgtgaagccctgcatcgccgagttcatgcccatcctgggcaccaacctgaaccccgagttcatcagcgtgtgcaacaacgccacctgggccatcggcgagatctgcatgcagatgggcgccgagatgcagccctacgtgcagatggtgctgaacaacctggtggagatcatcaacagacccaacacccccaagaccctgctggagaacaccggcagactgaccagccccagcgccatccccgccatcaccatcggcagactgggctacgtgtgcccccaggaggtggcccccatgctgcagcagttcatcagaccctggtgcaccagcctgagaaacatcagagacaacgaggagaaggacagcgccttcagaggcatctgcatgatgatcggcgtgaaccccggcggcgtggtgcaggacttcatcttcttctgcgacgccgtggccagctgggtgagccccaaggacgacctgagagacatgttctacaagatcctgcacggcttcaaggaccaggtgggcgaggacaactggcagcagttcagcgagcagttcccccccctgctgaaggagagactggccgccttctacggcgtgtag

SEQ ID NO: 52160 - DNA, 2694 bp, Artificial Sequence
  derived and/or modified sequence
atggactggcaaccggatgagcaaggcctccagcaagtgctgcaactgctgaaagactcccagtctcctaacacagccacacagaggatcgttcaggacaagcttaagcagctgaatcaatttcccgatttcaataattatctgattttcgtgcttacgaggctaaagtctgaagacgagccaacacgatccctcagcggactgatcttgaagaataatgtgaaggcacactaccagagtttcccaccccccgtggccgatttcatcaaacaagagtgcctcaataatatcggagacgccagctcactgatcagggcaacgattggcattctgattactacaatcgcgtccaaaggcgaattgcagatgtggcccgagctgctcccccaactctgtaatcttttgaacagcgaagactacaatacctgcgaaggcgccttcggcgccctgcagaaaatctgcgaagactcgagcgagctcttagacagtgacgctttgaatcggccgctgaatatcatgataccgaaattcctgcaattttttaagcactgcagtcccaagatcaggtcgcacgcaatagcttgcgtgaatcagttcataatggacagagcccaggcactgatggataacatcgacacttttatagagcacctcttcgcccttgctgttgacgatgaccccgaagtcaggaagaatgtgtgcagggcactggtgatgctgctagaggtgcgaattgatcgattgattccccatatgcactcaattatccaatacatgctccagcgaactcaggaccacgatgagaacgtagctctcgaagcatgtgagttctggctgaccttggccgaacaacctatttgtaaggaagtacttgcgagccacctggtgcagcttattcccatcctggttaatggaatgaaatacagcgagattgacataatcctgctgaagggcgatgtggaagaggacgaggctgtgccagattcagagcaggacatcaaaccccgattccataaaagcaggactgtaaccttaccgcacgaggccgagaggcctgacgggagtgaggacgctgaagacgacgacgacgatgacgccctgtccgattggaatctgaggaagtgctctgccgctgctctggacgttcttgcgaacgtgtttcgcgaggagctgttgccccacctcctgcccctcttaaaaggactgctgttccatccagagtgggtcgtgaaggaatcaggaatcttggtacttggcgccattgccgagggttgtatgcaagggatggttccttacctgcctgaacttattccacacctgatccagtgcctgagtgacaagaaagcgctggttcggagtatcgcctgttggactctttccaggtatgcacactgggtggtgagccagccacccgatatgcacttaaaacccctgatgactgagctgctgaaaagaatactggatggcaataagcgggtgcaggaagcagcctgttcagcatttgctaccttggaagaggaggcctgcaccgagttagtcccatacttatcatacatcctcgataccctggtttttgcgtttgggaaataccagcataaaaatttattgatcctctacgatgctatcggcaccctggccgactctgtcggacatcacttgaaccaaccggaatacatccagaaattgatgcccccactgatccagaagtggaacgaacttaaagacgaagataaagacctattcccgcttcttgagtgtttgagctcagtggccacggcactgcagagtgggtttctaccttactgtgagcctgtttaccagcgctgcgttacgttggtgcaaaaaacacttgctcaggccatgatgtacacccagcatcctgaacagtatgaggcacctgataaggacttcatgattgtggccttagatctgctctctggactggccgagggcctcggcggccatgttgagcagcttgtggcgaggtccaacatcatgacgctgctgttccagtgtatgcaggactccatgccagaggtccggcagtcctcctttgcacttctgggggaccttaccaaggcctgttttatccatgtgaaaccttgcatcgccgaatttatgcccattctcggtaccaacctcaaccctgagttcatctctgtctgtaacaatgccacgtgggctatcggtgagatctgtatgcagatgggcgccgagatgcagccctacgttcagatggtcctcaataatctcgtagagatcatcaacagacctaacacgccaaaaaccctattagaaaacacgggccgtctcacaagtccatctgccatccccgccatcacaattggacgactgggttacgtgtgccctcaggaggtcgcccctatgctacagcagttcattaggccttggtgtacttcgcttcgcaatattcgcgacaatgaggagaaagactctgctttcaggggtatatgcatgatgatcggcgtgaatccaggaggtgtggtgcaggatttcatcttcttctgcgacgctgtggccagttgggtgagccccaaagacgacctacgcgatatgttttataagatattgcacggattcaaggatcaggtcggcgaggacaactggcagcagttctcggaacagttccctcctctactgaaagaaagactggcagcgttctatggagtctag

SEQ ID NO: 52161 - DNA, 2694 bp, Artificial Sequence
  derived and/or modified sequence
atggattggcagccagacgaacagggactccagcaggtcttgcagctgctcaaggatagtcagagtccaaatactgctactcaacgcattgttcaggacaagctgaagcaacttaatcagtttccagacttcaataactatctgatcttcgtactcacccggctcaagtctgaggatgagcctacccggagtctgtctgggctcattcttaagaacaacgtgaaggcccattaccagtcctttcctccacccgtcgctgattttatcaagcaggagtgcctcaataatatcggagatgcttcttctctcattcgcgccaccatcggcatcctcatcacaacaatcgcaagcaagggggagctccagatgtggccagagctgttaccccagctgtgcaaccttctgaactcagaggattacaacacctgcgagggtgcctttggtgccttgcagaagatttgcgaggatagcagtgaattgttagactccgacgcgctaaaccggccactcaatattatgatcccaaagtttcttcagttcttcaaacactgttccccgaaaataaggagtcacgccatcgcatgcgtgaatcagtttataatggatcgggcccaagcacttatggacaacattgatacttttatcgaacacttattcgccttagccgtggatgatgacccagaagtgaggaagaacgtgtgtcgagctctcgtgatgttactcgaagtgagaatagaccgcctgattcctcatatgcattctattattcaatacatgttacaaaggacacaggaccatgatgaaaacgttgcgctggaagcttgtgagttctggctcaccctcgcagaacagccgatatgtaaggaggtgctggccagccacctcgtacagctgattccgattcttgtgaatggtatgaagtactctgagatcgacattatcctgctgaaaggagatgttgaagaggacgaagctgtgcctgactccgaacaagacataaaaccccgattccataaatcccgaaccgttacgcttccccacgaagccgagcggcctgatggttctgaagacgcagaagacgatgatgacgacgacgcgctgtccgattggaacctgcggaaatgttcagcagcagccttggacgtgctggccaacgtgtttagagaggagttgctgccacacctgttgccgttattgaaaggactgctgttccacccagagtgggttgtgaaagagagcggaattttggtcctcggtgctatcgccgaaggatgtatgcagggcatggtcccatacctgcctgagttaattccccacctaatccagtgcctctctgataaaaaagcactggtgcgtagcatcgcctgttggacactttcccgatacgcgcactgggtggtgagccagccacctgacatgcatctcaagcctttgatgaccgagctgctaaagcggatcctggatggcaataaaagagtgcaagaggccgcgtgcagtgcttttgcaactctcgaggaggaagcatgtacggagctcgtgccgtatttgagctacatccttgataccctagtgtttgccttcggtaagtatcagcataaaaaccttctgattctgtatgacgccattggcacactggctgactctgttggccatcatctcaatcaaccagaatatatccagaaactcatgcccccactgatccagaaatggaacgaactgaaggacgaagacaaagacctgttccccttgttggaatgcctctccagcgtagctaccgctttgcagtctggctttttgccctattgtgagcccgtgtatcagagatgcgtcacacttgtccagaagactttggcccaagcaatgatgtatacgcaacaccccgagcaatacgaggctccagataaggatttcatgatcgtagcacttgatctactcagtggcctggcagaggggctcggtggccatgtggagcagcttgtggctaggagcaacatcatgaccttactgttccagtgtatgcaagacagcatgcctgaagtgaggcagtcatccttcgcactgttaggagatctcaccaaggcatgtttcatccacgtcaagccatgcatagccgagttcatgcctatattaggaaccaacctcaatcctgagtttatatcagtctgcaacaatgccacctgggctattggagagatctgtatgcagatgggagcagaaatgcagccctacgtccaaatggtgcttaacaatttagtggagattattaacaggccaaatacaccaaagaccctcctggagaatactggtaggttgacctcaccgtcagccattcctgctatcacaattggccgtcttggatacgtgtgcccacaggaagttgcacctatgctgcagcagtttatcaggccttggtgcacctctctacgtaatattcgagacaatgaggagaaagattccgcattcagggggatctgcatgatgattggagtgaacccaggaggcgttgttcaagattttatctttttttgcgacgccgttgcaagctgggtgtcacctaaggacgatctgcgagatatgttctataagatcctccatggtttcaaggaccaggtgggcgaggacaattggcagcagtttagcgaacagttcccccctctgcttaaagagcggctcgctgctttctatggggtgtag

SEQ ID NO: 52162 - DNA, 2694 bp, Artificial Sequence
  derived and/or modified sequence
atggactggcagccagatgagcagggcctgcagcaggtgctgcagctgctgaaggacagccagagccccaacacagccacccagagaattgtgcaggacaagctgaagcagctgaaccagttcccagacttcaacaactacctgatctttgtgctgacccggctgaagtcagaagatgagcccaccaggagcctgagcggcctcatcctgaagaacaacgtgaaggcccactaccagagcttccccccacctgtggccgacttcatcaagcaggagtgcctgaacaacattggagatgccagcagcctcatccgggccaccatcggcatcctgatcaccaccatcgccagcaagggggagctgcagatgtggccagagctgctgccccagctgtgcaacctgctgaacagcgaggactacaacacctgtgagggcgcctttggagccctgcagaagatctgtgaggacagcagcgagctgctggacagtgatgccctgaaccggcccctgaacatcatgatccccaagttcctgcagttcttcaagcactgcagccccaagatccgcagccacgccatcgcctgtgtgaaccagttcatcatggaccgggcccaggccctgatggacaacatcgacaccttcatcgagcacctgtttgccctggccgtggatgatgatcctgaggtgaggaagaatgtgtgccgggccctggtgatgctgctggaggtgagaattgacaggctcatcccccacatgcacagcatcatccagtacatgctgcagaggacccaggaccatgatgaaaatgtggccctggaggcctgtgagttctggctgaccctggccgagcagcccatctgcaaggaggtgctggccagccacctggtgcagctgatccccatcctggtgaatggcatgaagtacagcgagattgacatcatcctgctgaagggagatgtggaggaggatgaagctgtgcctgattctgagcaggacatcaagccccgcttccacaagagcaggacagtgaccctgccccatgaagctgagaggccagatggctctgaagatgctgaagatgatgatgatgatgatgccctgagtgactggaacctgaggaagtgcagcgctgctgccctggatgtgctggccaacgtgttccgggaggagctgctgccccacctgctgcccctgctgaagggcctgctcttccaccctgagtgggtggtgaaggagagcggcatcctggtgctgggcgccatcgccgagggctgcatgcagggcatggtgccctacctgcctgagctgatcccccacctgatccagtgcctgagtgacaagaaggccctggtgcgcagcatcgcctgctggaccctgagccgctatgcccactgggtggtgtcccagcccccagacatgcacctgaagcccctgatgacagagctgctgaagaggatcctggatggcaacaagagggtgcaggaggccgcctgcagcgcctttgccaccctggaggaggaggcctgcacagagctggtgccctacctgagctacatcctggacaccctggtgtttgccttcggcaagtaccagcacaagaacctgctgatcctgtatgatgccatcggcaccctggccgacagcgtgggccaccacctgaaccagcctgagtacatccagaagctgatgccacccctcatccagaagtggaatgagctgaaggatgaggacaaggacctcttccccctgctggagtgcctgagctctgtggccacagccctgcagagcggcttcctgccctactgtgagcctgtgtaccagagatgtgtgaccctggtgcagaagaccctggcccaggccatgatgtacacccagcaccctgagcagtatgaggccccagacaaggacttcatgattgtggccctggacctgctgagcggcctggccgagggcctgggcggccacgtggagcagctggtggcccggagcaacatcatgaccctgctcttccagtgcatgcaggacagcatgcctgaggtgcggcagagcagctttgccctgctgggggacctgaccaaggcctgcttcatccacgtgaagccctgcatcgccgagttcatgcccatcctgggcaccaacctgaaccctgagttcatctctgtgtgcaacaatgccacctgggccatcggggagatctgcatgcagatgggcgctgagatgcagccctacgtgcagatggtgctgaacaacctggtggagatcatcaaccggcccaacacccccaagaccctgctggagaacacaggccgcctgaccagccccagcgccatcccagccatcaccatcggccgcctgggctacgtgtgcccccaggaggtggcccccatgctgcagcagttcatccggccctggtgcaccagcctgaggaacatccgggacaatgaggagaaggacagcgccttccggggcatctgcatgatgattggagtgaaccctgggggcgtggtgcaggacttcatcttcttctgtgatgctgtggcctcctgggtgagccccaaggatgacctgcgggacatgttctacaagatcctgcacggcttcaaggaccaggtgggggaggacaactggcagcagttcagcgagcagttcccccccctgctgaaggagcggctggccgccttctatggagtgtag

SEQ ID NO: 52163 - DNA, 2694 bp, Artificial Sequence
  derived and/or modified sequence
atggactggcagcccgacgagcagggcctgcagcaggtgctgcagttgttgaaagacagtcagagtccaaacaccgccacccagcggattgtgcaggacaaactgaagcagttgaatcaatttcccgactttaataattacttaattttcgtgttgactagactcaaatctgaggacgaacctaccaggagtctgagcgggctgatcttgaaaaacaacgtgaaagcccactaccagagttttcctcccccagttgcggacttcatcaagcaagaatgcctaaacaacattggcgacgcctcttccctcatccgcgctacaatcggcatcctgatcactacaatcgccagcaagggcgagctgcagatgtggccagagcttttgccccaactttgcaatcttctcaattcagaggattataatacatgtgaaggcgcctttggcgccctgcaaaaaatttgcgaagattcctctgagctcctcgatagcgatgcactgaatcggccgctgaatatcatgatcccaaagttcctgcaattctttaagcactgctcccccaaaattaggtcccacgcaatagcctgtgtgaatcagttcattatggatcgcgctcaggccctcatggataacattgatacattcattgagcacctcttcgctttagctgtggatgatgaccccgaagtcagaaaaaatgtgtgcagagctctggtaatgttgctggaggttcgcatcgatagactgattcctcacatgcacagtataatccagtacatgctgcagcgcactcaggatcatgacgagaatgtcgcactcgaggcctgcgagttttggctcaccctggctgagcagcctatttgcaaagaggtgctagcttctcatttagtccaactgattcctatcttggtaaacggcatgaagtactccgagatcgacattatccttctcaaaggcgacgttgaggaagacgaggccgtgcctgattccgagcaagatataaagccccgctttcacaaatctcgaaccgtgacactcccgcacgaagcagaacggccagacgggtcagaggacgccgaggacgatgatgatgatgacgcattgtccgactggaatctccgaaagtgttctgctgccgcgttagacgtgctggctaacgtgttccgcgaggagttacttccgcatcttctgcccttgctcaaaggtctgcttttccacccggagtgggtggtgaaggagtccggcatccttgtcctaggcgcaatcgccgaagggtgtatgcagggaatggtgccctacctgccagaactaattcctcacctcattcaatgcctcagcgacaagaaagccctcgttagatctatcgcctgttggacactatctaggtatgctcactgggtggtgtctcaacccccagacatgcacctgaaacccctgatgacagagctgctaaagcgcattctcgacgggaataagcgcgttcaggaggccgcttgctccgcgtttgccacactggaagaagaggcttgcacggaactggttccatacctgagctatatcctggacacactcgttttcgcgttcgggaagtatcagcacaagaatctcctgattttgtacgacgctattggcacattagccgattcagtgggtcatcatctcaaccagcccgaatatatccagaagctcatgccaccgctcatccagaagtggaatgagctcaaggatgaggacaaagacctcttccctctactcgaatgtttgagctccgtcgctaccgccctgcagagcggtttcctgccatattgtgaaccagtgtatcagcggtgtgtgactctggtgcagaagactctggcacaggctatgatgtatactcagcatcccgaacagtatgaagccccagataaggactttatgattgtggcactggaccttttaagcgggttggctgagggccttggaggacacgtcgagcagcttgtagcccgaagcaatattatgacactcctatttcaatgtatgcaggattcaatgcccgaagtgaggcagtcaagctttgcattgctcggcgacctgacaaaagcttgcttcattcatgtcaaaccatgtattgccgaatttatgcccatcctcggtaccaatttaaatcccgagttcatttcagtatgcaataatgctacctgggcaataggggaaatttgtatgcagatgggcgccgagatgcaaccctacgtgcagatggttctgaacaacttagtggaaataattaatcgccctaacacaccaaagaccctgcttgagaacacggggcgcttaacctctccatctgcgattcctgccataaccatcgggcgcttaggctacgtctgcccccaggaagtcgcaccaatgcttcaacagttcatccgcccatggtgcacgtcactgaggaacatccgcgataacgaggagaaggatagcgccttcagaggtatttgcatgatgatcggagtgaatcctggcggcgttgtccaagattttatctttttttgcgatgcggtcgccagctgggtgagtcccaaggacgacctccgggatatgttctacaaaattttacatggcttcaaggaccaggtaggagaagacaattggcagcagttcagcgaacaattcccaccacttctcaaagagcgcttggccgccttctatggcgtttag

SEQ ID NO: 52164 - DNA, 2694 bp, Artificial Sequence
  derived and/or modified sequence
atggactggcagcccgacgagcagggcctgcagcaggtgctgcagctgttgaaggacagccagtcgcctaatacggccacacaacgtatcgtgcaagacaagctcaagcagctcaatcagtttcccgactttaataactatctgatcttcgtccttaccagactgaaaagcgaagatgagccaacgagatcgctgtctggtctgattctcaagaacaatgtgaaagcccactatcaaagcttccctccccccgtggctgattttatcaagcaggagtgtctgaacaacattggggatgcatcttcactgattcgagctaccatcggaatcctcatcaccaccatcgccagtaaaggggagctccagatgtggcctgaactgctgccgcagctatgcaacctgcttaactcagaagattataacacctgcgagggcgcctttggcgcactgcagaaaatctgcgaggacagttccgagttgttggactcagatgcacttaaccgccccctgaacatcatgataccgaagttccttcagtttttcaagcattgctctcccaagattcgctctcacgcaattgcatgcgtgaaccaatttattatggatagggctcaagctttaatggataatatcgatactttcattgagcacctatttgccctggctgtggatgacgatcctgaagtaaggaagaatgtttgcagagcccttgtcatgctcctcgaggtgaggatcgatagactcatcccccacatgcatagcattatccagtatatgctccagcgaacacaggatcacgacgagaatgtggctttagaggcctgtgagttctggctgacacttgccgagcagcccatctgtaaagaggtactggcctcgcaccttgtgcagcttataccgattctggtgaacgggatgaaatatagtgagatcgacatcattttgctcaagggcgatgtggaggaagatgaggctgttcctgacagtgagcaggatataaagccacggtttcacaaatctcggaccgtgacactccctcacgaggctgagcggccagacggaagcgaggacgcagaagatgatgacgatgacgatgctctaagcgattggaatctccgcaagtgcagcgccgccgccctcgacgtactcgcaaatgtctttcgggaagagttgctgccccatctactgccacttctcaagggcttgctgttccacccagagtgggttgttaaagaatcaggaattttagtccttggggcgatcgcagaaggttgcatgcaaggaatggtgccttacttgcctgagctgatcccgcatttaatccagtgcctcagtgataagaaggcattggtccgcagcatcgcttgctggaccctgagtagatacgcccattgggttgtgtcccaacctccagacatgcacctgaagccactgatgactgaacttctgaagaggatcctagatggcaacaagcgcgtccaagaggcagcctgcagcgcctttgccactctggaggaagaggcatgcaccgagttggtgccctatctgagctatatcctggacacgctggtcttcgccttcggcaagtatcagcataaaaacctactcatcctgtacgacgccatcgggaccctggcagacagtgtcggccaccacctgaatcagcccgaatacattcaaaagctgatgccccccttgattcagaagtggaacgagctaaaggacgaggataaggatctgtttcctctgctcgagtgcctgtctagcgtggcaactgcactgcagtccgggtttttgccttattgtgagccagtgtatcagcgttgtgtaacactggtccagaaaacactggcgcaggccatgatgtacactcagcatcccgagcagtacgaagcaccagataaggacttcatgattgtcgctctcgacctgctcagtggattggctgaagggctgggaggacatgtggaacaactcgtcgccagatccaatataatgacgctgttgttccagtgtatgcaagacagtatgcccgaagtgaggcaaagtagcttcgccctgcttggggacctgacaaaggcctgttttatccatgtgaagccttgcatcgctgaattcatgcccatcctcggcaccaatctgaatcctgagtttatcagcgtatgtaacaacgcgacttgggctataggagagatctgtatgcagatgggggcggaaatgcaaccctatgttcaaatggtactgaataacctggtcgagatcatcaaccgcccaaacactccgaaaacacttctcgaaaacacaggaagactgacgtcaccaagcgctatccccgcgattactatcggtcggctcgggtacgtttgcccccaggaggttgcccccatgttgcagcagttcattaggccttggtgcaccagcctccgcaatattagggacaacgaggagaaagattctgccttccgggggatctgtatgatgatcggcgtgaatccaggcggcgtggtccaggactttatctttttttgcgacgccgtggcctcctgggtgagtccgaaggatgatctgcgcgatatgttctacaagatcctccacggcttcaaggatcaggtgggggaggataactggcaacaattctcagaacagttccccccactattaaaagagaggctcgcagccttttacggggtgtag

SEQ ID NO: 52165 - DNA, 2694 bp, Artificial Sequence
  derived and/or modified sequence
atggactggcaacctgacgaacagggcctccagcaagtgttgcagctgctcaaagatagccagtcccccaacactgccacacagagaattgtgcaggataagttgaagcagctgaaccagttccccgacttcaacaactacctcatctttgtactgacccggctgaagtctgaagacgagcccacgcgaagcctgagtggcttgatcctaaagaataacgtgaaggcccactaccagagtttccccccacccgtagccgattttattaagcaggagtgcctcaataatatcggagacgcctcttcattgatccgcgctacgatcggaatcctcataaccacaatagctagcaaaggggaactgcaaatgtggcctgagttgcttccacagctctgtaatctgttaaatagcgaagattataatacatgtgagggcgcttttggcgctttgcagaaaatttgtgaagactcaagcgagttgctcgattctgatgcactgaaccggcctctgaatataatgatccccaagtttctgcagttcttcaaacactgcagccctaaaattagatctcatgccatagcttgcgtgaaccagtttattatggacagagcgcaggccctgatggataacatagacacttttatcgaacacctgtttgcgttggctgtggatgatgatcctgaggttcggaagaatgtgtgtcgcgcactagtcatgctcctcgaggtcagaatcgacaggctaatcccccacatgcatagcataattcagtatatgctgcagcgcactcaggaccacgatgagaatgtcgctctggaggcttgtgaattctggctgactttagcagagcaacctatctgtaaagaagttctggcttcccacctagtccagttaattcccatcctcgtgaatggcatgaaatatagcgagatagatattattctgcttaaaggggacgtggaagaggatgaggccgtccccgactcagaacaggacatcaagcctcgcttccacaagtcacgcaccgtgacactcccccacgaggcagagagacctgatggttctgaggacgctgaagatgatgatgacgatgacgcactcagcgattggaacctgcgcaaatgttccgctgccgctctggatgtgctggcaaatgtttttagagaagagctgctgccccacctcttgcctcttctgaaggggctgctttttcatcccgagtgggtcgtaaaagagagcggcattctggtcttgggagctattgcagaagggtgtatgcagggtatggtgccctacctgcccgaactcattccgcatctgatccagtgtctgtcagataagaaagcgcttgtgaggagcattgcttgctggacactctcccgctacgcgcattgggtcgtgagccagcctcccgatatgcatttgaaacctttaatgacagagttgctgaagagaatattagacggaaataagcgcgtgcaggaggcagcctgctccgcctttgctactcttgaagaggaggcttgtaccgagcttgtcccttatctgagttacatcctggataccctggtgtttgcatttggaaagtaccagcacaaaaatcttctgatcctgtacgatgcaatcggaaccctggctgactccgtcggacaccacttaaaccagccagaatatattcagaaactgatgcctcctttgatccagaaatggaatgagctgaaggacgaggataaagatcttttccctctgcttgaatgcctcagctcggtcgcaaccgcacttcagtcaggttttctgccttactgcgagcccgtttatcaaagatgtgtgacattagtccagaagacactggctcaggcgatgatgtacactcagcaccccgagcagtacgaggctcctgacaaggacttcatgattgtcgcactggaccttctgtcggggctggctgagggcctagggggacacgtggagcagttggtggcgagatccaacattatgactttactgtttcagtgtatgcaggactctatgcctgaagtgcgtcagagctccttcgcactgttaggagaccttactaaagcatgcttcatccacgtgaaaccgtgcatcgcagagtttatgcccattttaggaactaatctaaacccagaattcatttccgtctgtaacaacgcgacatgggcgataggagaaatctgcatgcagatgggagcagaaatgcaaccatacgtccaaatggttctgaataatctcgtggaaatcattaacaggcccaacacacccaagactttgttagaaaataccgggagacttacgtcaccaagcgcgatccctgccatcacaattggacggctgggatacgtctgtccccaagaggtagccccaatgctccagcagtttattaggccttggtgcacctctctacgaaacattcgcgacaacgaggagaaggacagcgcatttaggggcatctgtatgatgatcggcgtgaatcccggtggtgttgtccaggatttcatattcttctgtgatgcagtcgcctcctgggtcagccccaaggatgatttaagggatatgttctacaaaattcttcacggcttcaaggatcaggtgggggaggacaattggcagcaattcagtgagcagttcccccctctgctaaaggaaagacttgcagctttttatggagtgtag

SEQ ID NO: 52166 - DNA, 2694 bp, Artificial Sequence
  derived and/or modified sequence
atggattggcagccggacgagcagggcctacaacaggtgctgcagttgctgaaagattcccagagcccgaatacagccacccagagaatagtgcaggataagctgaagcaacttaatcagttcccagatttcaataattatttgatattcgtcctgactcggctgaaaagcgaagacgagcctactaggtccctgtctggcttaatcctgaagaacaatgtcaaggctcactaccagtcgttccccccacccgtcgctgattttatcaagcaggagtgcctgaataatattggggatgcttcctctctcatacgcgctactatcgggattctcatcaccactatcgcctcgaaaggcgagctgcaaatgtggcccgagctactcccccaactgtgcaacctgctcaattccgaggactataatacctgcgagggtgcattcggcgctctccaaaagatctgtgaggactccagcgaactattagacagcgatgccttgaatcggcctttaaatataatgatccctaagttcctgcagttttttaaacactgcagtcctaagattcgatctcacgctattgcgtgcgtcaatcaattcattatggacagggcccaggcacttatggataacatcgacacttttatcgagcacctgttcgcattggccgttgacgatgatccagaggtcaggaaaaatgtgtgccgggcacttgtgatgctcctagaggtgagaattgaccggctgattccacatatgcactcaattatccagtacatgttgcagaggactcaagaccatgacgagaacgtggcgctcgaggcttgcgagttttggctgacgctggccgagcagcccatctgcaaagaggtcctcgcttctcacctggtgcagctgattccaatccttgtcaatggtatgaagtactcggaaatagatatcattttactgaaaggagacgttgaagaggacgaggctgtcccagatagcgaacaagacatcaaacccaggttccacaagtccaggacagttacactgccccatgaggccgaacggcctgacggttctgaggacgccgaggatgatgacgatgatgacgcattgagtgactggaatctgagaaaatgtagtgctgcagccctggacgttctggctaacgtcttcagagaggaactgctgccccacctgctgcctctattgaaaggcttactattccatcccgagtgggtggtcaaggagagcggcattctcgtactcggggctatcgcagaaggctgcatgcaagggatggtgccctacctacccgaacttattccacacctgatccagtgcctgagtgataagaaagcgttggtgagatcgatcgcatgctggaccctgagcaggtacgcccactgggttgtgtctcagcctcccgatatgcacctgaagccgctgatgacagaactgctgaagcgaattctggacggcaacaaacgtgtgcaggaggctgcctgttccgcctttgccacgctggaggaagaggcctgtactgaactcgtgccatacctcagttacatattggacacgcttgtttttgcctttgggaaataccagcataaaaatctcttgatcctgtacgacgccatcggcacattggcagatagcgtcggacaccatttaaatcagccggagtacatccagaaactaatgccacccctgatccaaaaatggaatgaactcaaggacgaggataaggacttgtttcccctgttggagtgtctgagcagtgttgccaccgcactccagagcggctttctgccctactgcgagcctgtttaccagagatgcgttacattggtgcagaagaccctcgcgcaggccatgatgtatactcagcatcctgagcagtatgaggctcctgacaaggattttatgatcgttgccctggacctgctgtcaggcctggctgaagggcttggagggcatgtggaacagctggtggcccgatcaaacattatgactcttctgttccagtgcatgcaggactcaatgcccgaggtgcgccagtcgtcctttgcacttctcggcgatctgactaaggcgtgttttattcacgtgaagccctgcatcgctgaattcatgccaatccttggaaccaacctgaatccagagtttatatcagtgtgcaacaatgcgacttgggctatcggagagatatgtatgcaaatgggagctgagatgcaaccatatgtgcagatggtcctgaataatttagtcgaaattataaatcgaccaaatactcctaagacactcctggaaaacacaggtagacttacctctccttcagctatcccagccatcactattgggaggttggggtatgtatgtccacaagaggtggctcccatgttgcagcagtttatcaggccatggtgtaccagcctgaggaatattagggataatgaggaaaaggactcagcctttcggggtatttgtatgatgatcggtgttaacccaggaggagtagtccaagatttcatctttttttgcgacgctgtggcctcgtgggtgtcaccgaaggacgacttacgcgatatgttttataagattttgcatggattcaaggatcaggtgggggaagataactggcagcagttcagcgagcagttccctccactgctgaaggagagactcgccgcattctatggagtgtag

SEQ ID NO: 52167 - DNA, 5122 bp, Artificial Sequence
  derived and/or modified sequence
agagggaggcctttacgcatgccttggtggcggctttctgcacgtgtttctcagcccaggtttcagtccagcggaactggctacctcggaatcccaactgctcctttagggtgtcttccgcgattctccgagtggagttaggcgcctgccgacacttccctaaccttggaggcccgggacttgattttcatgaatgaacggagccgggactgactttgcctacggcaaagaaggaaaaacggtgccctactgtcttcagacgtcgcaaggatcaagaagatttctttcttcatgaccctgcccttgccagaatttcctgcgctgttccacctcattcaacttcagcttgccttgcgccatggactggcagccagacgagcagggcctgcagcaggtcctgcagctgctcaaagactcacagtcgcccaacacagccactcagcgcatcgtgcaggataaactcaaacaactcaatcagtttcctgacttcaacaactacctgattttcgtcctgaccagactcaagtcagaagatgagccaacgcgctctctcagtggcctcatcctcaagaacaacgtgaaggcacactatcagagcttcccaccccctgtggcagacttcatcaaacaggagtgtctcaacaacattggcgatgcctcctcgctcatccgagccaccattggcattctcatcaccaccatcgcttccaagggtgagctgcagatgtggcccgagctgctgccccagctctgcaacctgcttaactcggaggattacaacacttgtgagggagcctttggagccctgcagaagatctgtgaagactcatcagagcttctggacagtgacgccctcaacaggcccctcaacatcatgatccccaagttcctgcagttcttcaagcactgcagtcccaagatccggtcccacgccatcgcctgcgtgaaccagttcatcatggaccgggcccaggcgctgatggacaatattgacaccttcatcgagcacctatttgccctggctgtggatgatgaccccgaggtgcggaagaatgtgtgccgtgccctggtgatgcttctggaagtgcggattgacaggctcatcccccacatgcacagcatcatccagtacatgctgcagaggacccaggaccatgatgagaacgttgcccttgaggcctgtgagttctggctgacgctggccgagcagcccatctgcaaggaagtcctggcctcccatctggtccagttgatccccatcttggtgaatgggatgaagtactcggaaattgacatcatcctgctcaagggggatgtggaggaggatgaggctgtccccgacagtgagcaggacatcaagccacgcttccacaagtcacgcacggtcacactgccccacgaggctgagcggcctgatggctccgaggacgcggaggatgacgatgatgatgatgctctgtccgactggaatttgaggaagtgctcagcggctgcactggacgtcctcgccaatgtcttccgggaggaactgctgccccacctactcccactactcaaaggcctcctcttccaccccgagtgggtggtcaaggagtcgggcatcctggtgctgggcgccattgctgagggctgcatgcagggcatggtgccctacctgcctgagctgatcccgcacctgatccagtgcctgtcggataagaaggccttggtccgctccatcgcctgctggacgctgagccgctatgcccactgggtggtcagccagccacccgacatgcacctcaagcccctgatgacagagctgctcaaacgcatcctggatggcaacaagagggtacaggaggcggcctgcagtgcttttgccaccctggaggaagaggcctgcacggagctggtgccctacctcagctacatcctggacacccttgtctttgcctttgggaaataccagcacaagaacctgctcatcctctatgacgccattggcaccctggccgactctgtaggccaccacctcaaccagccggaatacatccagaagctgatgcccccactgatccagaagtggaatgagctcaaggacgaagacaaggacctcttccccctgctggagtgtctgtcatcggtggccaccgccctgcagagtggcttcctgccttactgtgagcccgtctaccagcgctgtgtcaccctggtgcagaagacactggctcaggccatgatgtacacccagcaccctgagcagtatgaggctcccgacaaggacttcatgatcgtagcactggatctgctcagcggcctggccgagggcctgggtggtcacgtggagcagctggtggcccgcagcaacatcatgacattgctgttccagtgcatgcaggactcgatgcctgaggtccggcagagctcctttgccctcctgggagacctcaccaaagcctgcttcatccatgtcaagccctgtatcgccgagttcatgcccattctgggcaccaacctgaacccagagttcatctccgtctgcaacaacgccacctgggccattggtgaaatctgcatgcagatgggggcagagatgcagccttatgtgcagatggtcctcaacaacctggtggaaatcattaaccgacccaacacacccaagacactgctggaaaacacaggtcgcctgacgagtccctctgccattccagccatcaccatcggccgcttgggctacgtgtgcccccaggaggtggcacccatgctgcagcagttcatccggccttggtgcacgtccctcaggaacatcagggacaacgaggagaaggactcagccttccgcggcatctgcatgatgatcggtgtcaacccggggggcgttgtgcaggactttattttcttctgcgatgctgtagcctcctgggtgagcccgaaggatgaccttcgggacatgttttataagattctccacggcttcaaagaccaagttggggaagataactggcagcagttctctgagcaattcccgccgctgctcaaggagaggctggcggctttctatggggtctaggtgatcatggagactgccaggtttctgtctgcgtcgtcgtcggagggattactggggagtgcgctgcatccggaagtcgctgtgccctggttgaggggggttagggaggagtgagtgggactcaaatccagatgccttccccgtccgtccgtccgtccgtccatccgtccacttgccctcctggcaggtgggtggggccaccatgctcatcctacaaacggggaggtgggggggacttctggtgggcaagggcccctgggctctaatagggtcatctctggcagcccacttgggccagctacgtgggagggaggaattacacagctgaccgaatccggcttcggatgaggtgagggaggagcaggtcaggaggggggccctcgtagggacgcgtacactcacacggacacacatggccacacgcatgtgcgggtgccataaccggcgaggctgggccagccgctccaccatttccccgactgcatggagacagtagaattagtgaacccctgagttaacccgtaaggccttccgtgtaacctgcatctagagtttaagaagcttctgctgttttgccggaattggcggtgactggggagggctgggtgggtggggggcctcaggcgggatctcggggcggggggaggaggatggtgaccttgggagtcgccctgtcagcacgcacatgcttgggacccactccacacactccctgccagctttgttgcagcctcagctggtggtgtctccgtccttatcctagcctagctcgcagggtgagaaccactggagtggctggggctggccagaggtcaccgtttctccttcctgtgtgctccagtggcttttgaagacactgggttgggacctttttcctgaagagagctgggtgtagccagagctactggcacctaccccgagcatctctctctgtaagcagcttcaggggcagtccgtttctctgtgcttctgaaacccccttctcacgtttcaggccccagttttaactcaaggcctggggcaggggcgtttaattgatgatgacagaggacacaggtttttgccagcaaaaaggaaaaccaaggcttggtggaagggaaaggtggtgtgtcccctgttccctattccatctccctgggacttcctgctcatcatagtacccagtgagcccagagatcctactagactgggtcagcaattctagagaaccttccggaatagtctgggaacatggtcaaggtggaaggggctcccctagagagggtgggggtgtagttacttcccagttggccagaaaactgggccttgcagacccccttagcattttttccctttttttccttccctgctttctacttctttggggagccccttgtgttttggagtctgactggagtctcgcatcctggggcctgctccatccatccctcctgggcgccagaccctccatccaagccctgtgtctttccatagtcagggtcaggccctgcatctattccaaggggcactcagtacacattccataaattagctgggtgtccctgcacgcccaccccatgaaactcgagcaggtctctggaagccatttgttaaaaaaaaaaaaaaaagttttaaaaataccttttaattttctggtaattccagttctttgaagcatcctctgctgggtcttggggtgtgtggatggattggctgtctgatgggattggtaacccctcgctactcaagatggggggatacaaacaccttcagggaaggggagcctggttcttctcgttttcctttttttttttttttttaaaaaaaaactatttaattttttaatttatttttggttgttttttgcacaatgaagtttcagcttctcaaccttctcccctacccagggctgtggacccagactggccttgagccacagtccctctttccctcctcaccctcttccccctgcgggctcccgggtctgtccatttgttactgtgctgtgctggggattggcgccgaggtggcgtgagattccacttgtgtagaactttgttgagtaaagatcagtttcttgtgaactcctta

SEQ ID NO: 52168 - DNA, 4949 bp, Artificial Sequence
  derived and/or modified sequence
gagtacgggagccgcggcggctcacctacggccgcgtttttcttttttttttttctttctttcttttttttttttttttttttttttaattctctctctttggctccctccttccgcgcgagtctctggagaagccgcagcgcgagttgccgccgctgctgcccggggccggcttgccttgcgccatggactggcagccagacgagcagggcctgcagcaggtcctgcagctgctcaaagactcacagtcgcccaacacagccactcagcgcatcgtgcaggataaactcaaacaactcaatcagtttcctgacttcaacaactacctgattttcgtcctgaccagactcaagtcagaagatgagccaacgcgctctctcagtggcctcatcctcaagaacaacgtgaaggcacactatcagagcttcccaccccctgtggcagacttcatcaaacaggagtgtctcaacaacattggcgatgcctcctcgctcatccgagccaccattggcattctcatcaccaccatcgcttccaagggtgagctgcagatgtggcccgagctgctgccccagctctgcaacctgcttaactcggaggattacaacacttgtgagggagcctttggagccctgcagaagatctgtgaagactcatcagagcttctggacagtgacgccctcaacaggcccctcaacatcatgatccccaagttcctgcagttcttcaagcactgcagtcccaagatccggtcccacgccatcgcctgcgtgaaccagttcatcatggaccgggcccaggcgctgatggacaatattgacaccttcatcgagcacctatttgccctggctgtggatgatgaccccgaggtgcggaagaatgtgtgccgtgccctggtgatgcttctggaagtgcggattgacaggctcatcccccacatgcacagcatcatccagtacatgctgcagaggacccaggaccatgatgagaacgttgcccttgaggcctgtgagttctggctgacgctggccgagcagcccatctgcaaggaagtcctggcctcccatctggtccagttgatccccatcttggtgaatgggatgaagtactcggaaattgacatcatcctgctcaagggggatgtggaggaggatgaggctgtccccgacagtgagcaggacatcaagccacgcttccacaagtcacgcacggtcacactgccccacgaggctgagcggcctgatggctccgaggacgcggaggatgacgatgatgatgatgctctgtccgactggaatttgaggaagtgctcagcggctgcactggacgtcctcgccaatgtcttccgggaggaactgctgccccacctactcccactactcaaaggcctcctcttccaccccgagtgggtggtcaaggagtcgggcatcctggtgctgggcgccattgctgagggctgcatgcagggcatggtgccctacctgcctgagctgatcccgcacctgatccagtgcctgtcggataagaaggccttggtccgctccatcgcctgctggacgctgagccgctatgcccactgggtggtcagccagccacccgacatgcacctcaagcccctgatgacagagctgctcaaacgcatcctggatggcaacaagagggtacaggaggcggcctgcagtgcttttgccaccctggaggaagaggcctgcacggagctggtgccctacctcagctacatcctggacacccttgtctttgcctttgggaaataccagcacaagaacctgctcatcctctatgacgccattggcaccctggccgactctgtaggccaccacctcaaccagccggaatacatccagaagctgatgcccccactgatccagaagtggaatgagctcaaggacgaagacaaggacctcttccccctgctggagtgtctgtcatcggtggccaccgccctgcagagtggcttcctgccttactgtgagcccgtctaccagcgctgtgtcaccctggtgcagaagacactggctcaggccatgatgtacacccagcaccctgagcagtatgaggctcccgacaaggacttcatgatcgtagcactggatctgctcagcggcctggccgagggcctgggtggtcacgtggagcagctggtggcccgcagcaacatcatgacattgctgttccagtgcatgcaggactcgatgcctgaggtccggcagagctcctttgccctcctgggagacctcaccaaagcctgcttcatccatgtcaagccctgtatcgccgagttcatgcccattctgggcaccaacctgaacccagagttcatctccgtctgcaacaacgccacctgggccattggtgaaatctgcatgcagatgggggcagagatgcagccttatgtgcagatggtcctcaacaacctggtggaaatcattaaccgacccaacacacccaagacactgctggaaaacacaggtcgcctgacgagtccctctgccattccagccatcaccatcggccgcttgggctacgtgtgcccccaggaggtggcacccatgctgcagcagttcatccggccttggtgcacgtccctcaggaacatcagggacaacgaggagaaggactcagccttccgcggcatctgcatgatgatcggtgtcaacccggggggcgttgtgcaggactttattttcttctgcgatgctgtagcctcctgggtgagcccgaaggatgaccttcgggacatgttttataagattctccacggcttcaaagaccaagttggggaagataactggcagcagttctctgagcaattcccgccgctgctcaaggagaggctggcggctttctatggggtctaggtgatcatggagactgccaggtttctgtctgcgtcgtcgtcggagggattactggggagtgcgctgcatccggaagtcgctgtgccctggttgaggggggttagggaggagtgagtgggactcaaatccagatgccttccccgtccgtccgtccgtccgtccatccgtccacttgccctcctggcaggtgggtggggccaccatgctcatcctacaaacggggaggtgggggggacttctggtgggcaagggcccctgggctctaatagggtcatctctggcagcccacttgggccagctacgtgggagggaggaattacacagctgaccgaatccggcttcggatgaggtgagggaggagcaggtcaggaggggggccctcgtagggacgcgtacactcacacggacacacatggccacacgcatgtgcgggtgccataaccggcgaggctgggccagccgctccaccatttccccgactgcatggagacagtagaattagtgaacccctgagttaacccgtaaggccttccgtgtaacctgcatctagagtttaagaagcttctgctgttttgccggaattggcggtgactggggagggctgggtgggtggggggcctcaggcgggatctcggggcggggggaggaggatggtgaccttgggagtcgccctgtcagcacgcacatgcttgggacccactccacacactccctgccagctttgttgcagcctcagctggtggtgtctccgtccttatcctagcctagctcgcagggtgagaaccactggagtggctggggctggccagaggtcaccgtttctccttcctgtgtgctccagtggcttttgaagacactgggttgggacctttttcctgaagagagctgggtgtagccagagctactggcacctaccccgagcatctctctctgtaagcagcttcaggggcagtccgtttctctgtgcttctgaaacccccttctcacgtttcaggccccagttttaactcaaggcctggggcaggggcgtttaattgatgatgacagaggacacaggtttttgccagcaaaaaggaaaaccaaggcttggtggaagggaaaggtggtgtgtcccctgttccctattccatctccctgggacttcctgctcatcatagtacccagtgagcccagagatcctactagactgggtcagcaattctagagaaccttccggaatagtctgggaacatggtcaaggtggaaggggctcccctagagagggtgggggtgtagttacttcccagttggccagaaaactgggccttgcagacccccttagcattttttccctttttttccttccctgctttctacttctttggggagccccttgtgttttggagtctgactggagtctcgcatcctggggcctgctccatccatccctcctgggcgccagaccctccatccaagccctgtgtctttccatagtcagggtcaggccctgcatctattccaaggggcactcagtacacattccataaattagctgggtgtccctgcacgcccaccccatgaaactcgagcaggtctctggaagccatttgttaaaaaaaaaaaaaaaagttttaaaaataccttttaattttctggtaattccagttctttgaagcatcctctgctgggtcttggggtgtgtggatggattggctgtctgatgggattggtaacccctcgctactcaagatggggggatacaaacaccttcagggaaggggagcctggttcttctcgttttcctttttttttttttttttaaaaaaaaactatttaattttttaatttatttttggttgttttttgcacaatgaagtttcagcttctcaaccttctcccctacccagggctgtggacccagactggccttgagccacagtccctctttccctcctcaccctcttccccctgcgggctcccgggtctgtccatttgttactgtgctgtgctggggattggcgccgaggtggcgtgagattccacttgtgtagaactttgttgagtaaagatcagtttcttgtgaactcctta

SEQ ID NO: 52169 - protein, 404 aa, Artificial Sequence
  derived and/or modified sequence
MDQDYERRLLRQIVIQNENTMPRVTEMRRTLTPASSPVSSPSKHGDRFIPSRAGANWSVNFHRINENEKSPSQNRKAKDATSDNGKDGLAYSALLKNELLGAGIEKVQDPQTEDRRLQPSTPEKKGLFTVTRLCDLSVEGDSVTSVGWSERGNLVAVGTHKGFVQIWDAAAGKKLSMLEGHTARVGALAWNAEQLSSGSRDRMILQRDIRTPPLQSERRLQGHRQEVCGLKWSTDHQLLASGGNDNKLLVWNHSSLSPVQQYTEHLAAVKAIAWSPHQHGLLASGGGTADRCIRFWNTLTGQPLQCIDTGSQVCNLAWSKHANELVSTHGYSQNQILVWKYPSLTQVAKLTGHSYRVLYLAMSPDGEAIVTGAGDETLRFWNVFSKTRSTKESVSVLNLFTRIR

SEQ ID NO: 52170 - DNA, 1215 bp, Artificial Sequence
  derived and/or modified sequence
atggatcaggattacgaaagaaggctcctccgccagattgttatccagaatgaaaataccatgccacgcgtgacagagatgagaagaaccttaactcccgcaagttcacctgtctcctcgccatctaaacacggagaccgatttatcccatcaagagccggagcaaattggtctgtgaacttccatcgcataaatgagaacgaaaagagtcctagccagaatagaaaggctaaggacgctacttccgacaacggaaaggacggcctggcctatagtgccttgctgaagaatgagctcctcggggcgggcattgagaaggtgcaggatcctcagacagaagaccggcgacttcagccatcgacccctgagaaaaaaggactctttacagtaaccaggctgtgcgacctgtctgtggagggggattccgtgacgtccgtggggtggtccgaacggggaaacctcgtggctgtcggaacacataaggggttcgttcagatctgggacgccgcggcagggaaaaagctgtcaatgctggaagggcatacagcccgggtcggggcactcgcgtggaacgcggagcagctctctagcggaagtcgagaccggatgatactccagagagacatcagaactccacccctccaatcggaaaggagacttcagggacatcggcaagaagtgtgcggcttgaaatggagcaccgatcatcagctccttgcgagcggaggcaacgacaacaaactcctagtgtggaaccattcatccctgtctcccgtgcaacagtacacagagcatctggcagcagtcaaagccattgcctggagcccccaccaacatggactgttggcaagtggcggcggcactgccgatcgatgtattaggttctggaacactctaaccggtcaaccgttgcaatgcatagataccggaagccaggtgtgcaacctagcttggtccaagcacgccaatgagctggtgagcacacacggctatagtcagaaccagatattggtctggaagtacccatcgctcactcaagtcgccaaactcaccggacacagctaccgagtcctgtatctagccatgtctccagacggcgaagcgattgttaccggagccggcgacgagactctcaggttctggaatgtcttttcaaagacgcgttccactaaggagagcgtgtccgttctgaatctgttcactaggatcagatag

SEQ ID NO: 52171 - DNA, 1215 bp, Artificial Sequence
  derived and/or modified sequence
atggaccaggactatgaaagaaggctgctgcggcagatcgtcatccagaatgaaaacaccatgccccgggtgacagagatgaggaggaccctgaccccagccagcagccctgtgagcagccccagcaagcacggggaccgcttcatccccagcagagctggggccaactggagcgtgaacttccaccgcatcaatgaaaatgagaagagccccagccagaacaggaaggccaaggatgccaccagtgacaacgggaaggatggcctggcctacagcgccctgctgaagaatgagctgctgggcgccggcatcgagaaggtgcaggacccccagacagaagatagaaggctgcagcccagcaccccagagaagaagggcctcttcaccgtgacccggctgtgtgacctgtctgtggagggggacagcgtgacctctgtgggctggagcgagcggggcaacctggtggccgtgggcacccacaagggctttgtgcagatctgggatgctgctgctgggaagaagctgtccatgctggagggccacacagcccgggtgggcgccctggcctggaatgctgagcagctgagcagcggcagccgggacaggatgatcctgcagagggacatccgcaccccacccctgcagagcgagcggcggctgcagggccaccggcaggaggtgtgtggcctgaagtggagcacagaccaccagctgctggccagcggcggcaatgacaacaagctgctggtgtggaaccacagcagcctgagccctgtgcagcagtacacagagcacctggccgctgtgaaggccatcgcctggagcccccaccagcacggcctgctggccagcggcggcggcacagctgaccgctgcatccgcttctggaacaccctgaccggccagcccctgcagtgcatcgacaccggcagccaggtgtgcaacctggcctggagcaagcacgccaatgagctggtgtccacccacggctacagccagaaccagatcctggtgtggaagtaccccagcctgacccaggtggccaagctgaccggccacagctacagagtgctgtacctggccatgagcccagatggagaggccatcgtgactggagctggagatgagaccctgcgcttctggaatgtgttcagcaagaccaggagcaccaaggagagcgtgtctgtgctgaacctcttcacccgcatcagatag

SEQ ID NO: 52172 - DNA, 1215 bp, Artificial Sequence
  derived and/or modified sequence
atggaccaggactacgagcggcggctgctgcggcagatcgtgatccagaatgaaaacactatgcctagggttacagagatgagaaggacccttacccctgcaagcagtcccgtgagctcgcctagcaaacacggagataggttcatcccctcccgtgccggcgccaattggtctgtgaatttccaccgcataaacgagaacgagaaaagcccctcccagaatcgaaaagctaaggacgccacctccgacaatggaaaggatgggttggcttactcagctcttctcaagaacgaactcctgggcgccggcattgagaaagtgcaggacccacagacggaggaccgcaggctgcagccttcaactcctgagaagaaaggactgttcaccgttacacgactgtgcgatttgtctgtggagggtgatagcgtgactagcgtgggatggagtgaacgggggaatctggtagctgtagggacacacaaaggctttgtccagatttgggacgcggcggcggggaagaagttatctatgctcgaaggccatactgcccgcgtcggagctctggcctggaatgcagagcagcttagcagcggcagccgcgatcgaatgatcctacaaagggatattagaacacctccactccaatcagagaggaggctccagggacacaggcaggaagtgtgcgggctgaagtggagcactgaccaccagctgctcgcaagcggcggtaatgataataaactcctggtgtggaatcacagctccctgagccctgtccagcaatacactgagcacttggctgcagtgaaggcaatcgcatggtcaccacatcagcacggcctcctggcctctggcggaggcacagctgatagatgtatcagattctggaacacactcacggggcagcccctgcagtgtatcgacactggctcacaggtctgcaatctggcctggtctaagcatgctaatgagctcgtatcaacccacggctacagccagaatcaaatccttgtgtggaagtatccatctctgacccaagtagctaagcttactggtcactcctatagagtgctttacctagctatgtcccctgatggcgaagctattgtaactggcgcaggagatgagacactacggttctggaacgtgttcagcaagacccggagcacgaaggagtccgtttcagtactaaacttattcacacgcatccggtag

SEQ ID NO: 52173 - DNA, 1215 bp, Artificial Sequence
  derived and/or modified sequence
atggaccaggattacgaacgcagactgctgagacaaatcgtcattcagaatgaaaacaccatgccgagagtgaccgagatgagaagaacactgactcctgcttcttctccagtgagttccccaagtaagcacggtgaccgattcatccccagcagagcaggtgctaactggtccgtgaacttccaccgaattaacgaaaacgagaagagtcctagtcagaacagaaaggctaaggatgcaacctctgacaatggcaaagatggcctggcatatagtgctctgctgaagaatgaattactaggggctgggattgaaaaggtccaggatccgcagacggaggatcgcagattgcagccttccacccccgaaaagaagggcctttttacggttacccgtttatgcgacctttccgtcgaaggagactctgttacatcggttggctggagcgaacgaggcaatctggtagccgttggaacccacaaggggttcgtccagatctgggatgccgctgcaggcaaaaaattgagcatgctcgaaggtcacacagcacgagtgggagctctggcctggaatgccgagcagttaagctctggttctcgggatcgcatgatcctgcagagggacattaggaccccccctctccagagcgaacgcaggctccaggggcaccgacaggaggtctgtgggctcaaatggagcacagaccaccagctcctcgcctcagggggaaatgataataagctgctggtgtggaaccattcttctctgtctcctgtgcaacagtataccgaacacttagccgctgtgaaagcaatcgcttggagccctcatcaacacggattactcgcctcaggcggaggcaccgccgaccgctgcattcggttttggaacactctgacaggccagccgctgcagtgcatagacacaggctcacaggtttgcaacctggcctggtcaaagcacgcaaacgagcttgtaagcacccatggttactcccagaatcaaatcctcgtttggaagtaccccagcttgactcaagtagcaaagctgaccggccacagctatcgggtgctgtatttggctatgtctccagatggcgaggccatcgtcactggcgcaggcgacgagaccctacgtttctggaacgtgtttagcaagactaggtctactaaagagagcgtgtcggtgctcaacttgttcacacgcatccgatag

SEQ ID NO: 52174 - DNA, 3170 bp, Artificial Sequence
  derived and/or modified sequence
gctaaccttgccgcgggccgagccctgcctcgccatggaccaggactatgagcggcgcctgcttcgccagatcgtcatccagaatgagaacacgatgccacgcgtcacagagatgcggcggaccctgacgcctgccagctccccagtgtcctcgcccagcaagcacggagaccgcttcatcccctccagagccggagccaactggagcgtgaacttccacaggattaacgagaatgagaagtctcccagtcagaaccggaaagccaaggacgccacctcagacaacggcaaagacggcctggcctactctgccctgctcaagaatgagctgctgggtgccggcatcgagaaggtgcaggacccgcagactgaggaccgcaggctgcagccctccacgcctgagaagaagggtctgttcacggtgacgcggctctgtgacctctcagtggaaggggactcagtgacctccgtgggctggtctgagcgggggaacctggtggcggtgggcacacacaagggcttcgtgcagatctgggacgcagccgcagggaagaagctgtccatgttggagggccacacggcacgcgtcggggcgctggcctggaatgctgagcagctgtcgtccgggagccgcgaccgcatgatcctgcagagggacatccgcaccccgccactgcagtcggagcggcggctgcagggccaccggcaggaggtgtgcgggctcaagtggtccacagaccaccagctcctcgcctcggggggcaacgacaacaagctgctggtctggaatcactcgagcctgagccccgtgcagcagtacacggagcacctggcggccgtgaaggccatcgcctggtccccacatcagcacgggctgctggcctcggggggcggcacagctgaccgctgtatccgcttctggaacacgctgacaggacaaccactgcagtgtatcgacacgggctcccaagtgtgcaatctggcctggtccaagcacgccaacgagctggtgagcacgcacggctactcacagaaccagatccttgtctggaagtacccctccctgacccaggtggccaagctgaccgggcactcctaccgcgtgctgtacctggcaatgtcccctgatggggaggccatcgtcactggtgctggagacgagaccctgaggttctggaacgtctttagcaaaacccgttcgacaaaggagtctgtgtctgtgctcaacctcttcaccaggatccggtaaacctgccgggcaggaccgtgccacaccagctgtccagagtcggaggaccccagctcctcagcttgcatggactctgccttcccagcgcttgtcccccgaggaaggcggctgggcgggcggggagctgggcctggaggatcctggagtctcattaaatgcctgattgtgaaccatgtccaccagtatctggggtgggcacgtggtcggggaccctcagcagcaggggctctgtctcccttcccaaagggcgagaaccacattggacggtcccggctcagaccgtctgtactcagagcgacggatgccccctgggaccctcactgcctccgtctgttcatcacctgcccaccggagccgcatgctcttcctggaactgcccacgtctgcacagaacagaccaccagacgccagggctgattggtgggggcctgagaccccggttgcccattcatggctgcaccccaccatgtcaaacccaagaccagccccaaggccagaccaaggcatgtaggcctgggcaggtggctcggggccactggcggagccagcctgtggatccaagagacagtccccacctgggcttcacggcatccttgcagccacctctgctgtcactgctcgaagcagcagtctctctggaagcatctgtgtcatggccatcgcccggcggtcagtgggcttcagatgggcctgtgcatcctggccaagcgtcaccctcacactggaggaggatgtctgctctggacttatcaccccaggagaactgaacccggacctgctcactgccctggctggagaggagcacaacagatgccacgtcttcgtgcattcgccaacacgtgccctcacagggccagcgtcctccttccctgcgcaagacttgcgtcccccatgcctgctgggtggctgggtcctgtggaggccagcagcggtgtggcccccgcccccaggctgcctgtgtcttcacctgtcctgtccaccagcgccaacagccgtggggaagccaaggagacccaaggggtccaggaggtgggcgccctccatccttcgagaagcttcccaggctcctctgcttctctgtctcatgctcccaggctgcacagcaggcagggagggaggcaaggcaggggagtggggcctgagctgagcactgccccctcacccccccaccaccccttcccatttcatcggtggggacgtggagagggtggggcgggctggggttggagggtcccacccaccaccctgctgtgcttgggaacccccactccccactccccacatcccaacatcctggtgtctgtccccagtggggttggcgtgcatgtgtacatatgtatttgtgacttttctttggatttgttttgtgtttttgttgactagtcctggaaatgtttgaggctagacggggaggggccaggacccacccactgctcctgggggatgaggtcctggttttaaagccccgtcatttcaagcgggtcgatcttccacattcactggagagactctccccacctctgtctgggtggggcgcggacccctcactgtgcgcctgtgcagggggtgctggtgcacgtggcagtgtggatttccagtggtcacggtcttactgtttcaaggtttttaaataagaaaaccaaccctgccttcgcccatgcccgcccctgcccgcagttgccaaagagccgccttgtcgctgtgggcgtcagggcttggctggctcagtgcacaacccacagtggccttcagaggctcctcctgggactgggaaccgccgcagggccaggcggacggcgtgaggtttgtgttggggctggttctgcccatgctagggggtgggggagctcccaggacagaccagccttgtttctcatgtaatgcagtgacgctgtcattaaacacgtggattcatgtgtgg

SEQ ID NO: 52175 - DNA, 1215 bp, Artificial Sequence
  derived and/or modified sequence
atggaccaggactacgagagaagactgctgagacagatcgtgatccagaacgagaacaccatgcccagagtgaccgagatgagaagaaccctgacccccgccagcagccccgtgagcagccccagcaagcacggcgacagattcatccccagcagagccggcgccaactggagcgtgaacttccacagaatcaacgagaacgagaagagccccagccagaacagaaaggccaaggacgccaccagcgacaacggcaaggacggcctggcctacagcgccctgctgaagaacgagctgctgggcgccggcatcgagaaggtgcaggacccccagaccgaggacagaagactgcagcccagcacccccgagaagaagggcctgttcaccgtgaccagactgtgcgacctgagcgtggagggcgacagcgtgaccagcgtgggctggagcgagagaggcaacctggtggccgtgggcacccacaagggcttcgtgcagatctgggacgccgccgccggcaagaagctgagcatgctggagggccacaccgccagagtgggcgccctggcctggaacgccgagcagctgagcagcggcagcagagacagaatgatcctgcagagagacatcagaaccccccccctgcagagcgagagaagactgcagggccacagacaggaggtgtgcggcctgaagtggagcaccgaccaccagctgctggccagcggcggcaacgacaacaagctgctggtgtggaaccacagcagcctgagccccgtgcagcagtacaccgagcacctggccgccgtgaaggccatcgcctggagcccccaccagcacggcctgctggccagcggcggcggcaccgccgacagatgcatcagattctggaacaccctgaccggccagcccctgcagtgcatcgacaccggcagccaggtgtgcaacctggcctggagcaagcacgccaacgagctggtgagcacccacggctacagccagaaccagatcctggtgtggaagtaccccagcctgacccaggtggccaagctgaccggccacagctacagagtgctgtacctggccatgagccccgacggcgaggccatcgtgaccggcgccggcgacgagaccctgagattctggaacgtgttcagcaagaccagaagcaccaaggagagcgtgagcgtgctgaacctgttcaccagaatcagatag

SEQ ID NO: 52176 - protein, 496 aa, Artificial Sequence
  derived and/or modified sequence
MDQDYERRLLRQIVIQNENTMPRVTEMRRTLTPASSPVSSPSKHGDRFIPSRAGANWSVNFHRINENEKSPSQNRKAKDATSDNGKDGLAYSALLKNELLGAGIEKVQDPQTEDRRLQPSTPEKKGLFTYSLSTKRSSPDDGNDVSPYSLSPVSNKSQKLLRSPRKPTRKISKIPFKVLDAPELQDDFYLNLVDWSSLNVLSVGLGTCVYLWSACTSQVTRLCDLSVEGDSVTSVGWSERGNLVAVGTHKGFVQIWDAAAGKKLSMLEGHTARVGALAWNAEQLSSGSRDRMILQRDIRTPPLQSERRLQGHRQEVCGLKWSTDHQLLASGGNDNKLLVWNHSSLSPVQQYTEHLAAVKAIAWSPHQHGLLASGGGTADRCIRFWNTLTGQPLQCIDTGSQVCNLAWSKHANELVSTHGYSQNQILVWKYPSLTQVAKLTGHSYRVLYLAMSPDGEAIVTGAGDETLRFWNVFSKTRSTKVKWESVSVLNLFTRIR

SEQ ID NO: 52177 - DNA, 1491 bp, Artificial Sequence
  derived and/or modified sequence
atggaccaggactacgagagaagactgctgagacagatcgtgatccagaacgagaacaccatgcccagagtgaccgagatgagaagaaccctgacccccgccagcagccccgtgagcagccccagcaagcacggcgacagattcatccccagcagagccggcgccaactggagcgtgaacttccacagaatcaacgagaacgagaagagccccagccagaacagaaaggccaaggacgccaccagcgacaacggcaaggacggcctggcctacagcgccctgctgaagaacgagctgctgggcgccggcatcgagaaggtgcaggacccccagaccgaggacagaagactgcagcccagcacccccgagaagaagggcctgttcacctacagcctgagcaccaagagaagcagccccgacgacggcaacgacgtgagcccctacagcctgagccccgtgagcaacaagagccagaagctgctgagaagccccagaaagcccaccagaaagatcagcaagatccccttcaaggtgctggacgcccccgagctgcaggacgacttctacctgaacctggtggactggagcagcctgaacgtgctgagcgtgggcctgggcacctgcgtgtacctgtggagcgcctgcaccagccaggtgaccagactgtgcgacctgagcgtggagggcgacagcgtgaccagcgtgggctggagcgagagaggcaacctggtggccgtgggcacccacaagggcttcgtgcagatctgggacgccgccgccggcaagaagctgagcatgctggagggccacaccgccagagtgggcgccctggcctggaacgccgagcagctgagcagcggcagcagagacagaatgatcctgcagagagacatcagaaccccccccctgcagagcgagagaagactgcagggccacagacaggaggtgtgcggcctgaagtggagcaccgaccaccagctgctggccagcggcggcaacgacaacaagctgctggtgtggaaccacagcagcctgagccccgtgcagcagtacaccgagcacctggccgccgtgaaggccatcgcctggagcccccaccagcacggcctgctggccagcggcggcggcaccgccgacagatgcatcagattctggaacaccctgaccggccagcccctgcagtgcatcgacaccggcagccaggtgtgcaacctggcctggagcaagcacgccaacgagctggtgagcacccacggctacagccagaaccagatcctggtgtggaagtaccccagcctgacccaggtggccaagctgaccggccacagctacagagtgctgtacctggccatgagccccgacggcgaggccatcgtgaccggcgccggcgacgagaccctgagattctggaacgtgttcagcaagaccagaagcaccaaggtgaagtgggagagcgtgagcgtgctgaacctgttcaccagaatcagatag

SEQ ID NO: 52178 - DNA, 1491 bp, Artificial Sequence
  derived and/or modified sequence
atggaccaagactatgaaagaagattattgagacaaattgtgatccagaatgaaaacaccatgccccgggtgactgaaatgcgtcggaccttgaccccagcgtcttcccctgtgtcaagtccttccaagcacggcgacagattcattccatcccgcgccggagcaaactggtccgtgaattttcacagaatcaacgagaatgaaaagtcccctagtcagaataggaaggccaaggatgctacatcagataacgggaaggacggcctggcatattccgccttgttgaaaaatgagctacttggtgccgggattgaaaaggtccaggatccgcagaccgaagatcgaagattacagccgagcacacctgaaaaaaagggtttatttacttattccctgagcactaagcggagctcaccggacgatggcaacgacgtcagcccgtactccctgagtccagtcagtaacaagtcccagaagcttctcagatctccgcggaagcccaccagaaagatttctaagatcccctttaaggtacttgacgccccagagttacaggacgatttttacctgaatcttgttgattggtctagcctgaacgtactgtccgtcggcctgggaacgtgtgtgtacctgtggtctgcatgcacaagccaagtgaccaggctgtgcgacctgagtgtcgaaggggactctgtaaccagcgtaggctggtctgagcgcggtaatcttgtggccgtcggaacacacaagggattcgtccaaatctgggacgctgcagctggcaagaaactttccatgctcgaagggcatacagcacgggtgggagctctcgcctggaacgctgagcagctttcctccggttcacgagataggatgattctgcagagagatataagaacccccccactacagtccgaacgcagattacagggacacaggcaggaggtctgcgggctaaagtggagcactgaccaccaactcctcgctagtggcggaaacgataacaagttgctagtgtggaaccactcaagcctaagtccggtgcagcagtacactgaacatttagccgcggtgaaggcgatcgcttggtcaccacatcaacacgggctgctggcatccggaggcggaacagctgaccgttgcatccgcttctggaacacgctgaccggacagccactccaatgtattgatacagggtcccaggtatgcaacctggcctggtctaagcacgccaacgaactcgtgagcacccacggttacagtcaaaaccagatcctggtgtggaagtacccttccctgactcaggtggctaaactgacaggccactcgtatcgggtcctttatctggctatgagcccagacggcgaggctatagtgactggcgccggagatgagaccctgcgcttctggaacgtttttagtaaaacccgaagtacaaaggtcaaatgggagtccgtctctgtgttaaacctgttcactaggattcgttag

SEQ ID NO: 52179 - DNA, 1491 bp, Artificial Sequence
  derived and/or modified sequence
atggaccaggactatgaaagaaggctgctgcggcagatcgtcatccagaatgaaaacaccatgccccgggtgacagagatgaggaggaccctgaccccagccagcagccctgtgagcagccccagcaagcacggggaccgcttcatccccagcagagctggggccaactggagcgtgaacttccaccgcatcaatgaaaatgagaagagccccagccagaacaggaaggccaaggatgccaccagtgacaacgggaaggatggcctggcctacagcgccctgctgaagaatgagctgctgggcgccggcatcgagaaggtgcaggacccccagacagaagatagaaggctgcagcccagcaccccagagaagaagggcctcttcacctacagcctgagcaccaagaggagcagcccagatgatggaaatgatgtgagcccctacagcctgagccctgtgagcaacaagagccagaagctgctgcggagccccaggaagcccaccaggaagatcagcaagatccccttcaaggtgctggatgcccctgagctgcaggatgacttctacctgaacctggtggactggagcagcctgaatgtgctgtctgtgggcctgggcacctgtgtgtacctgtggagcgcctgcaccagccaggtgacccggctgtgtgacctgtctgtggagggggacagcgtgacctctgtgggctggagcgagcggggcaacctggtggccgtgggcacccacaagggctttgtgcagatctgggatgctgctgctgggaagaagctgtccatgctggagggccacacagcccgggtgggcgccctggcctggaatgctgagcagctgagcagcggcagccgggacaggatgatcctgcagagggacatccgcaccccacccctgcagagcgagcggcggctgcagggccaccggcaggaggtgtgtggcctgaagtggagcacagaccaccagctgctggccagcggcggcaatgacaacaagctgctggtgtggaaccacagcagcctgagccctgtgcagcagtacacagagcacctggccgctgtgaaggccatcgcctggagcccccaccagcacggcctgctggccagcggcggcggcacagctgaccgctgcatccgcttctggaacaccctgaccggccagcccctgcagtgcatcgacaccggcagccaggtgtgcaacctggcctggagcaagcacgccaatgagctggtgtccacccacggctacagccagaaccagatcctggtgtggaagtaccccagcctgacccaggtggccaagctgaccggccacagctacagagtgctgtacctggccatgagcccagatggagaggccatcgtgactggagctggagatgagaccctgcgcttctggaatgtgttcagcaagaccaggagcaccaaggtgaagtgggagagcgtgtctgtgctgaacctcttcacccgcatcagatag

SEQ ID NO: 52180 - DNA, 3446 bp, Artificial Sequence
  derived and/or modified sequence
gctaaccttgccgcgggccgagccctgcctcgccatggaccaggactatgagcggcgcctgcttcgccagatcgtcatccagaatgagaacacgatgccacgcgtcacagagatgcggcggaccctgacgcctgccagctccccagtgtcctcgcccagcaagcacggagaccgcttcatcccctccagagccggagccaactggagcgtgaacttccacaggattaacgagaatgagaagtctcccagtcagaaccggaaagccaaggacgccacctcagacaacggcaaagacggcctggcctactctgccctgctcaagaatgagctgctgggtgccggcatcgagaaggtgcaggacccgcagactgaggaccgcaggctgcagccctccacgcctgagaagaagggtctgttcacgtattcccttagcaccaagcgctccagccccgatgacggcaacgatgtgtctccctactccctgtctcccgtcagcaacaagagccagaagctgctccggtccccccggaaacccacccgcaagatctccaagatccccttcaaggtgctggacgcgcccgagctgcaggacgacttctacctcaatctggtggactggtcgtccctcaatgtgctcagcgtggggctaggcacctgcgtgtacctgtggagtgcctgtaccagccaggtgacgcggctctgtgacctctcagtggaaggggactcagtgacctccgtgggctggtctgagcgggggaacctggtggcggtgggcacacacaagggcttcgtgcagatctgggacgcagccgcagggaagaagctgtccatgttggagggccacacggcacgcgtcggggcgctggcctggaatgctgagcagctgtcgtccgggagccgcgaccgcatgatcctgcagagggacatccgcaccccgccactgcagtcggagcggcggctgcagggccaccggcaggaggtgtgcgggctcaagtggtccacagaccaccagctcctcgcctcggggggcaacgacaacaagctgctggtctggaatcactcgagcctgagccccgtgcagcagtacacggagcacctggcggccgtgaaggccatcgcctggtccccacatcagcacgggctgctggcctcggggggcggcacagctgaccgctgtatccgcttctggaacacgctgacaggacaaccactgcagtgtatcgacacgggctcccaagtgtgcaatctggcctggtccaagcacgccaacgagctggtgagcacgcacggctactcacagaaccagatccttgtctggaagtacccctccctgacccaggtggccaagctgaccgggcactcctaccgcgtgctgtacctggcaatgtcccctgatggggaggccatcgtcactggtgctggagacgagaccctgaggttctggaacgtctttagcaaaacccgttcgacaaaggtaaagtgggagtctgtgtctgtgctcaacctcttcaccaggatccggtaaacctgccgggcaggaccgtgccacaccagctgtccagagtcggaggaccccagctcctcagcttgcatggactctgccttcccagcgcttgtcccccgaggaaggcggctgggcgggcggggagctgggcctggaggatcctggagtctcattaaatgcctgattgtgaaccatgtccaccagtatctggggtgggcacgtggtcggggaccctcagcagcaggggctctgtctcccttcccaaagggcgagaaccacattggacggtcccggctcagaccgtctgtactcagagcgacggatgccccctgggaccctcactgcctccgtctgttcatcacctgcccaccggagccgcatgctcttcctggaactgcccacgtctgcacagaacagaccaccagacgccagggctgattggtgggggcctgagaccccggttgcccattcatggctgcaccccaccatgtcaaacccaagaccagccccaaggccagaccaaggcatgtaggcctgggcaggtggctcggggccactggcggagccagcctgtggatccaagagacagtccccacctgggcttcacggcatccttgcagccacctctgctgtcactgctcgaagcagcagtctctctggaagcatctgtgtcatggccatcgcccggcggtcagtgggcttcagatgggcctgtgcatcctggccaagcgtcaccctcacactggaggaggatgtctgctctggacttatcaccccaggagaactgaacccggacctgctcactgccctggctggagaggagcacaacagatgccacgtcttcgtgcattcgccaacacgtgccctcacagggccagcgtcctccttccctgcgcaagacttgcgtcccccatgcctgctgggtggctgggtcctgtggaggccagcagcggtgtggcccccgcccccaggctgcctgtgtcttcacctgtcctgtccaccagcgccaacagccgtggggaagccaaggagacccaaggggtccaggaggtgggcgccctccatccttcgagaagcttcccaggctcctctgcttctctgtctcatgctcccaggctgcacagcaggcagggagggaggcaaggcaggggagtggggcctgagctgagcactgccccctcacccccccaccaccccttcccatttcatcggtggggacgtggagagggtggggcgggctggggttggagggtcccacccaccaccctgctgtgcttgggaacccccactccccactccccacatcccaacatcctggtgtctgtccccagtggggttggcgtgcatgtgtacatatgtatttgtgacttttctttggatttgttttgtgtttttgttgactagtcctggaaatgtttgaggctagacggggaggggccaggacccacccactgctcctgggggatgaggtcctggttttaaagccccgtcatttcaagcgggtcgatcttccacattcactggagagactctccccacctctgtctgggtggggcgcggacccctcactgtgcgcctgtgcagggggtgctggtgcacgtggcagtgtggatttccagtggtcacggtcttactgtttcaaggtttttaaataagaaaaccaaccctgccttcgcccatgcccgcccctgcccgcagttgccaaagagccgccttgtcgctgtgggcgtcagggcttggctggctcagtgcacaacccacagtggccttcagaggctcctcctgggactgggaaccgccgcagggccaggcggacggcgtgaggtttgtgttggggctggttctgcccatgctagggggtgggggagctcccaggacagaccagccttgtttctcatgtaatgcagtgacgctgtcattaaacacgtggattcatgtgtgg

SEQ ID NO: 52181 - DNA, 1491 bp, Artificial Sequence
  derived and/or modified sequence
atggaccaggactacgagcggcggctgctgcggcagatcgtgatccagaatgagaacacaatgcccagggtcacagagatgcgcagaactcttacccctgcatcctcccctgtgagctctccctccaagcatggagatcggttcatcccgtcaagggccggagcaaattggtccgtgaactttcacagaattaacgagaacgaaaaatccccttcacagaatcggaaagctaaagacgccaccagtgataacgggaaagacggtctcgcttattcagccctcctgaagaacgagctcctcggcgctggaattgaaaaggtacaggacccccagacagaggataggaggttgcaaccatcaacacctgagaagaaaggcctgttcacatactcactatctactaaacgctccagcccggatgacggtaatgatgtcagcccctatagcctgagccccgtttccaacaaatcccagaaactgttaagatcaccacggaagcctactcgcaagattagcaagatccctttcaaggtgctggatgcaccagagctgcaggacgatttctacctcaacttggttgactggtcctctctgaatgtgctgtcggtgggactgggcacctgcgtctatctgtggtcagcttgcacctcccaggtgacaagactttgtgatctgagtgttgaaggagatagcgttacctctgtaggctggagcgagcgagggaaccttgtggccgtgggtactcataaggggtttgtccaaatatgggacgcggcagctgggaaaaagctgagcatgttagagggtcacacagcgcgggtaggggccctagcctggaacgctgagcaattgtcctctggctcacgggaccggatgatcctgcagcgcgacattagaacgccacccctacaatcagagcgaagactgcagggacatagacaagaggtgtgcggcctgaagtggtccactgaccatcagttactcgcgagtgggggtaacgataataagctactggtttggaatcactcttcactctcaccagtgcagcagtacactgaacatctcgcagccgtaaaggccatcgcttggtccccccaccagcacggattactcgcaagcggtggagggaccgccgaccgctgtattcggttttggaacactctcaccgggcaacccctacagtgcattgataccgggtcccaggtgtgcaatctggcctggtctaagcatgccaatgaactcgtaagcacacacggatactctcaaaatcagatcctcgtgtggaaatatccctctttgacccaagtagccaaactgacaggccacagctatagagttttatacctcgccatgtcacctgatggggaggccatcgttacaggagcaggtgacgaaaccctgcgattttggaatgtattttcaaagacccgaagcacaaaggttaagtgggagtctgtttccgttttgaatctgttcacaaggatacggtag

SEQ ID NO: 52182 - DNA, 1491 bp, Artificial Sequence
  derived and/or modified sequence
atggatcaagattacgagcgaaggttgctgcggcagatagtaatccagaacgagaatacgatgcccagagttacagaaatgcggcgaaccctaacaccagcaagcagtcccgtgtcttcaccgagtaaacatggcgatagattcattcccagtcgagccggagccaattggagtgtgaacttccacaggattaatgagaacgaaaaatcgccctctcagaataggaaggcaaaagatgccacctctgacaacgggaaagacggattggcctattctgcccttctgaaaaatgagcttcttggagctggtattgaaaaagtgcaggatccccagactgaggaccgacggctgcagccatcaactccggaaaaaaagggcttgttcacgtattcactgagcactaaacgtagcagcccagacgatggaaatgatgtctccccttattctctaagccctgtgagtaacaaaagccaaaagctcttgaggagtccacgcaaacctacccgcaagatctccaagatcccctttaaagtcctcgatgctccagagcttcaagacgacttctatctgaatcttgtggactggagctccctcaatgtgctttccgtgggcttaggcacttgcgtttatctctggtcagcctgtaccagccaagtgacccggctatgtgatctatcagtggagggtgattcagtgacttctgtgggctggtctgagcgagggaatctggtcgccgttggtactcacaagggattcgtccagatatgggatgcagcagcagggaagaagcttagtatgttagaagggcacacagcccgtgtcggagccctcgcttggaatgccgaacagctgtcctctggatcacgtgaccgcatgatcttacagcgggacatccggacacccccactgcagagcgagagaaggctgcagggtcataggcaggaagtgtgcggcctcaagtggtccactgatcaccagctgttagccagtggtgggaacgataacaagttgctagtctggaaccactcgagtctgtctcccgttcagcagtacaccgagcatcttgccgctgtcaaggctatagcctggagcccccaccagcacggtttgttagcatccggtggaggtactgccgaccggtgtatccgattttggaatacgctaaccggccagccgctccagtgtattgacacaggaagccaggtatgtaacctggcttggtcaaagcacgcaaatgaactggtaagcacccatggatacagccagaatcagatcctagtttggaaatacccatcgctgacccaggttgccaagctgacaggccatagttaccgagtgttgtacctggctatgtcaccggatggagaggcaatagtgactggagctggcgacgaaaccctgagattttggaatgtgttttccaagacccggagtacaaaagtcaaatgggagagtgtttctgttctcaatctattcacaaggatcaggtag

SEQ ID NO: 52183 - protein, 106 aa, Artificial Sequence
  derived and/or modified sequence
MMATGTPESQARFGQSVKGLLTEKVTTCGTDVIALTKQVLKGSRSSELLGQAARNMVLQEDAILHSEDSLRKMAIITTHLQYQQEAIQKNVEQSSDLQDQLNHLLK

SEQ ID NO: 52184 - DNA, 2422 bp, Artificial Sequence
  derived and/or modified sequence
gctttgcttgtcttttggccccggcgactcaccatcgtcagtgcgcaaccgttcgctaactgaaatgatggcgactggaacgccagagtctcaagcgcggttcggtcagtccgtgaaggggcttctcacggagaaggtgaccacctgtggtactgacgtaatcgcgctcaccaagcaggtgctgaaaggctcccggagctccgagctgctaggtcaggcagctcgaaacatggtactccaggaagatgccatcttgcactcagaagatagtttaaggaagatggcaataataacaacacatcttcaataccagcaagaagctattcagaagaatgttgaacagtcatcggatctacaggaccagttgaatcatctgttgaaatagaatgacatgtaagagtgctgtaggactcctttgcctaatgctgaggagtaaataccttacacagctgtcctctgggtttggttttctattttcttctccaaaagttaagttagaaaagttctgtgttagggccgggcgcggtagctcacgcctgtaatcccagcactttgggaggccgaggcgggtggatcacgaggtcaggagttcgagaccagcctggccaagatggtgaaaccccgtctctactaaaaatacaaagaattagctgggcgtggtggcgggcgcctgtaatcccagctactcgggaagctgaggcaagagaatcgcttgaacccaggaggtggaggttgcagtgagccaagatcgcgccactgcactccagcctgggcgacagagtgagattccatctccaaaaaaaaaaaaagaaaaaaaaaagaaaagttctgtgttgatgtacagtttctcctaagaagaagcgaggtggttgaattttggaagcacttcttgaatcggattaacccatgctcttattgaattttttcatctgctctgtttagtttgatattaaagcaaaattaagaggtcttagtttttcctatagaacttttaatatgtcaaaagctatattgtctaaatttcagtacttaagcaaatactgagtagtgttttaaattcagaaatagagcttctattatgaacacatgagaatgatttttttctcttaatcattattaaggaaatattttaatttcatggtcatataatggtgataagtaatacctgattgtttccttttctgttctagtaactcagaggagatacgtgttttatttgtgatagcaaattcctaaatgaacattaggcaagtggtatcattatcaggccagctgcagcctcttgccttgacctgcattcctagaatttctttgttgctgtaattcttgattaagtgaccttgactttcattttgtaattttgctaatcatcagcaaattcacttgcatgacgttactgccaaatatgaaggcagttgaattattatgagtgattgtggcagaggtttgtgccatggtgaaaactttgatgtttgtctgtgttcattggatccatctttttaaatgacattaccatgagtctgttgtcaaacctaaatatctttgtttgaatttaaaatgggactctatattgttgtagttcaggtcttcattgactaagagattgagagaaatctgacataagaaaatattgttttcactgcaggaataaagaggaagtaacagtgaatccaatatagttcatattgttattgtccaatcatcaagttaactaagcattatcagattacgtttatttctcatacatatggatattaacttaaggtaaaaaagctggatgtgaaggatctgaaaaggcattaatttatgtactaattctataaacatgtattaataattgcagtattattaaatacagatggactcaatgtacctttgaaaagaccactaatttagaaaacaaagctaagtgcagtcattacaagaagcaaagaaatacttaagttagaaaaaaattaaaatgaagggatggtctaagttttcttcatgctggaacaaatgttaaagaagcagtgattgcttacaatgtatgtgataaaataatacctttcacaatcaaaattttaatagtaaatataagataaaatttatattaaataatgaaaacgtatttgtactgaatttagtcactagagaacatcgtaacaaaatacatgaaacaaaagtagccagaaatgttagaacaggtggaaatgtatacattatttgatggtttgtttttttatggaaataaacaacatacatagaattaaatggtgatcaaaaacatggaaaaaatacttcactaaataacgtctaagttgtagaggttgtgccggaagataatatttttaaaataacaaatgttcaaatgccataaaagaaaatttgtgtgataataccaaagcagtactataagaaaataagcatgctttaaatccct

SEQ ID NO: 52185 - DNA, 838 bp, Artificial Sequence
  derived and/or modified sequence
agtgcgcaaccgttcgctaactgaaatgatggcgactggaacgccagagtctcaagcgcggttcggtcagtccgtgaaggggcttctcacggagaaggtgaccacctgtggtactgacgtaatcgcgctcaccaagcaggtgctgaaaggctcccggagctccgagctgctaggtcaggcagctcgaaacatggtactccaggaagatgccatcttgcactcagaagatagtttaaggaagatggcaataataacaacacatcttcaataccagcaagaagctattcagaagaatgttgaacagtcatcggatctacaggaccagttgaatcatctgttgaaatagaatgacattaactcagaggagatacgtgttttatttgtgatagcaaattcctaaatgaacattaggcaagtggtatcattatcaggccagctgcagcctcttgccttgacctgcattcctagaatttctttgttgctgtaattcttgattaagtgaccttgactttcattttgtaattttgctaatcatcagcaaattcacttgcatgacgttactgccaaatatgaaggcagttgaattattatgagtgattgtggcagaggtttgtgccatggtgaaaactttgatgtttgtctgtgttcattggatccatctttttaaatgacattaccatgagtctgttgtcaaacctaaatatctttgtttgaatttaaaatgggactctatattgttgtagttcaggtcttcattgactaagagattgagagaaatctgacataagaaaatattgttttcactgcaggaataaagaggaagtaacagtgaatccaa

SEQ ID NO: 52186 - DNA, 321 bp, Artificial Sequence
  derived and/or modified sequence
atgatggccaccggcacccccgagagccaggccagattcggccagagcgtgaagggcctgctgaccgagaaggtgaccacctgcggcaccgacgtgatcgccctgaccaagcaggtgctgaagggcagcagaagcagcgagctgctgggccaggccgccagaaacatggtgctgcaggaggacgccatcctgcacagcgaggacagcctgagaaagatggccatcatcaccacccacctgcagtaccagcaggaggccatccagaagaacgtggagcagagcagcgacctgcaggaccagctgaaccacctgctgaagtag

SEQ ID NO: 52187 - DNA, 321 bp, Artificial Sequence
  derived and/or modified sequence
atgatggccacgggcacccctgagagccaggcacgatttgggcaaagcgttaaaggcttactcaccgagaaggtgaccacctgtgggacagatgtgattgccctgaccaagcaggtgctgaagggaagcagatcaagtgaactgttggggcaggctgccagaaacatggtgctgcaggaggacgccatcctgcactctgaagactccctgcgcaagatggctattatcacaacgcatctgcagtatcagcaggaagctattcagaagaatgtcgagcagtcaagcgacttacaggatcagttaaaccacctgcttaagtag

SEQ ID NO: 52188 - DNA, 321 bp, Artificial Sequence
  derived and/or modified sequence
atgatggccacagggacgccagagagccaggccagattcgggcagtctgtgaaggggctgctgaccgagaaggtgacaacatgtggcacagatgtgatcgccttgactaaacaggtcctaaagggaagcaggagctcagagctgctcggccaggcggccagaaatatggtgttgcaagaagatgccatactgcactctgaagattcactgagaaagatggccatcatcaccactcatcttcagtatcagcaagaagccatacagaaaaatgtcgagcagtcctctgacctacaggaccagcttaaccatttgctcaagtag

SEQ ID NO: 52189 - DNA, 321 bp, Artificial Sequence
  derived and/or modified sequence
atgatggccaccggcaccccagagagccaggccaggtttggccagagcgtgaagggcctgctgacagagaaggtgaccacctgtggcacagatgtgattgccctgaccaagcaggtgctgaagggcagccgcagcagcgagctgctgggccaggccgccaggaacatggtgctgcaggaggatgccatcctgcacagcgaggacagcctgaggaagatggccatcatcaccacccacctgcagtaccagcaggaggccatccagaagaatgtggagcagagcagtgacctgcaggaccagctgaaccacctgctgaagtag

SEQ ID NO: 52190 - DNA, 321 bp, Artificial Sequence
  derived and/or modified sequence
atgatggccaccggcacccccgagagccaggcccggttcggccagtctgtgaaaggcttactcactgaaaaggtgaccacctgtggaaccgatgtgattgcgctaaccaagcaggtgcttaaagggtctcgatcatccgaactattgggccaggccgcccgaaatatggtgttgcaagaagacgctatactgcatagcgaagattcccttagaaaaatggccataattaccacacacctgcagtaccaacaagaggccattcaaaaaaatgtggagcagtccagtgacctccaagaccaactgaatcatctactgaagtag

SEQ ID NO: 52191 - DNA, 321 bp, Artificial Sequence
  derived and/or modified sequence
atgatggccaccggcacccccgagagccaggcccggttcggccagtccgtcaaggggctgctgactgagaaggtaacaacctgcgggacagacgtgatcgccttgactaagcaggtgctgaaagggtctcgctcgagcgagttgctgggacaagccgccaggaatatggtcctccaggaggatgcaattctccattccgaagattcccttcggaagatggccatcataacaactcatctgcagtatcaacaggaggccattcagaagaatgtggaacagtcctccgatttgcaggaccaacttaatcatcttctaaagtag

SEQ ID NO: 52192 - DNA, 321 bp, Artificial Sequence
  derived and/or modified sequence
atgatggccactgggacccctgaatcccaggcgagatttgggcagtctgtgaaaggccttctgacagaaaaagtgacaacatgtgggacagacgttatcgcactaaccaagcaagtgcttaaaggaagtcgctcctctgaactgctcggccaagcagctcggaacatggtgcttcaggaagacgcgattcttcactccgaggacagtcttagaaagatggcaatcattactactcacttacagtatcagcaggaggccatccagaagaatgtagagcagagctccgatttgcaggatcagcttaaccatctgttgaagtag

SEQ ID NO: 52193 - DNA, 321 bp, Artificial Sequence
  derived and/or modified sequence
atgatggccacaggtactcctgagtcccaagcaagattcggacaaagtgttaaaggcctactaaccgagaaagtgaccacttgcggcacagatgtcattgctctgacaaaacaggtgctgaaggggagccgcagcagcgaattactgggtcaggcagccaggaacatggttctccaggaggatgcaattctgcacagcgaagacagcctgcgtaagatggccatcattactacacatttgcagtatcaacaggaggccatccagaagaacgttgagcagagcagtgacctacaggatcagcttaatcacctcctgaagtag

SEQ ID NO: 52194 - protein, 545 aa, Artificial Sequence
  derived and/or modified sequence
MVAEAGSMPAASSVKKPFGLRSKMGKWCRHCFAWCRGSGKSNVGTSGDHDDSAMKTLRSKMGKWCCHCFPWCRGSGKSNVGTSGDHDDSAMKTLRSKMGKWCCHCFPCCRGSGKSNVGTSGDHDDSAMKTLRSKMGKWCCHCFPCCRGSGKNKVGPWGDYDDSAFMEPRYHVRREDLDKLHRAAWWGKVPRKDLIVMLKDTDMNKKDKQKRTALHLASANGNSEVVKLLLDRRCQLNILDNKKRTALTKAVQCQEDECALMLLEHGTDPNIPDEYGNTALHYAIYNEDKLMAKALLLYGADIESKNKHGLTPLLLGVHEQKQQVVKFLIKKKANLNALDRYGRTALILAVCCGSASIVSLLLEQNIDVSSQDLSGQTAREYAVSSRHNVICQLLSDYKEKQILKVSSENSNPEQDLKLTSEEESQRLKGSENSQPEEMSQEPEINKGGDRKVEEEMKKHGSTHMGFPENLTNGATADNGDDGLIPPRKSRTPESQQFPDTENEQYHSDEQNDTQKQLSEEQNTGILQDEILIHEEKQIEVAENEF

SEQ ID NO: 52195 - protein, 288 aa, Artificial Sequence
  derived and/or modified sequence
MVAEAGSMPAASSVKKPFGLRSKMGKWCRHCFAWCRGSGKSNVGTSGDHDDSAMKTLRSKMGKWCCHCFPWCRGSGKSNVGTSGDHDDSAMKTLRSKMGKWCCHCFPCCRGSGKSNVGTSGDHDDSAMKTLRSKMGKWCCHCFPCCRGSGKNKVGPWGDYDDSAFMEPRYHVRREDLDKLHRAAWWGKVPRKDLIVMLKDTDMNKKDKQKRTALHLASANGNSEVVKLLLDRRCQLNILDNKKRTALTKAVQCQEDECALMLLEHGTDPNIPDEYGNTALHYAIYNED

SEQ ID NO: 52196 - DNA, 1638 bp, Artificial Sequence
  derived and/or modified sequence
atggtcgcggaggccggaagtatgccagccgccagttccgttaagaaacctttcggactgaggtctaagatgggtaagtggtgtagacattgctttgcttggtgcagaggctctggcaagtctaacgtcggaacatccggtgatcatgacgacagcgccatgaagacactgagaagcaagatgggcaagtggtgctgccattgcttcccttggtgcaggggtagcggtaagtcaaacgttggcaccagcggcgaccatgatgactctgccatgaaaaccctgaggtcgaaaatggggaagtggtgttgccattgttttccatgttgccgggggtcggggaagagcaacgtgggaacgtctggcgaccatgatgacagtgccatgaaaaccctgaggtctaaaatgggaaagtggtgctgccactgcttcccttgctgccgtggcagtgggaaaaacaaggtgggcccttggggcgattatgacgactctgccttcatggaacctcgttaccacgtgaggagagaggacctggataagttgcaccgagctgcatggtggggcaaagtgcctaggaaggatttgattgttatgctaaaagacaccgacatgaataagaaggataagcagaagcgtacggccctgcacttagcgtcagcaaatggtaatagcgaggttgttaagttgctgctcgataggaggtgtcagttgaacatcctggacaataagaagcggactgctcttacaaaagccgtacagtgccaggaggacgagtgtgccctaatgctcctggagcacggcaccgaccccaacattcccgacgaatatgggaacactgcgctgcattatgctatctataatgaggataagctgatggctaaagctctgctcctatacggtgccgacatagaaagtaagaataaacacggattaacacccttactactgggcgtacatgagcaaaagcagcaagtcgttaaatttttgattaagaaaaaagctaatctgaatgctttggacaggtatggacggacagccctcatcctggccgtctgctgtggcagcgcctccatcgtatcacttcttctggaacagaacatcgatgtgtcctcacaggacttgagcggacagacagcacgggaatatgcagttagcagtcgtcacaacgtgatctgccagctactgagcgattataaggagaagcaaatcctgaaggtttctagcgagaactccaacccagaacaagacctcaagctgacgtccgaggaagaatcccaacgactgaagggctcggaaaacagtcagcctgaggagatgtcgcaggagcccgagattaacaaagggggagaccgcaaggtggaggaagaaatgaagaagcatggttcgacccatatgggcttccccgagaacctcacgaatggcgccactgccgataatggcgacgacggcctcatccctcctagaaagtcccgcaccccagaatcacagcagttccccgatactgagaacgagcaatatcacagcgacgaacaaaatgacacacagaaacaacttagtgaagaacaaaatacggggatcctgcaggatgaaatccttatccacgaagagaaacagatagaagtggctgagaacgagttctag

SEQ ID NO: 52197 - DNA, 867 bp, Artificial Sequence
  derived and/or modified sequence
atggtcgcagaggccggatccatgcctgccgcatccagcgtcaaaaaaccttttggactgcgttccaagatgggcaaatggtgtaggcactgctttgcctggtgcaggggctctggtaaatctaacgtcggaacttccggagatcacgacgatagcgcaatgaagacactccgttcaaagatgggtaaatggtgctgtcactgctttccatggtgccgcggttccggcaagtccaatgtgggcacgtctggcgaccacgatgactccgccatgaaaaccctcagaagtaaaatggggaaatggtgctgccactgtttcccttgctgtagagggagtggaaaaagcaacgtgggaaccagcggtgaccatgatgacagtgcaatgaagacacttcggtccaagatgggtaaatggtgctgccactgttttccttgctgtagaggtagcgggaagaataaggttggaccttggggcgactatgacgattccgccttcatggagccacggtatcacgtgaggcgggaggacctggataaacttcaccgggccgcctggtggggaaaggttccccgcaaggatcttattgtgatgttgaaagatacggatatgaataaaaaagacaaacagaagagaaccgctctgcacctcgccagcgcaaacgggaactccgaggtggtgaagctcctgctggatagacgctgccagctgaatatacttgacaataaaaaaagaaccgctctcactaaagccgtccagtgccaggaagacgaatgtgctcttatgctgttggaacacggcaccgatccaaacattcctgatgagtatggaaacacagccctgcactatgctatttataatgaggattag

SEQ ID NO: 52198 - DNA, 1638 bp, Artificial Sequence
  derived and/or modified sequence
atggtggccgaggccggctccatgcctgctgccagctctgtgaagaagcccttcggcctgcggagcaagatgggcaagtggtgccgccactgctttgcctggtgccggggcagcggcaagagcaatgtgggcaccagcggggaccatgatgacagcgccatgaagaccctgcggagcaagatgggcaagtggtgctgccactgcttcccctggtgccggggcagcggcaagagcaatgtgggcaccagcggggaccatgatgattctgccatgaagaccctgcggagcaagatgggcaagtggtgctgccactgcttcccctgctgccggggcagcggcaagagcaatgtgggcaccagcggggaccatgatgacagcgccatgaagaccctgcggagcaagatgggcaagtggtgctgccactgcttcccctgctgccggggcagcggcaagaacaaggtgggcccctggggagactatgatgattctgccttcatggagccccgctaccacgtgagaagagaggacctggacaagctgcacagagctgcctggtggggcaaggtgcccaggaaggacctgattgtgatgctgaaggacacagacatgaacaagaaggacaagcagaagaggacagccctgcacctggccagcgccaacggcaacagcgaggtggtgaagctgctgctggaccggcgctgccagctgaacatcctggacaacaagaagaggacagccctgaccaaggctgtgcagtgccaggaggatgaatgtgccctgatgctgctggagcacggcacagaccccaacatcccagatgaatatggcaacacagccctgcactacgccatctacaatgaagacaagctgatggccaaggccctgctgctgtatggagctgacatcgagagcaagaacaagcacggcctgacccccctgctgctgggcgtgcatgagcagaagcagcaggtggtgaagttcctgatcaagaagaaggccaacctgaatgccctggacagatatggccgcacagccctgatcctggccgtgtgctgcggcagcgccagcatcgtgtccctgctgctggagcagaacattgatgtgagcagccaggacctgagcggccagacagcccgggagtatgctgtgagcagccgccacaacgtcatctgccagctgctgagtgactacaaggagaagcagatcctgaaggtgtcctctgagaacagcaaccctgagcaggacctgaagctgaccagcgaggaggagagccagaggctgaagggcagcgagaacagccagcctgaggagatgagccaggagcctgagatcaacaagggcggggacaggaaggtggaggaggagatgaagaagcacggcagcacccacatgggcttccctgagaacctgaccaacggggccacagctgacaatggagatgatggcctcatcccccccaggaagagcaggaccccagagagccagcagttcccagacacagaaaatgagcagtaccacagtgatgagcagaatgacacccagaagcagctgtctgaggagcagaacacaggcatcctgcaggatgagatcctgattcatgaggagaagcagatcgaggtggccgagaatgagttctag

SEQ ID NO: 52199 - DNA, 867 bp, Artificial Sequence
  derived and/or modified sequence
atggtggccgaggccggctccatgcctgctgccagctctgtgaagaagcccttcggcctgcggagcaagatgggcaagtggtgccgccactgctttgcctggtgccggggcagcggcaagagcaatgtgggcaccagcggggaccatgatgacagcgccatgaagaccctgcggagcaagatgggcaagtggtgctgccactgcttcccctggtgccggggcagcggcaagagcaatgtgggcaccagcggggaccatgatgattctgccatgaagaccctgcggagcaagatgggcaagtggtgctgccactgcttcccctgctgccggggcagcggcaagagcaatgtgggcaccagcggggaccatgatgacagcgccatgaagaccctgcggagcaagatgggcaagtggtgctgccactgcttcccctgctgccggggcagcggcaagaacaaggtgggcccctggggagactatgatgattctgccttcatggagccccgctaccacgtgagaagagaggacctggacaagctgcacagagctgcctggtggggcaaggtgcccaggaaggacctgattgtgatgctgaaggacacagacatgaacaagaaggacaagcagaagaggacagccctgcacctggccagcgccaacggcaacagcgaggtggtgaagctgctgctggaccggcgctgccagctgaacatcctggacaacaagaagaggacagccctgaccaaggctgtgcagtgccaggaggatgaatgtgccctgatgctgctggagcacggcacagaccccaacatcccagatgaatatggcaacacagccctgcactacgccatctacaatgaagattag

SEQ ID NO: 52200 - DNA, 1638 bp, Artificial Sequence
  derived and/or modified sequence
atggtggccgaggccggcagcatgcccgccgccagcagcgtgaagaaaccatttggactccggagtaagatggggaaatggtgtagacattgtttcgcctggtgccgcggcagtggcaaatccaacgtcgggacgagcggagaccacgacgattctgccatgaaaaccttgcgctcaaaaatgggaaagtggtgctgtcactgcttcccatggtgccgcggcagcggaaagtccaacgtaggcacttcgggggaccacgatgattcagctatgaagacccttcgcagcaaaatggggaagtggtgctgtcattgcttcccatgctgccgcggttctggaaagagcaacgtgggaactagcggggaccatgatgactccgccatgaaaaccctgcgctctaagatgggtaaatggtgctgccattgctttccgtgttgccgtggatccggcaagaataaagtgggcccttggggagattacgacgacagtgcttttatggaaccacggtatcatgtccgtcgggaggatcttgacaagctgcatcgagcagcttggtggggcaaggtgccacggaaagatctgatcgtgatgctcaaagacacagacatgaacaaaaaggataagcaaaaaagaactgctcttcatctggcatccgccaatggtaacagcgaggtggttaaactcctgctcgataggaggtgccagctgaacatcctggataataaaaagagaacagccttaactaaggctgtccagtgtcaggaggatgagtgtgccctgatgctcctggagcacggaacagatccgaacattcctgacgagtatggcaatacagccctccattacgcaatctacaacgaggacaaactgatggcaaaagccctgcttctgtatggcgctgacattgaaagcaagaacaaacacggcttaacgcccctcctgcttggcgtacacgaacagaagcagcaggtagttaagtttcttatcaaaaagaaggcaaacctgaacgcgcttgataggtatggccgcaccgcccttatcctggctgtgtgttgtggctcggcctcaatcgtttccctgttgctcgaacagaatatcgacgtgtcttcacaggatctctccggccagacagccagagagtacgccgtttcttctcgtcataatgtgatctgccaattgctgtctgactacaaggaaaagcaaattctgaaggtgtccagcgagaacagcaatcccgaacaagatctaaagttgacatccgaagaggaatctcagcgattgaagggatctgagaacagccagcccgaggagatgagtcaagagccagaaattaacaagggcggcgacaggaaggtagaggaggagatgaagaaacacggaagtacccatatgggctttcccgaaaatctcactaacggggccactgccgacaatggtgatgacggtcttattcccccgcggaagtcaaggacaccagagagtcaacagtttcccgataccgaaaacgagcagtatcacagtgacgaacagaacgacacccagaaacagctgtctgaggagcaaaacaccgggatcttgcaggacgagatcctcatccatgaggaaaaacagatcgaggtggctgaaaacgagttttag

SEQ ID NO: 52201 - DNA, 867 bp, Artificial Sequence
  derived and/or modified sequence
atggtggccgaggccggcagcatgcccgccgccagcagcgtgaagaaaccattcggcctaagaagcaaaatgggaaaatggtgtcgacattgcttcgcatggtgtcgcggcagtggcaagagcaatgtcggcacatcaggagaccacgacgacagtgctatgaagacattgagaagcaaaatgggaaagtggtgttgccattgtttcccatggtgcaggggttcagggaaatctaatgtggggacctcaggggaccacgacgacagcgctatgaagacactgcggtccaagatgggcaagtggtgctgccattgcttcccatgctgcaggggaagcggcaagtctaatgtgggaacctcaggtgatcacgatgattcggccatgaagacattacgctctaagatgggtaagtggtgctgccattgcttcccctgctgccggggcagcggcaaaaacaaggtgggtccctggggggactacgacgattctgcttttatggaaccaagatatcacgtgagacgagaagacctagataaactccaccgagctgcctggtggggcaaggtgcccaggaaagatttgattgtgatgctcaaggatacagatatgaacaaaaaggacaaacagaaaagaaccgcccttcatctggcgtcagccaatgggaattctgaggtagtgaagctgctgttagacaggcgatgtcagctcaatatccttgataataaaaaaaggacagctcttacaaaggctgttcagtgtcaggaagacgaatgcgccctgatgttactagagcatggcaccgatcctaacatccccgatgagtacggcaatacagccctgcactacgcaatttataatgaagattag

SEQ ID NO: 52202 - DNA, 1928 bp, Artificial Sequence
  derived and/or modified sequence
ggtagacgcgatctgctggctactaccggccttccctggctgttaaaagcagatggtggctgaggctggttcaatgccggctgcctcctctgtgaagaagccatttggtctcagaagcaagatgggcaagtggtgccgccactgcttcgcctggtgcagggggagcggcaagagcaacgtgggcacttctggagaccacgacgattctgctatgaagacactcaggagcaagatgggcaagtggtgctgccactgcttcccctggtgcagggggagcggcaagagcaacgtgggcacttctggagaccacgacgattctgctatgaagacactcaggagcaagatgggcaagtggtgctgccactgcttcccctgctgcagggggagcggcaagagcaacgtgggcacttctggagaccacgacgactctgctatgaagacactcaggagcaagatgggcaagtggtgctgccactgcttcccctgctgcagggggagcggcaagaacaaagtgggcccttggggagactacgacgacagcgctttcatggagccgaggtaccacgtccgtcgagaagatctggacaagctccacagagctgcctggtggggtaaagtccccagaaaggatctcatcgtcatgctcaaggacactgacatgaacaagaaggacaagcaaaagaggactgctctacatctggcctctgccaatggaaattcagaagtagtaaaactcctgctggacagacgatgtcaacttaatatccttgacaacaaaaagaggacagctctgacaaaggccgtacaatgccaggaagatgaatgtgcgttaatgttgctggaacatggcactgatccgaatattccagatgagtatggaaataccgctctacactatgctatctacaatgaagataaattaatggccaaagcactgctcttatacggtgctgatatcgaatcaaaaaacaagcatggcctcacaccactgttacttggtgtacatgagcaaaaacagcaagtggtgaaatttttaatcaagaaaaaagcaaatttaaatgcactggatagatatggaagaactgctctcatacttgctgtatgttgtggatcggcaagtatagtcagccttctacttgagcaaaacattgatgtatcttctcaagatctatctggacagacggccagagagtatgctgtttctagtcgtcataatgtaatttgccagttactttctgactacaaagaaaaacagatactaaaagtctcttctgaaaacagcaatccagaacaagacttaaagctgacatcagaggaagagtcacaaaggcttaaaggaagtgaaaatagccagccagaggaaatgtctcaagaaccagaaataaataagggtggtgatagaaaggttgaagaagaaatgaagaagcacggaagtactcatatgggattcccagaaaacctgactaacggtgccactgctgacaatggtgatgatggattaattccaccaaggaaaagcagaacacctgaaagccagcaatttcctgacactgagaatgaacagtatcacagtgatgaacaaaatgatactcagaagcaactttctgaagaacagaacactggaatattacaagatgagattctgattcatgaagaaaagcagatagaagtggctgaaaatgaattctgagctttctcttagttataagaaagaaaaagacctcttgcatgaaaatagtacgttgcaggaagaaattgtcatgctaagactggaactagacataatgaaacatcagagccagctaagagaaaagaaatatttggaggaaattgaaagtgtggaaaaaaagaatgataatcttttaaagggtctacaactgaatgagctcaccatggatgatgatactgccgtgctcgtcattgacaac

SEQ ID NO: 52203 - DNA, 2124 bp, Artificial Sequence
  derived and/or modified sequence
ggtagacgcgatctgctggctactaccggccttccctggctgttaaaagcagatggtggctgaggctggttcaatgccggctgcctcctctgtgaagaagccatttggtctcagaagcaagatgggcaagtggtgccgccactgcttcgcctggtgcagggggagcggcaagagcaacgtgggcacttctggagaccacgacgattctgctatgaagacactcaggagcaagatgggcaagtggtgctgccactgcttcccctggtgcagggggagcggcaagagcaacgtgggcacttctggagaccacgacgattctgctatgaagacactcaggagcaagatgggcaagtggtgctgccactgcttcccctgctgcagggggagcggcaagagcaacgtgggcacttctggagaccacgacgactctgctatgaagacactcaggagcaagatgggcaagtggtgctgccactgcttcccctgctgcagggggagcggcaagaacaaagtgggcccttggggagactacgacgacagcgctttcatggagccgaggtaccacgtccgtcgagaagatctggacaagctccacagagctgcctggtggggtaaagtccccagaaaggatctcatcgtcatgctcaaggacactgacatgaacaagaaggacaagcaaaagaggactgctctacatctggcctctgccaatggaaattcagaagtagtaaaactcctgctggacagacgatgtcaacttaatatccttgacaacaaaaagaggacagctctgacaaaggccgtacaatgccaggaagatgaatgtgcgttaatgttgctggaacatggcactgatccgaatattccagatgagtatggaaataccgctctacactatgctatctacaatgaagattgagtctcactctgtttcccaggctggagtgcagtggtgtgatcacagctcactgcaacctcgacctcccgaagctcagatggtcctccaacctcaacctcagttgtttttttctttctttctttttatttttatttttatttttatttttttttagtagagatttggtttttgccatgtttctcaggctggtcttgaactcctgggctcaagcaattcatccccctcagcctcccaaagtgctaggattacaggtcatggcctcacaccactgttacttggtgtacatgagcaaaaacagcaagtggtgaaatttttaatcaagaaaaaagcaaatttaaatgcactggatagatatggaagaactgctctcatacttgctgtatgttgtggatcggcaagtatagtcagccttctacttgagcaaaacattgatgtatcttctcaagatctatctggacagacggccagagagtatgctgtttctagtcgtcataatgtaatttgccagttactttctgactacaaagaaaaacagatactaaaagtctcttctgaaaacagcaatccagaacaagacttaaagctgacatcagaggaagagtcacaaaggcttaaaggaagtgaaaatagccagccagaggaaatgtctcaagaaccagaaataaataagggtggtgatagaaaggttgaagaagaaatgaagaagcacggaagtactcatatgggattcccagaaaacctgactaacggtgccactgctgacaatggtgatgatggattaattccaccaaggaaaagcagaacacctgaaagccagcaatttcctgacactgagaatgaacagtatcacagtgatgaacaaaatgatactcagaagcaactttctgaagaacagaacactggaatattacaagatgagattctgattcatgaagaaaagcagatagaagtggctgaaaatgaattctgagctttctcttagttataagaaagaaaaagacctcttgcatgaaaatagtacgttgcaggaagaaattgtcatgctaagactggaactagacataatgaaacatcagagccagctaagagaaaagaaatatttggaggaaattgaaagtgtggaaaaaaagaatgataatcttttaaagggtctacaactgaatgagctcaccatggatgatgatactgccgtgctcgtcattgac

SEQ ID NO: 52204 - DNA, 1638 bp, Artificial Sequence
  derived and/or modified sequence
atggtagctgaggcgggatccatgccagcagcgagctccgtcaaaaaaccgtttggcctgcgctctaagatgggcaagtggtgcaggcactgcttcgcctggtgtcgcggatcaggcaagtccaatgtgggcacttccggagatcatgacgattccgctatgaaaactctccggagcaagatggggaagtggtgttgtcactgcttcccttggtgccgcggaagcggaaagagcaacgttggcacctcaggcgatcatgatgatagcgccatgaaaacgttgcgaagcaagatgggcaagtggtgttgtcactgcttcccctgttgtcgcggatctggcaagtccaacgtaggcactagtggagatcacgatgatagcgcaatgaaaaccctccgttccaaaatgggaaaatggtgctgccactgctttccttgctgtcgtggcagcggtaagaataaagtcggcccttggggtgattatgatgatagcgcattcatggagcctaggtaccacgtccggagagaagacctggacaagttacatcgggctgcatggtggggcaaggtgccccgaaaggatcttattgtgatgcttaaggacaccgatatgaataagaaagataagcaaaaacgcactgcgcttcaccttgcctcggcaaacggaaattccgaagtcgtgaagctcctattggatcgtcgctgccagttgaatatactggacaataaaaaacggactgcattgacaaaagccgtgcagtgtcaggaggatgaatgcgctcttatgctgctcgagcacggaaccgatccaaacatcccggatgagtacgggaacactgccttgcactacgccatttataatgaagataagctaatggcaaaggcacttttgctctacggggcagacatagaaagtaaaaacaagcatggactcacacctcttctccttggtgttcatgagcagaaacagcaggtggtcaagttcctgatcaagaagaaagccaaccttaatgctctcgatagatatggcaggacagctctgatccttgccgtgtgctgcgggtctgcaagtatcgtgtcgctccttctggagcagaacattgacgtctctagccaggacctaagtgggcagaccgccagagagtacgctgtgtcctcaagacacaatgtcatttgtcagttactgtcagactataaggaaaaacaaattctgaaagtttcatccgagaattccaatcccgagcaagaccttaaattaacaagtgaagaggaaagccaacgcctgaagggaagtgagaatagccaacccgaagagatgagtcaggaacctgagatcaacaaggggggagatcgaaaggtcgaggaggaaatgaaaaagcatggatctacgcacatgggattccccgaaaaccttacaaatggtgcaaccgccgataacggcgacgatgggctgattccacctcgcaaatcccgaacgccagaatcccaacaatttcccgacacggaaaacgaacagtatcatagtgacgaacaaaacgatacgcagaagcagttgtccgaggaacagaacactggtatccttcaggatgaaatcctgatccacgaagagaaacagatcgaagtggctgagaatgagttttag

SEQ ID NO: 52205 - DNA, 867 bp, Artificial Sequence
  derived and/or modified sequence
atggttgcagaggctggctctatgcccgctgcgagttcggtcaagaaaccctttggtctccggagcaagatgggtaagtggtgtcgtcattgtttcgcttggtgtcggggaagcggcaaatccaacgtcggaacatccggggatcacgatgactccgcaatgaagaccctgaggtcaaagatgggtaagtggtgttgccactgtttcccctggtgtagaggatccggtaagtcaaatgttggcacttccggggatcatgacgattctgccatgaagacgcttcgaagcaaaatggggaaatggtgctgccattgtttcccttgttgtcgaggcagcggaaagtctaatgtagggacatctggagatcacgatgatagtgcgatgaaaaccctgagaagcaaaatgggcaaatggtgttgccactgttttccctgctgccggggatccgggaagaataaggtgggcccttggggcgactatgacgacagcgccttcatggaaccgagataccatgtgagaagggaggacttggacaaacttcatagggcagcatggtgggggaaagtcccaagaaaagacttgattgtcatgcttaaggatactgacatgaacaagaaagacaagcagaagcgaaccgccctgcacctggcctctgccaatggcaacagcgaagtcgtgaaattacttctggaccggcgatgccagctcaatattcttgacaacaagaagcgaaccgcgctcacaaaagccgtgcagtgtcaggaggatgaatgcgccctcatgctcttagaacatggaacggatcccaacatccctgacgaatatggaaacaccgcccttcattacgctatctacaatgaggattag

SEQ ID NO: 52206 - DNA, 1638 bp, Artificial Sequence
  derived and/or modified sequence
atggtggccgaggccggcagcatgcccgccgccagcagcgtgaagaagcccttcggcctgagaagcaagatgggcaagtggtgcagacactgcttcgcctggtgcagaggcagcggcaagagcaacgtgggcaccagcggcgaccacgacgacagcgccatgaagaccctgagaagcaagatgggcaagtggtgctgccactgcttcccctggtgcagaggcagcggcaagagcaacgtgggcaccagcggcgaccacgacgacagcgccatgaagaccctgagaagcaagatgggcaagtggtgctgccactgcttcccctgctgcagaggcagcggcaagagcaacgtgggcaccagcggcgaccacgacgacagcgccatgaagaccctgagaagcaagatgggcaagtggtgctgccactgcttcccctgctgcagaggcagcggcaagaacaaggtgggcccctggggcgactacgacgacagcgccttcatggagcccagataccacgtgagaagagaggacctggacaagctgcacagagccgcctggtggggcaaggtgcccagaaaggacctgatcgtgatgctgaaggacaccgacatgaacaagaaggacaagcagaagagaaccgccctgcacctggccagcgccaacggcaacagcgaggtggtgaagctgctgctggacagaagatgccagctgaacatcctggacaacaagaagagaaccgccctgaccaaggccgtgcagtgccaggaggacgagtgcgccctgatgctgctggagcacggcaccgaccccaacatccccgacgagtacggcaacaccgccctgcactacgccatctacaacgaggacaagctgatggccaaggccctgctgctgtacggcgccgacatcgagagcaagaacaagcacggcctgacccccctgctgctgggcgtgcacgagcagaagcagcaggtggtgaagttcctgatcaagaagaaggccaacctgaacgccctggacagatacggcagaaccgccctgatcctggccgtgtgctgcggcagcgccagcatcgtgagcctgctgctggagcagaacatcgacgtgagcagccaggacctgagcggccagaccgccagagagtacgccgtgagcagcagacacaacgtgatctgccagctgctgagcgactacaaggagaagcagatcctgaaggtgagcagcgagaacagcaaccccgagcaggacctgaagctgaccagcgaggaggagagccagagactgaagggcagcgagaacagccagcccgaggagatgagccaggagcccgagatcaacaagggcggcgacagaaaggtggaggaggagatgaagaagcacggcagcacccacatgggcttccccgagaacctgaccaacggcgccaccgccgacaacggcgacgacggcctgatcccccccagaaagagcagaacccccgagagccagcagttccccgacaccgagaacgagcagtaccacagcgacgagcagaacgacacccagaagcagctgagcgaggagcagaacaccggcatcctgcaggacgagatcctgatccacgaggagaagcagatcgaggtggccgagaacgagttctag

SEQ ID NO: 52207 - DNA, 867 bp, Artificial Sequence
  derived and/or modified sequence
atggtggccgaggccggcagcatgcccgccgccagcagcgtgaagaagcccttcggcctgagaagcaagatgggcaagtggtgcagacactgcttcgcctggtgcagaggcagcggcaagagcaacgtgggcaccagcggcgaccacgacgacagcgccatgaagaccctgagaagcaagatgggcaagtggtgctgccactgcttcccctggtgcagaggcagcggcaagagcaacgtgggcaccagcggcgaccacgacgacagcgccatgaagaccctgagaagcaagatgggcaagtggtgctgccactgcttcccctgctgcagaggcagcggcaagagcaacgtgggcaccagcggcgaccacgacgacagcgccatgaagaccctgagaagcaagatgggcaagtggtgctgccactgcttcccctgctgcagaggcagcggcaagaacaaggtgggcccctggggcgactacgacgacagcgccttcatggagcccagataccacgtgagaagagaggacctggacaagctgcacagagccgcctggtggggcaaggtgcccagaaaggacctgatcgtgatgctgaaggacaccgacatgaacaagaaggacaagcagaagagaaccgccctgcacctggccagcgccaacggcaacagcgaggtggtgaagctgctgctggacagaagatgccagctgaacatcctggacaacaagaagagaaccgccctgaccaaggccgtgcagtgccaggaggacgagtgcgccctgatgctgctggagcacggcaccgaccccaacatccccgacgagtacggcaacaccgccctgcactacgccatctacaacgaggactag

SEQ ID NO: 52208 - protein, 317 aa, Artificial Sequence
  derived and/or modified sequence
MTMETQMSQNVCPRNLWLLQPLTVLLLLASADSQAAAPPKAVLKLEPPWINVLQEDSVTLTCQGARSPESDSIQWFHNGNLIPTHTQPSYRFKANNNDSGEYTCQTGQTSLSDPVHLTVLSEWLVLQTPHLEFQEGETIMLRCHSWKDKPLVKVTFFQNGKSQKFSHLDPTFSIPQANHSHSGDYHCTGNIGYTLFSSKPVTITVQVPSMGSSSPMGIIVAVVIATAVAAIVAAVVALIYCRKKRISANSTDPVKAAQFEPPGRQMIAIRKRQLEETNNDYETADGGYMTLNPRAPTDDDKNIYLTLPPNDHVNSNN

SEQ ID NO: 52209 - DNA, 2412 bp, Artificial Sequence
  derived and/or modified sequence
gtctcttaaaacccactggacgttggcacagtgctgggatgactatggagacccaaatgtctcagaatgtatgtcccagaaacctgtggctgcttcaaccattgacagttttgctgctgctggcttctgcagacagtcaagctgcagctcccccaaaggctgtgctgaaacttgagcccccgtggatcaacgtgctccaggaggactctgtgactctgacatgccagggggctcgcagccctgagagcgactccattcagtggttccacaatgggaatctcattcccacccacacgcagcccagctacaggttcaaggccaacaacaatgacagcggggagtacacgtgccagactggccagaccagcctcagcgaccctgtgcatctgactgtgctttccgaatggctggtgctccagacccctcacctggagttccaggagggagaaaccatcatgctgaggtgccacagctggaaggacaagcctctggtcaaggtcacattcttccagaatggaaaatcccagaaattctcccatttggatcccaccttctccatcccacaagcaaaccacagtcacagtggtgattaccactgcacaggaaacataggctacacgctgttctcatccaagcctgtgaccatcactgtccaagtgcccagcatgggcagctcttcaccaatggggatcattgtggctgtggtcattgcgactgctgtagcagccattgttgctgctgtagtggccttgatctactgcaggaaaaagcggatttcagccaattccactgatcctgtgaaggctgcccaatttgagccacctggacgtcaaatgattgccatcagaaagagacaacttgaagaaaccaacaatgactatgaaacagctgacggcggctacatgactctgaaccccagggcacctactgacgatgataaaaacatctacctgactcttcctcccaacgaccatgtcaacagtaataactaaagagtaacgttatgccatgtggtcatactctcagcttgctgagtggatgacaaaaagaggggaattgttaaaggaaaatttaaatggagactggaaaaatcctgagcaaacaaaaccacctggcccttagaaatagctttaactttgcttaaactacaaacacaagcaaaacttcacggggtcatactacatacaagcataagcaaaacttaacttggatcatttctggtaaatgcttatgttagaaataagacaaccccagccaatcacaagcagcctactaacatataattaggtgactagggactttctaagaagatacctacccccaaaaaacaattatgtaattgaaaaccaaccgattgcctttattttgcttccacattttcccaataaatacttgcctgtgacattttgccactggaacactaaacttcatgaattgcgcctcagatttttcctttaacatcttttttttttttgacagagtctcaatctgttacccaggctggagtgcagtggtgctatcttggctcactgcaaacccgcctcccaggtttaagcgattctcatgcctcagcctcccagtagctgggattagaggcatgtgccatcatacccagctaatttttgtattttttattttttttttttagtagagacagggtttcgcaatgttggccaggccgatctcgaacttctggcctctagcgatctgcccgcctcggcctcccaaagtgctgggatgaccagcatcagccccaatgtccagcctctttaacatcttctttcctatgccctctctgtggatccctactgctggtttctgccttctccatgctgagaacaaaatcacctattcactgcttatgcagtcggaagctccagaagaacaaagagcccaattaccagaaccacattaagtctccattgttttgccttgggatttgagaagagaattagagaggtgaggatctggtatttcctggactaaattccccttggggaagacgaagggatgctgcagttccaaaagagaaggactcttccagagtcatctacctgagtcccaaagctccctgtcctgaaagccacagacaatatggtcccaaatgactgactgcaccttctgtgcctcagccgttcttgacatcaagaatcttctgttccacatccacacagccaatacaattagtcaaaccactgttattaacagatgtagcaacatgagaaacgcttatgttacaggttacatgagagcaatcatgtaagtctatatgacttcagaaatgttaaaatagactaacctctaacaacaaattaaaagtgattgtttcaaggtgatgcaattattgatgacctattttatttttctataatgatcatatattacctttgtaataaaacattataaccaaaa

SEQ ID NO: 52210 - DNA, 954 bp, Artificial Sequence
  derived and/or modified sequence
atgactatggagacacaaatgagtcagaatgtgtgcccacggaacctttggctattgcagcccctgactgtccttctattgctagccagcgcggactctcaggcagcagccccacctaaggccgtgctgaagctggaaccgccttggataaacgtgctgcaggaagactctgttacacttacttgccagggcgctagaagccctgaatccgactccattcagtggttccataacggcaacttaatcccaactcatacacagcctagttatcggtttaaggctaataataatgactcaggcgagtatacctgccagaccgggcaaacaagcttgagcgaccccgtgcaccttaccgttcttagcgagtggctcgttttgcaaacccctcaccttgagtttcaagagggtgagaccattatgctccggtgccatagctggaaggataagcctctggttaaagtcacattttttcagaacggtaaaagccagaagttttctcacttggatcctacattcagcatcccccaagccaaccattcccactccggcgactatcactgtactgggaacatcggttacacactgttttcttccaagcctgttaccattaccgtgcaagtgcctagcatgggatcatcctcccccatgggtataatcgtagctgttgtgatagcaaccgctgttgccgcaattgttgccgcagtggtggccctgatatattgtcgaaagaagaggattagcgccaactcaactgatcccgtgaaggctgcccagtttgagccccctgggcgacagatgattgccatacgcaagcggcagctggaagaaaccaataacgactacgagaccgcagacggaggttacatgacgctcaatcccagagctccaactgacgatgacaagaacatttacctcacgttgccaccgaatgaccatgtcaactccaacaactag

SEQ ID NO: 52211 - DNA, 954 bp, Artificial Sequence
  derived and/or modified sequence
atgaccatggagacccagatgagccagaatgtgtgccccaggaacctgtggctgctgcagcccctgactgtgctgctgctgctggccagcgctgacagccaggccgccgccccacccaaggctgtgctgaagctggagcccccctggatcaacgtgctgcaggaggacagcgtgaccctgacctgccagggcgcccggagccctgagagtgacagcatccagtggttccacaacggcaacctgatccccacccacacccagcccagctaccgcttcaaggccaacaacaatgattctggagagtacacctgccagacaggccagaccagcctgagtgaccctgtgcacctgactgtgctgtctgagtggctggtgctgcagaccccccacctggagttccaggagggggagaccatcatgctgcgctgccacagctggaaggacaagcccctggtgaaggtgaccttcttccagaatggcaagagccagaagttcagccacctggaccccaccttcagcatcccccaggccaaccacagccacagcggggactaccactgcaccggcaacatcggctacaccctcttcagcagcaagcctgtgaccatcaccgtgcaggtgcccagcatgggcagcagcagccccatgggcatcatcgtggccgtggtgattgccacagctgtggccgccatcgtggccgctgtggtggccctgatctactgcaggaagaagaggatcagcgccaacagcacagatcctgtgaaggccgcccagtttgagcccccaggccggcagatgattgccatcaggaagaggcagctggaggagaccaacaatgactatgaaacagcagatggcggctacatgaccctgaacccccgggcccccacagatgatgacaagaacatctacctgaccctgcccccaaatgaccacgtgaacagcaacaactag

SEQ ID NO: 52212 - DNA, 954 bp, Artificial Sequence
  derived and/or modified sequence
atgaccatggagacccagatgagccagaacgtgtgcccccggaacctgtggctcctccaacctctgacagtgttgctcctgcttgcatctgccgattctcaggcagcagctccaccgaaagctgtgctgaagcttgagcccccttggataaatgtgctgcaggaggactcagtaaccctgacttgccagggtgccaggagtcccgaatcagattctatccaatggtttcacaatgggaatttaatacccacccatacccaaccttcctatcggttcaaggccaataataatgatagcggagagtacacctgtcagacaggccagacgagtctgtcagatcctgtgcacctgaccgtcttgtctgagtggctggttctgcaaacgccacatttggaatttcaggagggagaaacaatcatgctgcggtgtcacagttggaaggataagcccctcgttaaggtcactttttttcagaatggtaaaagccaaaaattcagtcatttagatcctaccttttctattccacaggcaaatcattcacattcgggagattatcattgtactgggaacatcggctacacattgtttagcagcaaaccagtgactatcacagtgcaagtccccagcatgggatcgtcttccccaatgggtattatcgtggctgtggtgatagccacagctgtagctgctattgttgccgccgtggtagccctgatctactgtcgaaagaagcgaatctccgcaaatagcaccgaccccgtcaaggctgctcagtttgagcctcctggccgtcagatgatcgctatccgcaaacgccaactagaagaaaccaataatgattatgagactgccgatggaggttacatgacgcttaatccgagagcaccaactgatgatgataaaaacatctatcttacgttgcctcccaacgatcatgtcaacagcaacaactag

SEQ ID NO: 52213 - DNA, 954 bp, Artificial Sequence
  derived and/or modified sequence
atgactatggaaacccagatgtcacaaaatgtatgccccaggaatctgtggctgttacaacctctgacagttctgttgctcctggcctccgcagattctcaggccgctgccccacccaaggccgtcctgaagctggaaccaccctggatcaacgtgctccaggaggatagcgttaccctgacatgtcagggcgctcgatctcctgaatccgactctatccaatggtttcacaatggaaatcttatcccaactcatacccagccttcttatcggttcaaggcaaacaacaacgactcaggcgagtatacttgccaaacaggacaaacgagtcttagtgatccagtgcatctcaccgtgctgagtgagtggttagtcctgcaaacgccacatttagaattccaggagggggaaacgatcatgctcagatgccattcatggaaggataaaccactagttaaggtgaccttcttccagaatggaaagtctcagaaattttcgcacctcgatcccacattcagcattccccaggccaatcatagccattccggcgattaccattgcactgggaacattggatacactctcttctcgtccaaacccgtcaccatcactgtccaagtcccctccatgggctcttcatcacctatgggcatcatcgtcgccgtggtaatcgctaccgccgttgctgcaatcgttgcagccgtggtggcactgatttattgtcgtaagaaaagaatatcagcaaacagcacagaccccgtcaaagccgcacagtttgaacctccaggcaggcagatgatagccatccgcaaacgccagcttgaagaaaccaataatgattacgaaaccgccgatgggggatacatgacccttaatcccagagccccaaccgacgatgacaagaatatctatctgaccctccctccaaatgatcatgtaaactctaacaactag

SEQ ID NO: 52214 - DNA, 954 bp, Artificial Sequence
  derived and/or modified sequence
atgaccatggagacccagatgagccagaacgtgtgccccagaaacctgtggctgctgcagcccctgaccgtgctgctgctgctggccagcgccgacagccaggccgccgccccccccaaggccgtgctgaagctggagcccccctggatcaacgtgctgcaggaggacagcgtgaccctgacctgccagggcgccagaagccccgagagcgacagcatccagtggttccacaacggcaacctgatccccacccacacccagcccagctacagattcaaggccaacaacaacgacagcggcgagtacacctgccagaccggccagaccagcctgagcgaccccgtgcacctgaccgtgctgagcgagtggctggtgctgcagaccccccacctggagttccaggagggcgagaccatcatgctgagatgccacagctggaaggacaagcccctggtgaaggtgaccttcttccagaacggcaagagccagaagttcagccacctggaccccaccttcagcatcccccaggccaaccacagccacagcggcgactaccactgcaccggcaacatcggctacaccctgttcagcagcaagcccgtgaccatcaccgtgcaggtgcccagcatgggcagcagcagccccatgggcatcatcgtggccgtggtgatcgccaccgccgtggccgccatcgtggccgccgtggtggccctgatctactgcagaaagaagagaatcagcgccaacagcaccgaccccgtgaaggccgcccagttcgagccccccggcagacagatgatcgccatcagaaagagacagctggaggagaccaacaacgactacgagaccgccgacggcggctacatgaccctgaaccccagagcccccaccgacgacgacaagaacatctacctgaccctgccccccaacgaccacgtgaacagcaacaactag

SEQ ID NO: 52215 - protein, 264 aa, Artificial Sequence
  derived and/or modified sequence
MNIILEILLLLITIIYSYLESLVKFFIPQRRKSVAGEIVLITGAGHGIGRQTTYEFAKRQSILVLWDINKVKKEVGDVTIVVNNAGTVYPADLLSTKDEEITKTFEVNILGHFWITKALLPSMMERNHGHIVTVASVCGHEGIPYLIPYCSSKFAAVGFHRGLTSELQALGKTGIKTSCLCPVFVNTGFTKNPSTRLWPVLETDEVVRSLIDGILTNKKMIFVPSYINIFLRLQKFLPERASAILNRMQNIQFEAVVGHKIKMK

SEQ ID NO: 52216 - DNA, 795 bp, Artificial Sequence
  derived and/or modified sequence
atgaacatcatcttggagatattactcctgctgattacaatcatctacagttatctggagtccctggtgaaattcttcataccacagaggagaaagagtgtagctggggagatcgttctcattacaggcgctggacacggaatcggtcgtcagaccacgtacgagttcgcaaagcgccaaagcatccttgtgctctgggacataaacaaggtaaagaaagaagtcggcgatgttaccattgtcgtcaacaatgctgggaccgtttaccccgccgacctactgagcactaaggacgaagaaattaccaagacgtttgaagtcaatattctcggacatttttggatcacaaaggctctgctgccctcaatgatggagagaaaccacggtcacatagtgacggtggcctcagtttgtggccacgagggtatcccttatctgatcccatactgctcgagtaaatttgctgctgtgggctttcacaggggactgacttcagaactgcaggccctcggcaagaccggaattaaaacatcatgcctctgtccagtgttcgtgaacaccggttttacaaaaaatcccagcaccaggctctggccagtgctcgagacggatgaggtggtccgatctctgatagatggcatcctgacgaataaaaagatgatctttgtgcccagctacatcaacatttttctgaggttacagaaattcctgcccgagcgggcctcggcaatactcaatcggatgcagaacatacagttcgaggcagtggtaggacacaaaatcaaaatgaagtag

SEQ ID NO: 52217 - DNA, 2269 bp, Artificial Sequence
  derived and/or modified sequence
gactacacaaggactgaaccagaaggaagaggacagagcaaagccatgaacatcatcctagaaatccttctgcttctgatcaccatcatctactcctacttggagtcgttggtgaagtttttcattcctcagaggagaaaatctgtggctggggagattgttctcattactggagctgggcatggaataggcaggcagactacttatgaatttgcaaaacgacagagcatattggttctgtgggatattaataaggtgaagaaagaagtgggtgatgtaacaatcgtggtgaataatgctgggacagtatatccagccgatcttctcagcaccaaggatgaagagattaccaagacatttgaggtcaacatcctaggacatttttggatcacaaaagcacttcttccatcgatgatggagagaaatcatggccacatcgtcacagtggcttcagtgtgcggccacgaagggattccttacctcatcccatattgttccagcaaatttgccgctgttggctttcacagaggtctgacatcagaacttcaggccttgggaaaaactggtatcaaaacctcatgtctctgcccagtttttgtgaatactgggttcaccaaaaatccaagcacaagattatggcctgtattggagacagatgaagtcgtaagaagtctgatagatggaatacttaccaataagaaaatgatttttgttccatcgtatatcaatatctttctgagactacagaagtttcttcctgaacgcgcctcagcgattttaaatcgtatgcagaatattcaatttgaagcagtggttggccacaaaatcaaaatgaaatgaataaataagctccagccagagatgtatgcatgataatgatatgaatagtttcgaatcaatgctgcaaagctttatttcacattttttcagtcctgataatattaaaaacattggtttggcactagcagcagtcaaacgaacaagattaattacctgtcttcctgtttctcaagaatatttacgtagtttttcataggtctgtttttcctttcatgcctcttaaaaacttctgtgcttacataaacatacttaaaaggttttctttaagatattttatttttccatttaaaggtggacaaaagctacctccctaaaagtaaatacaaagagaacttatttacacagggaaggtttaagactgttcaagtagcattccaatctgtagccatgccacagaatatcaacaagaacacagaatgagtgcacagctaagagatcaagtttcagcaggcagctttatctcaacctggacatattttaagattcagcatttgaaagatttccctagcctcttcctttttcattagcccaaaacggtgcaactctattctggactttattacttgattctgtcttctgtataactctgaagtccaccaaaagtggaccctctatatttcctccctttttatagtcttataagatacattatgaaaggtgaccgactctattttaaatctcagaattttaagttctagccccatgataacctttttctttgtaatttatgctttcatatatccttggtcccagagatgtttagacaattttaggctcaaaaattaaagctaacacaggaaaaggaactgtactggctattacataagaaacaatggacccaagagaagaaaaggaagaaagaaaggttttttggtttttgttttgttttgttttgttttttgtttttttgagatggagtctcactctttcgcccaggctggagtgcagtggtatgatctcagctcactgcaagctccacctcccgggttcacgccattctcctgcctcagcctcctgagtagctgggactacaggcgcccgccaccacacccggctaattttttgtattttttgtagagacggggtttcaccatgttagccaagatggtctcgatctcctgacctcgtgatccacctgcctcggcctcccaaagtgctgggattacgggtgtgagccaccgtgcccagcctttttttttttaatagaaaaaataatccgactcccactacatcaagactaatcttgttttgtgtgtttttcacatgtattatagaatgcttttgcatggactatcctcttgtttttattaaaaacaaatgatttttttaaaagtcacaaaaacaattcactaaaaataaatatgtcattgtgctttaaaaaaataacctcttgtagttataaaataaaacgtttgacttctaaactctg

SEQ ID NO: 52218 - DNA, 795 bp, Artificial Sequence
  derived and/or modified sequence
atgaacatcatcctggagatcctgctgctgctgatcaccatcatctacagctacctggagagcctggtgaagttcttcatcccccagaggaggaagtctgtggccggggagatcgtgctgatcaccggggccggccacggcatcggccggcagaccacctatgaatttgccaagaggcagagcatcctggtgctgtgggacatcaacaaggtgaagaaggaggtgggagatgtgaccatcgtggtgaacaatgccggcaccgtgtacccagctgacctgctgagcaccaaggatgaggagatcaccaagacctttgaggtgaacatcctgggccacttctggatcaccaaggccctgctgcccagcatgatggagaggaaccacggccacatcgtgacagtggcctctgtgtgtggccacgagggcatcccctacctgatcccctactgcagcagcaagtttgctgctgtgggcttccaccggggcctgaccagcgagctgcaggccctgggcaagacaggcatcaagaccagctgcctgtgccctgtgtttgtgaacacaggcttcaccaagaaccccagcacccggctgtggcctgtgctggagacagatgaggtggtgcgcagcctgattgatggcatcctgaccaacaagaagatgatctttgtgcccagctacatcaacatcttcctgcggctgcagaagttcctgcctgagcgggccagcgccatcctgaacaggatgcagaacatccagtttgaagctgtggtgggccacaagatcaagatgaagtag

SEQ ID NO: 52219 - DNA, 795 bp, Artificial Sequence
  derived and/or modified sequence
atgaacatcatcctggagatcctgctgctgctgatcaccatcatctactcctatctcgaatccttggttaagttcttcattcctcagcgccgcaagtccgttgctggcgaaattgttctcatcaccggtgctgggcatggcatcggtcgccagaccacctatgagtttgcaaaaaggcagagtatcctagttctctgggacattaataaagttaagaaagaggtcggggacgtcaccatcgtggtgaacaatgcaggaactgtgtaccctgctgacctcctgtccactaaggacgaagagatcactaagacttttgaggtcaacatcctcgggcacttttggatcactaaggccttgcttccctccatgatggagagaaaccacggccacatcgtcacagtggcgagtgtgtgtgggcacgagggtatcccatatctgatcccctactgttctagtaagttcgccgctgtgggatttcatcgcggtctaacaagtgagctccaagccctggggaaaacaggtattaaaactagctgcttgtgccctgtctttgtgaatactggctttacgaagaacccgagcacccgcctctggcccgtgctcgaaacagacgaagtggtgcgtagcctaatcgacggcatcctgacaaataaaaaaatgattttcgtcccttcttatatcaatatttttttaaggttgcaaaaattcttgcccgaaagggcatccgccattttaaacaggatgcagaatatccagtttgaagcagtagtgggccataagattaagatgaaatag

SEQ ID NO: 52220 - DNA, 795 bp, Artificial Sequence
  derived and/or modified sequence
atgaacattatcctcgagatattgctcctactgattactatcatctactcctatctcgagagcctagtgaaatttttcattccacaaaggagaaagtcagtggcaggggagatcgttctgattactggagcaggacatggtattgggcgacagaccacctacgagttcgctaaacgacaatccatccttgtactttgggatatcaacaaggtaaagaaagaagttggggatgtgactattgtcgtgaataacgccggtacagtctaccccgcagacctcctttccaccaaagatgaggaaatcaccaagacctttgaggttaacattctgggtcatttctggattacaaaggctttactgccctcaatgatggagaggaaccatggtcacatcgtcacggtcgcttctgtctgtgggcatgaaggcatcccatatttgattccatactgtagtagcaaattcgccgctgtagggtttcatagagggctgacctccgagctccaggctcttggaaaaacagggattaaaacttcctgtctctgtccggtgtttgtgaacaccgggttcaccaagaatccctctacccgtctttggccagtgctggaaaccgatgaggtggtcagatcccttatagatggcatactcacaaacaaaaagatgatttttgtcccatcctacatcaatatctttctgcggttgcagaagtttttgcctgagagggcttccgctatcctgaatcgtatgcagaacattcaattcgaagccgtggtgggtcataaaatcaagatgaagtag

SEQ ID NO: 52221 - DNA, 795 bp, Artificial Sequence
  derived and/or modified sequence
atgaacatcatcctggagatcctgctgctgctgatcaccatcatctacagctacctggagagcctggtgaagttcttcatcccccagagaagaaagagcgtggccggcgagatcgtgctgatcaccggcgccggccacggcatcggcagacagaccacctacgagttcgccaagagacagagcatcctggtgctgtgggacatcaacaaggtgaagaaggaggtgggcgacgtgaccatcgtggtgaacaacgccggcaccgtgtaccccgccgacctgctgagcaccaaggacgaggagatcaccaagaccttcgaggtgaacatcctgggccacttctggatcaccaaggccctgctgcccagcatgatggagagaaaccacggccacatcgtgaccgtggccagcgtgtgcggccacgagggcatcccctacctgatcccctactgcagcagcaagttcgccgccgtgggcttccacagaggcctgaccagcgagctgcaggccctgggcaagaccggcatcaagaccagctgcctgtgccccgtgttcgtgaacaccggcttcaccaagaaccccagcaccagactgtggcccgtgctggagaccgacgaggtggtgagaagcctgatcgacggcatcctgaccaacaagaagatgatcttcgtgcccagctacatcaacatcttcctgagactgcagaagttcctgcccgagagagccagcgccatcctgaacagaatgcagaacatccagttcgaggccgtggtgggccacaagatcaagatgaagtag

SEQ ID NO: 52222 - DNA, 927 bp, Artificial Sequence
  derived and/or modified sequence
atgatccacgacgcccagatggactactacggcaccagactggccacctgcagcagcgacagaagcgtgaagatcttcgacgtgagaaacggcggccagatcctgatcgccgacctgagaggccacgagggccccgtgtggcaggtggcctgggcccaccccatgtacggcaacatcctggccagctgcagctacgacagaaaggtgatcatctggagagaggagaacggcacctgggagaagagccacgagcacgccggccacgacagcagcgtgaacagcgtgtgctgggccccccacgactacggcctgatcctggcctgcggcagcagcgacggcgccatcagcctgctgacctacaccggcgagggccagtgggaggtgaagaagatcaacaacgcccacaccatcggctgcaacgccgtgagctgggcccccgccgtggtgcccggcagcctgatcgaccaccccagcggccagaagcccaactacatcaagagattcgccagcggcggctgcgacaacctgatcaagctgtggaaggaggaggaggacggccagtggaaggaggagcagaagctggaggcccacagcgactgggtgagagacgtggcctgggcccccagcatcggcctgcccaccagcaccatcgccagctgcagccaggacggcagagtgttcatctggacctgcgacgacgccagcagcaacacctggagccccaagctgctgcacaagttcaacgacgtggtgtggcacgtgagctggagcatcaccgccaacatcctggccgtgagcggcggcgacaacaaggtgaccctgtggaaggagagcgtggacggccagtgggtgtgcatcagcgacgtgaacaagggccagggcagcgtgagcgccagcgtgaccgagggccagcagaacgagcagtag

SEQ ID NO: 52223 - DNA, 927 bp, Artificial Sequence
  derived and/or modified sequence
atgattcacgacgcccaaatggactactatggaactcgtctggctacctgtagttccgaccggtccgttaagatcttcgatgtgcgcaacggaggccagatactgatcgccgacttgaggggccacgagggacccgtgtggcaagtagcatgggcccacccaatgtacggcaacatcctagcttcatgtagctacgatcgcaaagtcatcatctggagagaagagaatgggacgtgggaaaagtcccatgagcatgcagggcatgactctagcgtcaacagcgtgtgctgggctcctcatgactatggtctgattctcgcatgcggctcgtccgatggagccatcagcttactcacctacactggagaggggcagtgggaggtgaagaaaatcaacaatgcccacaccataggctgcaatgcggtgagttgggcgcctgctgtcgtgcccggcagtttgattgatcatccaagcggccagaagccaaactacatcaaacgatttgcttctggaggctgcgacaacctgattaagctgtggaaagaagaagaggatggccagtggaaagaagagcagaagttggaagcgcacagcgactgggtgcgcgacgttgcctgggcccctagcatcgggctgccaacctcaaccatagcttcttgctcacaggatggacgggtcttcatatggacctgcgatgacgcttcttccaatacctggagccccaagcttctgcacaaattcaacgacgtggtctggcacgtaagctggtccatcaccgcaaacattctcgccgtgtcgggaggtgacaacaaagtgactctttggaaggagagcgtagatggccagtgggtgtgtatcagcgatgtaaacaagggtcagggctccgtgtctgccagtgtaacagaaggacaacagaacgagcagtag

SEQ ID NO: 52224 - DNA, 927 bp, Artificial Sequence
  derived and/or modified sequence
atgattcatgatgcccagatggactactacggcacccggctggccacctgcagcagtgacagatctgtgaagatctttgatgtgagaaatggaggccagatcctgattgctgacctgcggggccacgagggccctgtgtggcaggtggcctgggcccaccccatgtatggcaacatcctggccagctgcagctatgacaggaaggtgatcatctggagagaagaaaatggcacctgggagaagagccatgaacatgctggccatgacagctctgtgaacagcgtgtgctgggcccctcatgactatggcctcatcctggcctgtggcagcagtgatggagccatcagcctgctgacctacacaggagagggccagtgggaggtgaagaagatcaacaatgcccacaccatcggctgcaatgctgtgtcctgggccccagctgtggtgcccggcagcctgattgaccaccccagcggccagaagcccaactacatcaagagatttgccagcggcggctgtgacaacctgatcaagctgtggaaggaggaggaggatggccagtggaaggaggagcagaagctggaggcccacagcgactgggtgagagatgtggcctgggcccccagcatcggcctgcccaccagcaccatcgccagctgcagccaggacggccgggtcttcatctggacctgtgatgatgccagcagcaacacctggagccccaagctgctgcacaagttcaatgatgtggtgtggcacgtgtcctggagcatcacagccaacatcctggccgtgtctggaggagacaacaaggtgaccctgtggaaggagagcgtggatggccagtgggtgtgcatcagtgatgtgaacaagggccagggctctgtgtctgcctctgtgacagagggccagcagaatgagcagtag

SEQ ID NO: 52225 - DNA, 927 bp, Artificial Sequence
  derived and/or modified sequence
atgatccacgacgcccagatggactactacggcacccggctggccacctgctccagcgacaggagcgtcaaaatatttgatgtcagaaatggcgggcagatcctgatcgccgacctacggggccatgagggcccagtttggcaggttgcctgggctcaccccatgtacgggaatatcctggcttcatgttcgtacgacagaaaggttatcatatggcgcgaagaaaatgggacgtgggagaagtcgcacgagcacgcaggccacgattcgtctgtcaatagtgtgtgctgggctccacatgactacggactgatcctagcctgtggctcttccgacggcgctatttctctgttaacttataccggggaaggtcaatgggaggttaagaagatcaacaatgctcacaccatcggatgcaatgccgtcagctgggcacctgcagtggtgccaggatccctgatcgaccatcccagtggtcagaagcccaattacattaagagattcgctagcggcggatgtgacaacctaattaagttgtggaaggaggaagaggacggacagtggaaggaagagcagaaactggaggcccacagtgactgggtcagagacgtcgcttgggccccgtcgattgggttgcctaccagtactatcgcatcttgcagtcaggacgggcgtgtctttatttggacctgcgatgatgcttcatctaacacatggtcaccaaaacttttgcataagtttaatgatgtggtatggcacgtgtcctggtccatcacagccaacattctggccgtgtctggcggagacaacaaggtgactctatggaaggagtccgtggatggacagtgggtctgtatttccgacgttaacaaggggcagggcagtgtctcagcttcagtcacggaaggtcagcagaacgagcaatag

SEQ ID NO: 52226 - DNA, 927 bp, Artificial Sequence
  derived and/or modified sequence
atgattcacgacgcccagatggattactatggcactcgcctcgccacatgctcatccgatcgatcagtgaaaatctttgatgtgaggaacggagggcagattttaatcgccgatctgagaggtcacgagggacctgtctggcaagtggcctgggcccacccaatgtacgggaatatcctggccagctgtagttacgacaggaaagtcattatctggcgggaggagaatggtacctgggagaaatcccatgaacatgctggccacgactcatccgtcaacagcgtgtgttgggccccacacgactacggtctcatcctagcttgtggaagctcggatggcgctatatccctgctgacatacactggcgaaggacagtgggaagtgaaaaagattaataatgcccatactattggttgcaatgcagtctcctgggccccagcagttgtgcctggatcactcattgaccacccttccggacagaaaccaaactacatcaaacggttcgcaagcggcggatgtgacaacctcatcaaactttggaaagaagaggaagacggccaatggaaagaagagcaaaagctggaggcccactctgactgggtcagggatgtggcctgggccccaagtattggcttaccaacaagcacaattgcgagctgttctcaagacggcagggtattcatctggacatgcgatgacgcatcctccaatacatggtccccaaaactcctgcacaagttcaatgatgttgtttggcatgtgagttggagcataacagccaacatcctagctgtaagcgggggtgacaataaagtgaccctctggaaggaaagcgtggacggccaatgggtgtgcatttctgacgtgaacaagggtcagggatctgtcagcgcgtccgtaaccgaaggacagcagaacgaacagtag

SEQ ID NO: 52227 - protein, 595 aa, Artificial Sequence
  derived and/or modified sequence
MLKPGDPGGSAFLKVDPAYLQHWQQLFPHGGAGPLKGSGAAGLLSAPQPLQPPPPPPPPERAEPPPDSLRPRPASLSSASSTPASSSTSASSASSCAAAAAAAALAGLSALPVSQLPVFAPLAAAAVAAEPLPPKELCLGATSGPGPVKCGGGGGGGGEGRGAPRFRCSAEELDYYLYGQQRMEIIPLNQHTSDPNNRCDMCADNRNGECPMHGPLHSLRRLVGTSSAAAAAPPPELPEWLRDLPREVCLCTSTVPGLAYGICAAQRIQQGTWIGPFQGVLLPPEKVQAGAVRNTQHLWEIYDQDGTLQHFIDGGEPSKSSWMRYIRCARHCGEQNLTVVQYRSNIFYRACIDIPRGTELLVWYNDSYTSFFGIPLQCIAQDENLNVPSTVMEAMCRQDALQPFNKSSKLAPTTQQRSVVFPQTPCSRNFSLLDKSGPIESGFNQINVKNQRVLASPTSTSQLHSEFSDWHLWKCGQCFKTFTQRILLQMHVCTQNPDRPYQCGHCSQSFSQPSELRNHVVTHSSDRPFKCGYCGRAFAGATTLNNHIRTHTGEKPFKCERCERSFTQATQLSRHQRMPNECKPITESPESIEVD

SEQ ID NO: 52228 - DNA, 2627 bp, Artificial Sequence
  derived and/or modified sequence
gcacaatctctctctcacacacacacacacacacacacacacacacactcactcactctattttgtgctgtcgtaaaacccacgtgtccagccgggaagctgccagagcgtggaaccaaggagccaggacgcggcagcggccaagcgcagcagcccacggcggttgagtcgggcgcccaggtccgtccgcactctcgcgccctccgcgggcctcccaattttctcgcttgcaggtcgggaggtttccgggcggcacaatctctaggactctcctcccgcgctgctcaggggcatgtagcgcacgcagggcgcacactctcgcgcacccgcacgctcaccgagacacccgcgctggctggtctctcggccctgccggtgtcgcagctgccggtgttcgcgcctctagccgccgctgccgtcgccgccgagccgctgccccccaaggaactgtgcctcggcgccacctccggccccgggcccgtcaagtgcggtggtggtggcggcggcggcggggagggtcgcggcgccccgcgcttccgctgcagcgcagaggagctggactattacctgtatggccagcagcgcatggagatcatcccgctcaaccagcacaccagcgaccccaacaaccgttgcgacatgtgcgcggacaaccgcaacggcgagtgccctatgcatgggccactgcactcgctgcgccggcttgtgggcaccagcagcgctgcggccgccgcgcccccgccggagctgccggagtggctgcgggacctgcctcgcgaggtgtgcctctgcaccagtactgtgcccggcctggcctacggcatctgcgcggcgcagaggatccagcaaggcacctggattggacctttccaaggcgtgcttctgcccccagagaaggtgcaggcaggcgccgtgaggaacacgcagcatctctgggagatatatgaccaggatgggacactacagcactttattgatggtggggaacctagtaagtcgagctggatgaggtatatccgatgtgcaaggcactgcggagaacagaatctaacagtagttcagtacaggtcgaatatattctaccgagcctgtatagatatccctaggggcaccgagcttctggtgtggtacaatgacagctatacgtctttctttgggatccccttacaatgcattgcccaggatgaaaacttaaatgtcccttcaacggtaatggaagccatgtgcagacaagacgccctgcagcccttcaacaaaagcagcaaactcgcccctaccacccagcagcgctccgttgttttcccccagactccgtgcagcaggaacttctctcttctggataagtctgggcccattgaatcaggatttaatcaaatcaacgtgaaaaaccagcgagtcctggcaagcccaacttccacaagccagctccactcggagttcagtgactggcatctttggaaatgtgggcagtgctttaagactttcacccagcggatcctcttacagatgcacgtgtgcacgcagaaccccgacagaccctaccaatgcggccactgctcccagtccttttcccagccttcagaactgaggaaccacgtggtcactcactctagtgaccggcctttcaagtgcggctactgtggtcgtgcctttgccggggccaccaccctcaacaaccacatccgaacccacactggagaaaagcccttcaagtgcgagaggtgtgagaggagcttcacgcaggccacccagctgagccgacaccagcggatgcccaatgagtgcaagccaataactgagagcccagaatcaatcgaagtggattaacggattgactggttggaattaaactgcaaggaaagtcatgattaaatgtcacggacacttaagcaaaaccaaagatttcctctgagcaactttcaatcagtcccagaaaaccaaaagcagtaataaaataagtaagatgttaagagatattgatcctggcatggaagtcagaccaggaaagagattatttatttatgacttagggatgagacttatttcagtggacaactaacctgggatggtaaacattcccagtcccaccatgtattttgctttgtttctaaaaagctttttaaaaactgttatttaataccaaagggaggaatcgtatgggttcttctgcccaccgttgtgactaagaatgcacagggacttggttctcgttgcacctttttttagtaacatgtttcatggggacccactgtacagcccttcattctgctgtgtcagtttggcctggcctgacactggctgccccagcggggaccacggaagcagagtgagagccttcgctgagtcaatgctaccttcagccccagacgcatcccatttccatgtcttccatgctcactgctcatgcactttttacacggtttcttccaaacagcccggtcttgatgcaggagagtctggaaaaggaagaaaatggtttcagtttcaaaattcaaaggaaaaagttgaggacttattttgtcctgtcaagattgcaagaacatgtaaaatgtacggagcttcataatacgttatattgttccgaagcagctcgttgagaaacatttgttttcaataacattttagct

SEQ ID NO: 52229 - DNA, 1788 bp, Artificial Sequence
  derived and/or modified sequence
atgctaaagccgggagacccaggaggatctgctttccttaaggtggaccctgcctacctgcaacattggcagcaactgttccctcacgggggagccgggcctctcaaagggtccggtgccgctggcctgttatcagccccccagcccctccagccacctcctccacctccacctcctgaaagggctgaacccccccctgacagcctcagaccgcgccctgctagcctctcatctgccagttctacacctgcctccagctccacctccgcctcctccgcatctagctgtgcagccgcggctgccgccgctgcccttgccggtctgtccgctcttccagtgagtcagctgcctgtctttgctccactggcagccgccgcagtcgccgccgagcccttgccccccaaggaactgtgcctgggcgccacctctggacccgggcccgttaagtgcggcggtggcgggggtggcggcggcgagggaagaggagcccccaggtttaggtgctcagcggaggaattggactattatctgtacgggcagcagcgcatggaaattatcccactgaatcaacacacctccgatcctaacaatcgctgcgatatgtgcgccgacaatcgcaacggcgaatgccctatgcacggccctctgcacagtctgaggaggttagtcgggaccagtagtgctgctgctgccgctccccctcccgaactccctgaatggcttcgggatctgccccgagaagtgtgcttgtgcactagcactgttcccggtctagcatacggtatctgcgcagcccagcgaattcagcaaggtacatggatcggaccttttcagggagtcctgttgccacccgagaaggtgcaggccggcgctgttcggaatacgcagcatctttgggaaatctacgaccaggatggcaccctccaacactttatcgacggaggcgagccctccaagagctcgtggatgaggtacattaggtgcgcccggcactgcggcgaacaaaacctgacagttgtccagtacaggtctaacattttctatcgagcttgtatagatattccccgaggcaccgaattactagtatggtacaacgatagctacactagcttcttcggaatcccacttcagtgcatcgcgcaggacgagaatctaaacgttcccagcacagtgatggaggccatgtgtaggcaggacgccttgcagccctttaataaaagtagcaagctcgctccgactactcagcagagatccgtagtgtttccacagactccatgttccagaaacttctctcttctcgataagtccggccctatagaatcgggattcaaccagattaacgttaaaaaccagagagtgttggcatctcccacttcaacttcacaactgcatagcgaattctctgactggcatttgtggaaatgcggccagtgtttcaagactttcacccaacggatcctcctccagatgcacgtgtgtacacagaaccccgatagaccttaccaatgtggccattgctcgcagtctttttcacagccatctgaactaaggaaccatgtcgtcacacattcctctgaccgtccctttaagtgtggctactgtggacgggcctttgccggcgcgacaactcttaataaccacatccgcactcataccggtgaaaaaccctttaagtgcgagcggtgcgagcgttctttcacacaagctactcagctgtccagacaccaaaggatgccaaatgaatgtaagccaattaccgaaagcccggagtcgattgaggtggactag

SEQ ID NO: 52230 - DNA, 1788 bp, Artificial Sequence
  derived and/or modified sequence
atgctgaagccaggggaccccggcggcagcgccttcctgaaggtggaccctgcctacctgcagcactggcagcagctgttcccccatggaggagctggccccctgaagggcagcggggctgctggcctgctgagcgccccccagcccctgcagcccccacctcctcctcctcctcctgagcgggcagagcccccaccagacagcctgcggcccaggcctgccagcctgagcagcgccagcagcaccccagccagcagcagcaccagcgccagcagcgccagcagctgtgccgctgctgctgctgctgctgccctggccggcctgagcgccctgcctgtgtcccagctgcctgtgtttgcccccctggccgctgctgctgtggccgctgagcccctgccccccaaggagctgtgcctgggcgccaccagcggccctggccctgtgaagtgtggcggcggcggcggcggcggcggggagggccgcggggccccccgcttccgctgcagcgctgaggagctggactactacctgtatggccagcagaggatggagatcatccccctgaaccagcacaccagtgaccccaacaacagatgtgacatgtgtgccgacaacagaaatggagaatgtcccatgcacggccccctgcacagcctgcggcggctggtgggcaccagcagcgctgctgctgctgcccctcctcctgagctgcctgagtggctgcgggacctgccccgggaggtgtgcctgtgcaccagcacagtgcccggcctggcctacggcatctgtgccgcccagaggatccagcagggcacctggattggccccttccagggcgtgctgctgcccccagagaaggtgcaggccggggctgtgaggaacacccagcacctgtgggagatctatgaccaggacggcaccctgcagcacttcattgatggaggagagcccagcaagagctcctggatgagatacatccgctgtgcccggcactgtggggagcagaacctgactgtggtgcagtaccgcagcaacatcttctaccgggcctgcatcgacatcccccggggcacagagctgctggtgtggtacaatgacagctacaccagcttcttcggcatccccctgcagtgcatcgcccaggatgagaacctgaatgtgcccagcacagtgatggaggccatgtgccggcaggatgccctgcagcccttcaacaagagcagcaagctggcccccaccacccagcagaggtctgtggtgttcccccagaccccctgcagcaggaacttcagcctgctggacaagagcggccccattgaaagtggcttcaaccagatcaacgtgaagaaccagagggtgctggccagccccaccagcaccagccagctgcacagcgagttcagtgactggcacctgtggaagtgtggccagtgcttcaagaccttcacccagaggatcctgctgcagatgcacgtgtgcacccagaacccagaccggccctaccagtgtggccactgcagccagagcttcagccagcccagcgagctgagaaatcatgtggtgacccacagcagtgaccggcccttcaagtgtggctactgcggccgggcctttgctggggccaccaccctgaacaaccacatccgcacccacactggagagaagcccttcaagtgtgagcgctgtgagaggagcttcacccaggccacccagctgagccgccaccagaggatgcccaatgaatgcaagcccatcacagagagccctgagagcattgaggtggactag

SEQ ID NO: 52231 - DNA, 3052 bp, Artificial Sequence
  derived and/or modified sequence
ctctctcacacacacacacacacacacacacacacacacacacacacacacacacacacacacacacacactcactctattttgtgctgtcgtaaaacccacgtgtccagccgggaagctgccagagcgtggaaccaaggagccaggacgcggcagcggccaagcgcagcagcccacggcggttgagtcgggcgcccaggtccgtccgcactctcgcgccctccgcgggcctcccaattttctcgcttgcaggtcgggaggtttccgggcggcacaatctctaggactctcctcccgcgctgctcaggggcatgtagcgcacgcagggcgcacactctcgcgcacccgcacgctcaccgagacacccgcacgcacccaccggcagcaccgagttttcagttcgaggcgccggacatgctgaagcccggagaccccggcggttcggccttcctcaaagtggacccagcctacctgcagcactggcagcaactcttccctcacggaggcgcaggcccgctcaagggcagcggcgccgcgggtctcctgagcgcgccgcagcctcttcagccgccgccgccgcccccgcccccggagcgcgctgagcctccgccggacagcctgcgcccgcggcccgcctctctctcctccgcctcgtccacgccggcttcctcttccacctccgcctcctccgcctcctcctgcgctgctgcggccgctgccgccgcgctggctggtctctcggccctgccggtgtcgcagctgccggtgttcgcgcctctagccgccgctgccgtcgccgccgagccgctgccccccaaggaactgtgcctcggcgccacctccggccccgggcccgtcaagtgcggtggtggtggcggcggcggcggggagggtcgcggcgccccgcgcttccgctgcagcgcagaggagctggactattacctgtatggccagcagcgcatggagatcatcccgctcaaccagcacaccagcgaccccaacaaccgttgcgacatgtgcgcggacaaccgcaacggcgagtgccctatgcatgggccactgcactcgctgcgccggcttgtgggcaccagcagcgctgcggccgccgcgcccccgccggagctgccggagtggctgcgggacctgcctcgcgaggtgtgcctctgcaccagtactgtgcccggcctggcctacggcatctgcgcggcgcagaggatccagcaaggcacctggattggacctttccaaggcgtgcttctgcccccagagaaggtgcaggcaggcgccgtgaggaacacgcagcatctctgggagatatatgaccaggatgggacactacagcactttattgatggtggggaacctagtaagtcgagctggatgaggtatatccgatgtgcaaggcactgcggagaacagaatctaacagtagttcagtacaggtcgaatatattctaccgagcctgtatagatatccctaggggcaccgagcttctggtgtggtacaatgacagctatacgtctttctttgggatccccttacaatgcattgcccaggatgaaaacttaaatgtcccttcaacggtaatggaagccatgtgcagacaagacgccctgcagcccttcaacaaaagcagcaaactcgcccctaccacccagcagcgctccgttgttttcccccagactccgtgcagcaggaacttctctcttctggataagtctgggcccattgaatcaggatttaatcaaatcaacgtgaaaaaccagcgagtcctggcaagcccaacttccacaagccagctccactcggagttcagtgactggcatctttggaaatgtgggcagtgctttaagactttcacccagcggatcctcttacagatgcacgtgtgcacgcagaaccccgacagaccctaccaatgcggccactgctcccagtccttttcccagccttcagaactgaggaaccacgtggtcactcactctagtgaccggcctttcaagtgcggctactgtggtcgtgcctttgccggggccaccaccctcaacaaccacatccgaacccacactggagaaaagcccttcaagtgcgagaggtgtgagaggagcttcacgcaggccacccagctgagccgacaccagcggatgcccaatgagtgcaagccaataactgagagcccagaatcaatcgaagtggattaacggattgactggttggaattaaactgcaaggaaagtcatgattaaatgtcacggacacttaagcaaaaccaaagatttcctctgagcaactttcaatcagtcccagaaaaccaaaagcagtaataaaataagtaagatgttaagagatattgatcctggcatggaagtcagaccaggaaagagattatttatttatgacttagggatgagacttatttcagtggacaactaacctgggatggttaacatttccagtcccaccatgtattttgctttgtttctaaaaagctttttaaaaactgttatttaataccaaagggaggaatcgtatgggttcttctgcccaccgttgtgactaagaatgcacagggacttggttctcgttgcacctttttttagtaacatgtttcatggggacccactgtacagcccttcattctgctgtgtcagtttggcctggcctgacactggctgccccagcggggaccacggaagcagagtgagagccttcgctgagtcaatgctaccttcagccccagacgcatcccatttccatgtcttccatgctcactgctcatgcactttttacacggtttcttccaaacagcccggtcttgatgcaggagagtctggaaaaggaagaaaatggtttcagtttcaaaattcaaaggaaaaagttgaggacttattttgtcctgtcaagattgcaagaacatgtaaaatgtacggagcttcataatacgttatattgttccgaagcagctcgttgagaaacatttgttttcaataacattttagcttaaaaaaaaaaaaagaaaatgaaaataaagttctttggtttaaggctgga

SEQ ID NO: 52232 - DNA, 1788 bp, Artificial Sequence
  derived and/or modified sequence
atgctgaagcccggcgaccccggcggcagcgccttcctgaaggtggacccagcatatctccagcattggcagcagttgtttccccacggtggggccggcccactcaaaggttccggagcggcggggctgctttctgcgccacagccacttcagcccccgccccctcctcctcctcctgagagagccgaaccaccgcccgacagcctcaggcctcgcccagcttctctatccagcgctagttccacccctgccagctcgagcacaagcgcctcctcagcatcctcctgtgcggccgccgcggctgcggcggctctggcagggttatccgcattgcccgtcagtcagctgccagtgtttgctccattggccgcggctgctgtggccgccgagcccctgccaccgaaggaactgtgcctgggagcaacctccggccccggccccgtaaaatgcgggggaggcggggggggtggaggggagggccggggagcccccagattcagatgttcagcagaagaactcgattactatctgtatggccagcaaaggatggaaatcatcccacttaatcagcacactagtgatccaaataacaggtgtgacatgtgcgcagataacaggaatggtgaatgcccgatgcacgggcctctgcactctctccgccgcctggtggggacatcatccgcagccgccgcagcccctccgcctgagctgccagagtggctcagggatctgccacgagaggtctgcctttgcacttccacagtgcctggcctggcttacgggatctgtgccgctcagcgaatccaacaaggtacttggatcggcccattccaaggagtcctgctgccgccagaaaaggtacaggcaggtgcagtgaggaacactcaacacttgtgggagatctacgatcaggatggtaccctccagcatttcattgatggaggggagccctccaagagctcatggatgagatatatacggtgcgcgcgccattgtggcgagcaaaatctgacagttgttcagtaccgctccaatatcttctacagagcttgtatcgatatacccaggggtaccgagctcctggtgtggtacaatgatagctacacttcattctttgggattcccctccaatgtatagcccaggacgaaaatctcaatgttcctagtacagtcatggaggccatgtgccgccaagacgcattgcagcctttcaataagagctctaagcttgctcccaccacgcagcagcggtccgtcgttttccctcaaactccttgctcccgtaatttctcgcttttggataaaagcggtcctattgaatctggatttaatcagatcaacgtcaagaaccagagagtcctcgcttctccaacgtccacctcccagcttcacagtgaatttagtgattggcacctgtggaaatgcggacaatgcttcaaaacttttacccagaggatcctgttacagatgcacgtctgcacccagaaccctgacagaccttaccagtgtggtcactgcagccagagcttcagccagcctagtgaactccgtaatcatgttgtgacccatagcagcgatcgaccttttaagtgcggatactgcggcagggcattcgctggcgccaccacgcttaataaccatattaggactcacacaggcgagaagccttttaagtgcgaacgctgtgagagatcctttacccaggccacccagctaagcaggcaccagcgcatgcctaatgaatgcaagcccatcacagaaagccctgagtcaattgaggtggattag

SEQ ID NO: 52233 - DNA, 1788 bp, Artificial Sequence
  derived and/or modified sequence
atgctgaaacccggtgatcctgggggtagcgcattcttaaaggtggatccagcatacctgcagcattggcagcagttatttccacacggtggtgccggaccactgaaaggatctggagctgcgggactgctgtccgcaccgcagcctctacaaccaccccctccccctccacccccagagcgggctgaaccaccacccgactcactgcgaccacggccagcatctctgtccagcgcctcctctacaccagctagcagctctacttccgcatcctccgcctcatcctgcgccgcagcggctgccgctgccgcactagctggattgtcagctctacctgtgagtcaactgcccgtttttgccccactggctgctgcggctgtggcagccgaacccctacctcccaaagaactctgtcttggcgctacctctggacccggacccgtcaagtgcggaggcggagggggagggggaggtgaaggcagaggcgcacctcggttcagatgctctgcggaagaattggattattacctctacgggcagcagcgtatggagatcattccacttaaccagcacacctctgatccaaataatcggtgtgatatgtgtgcggataatcggaatggagaatgtccaatgcacgggccactccacagcttgcgacggctggtcggtacctcatccgccgcagctgcggcacctccacccgagctgcccgagtggctgcgggacttaccacgggaggtgtgtctgtgcacatctactgtgccaggtttggcatatgggatttgcgccgcacagcgcatccagcaaggcacatggataggccctttccagggcgtgctgctgccaccagaaaaagtgcaagcgggtgcggtaaggaacacacaacatctctgggagatttacgaccaggatggaactctgcaacacttcattgacggcggagagccgtcgaagagctcttggatgagatacattagatgcgcacgccattgtggcgagcaaaatctgaccgtggtccagtacaggtccaacattttttaccgagcatgtatcgacatcccacggggtactgagttgcttgtgtggtacaatgattcgtatacctctttcttcggcattcccctgcaatgcattgcacaggacgagaatttgaacgtcccaagcacagtaatggaagctatgtgcaggcaagacgccctgcaacctttcaataagtcttcaaaactcgccccaaccacccagcagcgttctgtggtgttcccccagacaccttgttcaaggaatttcagtctgcttgacaagagcggacccatagagagtgggttcaatcagataaacgtgaagaaccaacgagtgctggccagccctacctctaccagccagctgcactctgagttttcagactggcacctgtggaagtgcggtcaatgttttaaaacgtttacacagaggatactcctacagatgcacgtgtgtacccagaatcccgacaggccctaccaatgtggtcactgctcacagtccttttcacaaccgtctgaactgcgtaatcatgtggtgacccactcatccgacagacccttcaagtgtggctactgcgggagagcattcgccggagccaccacactgaataaccatattaggactcatactggcgagaagccctttaagtgtgaacgctgtgaaagatcctttacccaggctacccagctgagcagacatcaaagaatgccaaatgagtgtaagccgataactgaatcgcccgaatcaattgaggtcgattag

SEQ ID NO: 52234 - DNA, 1788 bp, Artificial Sequence
  derived and/or modified sequence
atgctgaagcccggcgaccccggcggcagcgccttcctgaaggtggaccccgcctacctgcagcactggcagcagctgttcccccacggcggcgccggccccctgaagggcagcggcgccgccggcctgctgagcgccccccagcccctgcagccccccccccccccccccccccccgagagagccgagcccccccccgacagcctgagacccagacccgccagcctgagcagcgccagcagcacccccgccagcagcagcaccagcgccagcagcgccagcagctgcgccgccgccgccgccgccgccgccctggccggcctgagcgccctgcccgtgagccagctgcccgtgttcgcccccctggccgccgccgccgtggccgccgagcccctgccccccaaggagctgtgcctgggcgccaccagcggccccggccccgtgaagtgcggcggcggcggcggcggcggcggcgagggcagaggcgcccccagattcagatgcagcgccgaggagctggactactacctgtacggccagcagagaatggagatcatccccctgaaccagcacaccagcgaccccaacaacagatgcgacatgtgcgccgacaacagaaacggcgagtgccccatgcacggccccctgcacagcctgagaagactggtgggcaccagcagcgccgccgccgccgcccccccccccgagctgcccgagtggctgagagacctgcccagagaggtgtgcctgtgcaccagcaccgtgcccggcctggcctacggcatctgcgccgcccagagaatccagcagggcacctggatcggccccttccagggcgtgctgctgccccccgagaaggtgcaggccggcgccgtgagaaacacccagcacctgtgggagatctacgaccaggacggcaccctgcagcacttcatcgacggcggcgagcccagcaagagcagctggatgagatacatcagatgcgccagacactgcggcgagcagaacctgaccgtggtgcagtacagaagcaacatcttctacagagcctgcatcgacatccccagaggcaccgagctgctggtgtggtacaacgacagctacaccagcttcttcggcatccccctgcagtgcatcgcccaggacgagaacctgaacgtgcccagcaccgtgatggaggccatgtgcagacaggacgccctgcagcccttcaacaagagcagcaagctggcccccaccacccagcagagaagcgtggtgttcccccagaccccctgcagcagaaacttcagcctgctggacaagagcggccccatcgagagcggcttcaaccagatcaacgtgaagaaccagagagtgctggccagccccaccagcaccagccagctgcacagcgagttcagcgactggcacctgtggaagtgcggccagtgcttcaagaccttcacccagagaatcctgctgcagatgcacgtgtgcacccagaaccccgacagaccctaccagtgcggccactgcagccagagcttcagccagcccagcgagctgagaaaccacgtggtgacccacagcagcgacagacccttcaagtgcggctactgcggcagagccttcgccggcgccaccaccctgaacaaccacatcagaacccacaccggcgagaagcccttcaagtgcgagagatgcgagagaagcttcacccaggccacccagctgagcagacaccagagaatgcccaacgagtgcaagcccatcaccgagagccccgagagcatcgaggtggactag

SEQ ID NO: 52235 - protein, 365 aa, Artificial Sequence
  derived and/or modified sequence
MDIIETAKLEEHLENQPSDPTNTYARPAEPVEEENKNGNGKPKSLSSGLRKGTKKYPDYIQIAMPTESRNKFPLEWWKTGIAFIYAVFNLVLTTVMITVVHERVPPKELSPPLPDKFFDYIDRVKWAFSVSEINGIILVGLWITQWLFLRYKSIVGRRFCFIIGTLYLYRCITMYVTTLPVPGMHFQCAPKLNGDSQAKVQRILRLISGGGLSITGSHILCGDFLFSGHTVTLTLTYLFIKEYSPRHFWWYHLICWLLSAAGIICILVAHEHYTIDVIIAYYITTRLFWWYHSMANEKNLKVSSQTNFLSRAWWFPIFYFFEKNVQGSIPCCFSWPLSWPPGCFKSSCKKYSRVQKIGEDNEKST

SEQ ID NO: 52236 - protein, 44 aa, Artificial Sequence
  derived and/or modified sequence
MDIIETAKLEEHLENQPSDPTNTYARPAEPVEEENKNGNGKPKS

SEQ ID NO: 52237 - protein, 34 aa, Artificial Sequence
  derived and/or modified sequence
MDIIETAKLEEHLENQPSDPTNTYARPAEPVEEE

SEQ ID NO: 52238 - DNA, 1098 bp, Artificial Sequence
  derived and/or modified sequence
atggacatcatcgagaccgccaagctggaggagcacctggagaaccagcccagcgaccccaccaacacctacgccagacccgccgagcccgtggaggaggagaacaagaacggcaacggcaagcccaagagcctgagcagcggcctgagaaagggcaccaagaagtaccccgactacatccagatcgccatgcccaccgagagcagaaacaagttccccctggagtggtggaagaccggcatcgccttcatctacgccgtgttcaacctggtgctgaccaccgtgatgatcaccgtggtgcacgagagagtgccccccaaggagctgagcccccccctgcccgacaagttcttcgactacatcgacagagtgaagtgggccttcagcgtgagcgagatcaacggcatcatcctggtgggcctgtggatcacccagtggctgttcctgagatacaagagcatcgtgggcagaagattctgcttcatcatcggcaccctgtacctgtacagatgcatcaccatgtacgtgaccaccctgcccgtgcccggcatgcacttccagtgcgcccccaagctgaacggcgacagccaggccaaggtgcagagaatcctgagactgatcagcggcggcggcctgagcatcaccggcagccacatcctgtgcggcgacttcctgttcagcggccacaccgtgaccctgaccctgacctacctgttcatcaaggagtacagccccagacacttctggtggtaccacctgatctgctggctgctgagcgccgccggcatcatctgcatcctggtggcccacgagcactacaccatcgacgtgatcatcgcctactacatcaccaccagactgttctggtggtaccacagcatggccaacgagaagaacctgaaggtgagcagccagaccaacttcctgagcagagcctggtggttccccatcttctacttcttcgagaagaacgtgcagggcagcatcccctgctgcttcagctggcccctgagctggccccccggctgcttcaagagcagctgcaagaagtacagcagagtgcagaagatcggcgaggacaacgagaagagcacctag

SEQ ID NO: 52239 - DNA, 135 bp, Artificial Sequence
  derived and/or modified sequence
atggacatcatcgagaccgccaagctggaggagcacctggagaaccagcccagcgaccccaccaacacctacgccagacccgccgagcccgtggaggaggagaacaagaacggcaacggcaagcccaagagctag

SEQ ID NO: 52240 - DNA, 105 bp, Artificial Sequence
  derived and/or modified sequence
atggacatcatcgagaccgccaagctggaggagcacctggagaaccagcccagcgaccccaccaacacctacgccagacccgccgagcccgtggaggaggagtag

SEQ ID NO: 52241 - DNA, 1098 bp, Artificial Sequence
  derived and/or modified sequence
atggatatcatagaaaccgcaaagctcgaggaacatctcgagaaccaaccgtccgacccgacaaatacatatgcgagacccgccgaacccgtggaggaagagaacaagaacggaaatggaaaacctaaatccctgtcttctggcttaaggaagggaaccaagaaatatcctgactacatacagatcgccatgccaactgagagtaggaataaatttcctctggagtggtggaaaactggtatagcatttatatatgcagtgtttaatctcgtgctgacaactgtgatgattaccgtggtgcatgaaagggtaccacccaaagagctgtctccacctctgcctgacaagttcttcgattatattgatcgcgtcaagtgggcctttagcgtgtccgaaatcaacgggatcattctggtgggactgtggatcacacaatggttatttcttagatacaagtccatcgtaggaagaaggttctgctttattatagggacactctacctataccggtgcattacaatgtacgtgaccaccctgcccgtccctggtatgcacttccagtgcgcccctaagctgaatggagattcgcaagccaaggttcaaagaatattacgactgatttcaggcggtggcttgtccattaccggctcacacattctctgtggcgacttcctcttctctgggcacaccgtgacgctcaccctgacatatctcttcattaaggaatattctccaagacatttctggtggtaccacctgatttgctggctgctgagtgctgctggaattatctgcattttggttgcccacgagcattacaccatcgacgtgatcatagcttattacatcactacacgtctgttttggtggtaccatagtatggccaacgagaagaaccttaaggtgagctctcagaccaacttccttagcagagcctggtggttccctattttctatttttttgagaaaaacgtccagggctcgatcccttgctgttttagctggcccctgagttggcccccagggtgcttcaagagctcatgcaagaaatatagcagagtccagaagatcggcgaggacaatgagaaatccacatag

SEQ ID NO: 52242 - DNA, 1098 bp, Artificial Sequence
  derived and/or modified sequence
atggacattatcgagaccgcaaagctcgaagaacatttggagaatcaacctagtgatcccaccaacacttacgccagaccggccgagccagtggaagaggagaacaaaaacggaaatgggaagcctaagtccctaagtagcgggctccgcaaggggactaaaaaatatcctgactatatacagatcgccatgcctacagaatcaaggaacaaatttcccctcgagtggtggaagacggggattgcattcatttacgctgtgtttaatttagtgctgaccacggtcatgatcaccgtggtgcatgagagggttccccctaaagaactgtctccacccttgcctgacaagttcttcgactacattgatcgagttaaatgggccttctctgtgtccgagattaacggtattattctcgttggactctggatcacccagtggctcttcctgagatacaaaagcatcgtcggtaggagattctgttttatcatcggtacactgtatttgtaccggtgtatcacaatgtatgtcactaccctgccagttcctggtatgcatttccagtgtgcccccaagctgaacggggactcacaggccaaagttcagcggattttgagactgatctcaggaggcgggctaagtatcactggatcgcatatcctatgtggcgacttcctgttctctggccacacggttaccctcactctgacatatcttttcattaaagaatacagcccacgccatttctggtggtaccacctgatctgttggttactatctgctgcggggataatctgcatcttggtggcccacgaacattataccattgacgtaataattgcttactacattaccacaaggttgttctggtggtaccacagcatggccaacgagaagaacttgaaggtaagttctcagacaaactttctgtcccgggcctggtggtttcccattttctactttttcgagaaaaatgtgcagggatccattccctgttgcttcagctggccccttagctggcctcctggatgctttaagtctagttgcaagaagtactcacgtgtgcaaaagatcggggaagataatgagaaaagtacatag

SEQ ID NO: 52243 - DNA, 1098 bp, Artificial Sequence
  derived and/or modified sequence
atggacatcatagaaacggccaagctggaggagcaccttgagaaccagccaagtgaccccaccaatacctacgcccggcctgcagagccggtggaggaagaaaataagaacggtaacggaaaacctaaatccctttcttcaggactcaggaagggcaccaaaaagtaccctgattatatccaaattgccatgcctaccgaaagccgcaacaagtttccacttgaatggtggaaaactgggatcgcctttatttatgcagtgtttaacctagtcctgactactgtgatgatcaccgtcgtacacgagagggtcccgcctaaagaacttagtccgccgcttccagataaattctttgactacatagatcgggtgaaatgggcattctccgtgtctgaaattaacgggattatcctggtcggcctgtggatcacccaatggctgttcttgcgctataagagcatagtagggcgaaggttctgttttatcattggaactctctacctataccgatgtatcaccatgtatgtaactacactacctgtgccagggatgcattttcagtgtgctcctaagctcaatggtgacagccaggctaaggtgcagcggatcctgcggcttatttctggaggcggtctgtcaattaccgggagccacatcctctgcggcgatttcctgtttagcgggcataccgttactttaacactgacctatctgttcattaaagaatacagcccgagacacttctggtggtatcacctgatttgttggctgctctctgccgccggcattatctgcattttagtagcccatgaacactacacgatcgatgtgatcatcgcttattacatcaccactaggctgttctggtggtaccactccatggctaacgagaagaatttgaaggtctcatctcagaccaattttttatcaagagcctggtggttcccaattttctattttttcgaaaaaaatgtccaaggaagtattccttgttgcttctcgtggccgctatcctggcccccaggttgttttaaaagtagttgcaaaaagtacagtcgagtgcaaaaaattggcgaagataacgagaaaagcacctag

SEQ ID NO: 52244 - DNA, 135 bp, Artificial Sequence
  derived and/or modified sequence
atggacattattgagactgccaaactggaggaacacctggaaaaccagccgtcagacccaacaaacacatacgctaggcccgcagaaccagtcgaagaagagaacaagaatggcaacggcaagccaaagagctag

SEQ ID NO: 52245 - DNA, 105 bp, Artificial Sequence
  derived and/or modified sequence
atggatatcattgaaacagcaaagctagaggagcatctcgagaaccagcccagcgaccctaccaacacatacgcgagacctgctgagccggtggaggaggaatag

SEQ ID NO: 52246 - DNA, 1098 bp, Artificial Sequence
  derived and/or modified sequence
atggacatcatcgagacagccaagctggaggagcacctggagaaccagcccagcgaccccaccaacacctacgcccggcctgctgagcctgtggaggaggagaacaagaatggaaatggcaagcccaagagcctgagcagcggcctgaggaagggcaccaagaagtacccagactacatccagatcgccatgcccacagagagcaggaacaagttccccctggagtggtggaagacaggaattgccttcatctatgctgtgttcaacctggtgctgaccaccgtgatgatcaccgtggtgcatgagcgggtgccccccaaggagctgagcccccccctgcctgacaagttctttgactacatcgacagagtgaagtgggccttctctgtgtctgagatcaatggcatcatcctggtgggcctgtggatcacccagtggctgttcctgcgctacaagagcatcgtgggccgccgcttctgcttcatcatcggcaccctgtacctgtaccgctgcatcaccatgtatgtgaccaccctgcctgtgcccggcatgcacttccagtgtgcccccaagctgaatggagacagccaggccaaggtgcagaggatcctgcggctcatcagcggcggcggcctgagcatcaccggcagccacatcctgtgtggggacttcctgttcagcggccacacagtgaccctgaccctgacctacctgttcatcaaggagtacagccccaggcacttctggtggtaccacctgatctgctggctgctgtctgctgctggcatcatctgcatcctggtggcccacgagcactacaccattgatgtgatcatcgcctactacatcaccaccaggctcttctggtggtaccacagcatggccaatgagaagaacctgaaggtgagcagccagaccaacttcctgagccgggcctggtggttccccatcttctacttctttgagaagaatgtgcagggcagcatcccctgctgcttctcctggcccctgtcctggcccccaggctgcttcaagagcagctgcaagaagtacagccgggtgcagaagattggagaagataatgagaagagcacctag

SEQ ID NO: 52247 - DNA, 135 bp, Artificial Sequence
  derived and/or modified sequence
atggacatcatcgagacagccaagctggaggagcacctggagaaccagcccagcgaccccaccaacacctacgcccggcctgctgagcctgtggaggaggagaacaagaatggaaatggcaagcccaagagctag

SEQ ID NO: 52248 - DNA, 105 bp, Artificial Sequence
  derived and/or modified sequence
atggacatcatcgagacagccaagctggaggagcacctggagaaccagcccagcgaccccaccaacacctacgcccggcctgctgagcctgtggaggaggagtag

SEQ ID NO: 52249 - DNA, 1098 bp, Artificial Sequence
  derived and/or modified sequence
atggacatcatcgagaccgccaagctggaggagcacctggagaaccaaccaagcgaccctacaaatacctatgccaggcctgcagaaccagtcgaagaagagaacaaaaacggaaacggaaaaccgaaatcgctgagttcaggcctgagaaagggcacaaaaaaatacccagactatatccagatcgctatgcccaccgaaagccgcaacaaattccccctggagtggtggaagacaggaatcgcattcatctatgccgtgtttaacctcgtactcaccacggtgatgattacagtagtccacgaaagggtacctccaaaagagctatccccgcccctccccgacaaattctttgactacatcgaccgcgttaaatgggccttcagcgtctcggaaataaatggcattatactggtgggtttgtggatcacgcagtggctgttcctgcgctacaagtccatagtgggcaggcgattctgctttattattggcacgctgtacctttatagatgtatcaccatgtacgttaccacactgccagttcctggcatgcacttccaatgtgctcctaaattgaatggtgactctcaggctaaagtgcagaggattctaaggcttatcagtggcgggggtttatcaatcaccgggtcccatatcttgtgcggggatttcctgttttctggccatacagtcacccttactctgacgtacttgttcatcaaagagtactccccccgtcacttttggtggtatcacttgatttgctggcttttaagcgccgccggaattatttgcatactggtggcccatgagcactacacaattgacgtgatcattgcatattacatcactactcgcctgttttggtggtaccacagtatggcaaatgagaagaacctgaaggtatcatcacaaactaactttttgtctcgagcatggtggtttcccatcttctacttttttgagaagaacgtgcagggttctataccatgctgtttcagctggcccttgtcttggcctcccggttgctttaagagctcttgcaaaaagtattcgagagtccaaaagattggggaggataacgagaagtctacctag

SEQ ID NO: 52250 - DNA, 1098 bp, Artificial Sequence
  derived and/or modified sequence
atggacatcatcgagaccgccaagctggaggagcacctggagaaccagccctcagatccaaccaatacctatgcccggcccgctgagccggtggaggaagagaacaaaaacggaaatggtaagcctaagtccctgtccagtggccttagaaaggggactaaaaagtatcccgactacatccagatcgccatgcccactgagtcgcgaaataaattcccgctggagtggtggaaaacagggatcgcattcatctatgccgttttcaatctggtgctgactactgttatgatcaccgtggtgcatgagagggttcccccaaaggaactcagtccgcctctccctgataaatttttcgactacatcgaccgtgtgaagtgggcctttagtgtgtctgagattaatggcattatcctagtgggcttgtggattactcagtggctgtttctgaggtacaagtctattgtaggaaggagattttgttttatcatcggtactctgtacctttataggtgcattaccatgtacgtgaccactcttccagtgcctggcatgcacttccaatgcgctccaaaattaaacggagacagccaggccaaggtccagaggattctgcgccttatctctggcggagggttaagcataaccgggtctcatatcctgtgtggagacttccttttctcaggtcacactgtcacattaaccctcacttatctgttcatcaaggaatacagcccaaggcatttttggtggtaccacctgatctgttggttgctttcggccgcgggtataatttgcattctggtggcccacgagcactacacaattgacgtgataattgcttattacatcactacccgcctgttttggtggtaccactctatggctaacgagaagaacctgaaggtgtcgtcacagaccaacttccttagccgggcatggtggtttccgatattctattttttcgagaaaaatgttcagggaagcataccctgttgctttagttggcctttgtcttggcccccagggtgctttaaatcatcatgcaaaaagtacagtcgagtccagaaaataggggaagataacgagaagagtacatag

SEQ ID NO: 52251 - DNA, 1098 bp, Artificial Sequence
  derived and/or modified sequence
atggacatcatcgagaccgccaagctggaggagcacctggagaaccagccttccgatcctacgaatacctacgccaggccagcagagcctgtagaagaggagaataagaacgggaatggcaaaccaaagagtctcagctccggacttcgcaaaggcacaaagaagtatccagattatatccagatcgcgatgccaacagagtctaggaacaagttccccttggagtggtggaagacggggatagcttttatctatgctgtatttaaccttgtgctaaccacagtcatgatcaccgtggtccacgagcgcgttccaccaaaagagctttcgccaccattgcccgacaaattctttgactacatcgaccgggtgaaatgggcattttccgtatctgaaataaacggaattatcttggtgggactctggatcacccagtggctcttcttgcgctacaagagtattgtgggtcgccgattttgtttcattattggtacactctacctgtataggtgtataactatgtacgtgacaaccctccccgttccaggcatgcattttcagtgtgcacctaaactgaacggtgattctcaggccaaagtccagcgcatcttgcgcctgatatccgggggtgggttgtccatcacaggttcacacatcctctgtggcgattttctgttcagcggccataccgttacactgacactgacctaccttttcatcaaagagtactcaccaaggcacttctggtggtaccatctgatttgttggctcctgtccgccgcgggtatcatttgcatactagtcgcacatgaacattatactatcgatgtgatcatcgcttactacattacgacccgactgttttggtggtatcattcgatggctaatgagaagaacttgaaagtcagttcacaaacaaattttctgagcagggcctggtggttccccattttttatttttttgaaaagaacgttcagggttcaatcccttgctgctttagttggccgctctcttggccccccggttgctttaaaagcagttgcaaaaaatattcgcgagtgcaaaaaataggcgaggataacgagaaaagcacatag

SEQ ID NO: 52252 - DNA, 135 bp, Artificial Sequence
  derived and/or modified sequence
atggacatcatcgagaccgccaagctggaggagcacctggagaaccagccatctgacccaacaaacacgtatgcaagaccagccgaacctgtagaagaagagaataaaaatggcaacggcaaacccaagtcctag

SEQ ID NO: 52253 - DNA, 105 bp, Artificial Sequence
  derived and/or modified sequence
atggacatcatcgagaccgccaagctggaggagcacctggagaaccagccctccgatccaacgaacacttacgctagacccgctgagcccgtagaagaagaatag

SEQ ID NO: 52254 - DNA, 1098 bp, Artificial Sequence
  derived and/or modified sequence
atggacatcatcgagactgccaagctggaagagcatttggagaaccagccttcggatcctacaaacacatacgccagaccagccgagcctgtggaggaagaaaataaaaacgggaatggtaaacccaagagtctttcatctggcctaagaaagggtacaaaaaaatatcctgactatatacagatcgccatgcctactgaatcaaggaataagttcccattggaatggtggaagaccggaattgcgttcatctatgccgttttcaatcttgtcctgacaaccgtgatgatcactgttgtacacgaaagagtcccacccaaagagctgagtccacccctgcccgataagttttttgattatatagatcgagtgaagtgggctttctcagtgtctgagataaacggaatcatcctcgtgggtctgtggattacacaatggctctttctacggtacaagtccatagtgggtcggaggttttgttttataattgggaccctgtatctctacagatgcataactatgtatgtcaccaccctgccggtgccgggtatgcattttcagtgtgctcccaagttgaatggcgacagtcaggctaaggtacaacggatacttaggctcatatcgggtgggggtctgtccattacgggatcccacatcctatgcggagactttttattcagtggccacaccgtgacattgacgttaacttacttgttcataaaggagtactcccccaggcacttttggtggtatcacctgatctgctggctgctgtccgcagccggtatcatttgcatccttgttgctcacgagcactatacgattgatgtgattatagcgtattacattactactcggttgttttggtggtaccacagtatggctaacgaaaaaaatctgaaggtgagttcacagacgaatttcctgtcgcgggcttggtggtttcctattttctatttctttgagaaaaacgtccagggttctatcccatgttgcttctcctggcccctatcatggccgcctgggtgcttcaagagcagttgcaaaaaatattcgcgcgttcagaagattggtgaagataatgaaaagagcacttag

SEQ ID NO: 52255 - DNA, 1098 bp, Artificial Sequence
  derived and/or modified sequence
atggacattatcgagaccgctaagcttgaggaacatctggagaatcaacctagtgacccaactaacacatatgccagacccgcagagcccgttgaagaagaaaacaagaacggcaatgggaaacccaagagcctctccagtgggctaaggaaaggcacaaagaaatatcctgattatattcagatcgctatgcccaccgaatcacggaataaattccctttagaatggtggaagacaggtattgcgtttatttatgctgttttcaacctagttctgacaaccgtgatgatcacagtagtgcatgagagggttccccctaaagagctgtccccaccattgcctgataagtttttcgattatattgatcgtgtaaagtgggcttttagtgtatcggagataaacggaatcattctagtcggcctgtggattactcaatggcttttcttgagatacaagtccattgtgggtaggagattctgttttatcattggaacgctttacctctaccggtgcataacgatgtacgtgaccaccctacccgttcctggcatgcattttcagtgtgccccaaagcttaacggcgatagtcaagccaaagtacaacggattctgaggctcatttccggcggaggcctcagcatcaccggatcccacatcctttgcggagattttttattctctggccatacggtgactctcacacttacttaccttttcatcaaagagtatagccctcgacacttctggtggtaccatttaatctgctggctgctatctgctgctggtattatatgtatccttgtagcacacgagcactacacaatcgatgtgataatcgcctactacattaccacccgactcttttggtggtaccacagcatggcaaacgagaagaatctcaaagtctcctctcagaccaattttctgtctcgcgcttggtggtttcccattttttacttctttgagaaaaacgtccagggctctattccctgctgtttctcctggccgcttagttggccgcctggctgttttaaaagcagctgtaaaaagtacagccgcgtccagaaaataggggaggacaatgagaaaagcacctag

SEQ ID NO: 52256 - DNA, 1098 bp, Artificial Sequence
  derived and/or modified sequence
atggacattatcgagacagcaaagctcgaagaacaccttgagaatcagccttccgacccgacaaacacttacgccagacctgctgaacccgtggaggaagagaataagaatggcaatggaaagcccaaatcgctcagctccggcctgagaaagggcaccaagaaatacccagattacatccagatcgcgatgccaacagagagtcgcaacaaattccccctcgaatggtggaaaactggtatagcgtttatctacgcagtttttaatctggtacttaccacagtgatgatcaccgtcgtgcacgagcgtgtccctccaaaggagttgtctccgccactccccgataaattcttcgactacattgaccgagttaagtgggcgttttccgtgagtgagattaatgggatcattctggttggcctctggattacccagtggctgttcttgaggtacaaatctattgttggaagacgcttttgcttcattattggtaccctctatctgtaccgctgcattacaatgtatgtgaccacgctacctgtaccgggaatgcactttcagtgcgctcctaagttgaacggggactcccaggctaaggtccagcgcatcctgaggctaatctcgggtgggggactcagtattaccgggtcacacatcttgtgcggtgacttccttttctctggacatacagtgaccctgaccctcacttacctattcattaaagagtattcgccacgccatttttggtggtaccatttgatctgctggttgctcagcgctgctggaatcatctgtatcttagtggctcacgaacactacacaattgatgttatcatagcctactacatcacgacgcggctgttctggtggtatcactccatggccaacgagaaaaacctcaaggtttcgtcacaaaccaattttctgagccgcgcttggtggtttccaatcttctactttttcgagaaaaatgtgcagggaagtattccctgttgtttctcttggcccttatcttggcctcccggttgctttaaatcatcctgcaagaaatacagcagggtccaaaagattggcgaagataacgaaaagtcaacatag

SEQ ID NO: 52257 - DNA, 135 bp, Artificial Sequence
  derived and/or modified sequence
atggatatcatcgaaacagccaagttggaagagcatttggagaatcagccgtctgaccccaccaatacttacgcccgaccagctgaacccgtggaagaggagaacaaaaacgggaacgggaagcctaaatcatag

SEQ ID NO: 52258 - DNA, 105 bp, Artificial Sequence
  derived and/or modified sequence
atggacattatcgaaacagctaaactcgaggagcacctggagaaccagcccagcgatcctacaaatacctacgcccgtccagcagagcccgtcgaggaagagtag

SEQ ID NO: 52259 - DNA, 1887 bp, Artificial Sequence
  derived and/or modified sequence
agctaccttataaagaccatctgtacatccactgtgaaatggagtttcaaaatcacaagcttctttcccacatgaacataagactaggagcacatatggaagagtaaagttgaagggaatttggatgatgatttggcaagatgctgtgggatagtaacatctttttgagggaagaattggcttcctttcttgaaagtggtgaaggtacagcatatagctgcatggaagaaacagtaatcggatggctaccttctacattttgtattaggaaacaaagtccattgtaagagtccatgttgatcttggaaatagaaggattgaaaaaagctaaatttccacaaagaacaagaacttgaccatctcctttttgatctgaagactaggggacaatggatatcatagagacagcaaaacttgaagaacatttggaaaatcaacccagtgatcctacgaacacttatgcaagacccgctgaacctgttgaagaagaaaacaaaaatggcaatggtaaacccaagagcttatccagtgggctgcgaaaaggcaccaaaaagtacccggactatatccaaattgctatgcccactgaatcaaggaacaaatttccactagagtggtggaaaacgggcattgccttcatatatgcagttttcaacctcgtcttgacaaccgtcatgatcacagttgtacatgagagggtccctcccaaggagcttagccctccactcccagacaagttttttgattacattgatagggtgaaatgggcattttctgtatcagaaataaatgggattatattagttggattatggatcacccagtggctgtttctgagatacaagtcaatagtgggacgcagattctgttttattattggaactttatacctgtatcgctgcattacaatgtatgttactactctacctgtgcctggaatgcatttccagtgtgctccaaagctcaatggagactctcaggcaaaagttcaacggattctacgattgatttctggtggtggattgtccataactggatcacatatcttatgtggagacttcctcttcagcggtcacacggttacgctgacactgacttatttgttcatcaaagaatattcgcctcgtcacttctggtggtatcatttaatctgctggctgctgagtgctgccgggatcatctgcattcttgtagcacacgaacactacactatcgatgtgatcattgcttattatatcacaacacgactgttttggtggtaccattcaatggccaatgaaaagaacttgaaggtctcttcacagactaatttcttatctcgagcatggtggttccccatcttttatttttttgagaaaaatgtacaaggctcaattccttgctgcttctcctggccgctgtcttggcctcctggctgcttcaaatcatcatgcaaaaagtattcacgggttcagaagattggtgaagacaatgagaaatcgacctgaggagcaaaacaaaggcatcagctcttacaccaaaagagttaacgctgtaaccaaaggtatagttttgttttttattttaggagaactgactggtaaatgaagaaatggaccaaattttgtgtaaacgattagaaagatgaacaaagtattgccctttgactggttttcttcttcatcctgagaaagatacattctcttgcagctcttcattcattggtgacaagcccccaccccgggactttactaatgagcttgttaaagaggtgccaaagaacatattcctcctttctttattctttctccaccaaaaccctctacttcagaattttttcaggatatttttcagcccaaggtcagaagaatgtgttaatattttaaataaaatatctggacatctaca

SEQ ID NO: 52260 - DNA, 6149 bp, Artificial Sequence
  derived and/or modified sequence
agattgatctctgttgccgctcagggaggtcagctccaggccctcagcctttcggccgggagccaaactgccctgcctgccaagcccctccttctctgcaccttaaacagccgcgaggggagagtcggctgggattttcttcttaagaagtcgcgcaggtttttcgagctccactctgcgccaggagagccacggcagcaggaacgggcactgctgccaccgggccgacggagctgcatcctgtggccctataacactcttctccaaaaggacctgccagagactgggagtgttgactgctgcaaggaccaaggtgggatagtaacatctttttgagggaagaattggcttcctttcttgaaagtggtgaaggtacagcatatagctgcatggaagaaacagtaatcggatggctaccttctacattttgtattaggaaacaaagtccattgtaagagtccatgttgatcttggaaatagaaggattgaaaaaagctaaatttccacaaagaacaagaacttgaccatctcctttttgatctgaagactaggggacaatggatatcatagagacagcaaaacttgaagaacatttggaaaatcaacccagtgatcctacgaacacttatgcaagacccgctgaacctgttgaagaagaaaacaaaaatggcaatggtaaacccaagagcttatccagtgggctgcgaaaaggcaccaaaaagtacccggactatatccaaattgctatgcccactgaatcaaggaacaaatttccactagagtggtggaaaacgggcattgccttcatatatgcagttttcaacctcgtcttgacaaccgtcatgatcacagttgtacatgagagggtccctcccaaggagcttagccctccactcccagacaagttttttgattacattgatagggtgaaatgggcattttctgtatcagaaataaatgggattatattagttggattatggatcacccagtggctgtttctgagatacaagtcaatagtgggacgcagattctgttttattattggaactttatacctgtatcgctgcattacaatgtatgttactactctacctgtgcctggaatgcatttccagtgtgctccaaagctcaatggagactctcaggcaaaagttcaacggattctacgattgatttctggtggtggattgtccataactggatcacatatcttatgtggagacttcctcttcagcggtcacacggttacgctgacactgacttatttgttcatcaaagaatattcgcctcgtcacttctggtggtatcatttaatctgctggctgctgagtgctgccgggatcatctgcattcttgtagcacacgaacactacactatcgatgtgatcattgcttattatatcacaacacgactgttttggtggtaccattcaatggccaatgaaaagaacttgaaggtctcttcacagactaatttcttatctcgagcatggtggttccccatcttttatttttttgagaaaaatgtacaaggctcaattccttgctgcttctcctggccgctgtcttggcctcctggctgcttcaaatcatcatgcaaaaagtattcacgggttcagaagattggtgaagacaatgagaaatcgacctgaggagcaaaacaaaggcatcagctcttacaccaaaagagttaacgctgtaaccaaaggtatagttttgttttttattttaggagaactgactggtaaatgaagaaatggaccaaattttgtgtaaacgattagaaagatgaacaaagtattgccctttgactggttttcttcttcatcctgagaaagatacattctcttgcagctcttcattcattggtgacaagcccccaccccgggactttactaatgagcttgttaaagaggtgccaaagaacatattcctcctttctttattctttctccaccaaaaccctctacttcagaattttttcaggatatttttcagcccaaggtcagaagaatgtgttaatattttaaataaaatatctggacatctacagccactgtgtaaatagaactgcctaatgttgagagtggtttttagcattaggtttagcaagggggagatccgtgggttgtgcgtcagctttgggtgaattttgtttctaccctgtcacggggaaagttcgggttgagtccaggagtgcacactgctgctgccacccaatgcgctacatatcacttttttttgttttgttttgttttgtttttaaaagatcattttatcttaaaaaggaaagctgatccaagtaaacacgaaagtatttgacacaccccacagattttacatgtgtgtaaatgtttcactttaaaatctctatgacagatacacaggaaacatgagatggtttctgctaatgagtggcccttgagtacacacttagatgctgtctgccctgtaaatttggatctggtgccccagggcagtcaactcttctagcacaggctgaaaacacgtgtgtgtcaactgaggttcacaccacttggggaatgagcctgttttctttccaggtcaggccctggtgtgagatcaattttagggctcctaattggagcacagaaatgtatttggtcaaatttcattgaaggtgatttcttcctttttctgttgtactttatggaaaaaccaagatggaacctgaaagttaatgtatccttgcttttagcaagagactcagtttcttataactagtcctaaggacatatgccgcaattgagtaattttacttttaccctatgaaaataacatggtgctgcactataatatactctcggaatcagtgtgttagttacagctatacagtgaagggggataactgtttctaaatttctttaaggtgatgccaaaaaatggattaaaaaatctgatcagatttaatgttaccagatttagtgcattatttaatgctattggatcttttggataattcttggcttaatttcttagctacttgaaggttaatttgcaagacttttaaaaccttagaaaagttttaaggttgcaaagttatcaacactggggcagagggtggagaggccaatgcgggtagaaggaggcagttatgtttatattgaaggtgaaatttttctttcatttagaatggaaaacatccccaaatgtatcattataaactagtcagccttgactacacaaaattgacctttaagttgcttgagaaaaacacaatgcaaatcgttcagaagggtcaacatcctttggtgctaaaatcttgtgtatgttttcagaatggctttttctgtatgttatagaataatcactaaaggaaaggtagttgaatttaaagtcatgaagcaagactctttaattcagttattttaaacaagaattaaaaccccaaacatccttggcaggctttgaagcacacagaattttctagtatttcttattaaatacaccaataataaacatatacttagtttacctgatgagtttagacataattctatataatgttcgcttatattcatttattaactagcaacacttgtgcaagaacaaggtattctgcttgaaaacactgatttttaagttcctgttgcccgattgtaaagaaaatcatctgacacagaagcctggattttgctctcctaacactggtgttttccttgagcctctaattcaaataaaacaaactgatacaccttacagccttattcatctgtgtctggataactcacttttcatctattgaataagaaaaagtgtttaaacttaataaaataaaaaattgtgcaccaattactacagatccttgaaacagtaagccttggattttagtcaagtaatccagtttttttttaatttaaaaaaaaccatcaccttttaaagaactttaaaaacacctgtgatgccaatgtggacattgccgctgccatgtctttacacgcatgtgtcgtatagctctgtcatcgagttgaggaagtccatggtttgcaaataagggtgggggaatcaaaatttcaagatggaaaaataaaacaaatagtaaaacccatttacatgtaggaaagaaaagttgagcttcaacccaatgtgccactttgatataaaacaagtatgatatatatataaactgaagatataaaacaagtatgatcttgcctttgaaatcataaatgtttggggtacctgttctttgccagttaagatacatatcttattatctttgtttttttcaagtctatgctcctgtttgaagcttttcctgtaatttaggttgtctgtgaaatacctataacatataattcctatagagtatgccacattttttttctaactcatttcaaatgaaattctctcagattctagtttttgagcttgtccactagatctgaaaataaagcatcctttcctgagtccacttgaactaattgtgaatttgttacttaatttactggcatcttgggaaacaagttttgctgtggcaggaaggctgttttgagagtgagcgttgagtctactctggtttgtggatgacattgcattagggttatttcctgtattaccagtgcccccttgtggcaatatactttatgacttggaatgcaaacaccacttttaaaagcctgttttcaagtttttgaaaggcatttgttttctgttgtttgccaataatctgaaagtatcatgtgaaaggaattattttaaaagcattttaaacctttcccaaaggtaaaatgtgctcagattataggcacttgtaattctaaccttgtatccatttgatcaaagaaaatttgtagaacatttttacctctcatgatcacaatcattagtgtctccctttataacgacctatgttttgtttactttgaaacaccaaatttgttgtcttggttttttttacatgacagaactcatgcagtttcttttttagttgaaagttcacatcttgccccttgaatagtttgaacatttctttcttaattcttttttgtttttgttttgcactgtaaaactgatgaaaactttaagccaatcttaatgcactagcctctgtagtgtaaggaagtgtgagaaggagtttcttaatgagtttacacgtttaaatcaagcatattataagttatatgccatgtgttgaaggcttttctatttatatatataaagatttttagtatttgtttttagtgtccttgtgttgcaataatttaactcctttgactcagttgctgaaaatatttcttctattaagaagtgctcttgacttcaacacccaaacactgaaaatcatgtcaatgttacccaaagataagtttttatacagatacacaccttataagttctgatttattttcttactcattatgctgtgttctaaataaatcatgaatgagaagagtgctttattgtgaaattatttaaaactgtcctttaaaagaaaaagaggaaacgatgaacaaaaactaatctaattgccaagttagaattcattatttaatttacctcctatgcaatgattaatgctgcaaaatgtatggttatgttaccgtatattcacaaaagaaatattattacaaggtttcagaggtagccaattgcattcttttggaaatttactgtactgtttcaatgtgttaagtgccttgttgtaaagtaaaattttaagtctagattcattattttcctgacatatatttttcattatgatatctactgtatgctattgtgatagttttatgaaatgcttacattttaatcaaatatgtaaatttcagaagctcttttttcctacccaccagtaccttaatcattggtttatcacattggattcaaattcaggttccttttttgataaagaggaaatttgttttccatgcttgtgattttgtgtttgtaaacatttcaggaggaatttaggagtgtaactatagtttatacttctataatgttgtcttacatttacatttttaagtgcctaattgttaaaactgatttatgtttctcttctaaagaggatatgtgtacttggtttctaatctctttggttttgctttttaaaaaatgcaagagcctatactttgtatttacctaataaaccacagtgacatcaacagtcttttcaaaattaa

SEQ ID NO: 52261 - DNA, 2127 bp, Artificial Sequence
  derived and/or modified sequence
aaatggagtttcaaaatcacaagcttctttcccacatgaacataagactaggagcacatatggaagagtaaagttgaagggaatttggatgatgatttggcaagatgctgtaagtggattaggcaaggctgctaaagagagacaggaaatggctgtgttagtgcttcggacctccgttagaagtagcagttcatggtgttgaaggtttgttgttgaaaataccttcctgaggcacctcttcattgtgcttattcttcccacaacattgtgccaagacactgtcaagcctgggcctgtcaaagcctgggatgtcaaaggcctgggtctttctcatcctgctgtaatgtattgatagctgggggctctgcagaaggacaagggaaaggtgggatagtaacatctttttgagggaagaattggcttcctttcttgaaagtggtgaaggtacagcatatagctgcatggaagaaacagtaatcggatggctaccttctacattttgtattaggaaacaaagtccattgtaagagtccatgttgatcttggaaatagaaggattgaaaaaagctaaatttccacaaagaacaagaacttgaccatctcctttttgatctgaagactaggggacaatggatatcatagagacagcaaaacttgaagaacatttggaaaatcaacccagtgatcctacgaacacttatgcaagacccgctgaacctgttgaagaagaaaacaaaaatggcaatggtaaacccaagagcttatccagtgggctgcgaaaaggcaccaaaaagtacccggactatatccaaattgctatgcccactgaatcaaggaacaaatttccactagagtggtggaaaacgggcattgccttcatatatgcagttttcaacctcgtcttgacaaccgtcatgatcacagttgtacatgagagggtccctcccaaggagcttagccctccactcccagacaagttttttgattacattgatagggtgaaatgggcattttctgtatcagaaataaatgggattatattagttggattatggatcacccagtggctgtttctgagatacaagtcaatagtgggacgcagattctgttttattattggaactttatacctgtatcgctgcattacaatgtatgttactactctacctgtgcctggaatgcatttccagtgtgctccaaagctcaatggagactctcaggcaaaagttcaacggattctacgattgatttctggtggtggattgtccataactggatcacatatcttatgtggagacttcctcttcagcggtcacacggttacgctgacactgacttatttgttcatcaaagaatattcgcctcgtcacttctggtggtatcatttaatctgctggctgctgagtgctgccgggatcatctgcattcttgtagcacacgaacactacactatcgatgtgatcattgcttattatatcacaacacgactgttttggtggtaccattcaatggccaatgaaaagaacttgaaggtctcttcacagactaatttcttatctcgagcatggtggttccccatcttttatttttttgagaaaaatgtacaaggctcaattccttgctgcttctcctggccgctgtcttggcctcctggctgcttcaaatcatcatgcaaaaagtattcacgggttcagaagattggtgaagacaatgagaaatcgacctgaggagcaaaacaaaggcatcagctcttacaccaaaagagttaacgctgtaaccaaaggtatagttttgttttttattttaggagaactgactggtaaatgaagaaatggaccaaattttgtgtaaacgattagaaagatgaacaaagtattgccctttgactggttttcttcttcatcctgagaaagatacattctcttgcagctcttcattcattggtgacaagcccccaccccgggactttactaatgagcttgttaaagaggtgccaaagaacatattcctcctttctttattctttctccaccaaaaccctctacttcagaattttttcaggatatttttcagcccaaggtcagaagaatgtgttaatattttaaataaaatatctggacatctaca

SEQ ID NO: 52262 - DNA, 581 bp, Artificial Sequence
  derived and/or modified sequence
gagcagtgtatccagggagaggactaattacgaggtttgaaaacctcatcaggtggctggtttctgtagcaggactaaaagactgctctcctaaattgagaacagctggggctgtgtgctagcaagtataaaagaggtggcagtggtgccccgtgtccgaaagaagtgtgtgctctctggagcctgtggagctgaagccaaaggtgggatagtaacatctttttgagggaagaattggcttcctttcttgaaagtggtgaaggtacagcatatagctgcatggaagaaacagtaatcggatggctaccttctacattttgtattaggaaacaaagtccattgtaagagtccatgttgatcttggaaatagaaggattgaaaaaagctaaatttccacaaagaacaagaacttgaccatctcctttttgatctgaagactaggggacaatggatatcatagagacagcaaaacttgaagaacatttggaaaatcaacccagtgatcctacgaacacttatgcaagacccgctgaacctgttgaagaagaaaacaaaaatggcaatggtaaacccaagagctt

SEQ ID NO: 52263 - DNA, 570 bp, Artificial Sequence
  derived and/or modified sequence
atctgtacatccactgtgaaatggagtttcaaaatcacaagcttctttcccacatgaacataagactaggagcacatatggaagagtaaagttgaagggaatttggatgatgatttggcaagatgctgtaagtggattaggcaaggctgctaaagagagacaggaaatggctgtgttagtgcttcggacctccgttagaagtagcagttcatggtgttgaaggtgggatagtaacatctttttgagggaagaattggcttcctttcttgaaagtggtgaaggtacagcatatagctgcatggaagaaacagtaatcggatggctaccttctacattttgtattaggaaacaaagtccattgtaagagtccatgttgatcttggaaatagaaggattgaaaaaagctaaatttccacaaagaacaagaacttgaccatctcctttttgatctgaagactaggggacaatggatatcatagagacagcaaaacttgaagaacatttggaaaatcaacccagtgatcctacgaacacttatgcaagacccgctgaacctgttgaagaagaaaa

SEQ ID NO: 52264 - protein, 97 aa, Artificial Sequence
  derived and/or modified sequence
MEEISLANLDTNKLEAIAQEIYVDLIEDSCLGFCFEVHRAVKCGYFYLEFAETGSVKDFGIQPVEDKGACRLPLCSLPGEPGNGPDQQLQRSPPEFQ

SEQ ID NO: 52265 - DNA, 294 bp, Artificial Sequence
  derived and/or modified sequence
atggaggagatcagcctggccaacctggacaccaacaagctggaggccatcgcccaggagatctacgtggacctgatcgaggacagctgcctgggcttctgcttcgaggtgcacagagccgtgaagtgcggctacttctacctggagttcgccgagaccggcagcgtgaaggacttcggcatccagcccgtggaggacaagggcgcctgcagactgcccctgtgcagcctgcccggcgagcccggcaacggccccgaccagcagctgcagagaagcccccccgagttccagtag

SEQ ID NO: 52266 - DNA, 294 bp, Artificial Sequence
  derived and/or modified sequence
atggaggaaatttccttggccaatcttgatacgaacaaattggaagctatcgcccaggagatctatgtcgacctgattgaggatagctgtttgggtttctgtttcgaggtccacagagctgtaaagtgtggatatttttatctggagtttgctgagacaggaagtgtcaaggatttcgggatccagcctgtcgaggacaaaggcgcatgccggctacccctctgctctttgcccggtgagccagggaatgggccagaccaacagctccaaagaagcccacctgaattccaatag

SEQ ID NO: 52267 - DNA, 294 bp, Artificial Sequence
  derived and/or modified sequence
atggaggagatcagcctggccaacctggacaccaacaagctggaggccatcgcccaggagatctacgtggacctgattgaggacagctgcctgggcttctgctttgaggtgcacagagctgtgaagtgtggctacttctacctggagtttgctgagactggatctgtgaaggactttggcatccagcctgtggaggacaagggggcctgccgcctgcccctgtgcagcctgcccggggagcctggaaatggaccagaccagcagctgcagaggagccccccagagttccagtag

SEQ ID NO: 52268 - DNA, 294 bp, Artificial Sequence
  derived and/or modified sequence
atggaggagatcagcctggccaacctggacaccaacaagctggaggccattgctcaggaaatttacgtcgatctgattgaagatagttgcttaggcttttgttttgaagtacacagggctgtgaagtgtgggtacttttatctggaattcgcggagacagggtcagtgaaagattttggtatccagccggtggaggataaaggcgcctgtcgactgcctctttgttccctgccaggcgaaccaggtaacggccctgaccagcagcttcaacgcagtccaccggaattccagtag

SEQ ID NO: 52269 - DNA, 294 bp, Artificial Sequence
  derived and/or modified sequence
atggaagagattagtttagccaaccttgacactaacaaactggaagcaattgcccaggaaatatatgtggacctcatcgaagacagctgcctaggcttctgctttgaagtgcatcgcgcagtgaaatgtggatacttctatcttgaatttgccgagaccggatcagtcaaagattttgggattcagcccgtcgaggacaaaggcgcatgtaggttaccattgtgctccttgccaggagagccagggaatggcccagaccagcaactccaaaggagtccccctgagttccagtag

SEQ ID NO: 52270 - DNA, 3673 bp, Artificial Sequence
  derived and/or modified sequence
aggcgctctgaggggcggaagcggagaggcggggctaggcccgacaggggagcggaagaggcccaggaggctgggtgaggcgctgagacggtttggcggtgagtcctgggccaggcgcagctgaaaggcccgcaacccgggaaacgtcaaaacaaacagaaggacttgggattccggagcagtcgcccctatcgctgctcctgcagttgcggacgccaccgaccccgccgccggaggactgggcactgaaaggcctctaggcctaggcgcggcccgcggagccagacgtgttgctgccgtgagtaaaacgagcgccctctccgcactcgtttacaaattaaaatggaggaaatttcgttggccaacctggatactaacaagctagaggccatcgctcaggagatttacgtagacctgatagaggattcttgtttgggattctgctttgaggtgcaccgggcagtcaagtgtggctacttctacctggagttcgcagagactggtagcgtgaaggattttggcattcagccagtggaagacaaaggagcgtgccgcctcccgctttgctcccttcccggagaacctgggaatgggcctgatcagcagctgcagcgctcacctccggaattccagtagctgcaaaatgagagtctgaaagtggccaggacaataacatagactggtcctgtggcttcgaggagtaagctaagtagaaaaaagtagaaaaatcagacaaaagttttaattcccccttgaagatcctagcatttaaaaacccaaagtggataatttaggaatcctttttttaaagtgtattacctggagcaagctctgaagccctgggcaggaggagctgcacagcctgcgggccatgcagtgcctgttgatctctaaacacaccaggatgtgcgcaagatcctgtagtgcccccagtgcacaggtgagcagttgtgtgcccagcatataaaatttttggttcctcagcctttctgtctgcctgatgtcaagggcttcttggacagtttggacgttacagttcgtcaggccgtgatcagtggcctgcagtgggactgctcctttgatatctgaacctctgttatgggcttctctgagacaagtaaatgtcaggtgcaagatctggatactaacagtttcagtttgggaaatccaagaaaaagaattatcaagtttgatagggaagctctgtagccttgactccagcaagaagaaaaggtcaaaaccacgtgtttcccaaaagtccagactacaatgattcagctgacttgaggacaaggcctagcatttggctgagcagagccctcttccttgccctccaacctggtggcataggcttggcaaatggacaacttggttgtccagacaggttgaggattcggttatgatcccctggggaggtagcagggacctctgcaactatgcatgatttctcaaacttcaagattcatgtctggatgtattatgctgtggatataagtttagtagggcggtcatttcctactctgagttactggttacctagccagtccatgggtgtgacttggtccttaagtcaggtcactatctgcctcccaccctgggggcaggactgaagtatggaagagcatcatggctgtgcaggaggctgtggtttgaaaactgagcccagagggcactttcagctgccctcaataatgtgaatggattagtgctaggagccaaggagcaggactggattatctcatctgactgtgtgcagaatcctgttgaatgtccctgttttctttggttgggcagtcagagctctgctatggtgaacatccagactgtcaccactttctgtctgccgctcgaaagggatagtcctttccactcggtcccctttggatcttcttgacaacaggagcagtccttttattgttagaagtcagagaaagacctccagaatctcctgactttagggaatggtataggggaagatgggaagtaagagtcacatatcaaaactaccctccactttattccctgagcgagggtttatgaagtataaaggggtgggagccccgaggtgagcgggaacggtgctgctttatttgaaatgttttcttacctcattctgtgccccagtagggggtccagcctcatctgtctggcttggccctgtgttcctcctgtcccctgctccactgcctatctggtgccccaggtgctgcttgccactccagctgtcacattgaacagtttcaattcagctcttaatgctcctgcttccgaagcctgcccaatttcttttttcttggcctctgttttttttttttctttctttttcccttgtttttgtagaagactcagaggagaatctttcttatggctccctctgttgagattggaattggaagagaacttaattttttgtatttaaaatgcagtgtcatgcctataagcatttctcctatataggactgctttgctagtgtgccctcttgctgtgtcttacttcataaggagttgtatcttcccacctccatttcaatactgccggttaggacctaagtagaagagcagtaaaggctgattgacacacagggggatggagttggtccttgtccattctctcacccttgctgtgcatgtatcaatccttatcccagaaggtactatttagactgtatagactgatttagattacatactttagaggattaaggaaaccatagagtttgggccttggaactgttactgccttgtcctagagttgtcctgatcaggcttggggcctagttacagattagtcttaaagaattgcattaacttaaaaaaaatcaaaccttggcaagagctaaaataatttggagatatctttgcccttgacttgtagacgacatctaagaggatgaagaaaggagagtctaagtgagactctggcctacttcctaacaatgtcttggaagtgggatgatggtaaaggagaaaggccacagtccaatccctctgccttcagatagggaactcaaatcctgaaattactgttttctttctggccttttctcctggttagaggaggaagcggaaagtagttttgagtagtattttgttcatattaccccccttttgttttttgtttctggcccctctaccaatagggcagtagcctcctgccctggatgggtataaggtgggcttggtccaacaggtgcccagagggtacatactcctttctggggagagaatgctccctaccatatagttgacagtggttaggaactctccctttccctacctaccttccttttaatagcagaattcctatttttcccttgattatgtgtattgatcaccctgcaatcctattatgtatctgagtgtgtgtgtgtgtgtatgtgtgtgttatgggggaaggggggggttctttaaaatttctgtggtttgtggctttttcttccatacattagttcccaccatcgcatgcccagggaccactgcctggcattatcgcatgctgggatcatcgggggagggtagtgaagctcaccactgtcctttgttttggagatttttatttttgcataagtagtccatcctatacagatagctgattaactgtattcccctttcccctatggctgctggtgtaaataaactgcatctccccattggtaaacagtaataaaatttt

SEQ ID NO: 52271 - protein, 146 aa, Artificial Sequence
  derived and/or modified sequence
MNSKGQYPTQPTYPVQPPGNPVYPQTLHLPQAPPYTDAPPAYSELYRPSFVHPGAATVPTMSAAIPMAYYPVGPIYPPGSTVLVEGGYDAGARFGAGATAGNIPPPPPGCPPNAAQLAVMQGANVLVTQRKGNFFMGGSDGGYTIW

SEQ ID NO: 52272 - DNA, 441 bp, Artificial Sequence
  derived and/or modified sequence
atgaacagcaagggccagtaccccacccagcccacctaccccgtgcagccccccggcaaccccgtgtacccccagaccctgcacctgccccaggcccccccctacaccgacgccccccccgcctacagcgagctgtacagacccagcttcgtgcaccccggcgccgccaccgtgcccaccatgagcgccgccatccccatggcctactaccccgtgggccccatctacccccccggcagcaccgtgctggtggagggcggctacgacgccggcgccagattcggcgccggcgccaccgccggcaacatccccccccccccccccggctgcccccccaacgccgcccagctggccgtgatgcagggcgccaacgtgctggtgacccagagaaagggcaacttcttcatgggcggcagcgacggcggctacaccatctggtag

SEQ ID NO: 52273 - DNA, 441 bp, Artificial Sequence
  derived and/or modified sequence
atgaactccaagggccagtatccgacccagccaacctacccggtccaacctccagggaatccggtgtacccccagactctacacctcccccaagctcccccatacactgacgcacctcccgcttattccgagctgtaccggccatcattcgtgcatccaggagccgcgacagtacctacgatgagcgctgccatcccaatggcttactaccctgttggcccaatatatcctcccggctcaacagtgctcgttgaaggcggctacgatgcgggtgcacggttcggggcaggcgcaacagcgggtaacatacccccacctccgcctggctgccctccaaacgccgctcagctggccgtgatgcaaggtgccaacgtcctggtgactcagaggaaggggaactttttcatgggcgggtctgatggaggttacacgatctggtag

SEQ ID NO: 52274 - DNA, 441 bp, Artificial Sequence
  derived and/or modified sequence
atgaacagcaagggccagtaccccacccagcccacctaccctgtgcagcccccaggcaaccctgtgtacccccagaccctgcacctgccccaggccccaccctacacagatgcccccccagcctacagcgagctgtaccggcccagctttgtgcaccctggagctgccaccgtgcccaccatgtctgctgccatccccatggcctactaccctgtgggccccatctacccacctggcagcacagtgctggtggagggcggctatgatgctggggccaggtttggagctggggccacagctggcaacatccccccacctcctcctggctgccccccaaatgctgcccagctggccgtgatgcagggcgccaacgtgctggtgacccagaggaaaggaaacttcttcatgggcggcagtgatggcggctacaccatctggtag

SEQ ID NO: 52275 - DNA, 441 bp, Artificial Sequence
  derived and/or modified sequence
atgaacagcaagggccagtaccccacccagcccacctaccccgtgcaacctcccggaaacccagtttacccacagaccctacatttgcctcaggcgcccccatacactgatgctcctcctgcgtacagtgaactgtatcgcccaagcttcgtccacccaggtgcggctaccgtgcccactatgagtgcagccattcccatggcttattaccccgttggtcccatctatcctcccgggagtacagtgcttgtggagggcgggtacgacgcaggggcaagatttggggccggggccacagccggcaacattcctcctcccccaccggggtgccctccaaacgcagcgcagcttgcagttatgcagggcgcaaacgtgttagttacacagagaaaagggaacttcttcatgggcggatccgatggtggttataccatatggtag

SEQ ID NO: 52276 - DNA, 441 bp, Artificial Sequence
  derived and/or modified sequence
atgaactcaaaaggacaataccccacacagcctacttaccctgtccaacccccaggaaatcctgtgtatccccagactttacacctgccccaggccccaccctatactgacgcccctcccgcttactccgaactttaccgcccatctttcgtgcatcctggcgctgccacagtgcctactatgtccgccgcaatacccatggcttactaccccgtagggcctatctaccctcctggctcaaccgtgctagtagagggcggttacgatgccggtgcccgattcggcgctggagccaccgccggaaacatccctcctccacctcccggatgcccacccaacgccgctcagctcgccgtgatgcagggggctaacgttctcgtgacccaacgtaaaggaaatttcttcatggggggatctgacggaggctacaccatctggtag

SEQ ID NO: 52277 - protein, 207 aa, Artificial Sequence
  derived and/or modified sequence
MNSKGQYPTQPTYPVQPPGNPVYPQTLHLPQAPPYTDAPPAYSELYRPSFVHPGAATVPTMSAAFPGASLYLPMAQSVAVGPLGSTIPMAYYPVGPIYPPASTSWMPSQCCSACSHAGSQRPRNSAEGELLHGWFRWWLHHLVRNQGHLCAGKDITYLQHFSQCNCFSHINLKLQFRHMLLGCLSGAQTFRHFSNLIRNHVMVAVPP

SEQ ID NO: 52278 - DNA, 624 bp, Artificial Sequence
  derived and/or modified sequence
atgaacagcaagggccagtaccccacccagcccacctaccccgtgcagccccccggcaaccccgtgtacccccagaccctgcacctgccccaggcccccccctacaccgacgccccccccgcctacagcgagctgtacagacccagcttcgtgcaccccggcgccgccaccgtgcccaccatgagcgccgccttccccggcgccagcctgtacctgcccatggcccagagcgtggccgtgggccccctgggcagcaccatccccatggcctactaccccgtgggccccatctacccccccgccagcaccagctggatgcccagccagtgctgcagcgcctgcagccacgccggcagccagagacccagaaacagcgccgagggcgagctgctgcacggctggttcagatggtggctgcaccacctggtgagaaaccagggccacctgtgcgccggcaaggacatcacctacctgcagcacttcagccagtgcaactgcttcagccacatcaacctgaagctgcagttcagacacatgctgctgggctgcctgagcggcgcccagaccttcagacacttcagcaacctgatcagaaaccacgtgatggtggccgtgcccccctag

SEQ ID NO: 52279 - DNA, 2450 bp, Artificial Sequence
  derived and/or modified sequence
aggcaacgactgtcctggggaagacagggcagcgaagattccagtgcaggtctcattcaggaaaggatacatgtgagctggagtggcaaaataaattttaacagagctgaagcttaagttgggcttggtggggagggacgcatgataaactaaggtgtggggagccgatttcaggcagtgcgacaaatttgcagaaatctaagcccctcgtggaaggttgccaaggtgaggtgaccttgagtgaatgcgtgtaggtggaaaaaggttccggggaatgcttgcatcgttctgcatccgagcgtccaacagagaaaagatcctgtttccagacaatacctgcatttggtttttctccagctgagggacaccggtagggggggggaggacagaaacgagcagggggtggggccaaggcgagtgggcgggaccgcgcggaccctcccgcggccgactggaggcccggagcaggggcggagtttccggcggcagcgccactcgggcgtcgggtgacgctaggcggacggaccatcatgtgacacggaagtagctccgaacaggaagaggacgaaaaaaataaccgtccgcgacgccgagacaaaccggacccgcaaccaccatgaacagcaaaggtcaatatccaacacagccaacctaccctgtgcagcctcctgggaatccagtataccctcagaccttgcatcttcctcaggctccaccctataccgatgctccacctgcctactcagagctctatcgtccgagctttgtgcacccaggggctgccacagtccccaccatgtcagccgcatttcctggagcctctctgtatcttcccatggcccagtctgtggctgttgggcctttaggttccacaatccccatggcttattatccagtcggtcccatctatccacctggctccacagtgctggtggaaggagggtatgatgcaggtgccagatttggagctggggctactgctggcaacattcctcctccacctcctggatgccctcccaatgctgctcagcttgcagtcatgcagggagccaacgtcctcgtaactcagcggaaggggaacttcttcatgggtggttcagatggtggctacaccatctggtgaggaaccaaggccacctctgtgccgggaaagacatcacataccttcagcacttctcacaatgtaactgctttagtcatattaacctgaagttgcagtttagacacatgttgttggggtgtctttctggtgcccaaactttcaggcacttttcaaatttaataaggaaccatgtaatggtagcagtacctccctaaagcattttgaggtaggggaggtatccattcataaaatgaatgtgggtgaagccgccctaaggattttcctttaatttctctggagtaatactgtaccatactggtctttgcttttagtaataaaacatcaaattaggtttggagggaactttgatcttcctaagaattaaagttgccaaattattctgattggtctttaatctcctttaagtctttgatatatattacttgttataaatggaacgcattagttgtctgccttttcctttccatcccttgccccacccatcccatctccaaccctagtcttccatttcctcccgccagtctccattgaatcaatggtgcaggacagaaagccagtcagactaatttccttctttcctcgcacttctccccactcgtcatcttttaactagtgtttcacaaggatcctctgaaaccctctctgtgccccaagtacagatgccattacttctgctttcgtatctcctcaggcaaaagtggagggtgccttatgggccctcctcataggttgtctctgcatacacgaacctaacccaaatttgctttggtgccagaaaaactgagctatgtttgaacaaagatgtcgtgcaaactgtactgtgaacaacagttggtttaaaatatgaggggcaaggaggaggatgcatttcaaaagcttgattgatgtgttcagagctaaattaagaggagttttcagatcaaaaactggttaccattttttgtcagagtgtctgatgcggccactcattcggctccccagaattcctagactgggttaatagggtcatattgtgaatgtctcactacaaaatgacttgagtccagtgaaatctcattagggtttaagaatatttcagggatccttaatgttttgatttttgttttctgaaattggattttattttattttatcttataatttcagttcatctaaattgtgtgttctgtacatgtgatgtttgactgtaccattgactgttatggaagttcagcgttgtatgtctctctctacactgtggtgcacttaacttgtggaatttttatactaaaaatgtagaataaagactattttgaagatttgaataaagtgatgaagttgcattaca

SEQ ID NO: 52280 - DNA, 701 bp, Artificial Sequence
  derived and/or modified sequence
gacacggaagtagctccgaacaggaagaggacgaaaaaaataaccgtccgcgacgccgagacaaaccggacccgcaaccaccatgaacagcaaaggtcaatatccaacacagccaacctaccctgtgcagcctcctgggaatccagtataccctcagaccttgcatcttcctcaggctccaccctataccgatgctccacctgcctactcagagcctccacctcctggatgccctcccaatgctgctcagcttgcagtcatgcagggagccaacgtcctcgtaactcagcggaaggggaacttcttcatgggtggttcagatggtggctacaccatctggtgaggaaccaaggccacctctgtgccgggaaagacatcacataccttcagcacttctcacaatgtaactgctttagtcatattaacctgaagttgcagtttagacacatgttgttggggtgtctttctggtgcccaaactttcaggcacttttcaaatttaataaggaaccatgtaatggtagcagtacctccctaaagcattttgaggtaggggaggtatccattcataaaatgaatgtgggtgaagccgccctaaggattttcctttaatttctctggagtaatactgtaccatactggtctttgcttttagtaataaaacatcaaattaggtttggagggaactttgatcttcctaag

SEQ ID NO: 52281 - DNA, 1810 bp, Artificial Sequence
  derived and/or modified sequence
ataaccgtccgcgacgccgagacaaaccggacccgcaaccaccatgaacagcaaaggtcaatatccaacacagccaacctaccctgtgcagcctcctgggaatccagtataccctcagaccttgcatcttcctcaggctccaccctataccgatgctccacctgcctactcagagctctatcgtccgagctttgtgcacccaggggctgccacagtccccaccatgtcagccgcaatccccatggcttattatccagtcggtcccatctatccacctggctccacagtgctggtggaaggagggtatgatgcaggtgccagatttggagctggggctactgctggcaacattcctcctccacctcctggatgccctcccaatgctgctcagcttgcagtcatgcagggagccaacgtcctcgtaactcagcggaaggggaacttcttcatgggtggttcagatggtggctacaccatctggtgaggaaccaaggccacctctgtgccgggaaagacatcacataccttcagcacttctcacaatgtaactgctttagtcatattaacctgaagttgcagtttagacacatgttgttggggtgtctttctggtgcccaaactttcaggcacttttcaaatttaataaggaaccatgtaatggtagcagtacctccctaaagcattttgaggtaggggaggtatccattcataaaatgaatgtgggtgaagccgccctaaggattttcctttaatttctctggagtaatactgtaccatactggtctttgcttttagtaataaaacatcaaattaggtttggagggaactttgatcttcctaagaattaaagttgccaaattattctgattggtctttaatctcctttaagtctttgatatatattacttgttataaatggaacgcattagttgtctgccttttcctttccatcccttgccccacccatcccatctccaaccctagtcttccatttcctcccgccagtctccattgaatcaatggtgcaggacagaaagccagtcagactaatttccttctttcctcgcacttctccccactcgtcatcttttaactagtgtttcacaaggatcctctgaaaccctctctgtgccccaagtacagatgccattacttctgctttcgtatctcctcaggcaaaagtggagggtgccttatgggccctcctcataggttgtctctgcatacacgaacctaacccaaatttgctttggtgccagaaaaactgagctatgtttgaacaaagatgtcgtgcaaactgtactgtgaacaacagttggtttaaaatatgaggggcaaggaggaggatgcatttcaaaagcttgattgatgtgttcagagctaaattaagaggagttttcagatcaaaaactggttaccattttttgtcagagtgtctgatgcggccactcattcggctccccagaattcctagactgggttaatagggtcatattgtgaatgtctcactacaaaatgacttgagtccagtgaaatctcattagggtttaagaatatttcagggatccttaatgttttgatttttgttttctgaaattggattttattttattttatcttataatttcagttcatctaaattgtgtgttctgtacatgtgatgtttgactgtaccattgactgttatggaagttcagcgttgtatgtctctctctacactgtggtgcacttaacttgtggaatttttatactaaaaatgtagaataaagactattttgaagatttgaataaagtgatgaagttgcattac

SEQ ID NO: 52282 - DNA, 872 bp, Artificial Sequence
  derived and/or modified sequence
gtgacacggaagtagctccgaacaggaagaggacgaaaaaaataaccgtccgcgacgccgagacaaaccggacccgcaaccaccatgaacagcaaaggtcaatatccaacacagccaacctaccctgtgcagcctcctgggaatccagtataccctcagaccttgcatcttcctcaggctccaccctataccgatgctccacctgcctactcagagctctatcgtccgagctttgtgcacccaggggctgccacagtccccaccatgtcagccgcatttcctggagcctctctgtatcttcccatggcccagtctgtggctgttgggcctttaggttccacaatccccatggcttattatccagtcggtcccatctatccacctgcctccacctcctggatgccctcccaatgctgctcagcttgcagtcatgcagggagccaacgtcctcgtaactcagcggaaggggaacttcttcatgggtggttcagatggtggctacaccatctggtgaggaaccaaggccacctctgtgccgggaaagacatcacataccttcagcacttctcacaatgtaactgctttagtcatattaacctgaagttgcagtttagacacatgttgttggggtgtctttctggtgcccaaactttcaggcacttttcaaatttaataaggaaccatgtaatggtagcagtacctccctaaagcattttgaggtaggggaggtatccattcataaaatgaatgtgggtgaagccgccctaaggattttcctttaatttctctggagtaatactgtaccatactggtctttgcttttagtaataaaacatcaaattaggtttggagggaactttgatcttcctaag

SEQ ID NO: 52283 - DNA, 601 bp, Artificial Sequence
  derived and/or modified sequence
ggacgaaaaaaataaccgtccgcgacgccgagacaaaccggacccgcaaccaccatgaacagcaaaggtcaatatccaacacagccaacctaccctgtgcagcctcctgggaatccagtataccctcagaccttgcatcttcctcaggctccaccctataccgatgctccacctgcctactcagagtctgtggctgttgggcctttaggttccacaatccccatggcttattatccagtcggtcccatctatccacctggctccacagtgctggtggaaggagggtatgatgcaggtgccagatttggagctggggctactgctggcaacattcctcctccacctcctggatgccctcccaatgctgctcagcttgcagtcatgcagggagccaacgtcctcgtaactcagcggaaggggaacttcttcatgggtggttcagatggtggctacaccatctggtgaggaaccaaggccacctctgtgccgggaaagacatcacataccttcagcacttctcacaatgtaactgctttagtcatattaacctgaagttgcagtttagacacatgttgttggggtgtctttctggtgcccaaac

SEQ ID NO: 52284 - DNA, 624 bp, Artificial Sequence
  derived and/or modified sequence
atgaactcaaaagggcagtacccgactcagcccacgtatcccgtccagccgcccgggaatccagtttatccccagacactccacctgccacaagcaccaccatacaccgacgctccacccgcatattctgagctgtaccgcccgtccttcgtgcaccccggtgctgcgaccgttcctactatgagtgcagccttccctggagcaagcttgtacctgcctatggcccagtcggtcgccgtgggaccattggggtccaccattcccatggcctattatcccgttggacccatttatcccccagcttcaactagctggatgccctcacagtgctgcagcgcctgtagtcatgccggctcacagcggcccagaaatagcgcggaaggagaacttctccatggatggttcagatggtggcttcaccatttggtgaggaaccagggccatctgtgtgccggtaaagacattacttacttacaacacttctctcagtgcaattgtttttctcatattaatctgaaactccagttcagacacatgctactgggctgtcttagcggggcccagacatttaggcacttcagcaatctaattcggaaccacgtgatggtcgccgtaccaccctag

SEQ ID NO: 52285 - DNA, 624 bp, Artificial Sequence
  derived and/or modified sequence
atgaacagcaagggccagtaccccacccagcccacctaccctgtgcagcccccaggcaaccctgtgtacccccagaccctgcacctgccccaggccccaccctacacagatgcccccccagcctacagcgagctgtaccggcccagctttgtgcaccctggagctgccaccgtgcccaccatgtctgctgccttccctggggccagcctgtacctgcccatggcccagagcgtggccgtgggccccctgggcagcaccatccccatggcctactaccctgtgggccccatctaccccccagccagcacctcctggatgcccagccagtgctgcagcgcctgcagccatgctggcagccagaggcccagaaattctgctgagggggagctgctgcacggctggttccgctggtggctgcaccacctggtgaggaaccagggccacctgtgtgccggcaaggacatcacctacctgcagcacttcagccagtgcaactgcttcagccacatcaacctgaagctgcagttccgccacatgctgctgggctgcctgagcggggcccagaccttccgccacttcagcaacctgatccggaaccacgtgatggtggccgtgcccccatag

SEQ ID NO: 52286 - DNA, 624 bp, Artificial Sequence
  derived and/or modified sequence
atgaacagcaagggccagtaccccacccagcccacctaccccgtgcagccacctggaaatccggtatatccacagaccctgcacctcccccaggcaccgccctataccgacgcgccgcctgcgtacagtgaattgtataggccctcattcgtgcacccgggcgcagcgaccgtgcctacaatgtcggcagcgttccctggggcctctttgtatctacctatggcacagtctgtcgcagtaggacccctgggcagtacaataccaatggcctattatccagttggcccaatatatccccccgcatctacgtcctggatgccgagtcagtgctgttctgcgtgtagccacgctggctcccagcgcccaagaaacagtgccgaaggagagctgctgcatgggtggttcagatggtggttgcatcatctagtgagaaatcaaggccatctatgtgctggcaaagacattacgtatcttcagcatttctctcagtgcaactgcttcagccacatcaatctgaagcttcagttccggcatatgttgttgggatgtctgagcggcgctcaaacgtttaggcacttctcgaatttgatccgcaaccatgttatggtcgccgtgcccccttag

SEQ ID NO: 52287 - DNA, 624 bp, Artificial Sequence
  derived and/or modified sequence
atgaatagtaaagggcagtacccaacccagccaacataccctgtccaacctcccggtaatcctgtttacccacagactctgcatctaccacaggcgcctccctacaccgacgcaccccctgcttatagcgagctatatcggccatcattcgttcatcctggggctgcaaccgttccaactatgtcagctgcttttccaggagccagtctgtacttgccaatggctcagtctgtcgctgtgggcccacttgggtcaactatacctatggcatactatcctgtgggccctatctaccctcccgcatcaacaagctggatgcccagtcagtgctgctccgcctgcagccatgccggtagtcaacgaccgaggaacagcgctgaaggagagttgctccacggctggttccgatggtggctgcatcatttggtaaggaatcagggacatttgtgcgcgggtaaggatattacgtatctccagcacttttcccagtgcaattgcttttctcacataaatctcaagcttcaattccgtcatatgttactgggttgtctgtctggagcccagactttccgacatttcagtaatctgatacggaatcacgttatggtagccgtcccaccatag

SEQ ID NO: 52288 - protein, 136 aa, Artificial Sequence
  derived and/or modified sequence
MNSKGQYPTQPTYPVQPPGNPVYPQTLHLPQAPPYTDAPPAYSESVAVGPLGSTIPMAYYPVGPIYPPGSTVLVEGGYDAGARFGAGATAGNIPPPPPGCPPNAAQLAVMQGANVLVTQRKGNFFMGGSDGGYTIW

SEQ ID NO: 52289 - DNA, 411 bp, Artificial Sequence
  derived and/or modified sequence
atgaacagcaagggccagtaccccacccagcccacctaccccgtgcagccccccggcaaccccgtgtacccccagaccctgcacctgccccaggcccccccctacaccgacgccccccccgcctacagcgagagcgtggccgtgggccccctgggcagcaccatccccatggcctactaccccgtgggccccatctacccccccggcagcaccgtgctggtggagggcggctacgacgccggcgccagattcggcgccggcgccaccgccggcaacatccccccccccccccccggctgcccccccaacgccgcccagctggccgtgatgcagggcgccaacgtgctggtgacccagagaaagggcaacttcttcatgggcggcagcgacggcggctacaccatctggtag

SEQ ID NO: 52290 - DNA, 411 bp, Artificial Sequence
  derived and/or modified sequence
atgaacagtaagggtcagtacccaacacaacccacataccctgtgcagccccctgggaatccggtgtatccacaaacactgcatctgccacaggcaccaccctatacagacgcacccccagcttacagtgagtccgtggctgtcggccctttgggatctactattccgatggcctattaccccgtgggacctatttatccgcccgggtccaccgtgctggtggagggggggtatgacgctggcgcgcgctttggtgctggcgccaccgccggcaatattccccctcccccaccggggtgtcctcccaacgctgcccaactggcggtcatgcaaggagctaacgtgcttgtcactcagcggaaaggcaatttcttcatgggaggatcagacggtgggtatacgatatggtag

SEQ ID NO: 52291 - DNA, 411 bp, Artificial Sequence
  derived and/or modified sequence
atgaacagcaagggccagtaccccacccagcccacctaccctgtgcagcccccaggcaaccctgtgtacccccagaccctgcacctgccccaggccccaccctacacagatgcccccccagcctacagcgagagcgtggccgtgggccccctgggcagcaccatccccatggcctactaccctgtgggccccatctacccacctggcagcacagtgctggtggagggcggctatgatgctggggccaggtttggagctggggccacagctggcaacatccccccacctcctcctggctgccccccaaatgctgcccagctggccgtgatgcagggcgccaacgtgctggtgacccagaggaaaggaaacttcttcatgggcggcagtgatggcggctacaccatctggtag

SEQ ID NO: 52292 - DNA, 411 bp, Artificial Sequence
  derived and/or modified sequence
atgaacagcaagggccagtaccccacccagcccacctaccccgtgcagcctcctggcaacccagtgtatccacaaaccctgcacctgccgcaggcacccccatacaccgacgccccaccagcttacagcgagtcagttgccgtcggccccttgggatccacgatacccatggcctattacccagttggacccatctacccacccggtagcactgtgctcgttgagggtggatacgatgctggcgcccgatttggagccggtgcgactgccggaaatatacctcctcccccaccaggatgtccacctaatgccgcccaactggctgtcatgcagggtgcaaatgttcttgtcactcaacgcaagggtaattttttcatgggcggtagtgacggcggctacaccatatggtag

SEQ ID NO: 52293 - DNA, 411 bp, Artificial Sequence
  derived and/or modified sequence
atgaatagcaaaggccagtacccaacacagcccacatatcctgttcagccgcctggcaatcccgtgtacccacagactctgcacctccctcaggccccaccatacacagatgctccgcctgcctacagcgagtccgtggcggttggacccctggggtctaccattcctatggcctactatcctgttggacccatttatccaccagggtcaacagtactggtggagggaggttatgatgcaggtgcacggtttggcgctggggcaacagccggaaatattccaccccctccgccaggatgtccccctaatgcagctcaactagctgtcatgcagggcgcaaacgtgctcgtgactcaacgcaaaggaaattttttcatgggcggatctgatggtggctacactatttggtag

SEQ ID NO: 52294 - protein, 86 aa, Artificial Sequence
  derived and/or modified sequence
MNSKGQYPTQPTYPVQPPGNPVYPQTLHLPQAPPYTDAPPAYSEPPPPGCPPNAAQLAVMQGANVLVTQRKGNFFMGGSDGGYTIW

SEQ ID NO: 52295 - DNA, 261 bp, Artificial Sequence
  derived and/or modified sequence
atgaacagcaagggccagtaccccacccagcccacctaccccgtgcagccccccggcaaccccgtgtacccccagaccctgcacctgccccaggcccccccctacaccgacgccccccccgcctacagcgagccccccccccccggctgcccccccaacgccgcccagctggccgtgatgcagggcgccaacgtgctggtgacccagagaaagggcaacttcttcatgggcggcagcgacggcggctacaccatctggtag

SEQ ID NO: 52296 - DNA, 261 bp, Artificial Sequence
  derived and/or modified sequence
atgaacagcaagggccagtatccaacccagcccacataccctgttcaacctcccgggaatccggtgtaccctcagacactgcacttgccacaggccccaccttacactgacgcaccccctgcttactcagagccacctcctcctggatgcccccccaatgccgctcagctggcagttatgcagggcgccaacgtcctggtgacacaacgcaaggggaatttcttcatgggtgggtctgatggcggttataccatatggtag

SEQ ID NO: 52297 - DNA, 261 bp, Artificial Sequence
  derived and/or modified sequence
atgaacagcaagggccagtaccccacccagcccacctaccctgtgcagcccccaggcaaccctgtgtacccccagaccctgcacctgccccaggccccaccctacacagatgcccccccagcctacagcgagcccccacctcctggctgccccccaaatgctgcccagctggccgtgatgcagggcgccaacgtgctggtgacccagaggaaaggaaacttcttcatgggcggcagtgatggcggctacaccatctggtag

SEQ ID NO: 52298 - DNA, 261 bp, Artificial Sequence
  derived and/or modified sequence
atgaacagcaagggccagtaccccacccagcccacctaccccgtgcagccaccagggaatcctgtgtatccgcaaaccctccatctgcctcaggcacccccatacactgacgccccgccagcctactcagagcctcctccacccggctgtcctcctaatgcagcacagctcgctgtcatgcaaggagctaacgtcttagtcacacagcggaagggcaacttttttatgggtgggagcgacggaggatataccatatggtag

SEQ ID NO: 52299 - DNA, 261 bp, Artificial Sequence
  derived and/or modified sequence
atgaacagcaaaggccagtatccaacccaacctacgtaccctgttcaaccacccggaaatcctgtttaccctcagacccttcacctcccacaggcgccaccatatacggacgccccacctgcttatagtgaacccccaccccctggatgccccccaaatgccgcacagctcgccgtaatgcagggtgccaacgtgctggttacccagcgtaagggcaatttcttcatggggggatctgacgggggttatacaatctggtag

SEQ ID NO: 52300 - protein, 153 aa, Artificial Sequence
  derived and/or modified sequence
MNSKGQYPTQPTYPVQPPGNPVYPQTLHLPQAPPYTDAPPAYSELYRPSFVHPGAATVPTMSAAFPGASLYLPMAQSVAVGPLGSTIPMAYYPVGPIYPPGSTVLVEGGYDAGARFGAGATAGNIPVKEDQDHDREQGEEDNGDNNLERRGKM

SEQ ID NO: 52301 - DNA, 462 bp, Artificial Sequence
  derived and/or modified sequence
atgaacagcaagggccagtaccccacccagcccacctaccccgtgcagccccccggcaaccccgtgtacccccagaccctgcacctgccccaggcccccccctacaccgacgccccccccgcctacagcgagctgtacagacccagcttcgtgcaccccggcgccgccaccgtgcccaccatgagcgccgccttccccggcgccagcctgtacctgcccatggcccagagcgtggccgtgggccccctgggcagcaccatccccatggcctactaccccgtgggccccatctacccccccggcagcaccgtgctggtggagggcggctacgacgccggcgccagattcggcgccggcgccaccgccggcaacatccccgtgaaggaggaccaggaccacgacagagagcagggcgaggaggacaacggcgacaacaacctggagagaagaggcaagatgtag

SEQ ID NO: 52302 - DNA, 1117 bp, Artificial Sequence
  derived and/or modified sequence
gacacggaagtagctccgaacaggaagaggacgaaaaaaataaccgtccgcgacgccgagacaaaccggacccgcaaccaccatgaacagcaaaggtcaatatccaacacagccaacctaccctgtgcagcctcctgggaatccagtataccctcagaccttgcatcttcctcaggctccaccctataccgatgctccacctgcctactcagagctctatcgtccgagctttgtgcacccaggggctgccacagtccccaccatgtcagccgcatttcctggagcctctctgtatcttcccatggcccagtctgtggctgttgggcctttaggttccacaatccccatggcttattatccagtcggtcccatctatccacctggctccacagtgctggtggaaggagggtatgatgcaggtgccagatttggagctggggctactgctggcaacattcctgtaaaagaagatcaagatcacgaccgagagcagggtgaggaagacaacggtgataacaacttggaaaggagagggaaaatgtagagatgtttcaggattgaggatgtctcagtagttcctggagtcatctgatttagtcactgttttcgtaaagatcctcttgttttcattaactagtgtccacttccatccaaacccatgttcccccaccaaccccaatttccatggcacataatagctggagtctcctggtgcttaagctaaggacacatgcttttgatttctgacaaaactgaactgcctcccaaaccagttcctgattcttaaagaaacgggaaggagggaacaggaaatggcttatcctaacaggaagtggtttatctgatcctccccctcttcctcacccactcaaccaaccacatatatcctcgtccctacccacgtactcaagtgtaacgtccgtatgcatatctatttgcggccacctcccaacctgtcatttactggtagtgcctctgacagaagcctccgagtcttttatggctgtgtgtgtgtgtgtgtgtgtgtgtgtgtgtgtgtaatataacttacaagccagagtgagcccattaatggatttggtcaggctccctctggagagagatgcccttgatccag

SEQ ID NO: 52303 - DNA, 462 bp, Artificial Sequence
  derived and/or modified sequence
atgaatagcaaaggtcagtatcctacgcaacccacttatccagtgcagccaccaggaaaccctgtttatccgcaaaccctacacctcccgcaggcaccaccttacactgatgccccccccgcatatagcgaactctatcgccctagcttcgtgcatccaggggcagccaccgtaccaaccatgtctgccgcgttccccggcgcgtctctctacttgcccatggcacagtctgtggcagttggacccttgggttccacaatccctatggcctactacccagtgggacctatttacccacccggttccactgtcttggttgaggggggttatgacgcaggcgcgaggttcggcgctggtgccactgccggtaatattccagtgaaagaggatcaggatcacgatagagaacaaggcgaagaggataatggcgacaataaccttgagagacgcggaaaaatgtag

SEQ ID NO: 52304 - DNA, 462 bp, Artificial Sequence
  derived and/or modified sequence
atgaacagcaagggccagtaccccacccagcccacctaccctgtgcagcccccaggcaaccctgtgtacccccagaccctgcacctgccccaggccccaccctacacagatgcccccccagcctacagcgagctgtaccggcccagctttgtgcaccctggagctgccaccgtgcccaccatgtctgctgccttccctggggccagcctgtacctgcccatggcccagagcgtggccgtgggccccctgggcagcaccatccccatggcctactaccctgtgggccccatctacccacctggcagcacagtgctggtggagggcggctatgatgctggggccaggtttggagctggggccacagctggcaacatccctgtgaaggaggaccaggaccatgaccgggagcagggcgaggaggacaacggggacaacaacctggagcggcggggcaagatgtag

SEQ ID NO: 52305 - DNA, 462 bp, Artificial Sequence
  derived and/or modified sequence
atgaacagcaagggccagtaccccacccagcccacctaccccgtgcagccacccggaaatcccgtttacccacagacattgcatctccctcaggctcctccctatacggacgctccgcctgcgtacagtgagctttatcggcccagctttgtgcaccctggcgcagcgacggttcctacgatgagcgctgcattccctggtgcctctctgtacctccccatggctcagagtgtggcagtgggccctctgggaagcacaatcccaatggcctattatcctgttgggcctatatatcccccaggctcgaccgtgttggttgagggggggtacgacgccggggcccggtttggtgccggggcgacagccgggaatataccagtgaaagaagaccaggatcatgatcgcgaacagggcgaggaggacaatggagataacaatctcgagagacgagggaagatgtag

SEQ ID NO: 52306 - DNA, 462 bp, Artificial Sequence
  derived and/or modified sequence
atgaactcaaagggacaataccctacccagccaacctatccggtgcagcctcccggaaatccggtctatcctcagaccctgcatcttccccaggcccctccttataccgacgcccctccagcatacagcgagctgtatcgaccaagcttcgttcatccaggcgcagctaccgtgccaactatgtctgccgctttcccaggcgctagtctgtacctgcccatggcccagtctgtggccgttggccctctcggcagcactatacctatggcttactacccagtcggtccaatttatccccctgggtccacagtccttgttgaagggggatacgacgctggcgcacgtttcggggctggcgcaactgcagggaacatccccgtcaaagaggatcaggaccatgatagagaacaaggcgaggaagataatggggataataatctcgagagaaggggcaaaatgtag

SEQ ID NO: 52307 - protein, 301 aa, Artificial Sequence
  derived and/or modified sequence
MLLSPVTSTPFSVKDILRLERERSCPAASPHPRVRKSPENFQYLRMDAEPRGSEVHNAGGGGGDRKLDGSEPPGGPCEAVLEMDAERMGEPQPGLNAASPLGGGTRVPERGVGNSGDSVRGGRSEQPKARQRRKPRVLFSQAQVLALERRFKQQRYLSAPEREHLASALQLTSTQVKIWFQNRRYKCKRQRQDKSLELAGHPLTPRRVAVPVLVRDGKPCLGPGPGAPAFPSPYSAAVSPYSCYGGYSGAPYGAGYGTCYAGAPSGPAPHTPLASAGFGHGGQNATPQGHLAATLQGVRAW

SEQ ID NO: 52308 - protein, 219 aa, Artificial Sequence
  derived and/or modified sequence
MDAERMGEPQPGLNAASPLGGGTRVPERGVGNSGDSVRGGRSEQPKARQRRKPRVLFSQAQVLALERRFKQQRYLSAPEREHLASALQLTSTQVKIWFQNRRYKCKRQRQDKSLELAGHPLTPRRVAVPVLVRDGKPCLGPGPGAPAFPSPYSAAVSPYSCYGGYSGAPYGAGYGTCYAGAPSGPAPHTPLASAGFGHGGQNATPQGHLAATLQGVRAW

SEQ ID NO: 52309 - DNA, 906 bp, Artificial Sequence
  derived and/or modified sequence
atgctcctgtccccagtgacctcaacaccctttagcgttaaggatatacttcggctggagcgcgaacggtcctgccccgccgcaagccctcaccctcgggtgcgcaaaagcccagaaaatttccagtacctcagaatggacgctgagccccgaggatccgaggtgcataacgcaggcgggggcggtggcgaccggaagctcgacggatctgaaccgcccggtggcccatgtgaggccgtgctggagatggacgccgaaagaatgggagaaccccagcctgggctaaatgccgcatccccactaggaggtgggactcgggtcccagaaaggggtgtgggcaactccggagactccgtgcgcggggggcgaagcgaacagccaaaggctagacaaaggaggaaacctagagtattgtttagtcaagctcaagtcctcgcactggagcgacggttcaaacagcagaggtacctttcagctcccgagagggaacacttggcttccgccttgcaactcacctctacacaggtgaagatatggtttcagaacagaaggtacaagtgcaagcgccagaggcaggacaaatcactggaactcgccggccacccccttacccccaggagagtggctgtgccggtgcttgttagagacggtaaaccttgtttaggccctggccccggcgctccagcctttccaagcccatactcagcagccgtttccccatattcttgttacggaggctactctggagcgccatacggggcagggtacggcacctgctacgccggcgccccatctgggccagcaccacacaccccactcgcctctgctggcttcggccacggggggcagaatgccactccccagggacacctggcagcaactttgcagggcgtccgggcctggtag

SEQ ID NO: 52310 - DNA, 660 bp, Artificial Sequence
  derived and/or modified sequence
atggacgccgaaaggatgggggagccccaaccaggactgaacgccgccagcccacttgggggggggactagagtccctgaacggggcgtgggcaactcgggcgactccgtaagaggtgggagatcggaacaacctaaggcccgccaacgtcgcaagcccagggtcttgttttcccaggcccaggtcttggcgcttgaacgcaggtttaaacagcagagatatttatctgcccctgagagggagcatctggcttcagcattacagctgacttccacccaggtgaaaatctggttccaaaacagaaggtacaaatgtaaacggcagcggcaagacaaatctcttgaattagccggtcatcccctcaccccaaggagagtggctgtgcccgtcctcgtacgcgatgggaagccctgtctgggtcctggccctggggcacccgccttcccctccccttattccgcggctgtctctccatactcttgctatggcggctactctggcgcaccttatggcgccggctatggtacctgttacgccggagctccaagcggtcccgctcctcacacgcctcttgcttctgctggcttcggtcacggcggacaaaatgctacccctcagggacatctggccgccacactccagggggttagagcatggtag

SEQ ID NO: 52311 - DNA, 906 bp, Artificial Sequence
  derived and/or modified sequence
atgctgctgagccctgtgaccagcacccccttctctgtgaaggacatcctgcggctggagcgggagaggagctgcccagctgccagcccccacccccgggtgaggaagagccctgagaacttccagtacctgaggatggatgctgagccccggggcagcgaggtgcacaatgctgggggcggcggcggggacaggaagctggatggcagcgagcccccaggcggcccctgtgaggccgtgctggagatggatgctgagaggatgggagagccccagcccggcctgaatgctgccagccccctgggcggcggcaccagggtgcctgagcggggcgtgggcaacagcggggacagcgtgcggggcggccgctctgagcagcccaaggcccggcagaggaggaagccccgggtgctcttcagccaggcccaggtgctggccctggagcggcgcttcaagcagcagcgctacctgagcgcccctgagcgggagcacctggccagcgccctgcagctgaccagcacccaggtgaagatctggttccagaacagacgctacaagtgcaagaggcagaggcaggacaagagcctggagctggccggccaccccctgaccccccggcgggtggccgtgcctgtgctggtgagagatggcaagccctgcctgggccctggccctggggccccagccttccccagcccctacagcgctgctgtgagcccctacagctgctacggcggctacagcggggccccctacggggccggctacggcacctgctacgccggggcccccagcggccctgccccccacacccccctggccagcgctggcttcggccacggcggccagaatgccaccccccagggccacctggccgccaccctgcagggcgtgcgggcctggtag

SEQ ID NO: 52312 - DNA, 660 bp, Artificial Sequence
  derived and/or modified sequence
atggatgctgagaggatgggagagccccagcccggcctgaatgctgccagccccctgggcggcggcaccagggtgcctgagcggggcgtgggcaacagcggggacagcgtgcggggcggccgctctgagcagcccaaggcccggcagaggaggaagccccgggtgctcttcagccaggcccaggtgctggccctggagcggcgcttcaagcagcagcgctacctgagcgcccctgagcgggagcacctggccagcgccctgcagctgaccagcacccaggtgaagatctggttccagaacagacgctacaagtgcaagaggcagaggcaggacaagagcctggagctggccggccaccccctgaccccccggcgggtggccgtgcctgtgctggtgagagatggcaagccctgcctgggccctggccctggggccccagccttccccagcccctacagcgctgctgtgagcccctacagctgctacggcggctacagcggggccccctacggggccggctacggcacctgctacgccggggcccccagcggccctgccccccacacccccctggccagcgctggcttcggccacggcggccagaatgccaccccccagggccacctggccgccaccctgcagggcgtgcgggcctggtag

SEQ ID NO: 52313 - DNA, 906 bp, Artificial Sequence
  derived and/or modified sequence
atgctgctgagccccgtgaccagcacccccttcagcgtgaaggacatcttgcggctggagagggagaggtcttgcccagccgctagcccacaccctagagttcggaagagccccgagaattttcaatatctgaggatggacgccgaacctcgcgggtctgaggtgcacaacgctggaggcggagggggggacaggaaactcgatgggagtgagccacctgggggcccctgcgaagccgtgctcgaaatggacgccgagaggatgggtgagccacagcctgggctgaatgccgccagtcccctggggggcggtacacgcgttcccgaacgtggcgttggcaattctggggacagcgtaagaggcggccggagcgagcaaccaaaggcacgccagcgccggaaaccccgcgtcttattctcccaggcccaggtgctggcactcgaacgcaggtttaagcagcagagatacttgagcgcaccagaaagagagcacctggcatcagctctgcagctgacttctacgcaagtcaagatctggttccaaaaccggcgctacaaatgcaaaagacagcgtcaggataagtccctggaactagctggacaccccttgactccgaggcgcgtcgccgtgcctgttttggtgagagatggcaaaccatgcttgggtccaggacccggggcccccgcatttcctagcccgtactccgcggctgtctccccatactcttgttacggggggtattccggagcgccatatggcgctggctatgggacatgctacgccggagccccatcagggcccgcacctcatacccctctcgcgagcgcggggtttggacatggaggccagaacgcaaccccacaaggacacctggcggcaacactccaaggggttcgggcgtggtag

SEQ ID NO: 52314 - DNA, 660 bp, Artificial Sequence
  derived and/or modified sequence
atggacgccgagcggatgggcgagccccagcccggcctgaacgccgccagtcctcttggaggtggcactcgagtgcctgaacgaggggttggtaactcgggggactctgtgcgaggcgggaggagcgaacaacccaaagctaggcagagacgcaagcctagggtactgttttcgcaggcccaggtattggccttagagcgccgcttcaagcaacaacgctacctaagcgctcctgaaagggagcacctcgcaagcgcccttcagctaacgtccacacaggttaaaatctggtttcagaatagacgctacaagtgtaaaagacagcggcaggataagtcgctcgaactggctggtcacccattaaccccacgaagggttgccgtgcctgtgttagtgcgcgacggcaagccgtgcctgggtccaggccctggggctccagcatttcccagcccctattccgcagctgtgtcaccgtattcatgttacggggggtacagcggcgctccctacggcgccggttatggaacttgctatgctggagcccccagcggccccgcaccccacacccctctggcctccgccggatttggacacggaggacaaaatgccactccccagggtcacttagccgcaacactgcagggcgtgcgggcctggtag

SEQ ID NO: 52315 - DNA, 906 bp, Artificial Sequence
  derived and/or modified sequence
atgctgctgagccccgtcacctccacccccttctcggtcaaggacatcctgcgactggagcgcgagcggagctgccccgcggcttcgccacatccgcgggtgcggaagagcccggaaaactttcagtacctgagaatggacgcagagccgcgagggtcagaggttcacaacgctggtggcggcggcggtgacagaaagctggatggttcggagcctcctgggggtccctgtgaggcagtcttggagatggacgcggaacggatgggggagccacagcccggcctgaacgcggcctcgcccctcggcggcgggaccagggtgccagagcgcggcgttggcaacagcggcgacagcgtgcggggtggccgctcggagcagcccaaggcgcggcaacgacggaagccgcgcgtgctcttttcgcaggcgcaggtgctggccctggagcggcgcttcaagcagcagcggtacctgtcagcgcccgagcgcgagcacctggccagcgcgctgcagctcacgtccacgcaggtcaagatctggttccagaaccgacgctacaaatgcaagagacagcgccaggacaagtcgctggaactggctggccaccctctaacgccgcgccgagtagctgtgcccgtcctggtgcgcgatggcaagccctgcctgggccccgggcccggcgcacctgccttccccagcccctacagtgcagcagtgtcgccctactcttgctacggaggctacagcggagcaccctacggcgcaggctacggcacctgctacgcgggcgcgccctcgggtcctgcgccacacacaccactggccagcgcgggcttcggacacggtggccagaatgccaccccgcagggccatctggcagccacgctgcagggtgtcagggcctggtga

SEQ ID NO: 52316 - DNA, 717 bp, Artificial Sequence
  derived and/or modified sequence
gacagaaagctggatggttcggagcctcctgggggtccctgtgaggcagtcttggagatggacgcggaacggatgggggagccacagcccggcctgaacgcggcctcgcccctcggcggcgggaccagggtgccagagcgcggcgttggcaacagcggcgacagcgtgcggggtggccgctcggagcagcccaaggcgcggcaacgacggaagccgcgcgtgctcttttcgcaggcgcaggtgctggccctggagcggcgcttcaagcagcagcggtacctgtcagcgcccgagcgcgagcacctggccagcgcgctgcagctcacgtccacgcaggtcaagatctggttccagaaccgacgctacaaatgcaagagacagcgccaggacaagtcgctggaactggctggccaccctctaacgccgcgccgagtagctgtgcccgtcctggtgcgcgatggcaagccctgcctgggccccgggcccggcgcacctgccttccccagcccctacagtgcagcagtgtcgccctactcttgctacggaggctacagcggagcaccctacggcgcaggctacggcacctgctacgcgggcgcgccctcgggtcctgcgccacacacaccactggccagcgcgggcttcggacacggtggccagaatgccaccccgcagggccatctggcagccacgctgcagggtgtcagggcctggtga

SEQ ID NO: 52317 - DNA, 906 bp, Artificial Sequence
  derived and/or modified sequence
atgcttctgtctcctgtgacaagcacaccattttctgtcaaagatatcctcaggcttgaaagggagcggagctgccccgcagcttctccacatccaagggtcagaaaatctcctgagaatttccagtacttgcggatggacgccgaacccagagggtccgaagtgcataacgcagggggaggcggtggcgatcggaagctagacggctcagagcccccaggcggtccttgcgaagccgtgctggagatggatgctgaacgaatgggggagccccagccagggcttaacgccgcatcgcctctgggtgggggaaccagagtgccggaaagaggggtgggtaacagcggcgacagcgtacgcggagggagatcagagcagccgaaagcacggcagaggcggaaacccagagtcctcttctctcaggcccaggtgctggccttggaaagacgttttaagcagcagcgctatctctctgcaccagagcgcgagcatcttgcttcagcactgcaactaacatctactcaggttaaaatttggttccagaatcgtcgctacaagtgtaagaggcagaggcaagacaagtctctggagctggctggacatccactgacgccacgcagggtggccgtgcccgtgctggtgagggatggtaaaccatgtctcggccctggacccggagccccagccttcccaagcccatattctgctgcagtgtcaccctatagctgctatggtggatatagcggcgcaccttacggcgctggctacgggacatgctatgccggagcaccctccggccctgctccacacacaccactggcaagcgctggcttcggccatggaggacagaatgcgaccccccagggccacttggcagcgaccctgcaaggagttagagcgtggtag

SEQ ID NO: 52318 - DNA, 660 bp, Artificial Sequence
  derived and/or modified sequence
atggatgccgagcgcatgggggaaccacagcctggattgaacgctgctagtccactgggcggagggacacgggtacccgagcgtggcgtcggtaacagcggcgattccgtgcggggtgggcgatccgagcagcctaaggcacgccagcgccgaaagcccagagtgttgtttagccaggcccaggtcctggcgcttgagcgacgctttaaacagcagcgatacctgtccgctcctgagcgcgaacacctggccagcgccctgcaactcacaagtactcaggtgaagatctggttccagaatcggaggtataagtgtaagcgacaaagacaagataagtctttggagttggccggtcacccgctaactccacgcagagttgccgtccccgtcttggtgagagacggcaagccttgtctgggccctgggcctggagcaccagccttccccagcccttacagtgcggcagtctccccttattcttgctatggcggatatagtggtgccccttatggcgcaggttacggtacctgttacgcgggagcaccctctggtcccgctcctcacactcctctagcatccgccggtttcggtcatggaggccaaaatgccacccctcagggtcacttggccgctacgctgcaaggggtacgcgcatggtag

SEQ ID NO: 52319 - DNA, 906 bp, Artificial Sequence
  derived and/or modified sequence
atgctgctgagccccgtgaccagcacccccttcagcgtgaaggacatcctgagactggagagagagagaagctgccccgccgccagcccccaccccagagtgagaaagagccccgagaacttccagtacctgagaatggacgccgagcccagaggcagcgaggtgcacaacgccggcggcggcggcggcgacagaaagctggacggcagcgagccccccggcggcccctgcgaggccgtgctggagatggacgccgagagaatgggcgagccccagcccggcctgaacgccgccagccccctgggcggcggcaccagagtgcccgagagaggcgtgggcaacagcggcgacagcgtgagaggcggcagaagcgagcagcccaaggccagacagagaagaaagcccagagtgctgttcagccaggcccaggtgctggccctggagagaagattcaagcagcagagatacctgagcgcccccgagagagagcacctggccagcgccctgcagctgaccagcacccaggtgaagatctggttccagaacagaagatacaagtgcaagagacagagacaggacaagagcctggagctggccggccaccccctgacccccagaagagtggccgtgcccgtgctggtgagagacggcaagccctgcctgggccccggccccggcgcccccgccttccccagcccctacagcgccgccgtgagcccctacagctgctacggcggctacagcggcgccccctacggcgccggctacggcacctgctacgccggcgcccccagcggccccgccccccacacccccctggccagcgccggcttcggccacggcggccagaacgccaccccccagggccacctggccgccaccctgcagggcgtgagagcctggtag

SEQ ID NO: 52320 - DNA, 660 bp, Artificial Sequence
  derived and/or modified sequence
atggacgccgagagaatgggcgagccccagcccggcctgaacgccgccagccccctgggcggcggcaccagagtgcccgagagaggcgtgggcaacagcggcgacagcgtgagaggcggcagaagcgagcagcccaaggccagacagagaagaaagcccagagtgctgttcagccaggcccaggtgctggccctggagagaagattcaagcagcagagatacctgagcgcccccgagagagagcacctggccagcgccctgcagctgaccagcacccaggtgaagatctggttccagaacagaagatacaagtgcaagagacagagacaggacaagagcctggagctggccggccaccccctgacccccagaagagtggccgtgcccgtgctggtgagagacggcaagccctgcctgggccccggccccggcgcccccgccttccccagcccctacagcgccgccgtgagcccctacagctgctacggcggctacagcggcgccccctacggcgccggctacggcacctgctacgccggcgcccccagcggccccgccccccacacccccctggccagcgccggcttcggccacggcggccagaacgccaccccccagggccacctggccgccaccctgcagggcgtgagagcctggtag

SEQ ID NO: 52321 - protein, 228 aa, Artificial Sequence
  derived and/or modified sequence
MSVPGPYQAATGPSSAPSAPPSYEETVAVNSYYPTPPAPMPGPTTGLVTGPDGKGMNPPSYYTQPAPIPNNNPITVQTVYVQHPITFLDRPIQMCCPSCNKMIVSQLSYNAGALTWLSCGSLCLLGVHSGLLLHPLLRGCPAGRGPLLSQLQSSPGHLQAFVGLSQTWREPGAAGSPFHLSSSFTPGGGSALVVSPLQGAHLHVFFWGEYVAKLTNLQTPEIAAWSRA

SEQ ID NO: 52322 - protein, 152 aa, Artificial Sequence
  derived and/or modified sequence
MSVPGPYQAATGPSSAPSAPPSYEETVAVNSYYPTPPAPMPGPTTGLVTGPDGKGMNPPSYYTQPAPIPNNNPITVQTVYVQHPITFLDRPIQMCCPSCNKMIVSQLSYNAGALTWLSCGSLCLLGQECSGTIVALRSFDLLGSCNPPSSAS

SEQ ID NO: 52323 - DNA, 687 bp, Artificial Sequence
  derived and/or modified sequence
atgtcggttccgggaccgtaccaggcggctacagggcccagctctgccccatccgctcctcctagctatgaagagacagtagctgttaactcctactacccaactccacctgccccgatgcccgggcccacaaccggtcttgtaaccgggccagatggaaaaggcatgaaccctccttcttattatacgcagcctgcccctattcccaacaacaaccccatcactgtgcagacggtctacgtgcaacacccaataacattcctcgatagaccaatccagatgtgctgcccttcctgcaacaaaatgatcgtgtcccagctctcctacaatgcaggagctctgacgtggttatcctgcggtagcctttgcttactcggagtgcattccggactcctgttgcacccgctgcttcgcgggtgcccagcagggaggggtccattactttctcaactgcagagcagcccgggtcatctgcaggcttttgtcggactatcccagacctggagagagcccggggccgccgggagtccctttcatctcagttctagttttacacctggagggggctctgctcttgtggtgagtccactacagggggcccacctacacgtgtttttctggggcgagtacgtggcaaagctgacgaacctgcagacccccgagattgccgcgtggagtcgtgcctag

SEQ ID NO: 52324 - DNA, 459 bp, Artificial Sequence
  derived and/or modified sequence
atgtctgtaccaggaccctatcaggccgctaccggcccctcgtcagccccctcagctcctccgtcctacgaagaaacagtggctgtgaactcttactatcccacgccgcctgctcctatgccagggccaactaccgggctcgttaccggccctgatggcaaaggcatgaaccctccttcatattacacccagcctgccccaatccctaacaacaacccaatcacggtccagacggtgtatgttcagcatcccattacattcttggatcggccaattcagatgtgttgcccctcctgcaacaagatgattgttagccagttatcctataacgctggggccttgacttggctgtcctgtggcagcctgtgcctgttagggcaggaatgcagcgggaccatcgtggcactgcgctccttcgacctgctgggctcttgcaacccccctagttcagcctcgtag

SEQ ID NO: 52325 - DNA, 687 bp, Artificial Sequence
  derived and/or modified sequence
atgtctgtgcccggcccctaccaggccgccaccggccccagcagcgcccccagcgccccacccagctatgaggagaccgtggccgtgaacagctactaccccaccccaccagcccccatgcctggccccaccaccggcctggtgactggaccagatggcaagggcatgaacccccccagctactacacccagcctgcccccatccccaacaacaaccccatcaccgtgcagacagtgtatgtgcagcaccccatcaccttcctggaccggcccatccagatgtgctgccccagctgcaacaagatgattgtgtcccagctgagctacaatgctggggccctgacctggctgagctgtggcagcctgtgcctgctgggcgtgcacagcggcctgctgctgcaccccctgctgcggggctgcccagctggccggggccccctgctgagccagctgcagagcagccctggccacctgcaggcctttgtgggcctgagccagacctggagggagcctggagctgctggcagccccttccacctgagcagcagcttcacccctgggggcggcagcgccctggtggtgagccccctgcagggcgcccacctgcacgtgttcttctggggcgagtatgtggccaagctgaccaacctgcagaccccagaaattgctgcctggagccgggcctag

SEQ ID NO: 52326 - DNA, 459 bp, Artificial Sequence
  derived and/or modified sequence
atgtctgtgcccggcccctaccaggccgccaccggccccagcagcgcccccagcgccccacccagctatgaggagaccgtggccgtgaacagctactaccccaccccaccagcccccatgcctggccccaccaccggcctggtgactggaccagatggcaagggcatgaacccccccagctactacacccagcctgcccccatccccaacaacaaccccatcaccgtgcagacagtgtatgtgcagcaccccatcaccttcctggaccggcccatccagatgtgctgccccagctgcaacaagatgattgtgtcccagctgagctacaatgctggggccctgacctggctgagctgtggcagcctgtgcctgctgggccaggagtgcagcggcaccatcgtggccctgcggagctttgacctgctgggcagctgcaacccccccagcagcgccagctag

SEQ ID NO: 52327 - DNA, 2565 bp, Artificial Sequence
  derived and/or modified sequence
ccttttctcggggcgcccgagaggccagctcagacctcccggctcgacaggcggcgcgggcggcggtaaaatgtcggttccaggaccttaccaggcggccactgggccttcctcagcaccatccgcacctccatcctatgaagagacagtggctgttaacagttattaccccacacctccagctcccatgcctgggccaactacggggcttgtgacggggcctgatgggaagggcatgaatcctccttcgtattatacccagccagcgcccatccccaataacaatccaattaccgtgcagacggtctacgtgcagcaccccatcacctttttggaccgccctatccaaatgtgttgtccttcctgcaacaagatgatcgtgagtcagctgtcctataacgccggtgctctgacctggctgtcctgcgggagcctgtgcctgctggggcaggagtgcagtggtacgatcgtagctctccgcagctttgatctcctgggctcctgcaatccgcccagctcagcctcctgagtacctgggaccacaggtgcatagcgggctgctgcttcatccccttctgcgtggatgccctgcaggacgtggaccattactgtcccaactgcagagctctcctgggcacctacaagcgtttgtaggactcagccagacgtggagggagccgggtgccgcaggaagtcctttccacctctcatccagcttcacgcctggtggaggttctgccctggtggtctcacctctccagggggcccaccttcatgtcttcttttggggggaatacgtcgcaaaactaacaaatctccaaaccccagaaattgctgcttggagtcgtgcataggacttgcaaagacattccccttgagtgtcagttccacggtttcctgcctccctgagaccctgagtcctgccatctaactgtgatcattgccctatccgaatatcttcctgtgatctgccatcagtggctcttttttcctgcttccatgggcctttctggtggcagtctcaaactgagaagccacagttgccttatttttgaggctgttctgcccagagctcggctgaaccagcctttagtgcctaccattatcttatccgtctcttcccgtccctgatgacaaagatcttgccttacagactttacaggcttggctttgagattctgtaactgcagacttcattagcacacagattcactttaatttcttaattttttttttaaatacaaggagggggctattaacacccagtacagacatatccacaaggtcgtaaatgcatgctagaaaaatagggctggatcttatcactgccctgtctccccttgtttctctgtgccagatcttcagtgcccctttccatacagggatttttttctcatagagtaattatatgaacagtttttatgacctccttttggtctgaaatacttttgaacagaatttcttttttttaaaaaaaaacagagatggggtcttactatgttgcccaggctggtgtcgaactcctgggctcaagcgatccttctgccttggcctcccgaagtgctgggattgcaggcataagctaccatgctgggcctgaacataatttcaagaggaggatttataaaaccattttctgtaatcaaatgattggtgtcattttcccatttgccaatgtagtctcacttaaaaaaaaaaaaaagaaaaagaaatggataatttcatctactgcctttacttggggttaatgtgattcttaaacaccttcatcatggaactctcagagtggggtccgttttggtttcctggtggtgggttttgaaagataagggaaagcacattttgagcatgtctgggtaccatggtgcggatgcttgggaaccagaactgtttcagaggaatctaaagtctgattttagttttcagagacacagcttgttgtaaaacatgagaagacatgatttctaggactcaagcagcaagccaggattctaggttggctgctgtgtcatctttgaagtcaagacaaagctgggctcgaccttcaagggtcctcgttttgataatacttcagaatagggaactcatgtgaatactactatgtagaaataaaacctagaccttgagcgaacatctgtatattggttgaaaacgatagtggtaaccattgatcccccttcatttgatgtttggaaaattccagtaattatcatttttgcaacgaatatggataccacatagtactttggtgttacctgcttttgaaaaataaagtctttggttcacccggtgaactatttatgagttcttttggtgtgaagaaagggctcatgttgcatttccagccattgctacaaagaacctttatttgttcagtaacggtagaaaatccttcccgattaaaaacttcagacttgctgaatatcctgcaatgtcaagatgaccgatgttgagttgggtggatttgctaacgagtcagatttgaacatgaggctattggaacccaataggcgtcattgatggcggcaagccatagctttcaagttttaataaaatgcacaaaag

SEQ ID NO: 52328 - DNA, 687 bp, Artificial Sequence
  derived and/or modified sequence
atgagcgtgcccggcccctaccaggccgccaccggccccagcagcgccccgtcggcccctcctagctatgaggagaccgtggccgtgaacagctattacccaaccccaccagccccaatgcccgggccaacaaccggccttgttaccgggccggatggcaagggcatgaatccccccagctactacactcagccagcaccaatccctaacaataacccgatcaccgtgcagacagtgtacgtccagcaccccatcacctttctggaccgaccaatccagatgtgttgtccttcatgtaataagatgattgtgtctcagctctcatacaacgctggtgcactgacatggttgtcatgtggtagtctctgtctgctaggagtccacagcggcctcctgttacacccgctgttgcggggctgccccgctggccgtggcccacttctttcccaactccagagttctcctggccacctgcaagcgtttgtcggtctgtctcagacctggagggagccaggtgccgccggcagccccttccacctgtcctcctcttttaccccaggcggaggatcggccctggttgtgtcccctctacaaggtgcccatctccacgtatttttttggggtgagtacgttgccaagctgactaatcttcagactcctgagatcgccgcatggtctagagcctag

SEQ ID NO: 52329 - DNA, 459 bp, Artificial Sequence
  derived and/or modified sequence
atgagcgtgcccggcccctaccaggccgccaccggccccagcagcgccccatcggcaccccccagctatgaggaaacggtcgctgtcaatagctactatccaactcctcctgctccaatgcctggccccacaaccggcttggtgacaggccctgatgggaaggggatgaatcccccatcttattatactcagccagctccaatcccaaataacaatcctataacagtgcagaccgtgtacgttcaacacccaatcacatttcttgataggcccatccagatgtgctgtcccagttgcaacaaaatgatcgtgagccagctgagctacaatgccggcgcgttgacctggctctcatgcgggtccctgtgcctcttgggacaagaatgtagcggtactatcgtcgcgctgcgatcattcgatctccttggatcttgcaatccacccagttcagcatcctag

SEQ ID NO: 52330 - DNA, 687 bp, Artificial Sequence
  derived and/or modified sequence
atgtctgttcccggtccttaccaggccgctaccggcccaagttcagccccaagcgcccctccgagttatgaagagaccgtggctgttaactcctattatcccactccacccgcacctatgcctggccctactaccggtctagttacggggcctgatggcaaaggcatgaaccccccatcgtattatacccagcccgcacccattcccaataacaacccaattactgtgcagacggtgtacgtgcaacacccaattactttcttggacagacccattcagatgtgttgcccgtcctgcaacaagatgatcgtgtctcagctcagctacaatgctggagctctcacctggctcagttgtggcagcttatgtctgctgggggtccactctggcctcctgctccaccccctcctgagaggttgtcccgctggtagaggcccactgctcagtcagttgcagtcctcacctgggcacttgcaggcattcgttggattaagtcagacatggagagaacctggtgcagccggatcccccttccatctctcgtcctcctttactcccggtgggggttctgcattggtggtgtctcccttgcagggtgcacacctgcacgtttttttctggggggaatacgtggccaaactcaccaatctgcagactccagagatagcagcctggagcagagcttag

SEQ ID NO: 52331 - DNA, 459 bp, Artificial Sequence
  derived and/or modified sequence
atgtccgtgcccggtccctatcaagcagctactggaccctcttccgcccctagcgctccccctagttacgaagagacagttgcagtgaattcttattaccccacgccccctgctcccatgccaggccctactaccggcctggtgaccggacctgatggcaaagggatgaacccccctagctattacacacagccggctccaatccccaataacaatcccataaccgtgcagacagtttatgtgcagcaccccataacgttcctcgataggccgatccagatgtgctgccctagttgtaacaagatgattgtttcacagctaagctataatgcgggtgctctcacttggctctcctgcggctctctttgtttgctgggccaggaatgcagtggaactattgtcgcccttaggtcgttcgacttactgggctcatgcaacccaccttcaagtgcatcctag

SEQ ID NO: 52332 - DNA, 687 bp, Artificial Sequence
  derived and/or modified sequence
atgagcgtgcccggcccctaccaggccgccaccggccccagcagcgcccccagcgccccccccagctacgaggagaccgtggccgtgaacagctactaccccaccccccccgcccccatgcccggccccaccaccggcctggtgaccggccccgacggcaagggcatgaacccccccagctactacacccagcccgcccccatccccaacaacaaccccatcaccgtgcagaccgtgtacgtgcagcaccccatcaccttcctggacagacccatccagatgtgctgccccagctgcaacaagatgatcgtgagccagctgagctacaacgccggcgccctgacctggctgagctgcggcagcctgtgcctgctgggcgtgcacagcggcctgctgctgcaccccctgctgagaggctgccccgccggcagaggccccctgctgagccagctgcagagcagccccggccacctgcaggccttcgtgggcctgagccagacctggagagagcccggcgccgccggcagccccttccacctgagcagcagcttcacccccggcggcggcagcgccctggtggtgagccccctgcagggcgcccacctgcacgtgttcttctggggcgagtacgtggccaagctgaccaacctgcagacccccgagatcgccgcctggagcagagcctag

SEQ ID NO: 52333 - DNA, 459 bp, Artificial Sequence
  derived and/or modified sequence
atgagcgtgcccggcccctaccaggccgccaccggccccagcagcgcccccagcgccccccccagctacgaggagaccgtggccgtgaacagctactaccccaccccccccgcccccatgcccggccccaccaccggcctggtgaccggccccgacggcaagggcatgaacccccccagctactacacccagcccgcccccatccccaacaacaaccccatcaccgtgcagaccgtgtacgtgcagcaccccatcaccttcctggacagacccatccagatgtgctgccccagctgcaacaagatgatcgtgagccagctgagctacaacgccggcgccctgacctggctgagctgcggcagcctgtgcctgctgggccaggagtgcagcggcaccatcgtggccctgagaagcttcgacctgctgggcagctgcaacccccccagcagcgccagctag

SEQ ID NO: 52334 - protein, 25 aa, Artificial Sequence
  derived and/or modified sequence
MWMHVAKVHPKGGEMVGAIRNAAFL

SEQ ID NO: 52335 - DNA, 873 bp, Artificial Sequence
  derived and/or modified sequence
atgtggatgcacgtggccaaggtgcaccccaagggcggcgagatggtgggcgccatcagaaacgccgccttcctggccaagcccagcatcccccaggtgcccaactacagactgagcatgaccatccccgactggctgcaggccatccagaactacatgaagaccctgcagtacaaccacaccggcacccagttcttcgagatcagaaagatgagacccctgagcggcctgatggagaccgccaaggagatgaccagagagagcctgcccatcaagtgcctggaggccgtgatcctgggcatctacctgaccaacggccagcccagcatcgagagattccccatcagcttcaagacctacttcagcggcaactacttccaccacgtggtgctgggcatctactgcaacggcagatacggcagcctgggcatgagcagaagagccgagctgatggacaagcccctgaccttcagaaccctgagcgacctgatcttcgacttcgaggacagctacaagaagtacctgcacaccgtgaagaaggtgaagatcggcctgtacgtgccccacgagccccacagcttccagcccatcgagtggaagcagctggtgctgaacgtgagcaagatgctgagagccgacatcagaaaggagctggagaagtacgccagagacatgagaatgaagatcctgaagcccgccagcgcccacagccccacccaggtgagaagcagaggcaagagcctgagccccagaagaagacaggccagcccccccagaagactgggcagaagagagaagagccccgccctgcccgagaagaaggtggccgacctgagcaccctgaacgaggtgggctaccagatcagaatctag

SEQ ID NO: 52336 - DNA, 873 bp, Artificial Sequence
  derived and/or modified sequence
atgtggatgcacgttgctaaggtccacccaaaagggggtgagatggtgggggccattcgaaatgccgcattccttgcaaaaccgtcaatcccccaagtgcccaactatcgtttaagcatgaccatccctgattggctgcaagccatccagaactacatgaaaacgctccagtacaaccacaccgggacacagttttttgagattagaaaaatgagacccttaagtggacttatggagaccgccaaggaaatgacccgagagagcctgcctattaagtgcttggaggccgttatcttggggatctatctgaccaacgggcaaccctcaatcgaaagatttcccatcagttttaagacatatttctccggaaactacttccaccacgtggtgctaggaatttactgcaatggaaggtatggaagccttggtatgtctcgacgggctgagctgatggataagccactaacattcaggaccctgagtgatcttatattcgacttcgaggacagttacaaaaaatacctccataccgtcaagaaggttaaaatcggcctctatgttccgcacgagccacactcttttcaacccatcgaatggaagcagcttgtgcttaacgtgagcaagatgcttcgagcagacatccggaaagaactggagaaatacgccagggatatgagaatgaaaatcctgaaacccgcctctgctcacagcccgacacaggttcgtagccgtgggaaaagtctatcacctcggcgtcggcaagcctccccacccagacgtctgggcagaagggaaaaaagcccagcgctgcctgaaaagaaagtggcagatctgagcaccctgaacgaggttggctatcaaatacggatttag

SEQ ID NO: 52337 - DNA, 873 bp, Artificial Sequence
  derived and/or modified sequence
atgtggatgcatgtcgcaaaagttcatccaaagggaggcgagatggtgggggcaatcaggaatgctgctttcttagccaaacctagcatcccacaggtcccgaattacaggttaagcatgaccattcccgattggctgcaggcaatccaaaattacatgaagactctacagtataaccatactggaacgcagttcttcgagataaggaagatgcggccactgtccgggctgatggagaccgcaaaggagatgacgcgcgagtctttgcccatcaagtgcctggaggcagtgattctgggcatttacctcaccaatggacaaccaagcattgagcgctttcccatctcattcaaaacgtacttctcgggcaattactttcaccatgtggtccttgggatatactgcaacgggaggtatggcagcctggggatgagccggagggcagaattgatggacaagcctctgacattcagaaccctttctgatcttatttttgactttgaggactcttacaaaaaatatttgcacactgtcaagaaggtcaagattggactgtatgtcccccacgagcctcattcctttcaacccatagagtggaaacagctcgtgctgaatgtctcaaagatgctgcgggccgacatcagaaaggagctggagaagtacgccagggatatgcggatgaaaatactgaagcccgcttcagcccactcccctactcaggtacgatctaggggcaagtcgttgtcccctcggagacgtcaggcttccccccctcgaagactgggacgccgggaaaaatctcccgcactgcctgaaaaaaaggttgccgacctgtctactctgaatgaggtcggataccagatacggatctag

SEQ ID NO: 52338 - DNA, 873 bp, Artificial Sequence
  derived and/or modified sequence
atgtggatgcacgtggccaaggtgcaccccaagggcggggagatggtgggcgccatcagaaatgctgccttcctggccaagcccagcatcccccaggtgcccaactaccgcctgtccatgaccatcccagactggctgcaggccatccagaactacatgaagaccctgcagtacaaccacacaggcacccagttctttgagatcaggaagatgaggcccctgagcggcctgatggagacagccaaggagatgacccgggagagcctgcccatcaagtgcctggaggccgtcatcctgggcatctacctgaccaacggccagcccagcattgagcgcttccccatctccttcaagacctacttcagcggcaactacttccaccacgtggtgctgggcatctactgcaatggccgctatggcagcctgggcatgagccggcgggcagagctgatggacaagcccctgaccttccgcaccctgagtgacctgatctttgattttgaggacagctacaagaagtacctgcacacagtgaagaaggtgaagattggcctgtatgtgccccatgagccccacagcttccagcccatcgagtggaagcagctggtgctgaatgtgtccaagatgctgcgggctgacatcaggaaggagctggagaagtatgcccgggacatgaggatgaagatcctgaagccagccagcgcccacagccccacccaggtgcgcagccggggcaagagcctgagcccccggcggcggcaggccagccccccccggcggctgggcagaagagagaagagccctgccctgcctgagaagaaggtggccgacctgagcaccctgaatgaggtgggctaccagatccgcatctag

SEQ ID NO: 52339 - DNA, 873 bp, Artificial Sequence
  derived and/or modified sequence
atgtggatgcacgtggccaaggtgcaccccaagggcggcgagatggtcggcgctatccgcaatgcagcgtttctggccaaaccgagcatcccacaggtgcctaactataggctgagcatgacaattcccgactggctgcaggcaattcagaattacatgaagaccctgcagtacaaccacactggcactcagttttttgagattaggaagatgaggccactctcgggtcttatggagaccgctaaagaaatgacgagggagagcctcccgataaagtgcctcgaggccgttatcctgggtatctatctgacaaacggccagccaagcattgaaagattccctatatcattcaagacctacttctcaggaaattacttccatcacgtggtcctcggcatttactgtaacggccggtacgggagcctcggcatgtcccgacgggccgagctgatggacaagcccttaacgttcagaacgctgagtgatctaattttcgattttgaagattcctataagaaatatctccacactgtaaaaaaggtgaagattggcctctacgtgccacacgagccacactcctttcagccgattgagtggaaacagttagtgctgaatgtttcaaaaatgctgcgggccgatataaggaaagaactggaaaaatacgcccgcgatatgagaatgaaaatcctcaaaccagcctccgctcactctcccacacaggtccgcagtcggggaaaatccctcagtcctcgtcggcgacaggcaagccctccaagacggctaggacgacgagagaaatcacctgctctcccagagaagaaggtcgctgatctcagcacactcaacgaggtgggttatcaaattagaatatag

SEQ ID NO: 52340 - DNA, 873 bp, Artificial Sequence
  derived and/or modified sequence
atgtggatgcacgtggccaaggtgcaccccaagggcggcgagatggttggcgcgataaggaatgccgccttcttagcgaaaccttctatcccacaggttccgaactatcgcctatctatgactatcccagattggctgcaggcaattcagaattacatgaaaacccttcagtataaccataccggtacccagttctttgagattcggaaaatgcgccccctctccggacttatggagaccgcgaaggaaatgactcgggagtctctccccatcaaatgtctagaggctgtcattctggggatatatctgacaaatggccagccatcaatcgaacgattcccaatcagctttaaaacctatttctccggaaattattttcaccatgtcgtcctgggcatttactgcaacgggcggtatgggagcttagggatgtcacgcagagcggaattgatggacaaacctctgacgttccggacgctgagtgacctcatctttgacttcgaagatagttacaagaagtatctccacacggtaaaaaaggtgaagattggcctttacgtgcctcacgaaccccactcttttcagcccatcgaatggaagcaactggtattgaatgtctccaagatgctgagggccgacattcggaaggaactggaaaagtatgccagggatatgcgcatgaagatcctgaagcctgcgtcggcccacagccccacacaggtcagatcgaggggtaaatctctctccccccggcggaggcaagcctcccctccccgcagattgggtaggcgtgaaaagtcacccgcattacctgagaagaaagtcgccgacctcagcaccctcaatgaagtaggatatcagattaggatctag

SEQ ID NO: 52341 - DNA, 873 bp, Artificial Sequence
  derived and/or modified sequence
atgtggatgcacgtcgccaaggttcaccctaaaggcggtgaaatggtcggggcaatccgcaacgcagcattcttggcaaagcctagtatcccacaagtccctaattatcgcctgtccatgaccatccccgattggttgcaggctatacagaattatatgaaaacgttacagtacaaccataccggaactcaattttttgagattcgcaaaatgcgtcccctttccggcctcatggagacagctaaagaaatgacccgggagtctctgcctatcaagtgcttagaggcggtgatcctcggaatatatctcacaaatggccagccttccatagaacgttttccgattagtttcaagacctatttcagcggtaattactttcaccacgtggtcctgggaatttattgtaatggaagatacggatccctggggatgtcccgacgggcagaactgatggataaacctctcacattccgaaccttgtccgatctgatatttgacttcgaggactcctataagaaatatctgcatactgttaagaaagttaagatcggcctgtatgtgccccacgagccccacagttttcagcctattgaatggaagcagttggtgttgaacgttagtaaaatgctgcgtgctgatatccgcaaagagctcgaaaaatatgctagagacatgcgaatgaagatcctgaagcctgcaagcgctcactccccaactcaggtccggtcgcggggaaaatcgctctcacctagaaggcggcaggcctcccctccccgaagacttggcagaagggagaaatctccagcccttccagagaaaaaggttgcagatctttccactctcaacgaagtgggttatcagattcggatctag

SEQ ID NO: 52342 - DNA, 873 bp, Artificial Sequence
  derived and/or modified sequence
atgtggatgcacgttgcgaaagtgcatccaaagggaggggagatggtgggagctatccgcaatgccgcattcctagctaaacctagcattccccaggtgcccaactaccgtttgtctatgacaatcccagactggctccaagctatccagaattacatgaaaactctccaatataatcacactggcacacagttttttgagattcggaagatgagacccctgtctggcctgatggaaactgcaaaggagatgacaagggaaagcctgcccatcaagtgcctggaggccgttattctgggaatatatttgacaaatggccaaccatcaattgaacgctttcccattagtttcaagacatactttagcgggaattattttcaccacgtggtactcggaatatactgtaatggaaggtatgggtccttgggaatgtcgcgtcgtgctgagctgatggataagcctctgacatttaggacgctgtcagatctgattttcgatttcgaggactcctacaaaaagtatcttcacactgtgaaaaaggtcaagattggcctgtatgtgccccatgaacctcacagcttccaacccattgaatggaagcagcttgtgttaaacgtctccaagatgctgagagcagatattaggaaagaacttgagaagtacgccagagatatgaggatgaagatccttaagccagcaagcgcccatagccctacacaagtgaggtctcgagggaagtcactgtcaccccgtcggcgacaggcctccccacccaggcgccttggccgtcgagaaaagtcccccgctttaccagagaagaaggtggccgatctctcaaccttaaacgaagtgggctatcaaattagaatttag

SEQ ID NO: 52343 - DNA, 756 bp, Artificial Sequence
  derived and/or modified sequence
atgaccatccccgactggctgcaggccatccagaactacatgaagaccctgcagtacaaccacaccggcacccagttcttcgagatcagaaagatgagacccctgagcggcctgatggagaccgccaaggagatgaccagagagagcctgcccatcaagtgcctggaggccgtgatcctgggcatctacctgaccaacggccagcccagcatcgagagattccccatcagcttcaagacctacttcagcggcaactacttccaccacgtggtgctgggcatctactgcaacggcagatacggcagcctgggcatgagcagaagagccgagctgatggacaagcccctgaccttcagaaccctgagcgacctgatcttcgacttcgaggacagctacaagaagtacctgcacaccgtgaagaaggtgaagatcggcctgtacgtgccccacgagccccacagcttccagcccatcgagtggaagcagctggtgctgaacgtgagcaagatgctgagagccgacatcagaaaggagctggagaagtacgccagagacatgagaatgaagatcctgaagcccgccagcgcccacagccccacccaggtgagaagcagaggcaagagcctgagccccagaagaagacaggccagcccccccagaagactgggcagaagagagaagagccccgccctgcccgagaagaaggtggccgacctgagcaccctgaacgaggtgggctaccagatcagaatctag

SEQ ID NO: 52344 - DNA, 756 bp, Artificial Sequence
  derived and/or modified sequence
atgacgattcctgattggctccaggcaatccagaattacatgaagacactccagtacaaccacaccggaacccaatttttcgaaattcgcaagatgaggcctttaagtgggctgatggagacagccaaagagatgacaagagagagcctcccaatcaaatgtctcgaagcagtcattctaggtatctatctgacgaacggccagccatccattgagcggtttccaatctcttttaagacctatttctcgggcaactactttcaccatgtggtgcttgggatatattgtaacgggagatacggatctctcggaatgagtaggcgagcggagctgatggacaaaccactcacctttaggaccctctccgatctgatctttgatttcgaagacagttacaaaaagtaccttcacaccgtgaagaaagttaaaatcggattatacgtccctcacgagccgcactcttttcagcccatcgaatggaagcaactggtgcttaatgtttcaaagatgctgagggcagacatcaggaaggagctcgaaaaatatgcgagggatatgcgaatgaaaatcctgaaaccagcctccgcccactcccccacccaggtgcggtccagaggaaaatctctatctccccgccgtcgacaagcatcgccaccaaggaggcttggacgcagagaaaaaagccccgcgcttccagagaagaaggttgccgacctgagtacgttaaacgaggttggataccagattcggatctag

SEQ ID NO: 52345 - DNA, 756 bp, Artificial Sequence
  derived and/or modified sequence
atgaccatcccagactggctgcaggccatccagaactacatgaagaccctgcagtacaaccacacaggcacccagttctttgagatcaggaagatgaggcccctgagcggcctgatggagacagccaaggagatgacccgggagagcctgcccatcaagtgcctggaggccgtcatcctgggcatctacctgaccaacggccagcccagcattgagcgcttccccatctccttcaagacctacttcagcggcaactacttccaccacgtggtgctgggcatctactgcaatggccgctatggcagcctgggcatgagcagaagagctgagctgatggacaagcccctgaccttccgcaccctgagtgacctgatctttgattttgaagattcctacaagaagtacctgcacacagtgaagaaggtgaagattggcctgtatgtgccccatgagccccacagcttccagcccatcgagtggaagcagctggtgctgaatgtgtccaagatgctgcgggctgacatcaggaaggagctggagaagtatgcccgggacatgaggatgaagatcctgaagccagccagcgcccacagccccacccaggtgcgcagccggggcaagagcctgagcccccggcggcggcaggccagccccccccggcggctgggccggcgggagaagagccctgccctgcctgagaagaaggtggccgacctgagcaccctgaatgaggtgggctaccagatccgcatctag

SEQ ID NO: 52346 - DNA, 756 bp, Artificial Sequence
  derived and/or modified sequence
atgaccatccccgactggctgcaggccatccagaactacatgaagacactgcagtataatcatacgggaacccagttttttgagatacggaagatgagacccttaagcggcctgatggaaaccgccaaggaaatgaccagagagtccctccctattaagtgtctggaggcagtcatcttgggcatctaccttaccaatggacagccttcaatcgaaagattccccattagtttcaagacatacttcagcggtaattacttccatcatgtggtgctcggaatctattgcaatggacggtacggcagtctgggcatgtcaagacgcgccgaactgatggataagccactgaccttcagaacactgtctgatctgatctttgattttgaagacagttataagaagtatttacacactgtgaagaaagtaaaaattggcttgtacgtgccccatgaacctcattctttccagcccatcgaatggaagcagcttgtccttaatgttagtaagatgctgcgggcggatatccggaaggagcttgagaaatatgcacgagatatgagaatgaaaatactgaagcccgcttccgcacactctcctactcaagtgaggtcccggggtaaatctctgagcccacgacgccgccaagcttcacctcctcgacgactcggaagaagagaaaaaagtcctgctctgcccgagaaaaaggttgctgatttgtccacactgaatgaagtcggatatcagatccggatatag

SEQ ID NO: 52347 - DNA, 756 bp, Artificial Sequence
  derived and/or modified sequence
atgaccatccccgactggctacaggcgatacagaactatatgaagaccctgcagtacaaccataccggtacccagttctttgagatccgcaagatgagaccgctgtcagggctcatggagaccgctaaggaaatgacaagagagtcgctgcctattaagtgcctggaagcagtaatcctgggaatctaccttaccaacggacagccttccatcgagcggttccctatctcattcaaaacgtatttcagcggtaactactttcaccacgtagtgttggggatctactgtaacgggcgttacggcagcctgggcatgtcccgccgtgcagaactgatggacaaacctcttacattcaggactctgtccgacctgatctttgatttcgaggacagctacaaaaaatatctgcataccgtcaagaaagttaagatcgggctttatgtcccacacgagcctcacagcttccagcccattgaatggaaacagctcgttctaaatgtgtctaaaatgttacgggcagatattaggaaagaacttgagaaatacgctagagatatgaggatgaagattctgaaaccagctagcgcccactccccaacacaagtgcgttccagaggaaaatccctgtcccccagacggaggcaggcctcccctccccgaagactgggacggagagaaaagtctccggcattgcccgaaaaaaaggtcgccgatttaagtacactcaacgaggtgggatatcagatcaggatttag

SEQ ID NO: 52348 - protein, 551 aa, Artificial Sequence
  derived and/or modified sequence
MGFDVLLDQVGGMGRFQICLIAFFCITNILLFPNIVLENFTAFTPSHRCWVPLLDNDTVSDNDTGTLSKDDLLRISIPLDSNLRPQKCQRFIHPQWQLLHLNGTFPNTNEPDTEPCVDGWVYDRSSFLSTIVTEWDLVCESQSLKSMVQSLFMAGSLLGGLIYGHLSDRVGRKIICKLCFLQLAISNTCAAFAPTFLVYCILRFLAGFSTMTILGNTFILSLEWTLPRSRSMTIMVLLCSYSVGQMLLGGLAFAIQDWHILQLTVSTPIIVLFLSSWKMVESARWLIINNQLDEGLKELRRVAHINGKKNTEETLTTELVRSTMKKELDAVRIKTSIFSLFRAPKLRMRVFGLCFVRFAITVPFYGLILNLQHLGSNVSLFQILCGAVTFTARCVSLLTLNHMGRRISQILFTFPVGLFILVNTFLPQEMQILRVVLATLGIGSVSAASNSASVHHNELVPTILRSTVAGINAVSGRTGAALAPLLMTLMAYSPHLPWISYGVFPILAVPVILLLPETRDLPLPNTIQDVENEKDSRNIKQEDTCMKVTQF

SEQ ID NO: 52349 - DNA, 1656 bp, Artificial Sequence
  derived and/or modified sequence
atgggtttcgacgttttgttggatcaggtgggcgggatgggtcggttccagatctgccttattgcctttttctgtatcacgaacattctcctgtttccgaatatcgtacttgaaaacttcacagcctttaccccctctcaccggtgttgggtgccgctgctcgataatgacactgtgagtgataatgataccggtactctgtccaaggatgatctcttgagaattagcatcccccttgactcaaaccttaggcctcaaaagtgtcagaggtttatccatcctcagtggcagttgctgcacctcaacggcacgttccccaatacaaatgaacccgacacagaaccgtgtgtggatggatgggtttacgacagatcaagctttctgtcaacaatcgtcactgaatgggacctggtctgcgagagtcaaagcctgaaatccatggtgcagtcgctgtttatggccggcagtctcttaggagggttgatttatgggcacctttctgacagggtgggcaggaagataatatgcaagctttgctttcttcagcttgctattagcaacacttgtgccgctttcgccccaacatttctggtctactgcatcctgcgctttctcgccggattctcaacaatgactattctcgggaatactttcatcttgagcctggagtggaccctgcctcggtctaggagtatgactataatggtacttctctgcagttattctgtgggccagatgctactgggcggattagcattcgctatccaagactggcacatattgcagcttacagtgagcacccctatcatcgtgctgttcctgtcgtcttggaaaatggtcgagtctgccagatggctgataatcaacaaccagctggatgaggggctgaaggagctccggcgggttgcccatatcaatggaaaaaaaaacaccgaggaaacgcttaccactgagctggtgaggtccactatgaaaaaagagttggatgcagtaaggattaagacctcaattttttcattgtttagagctcccaagctgaggatgcgcgtctttggcctgtgttttgtaaggttcgctatcactgtgcccttttatggactgatactcaacctgcagcacttaggatcgaacgtgagtttgtttcaaatcctctgcggcgcggtgacattcaccgccaggtgtgtatcgttactgactctcaaccatatgggccggaggatatcccagattcttttcacatttcccgtgggtctcttcatactggtcaacaccttcctgcctcaggaaatgcagattttgcgggtcgtcctggctacactcggaattgggtctgtcagtgcggcatccaattcagcttcagttcaccataacgaactggtgccaaccatcttgaggtcaaccgtggctggtataaacgctgtgagcgggagaactggagcggccttggctccgctcctcatgactctgatggcctattccccacatcttccatggatcagttatggagtgttcccaatcttagccgtccccgtgatcctactgttgcccgaaaccagagatctgcctttgccaaacacaatccaggatgtggaaaatgagaaagattcaaggaatatcaagcaggaagatacatgcatgaaggtcacccagttctag

SEQ ID NO: 52350 - DNA, 1656 bp, Artificial Sequence
  derived and/or modified sequence
atgggctttgatgtgctgctggaccaggtgggcggcatgggccgcttccagatctgcctgattgccttcttctgcatcaccaacatcctgctcttccccaacatcgtgctggagaacttcaccgccttcacccccagccaccgctgctgggtgcccctgctggacaatgacacagtgtctgacaatgacaccggcaccctgagcaaggatgacctgctgcgcatcagcatccccctggacagcaacctgcggccccagaagtgccagcgcttcatccacccccagtggcagctgctgcacctgaatggcaccttccccaacaccaatgaaccagacacagagccctgtgtggatggctgggtgtatgacaggagcagcttcctgagcaccatcgtgacagagtgggacctggtgtgtgagagccagagcctgaagtccatggtgcagagcctcttcatggccggcagcctgctgggcggcctcatctacggccacctgagtgacagagtgggcaggaagatcatctgcaagctgtgcttcctgcagctggccatcagcaacacctgtgccgcctttgcccccaccttcctggtgtactgcatcctgcgcttcctggccggcttcagcaccatgaccatcctgggcaacaccttcatcctgagcctggagtggaccctgcccaggagccgctccatgaccatcatggtgctgctgtgcagctacagcgtgggccagatgctgctgggcggcctggcctttgccatccaggactggcacatcctgcagctgactgtgtccacccccatcatcgtgctcttcctgagctcctggaagatggtggagagcgcccgctggctgatcatcaacaaccagctggatgagggcctgaaggagctgcggcgggtggcccacatcaacgggaagaagaacacagaggagaccctgaccacagagctggtgcgcagcaccatgaagaaggagctggatgctgtgcgcatcaagaccagcatcttcagcctcttccgggcccccaagctgaggatgagggtgtttggcctgtgctttgtgcgctttgccatcaccgtgcccttctacggcctcatcctgaacctgcagcacctgggcagcaatgtgtccctcttccagatcctgtgtggggctgtgaccttcaccgcccgctgtgtgtccctgctgaccctgaaccacatgggccgccgcatcagccagatcctcttcaccttccctgtgggcctcttcatcctggtgaacaccttcctgccccaggagatgcagatcctgcgggtggtgctggccaccctgggcatcggctctgtgtctgctgccagcaacagcgcctctgtgcaccacaatgagctggtgcccaccatcctgcggagcacagtggccggcatcaatgctgtgtctggccgcactggagctgccctggcccccctgctgatgaccctgatggcctacagcccccacctgccctggatctcctatggagtcttccccatcctggccgtgcctgtgatcctgctgctgcctgagacccgggacctgcccctgcccaacaccatccaggatgtggagaatgagaaggacagcaggaacatcaagcaggaggacacctgcatgaaggtgacccagttctag

SEQ ID NO: 52351 - DNA, 1656 bp, Artificial Sequence
  derived and/or modified sequence
atgggcttcgacgtgctgctggaccaggtgggcggcatgggccggtttcagatctgcctcatcgcctttttctgcataactaacattctcctgtttcctaacattgtgctggagaactttaccgcatttacgccatcccaccggtgctgggttccactgctcgacaacgacactgtctctgataacgacaccggtacgctcagcaaagatgacctcctgcggatctcgatcccactggattcaaacttgcggccacagaagtgccagaggtttatccaccctcagtggcaactccttcaccttaacggtaccttccccaataccaacgaacccgacacggagccctgtgtggacggttgggtgtatgatcggtcatcctttttgtctacaatcgtgactgagtgggacctggtgtgtgagagccagtctctcaagtctatggttcagtctctgtttatggcgggcagcctcctaggcggtctcatttatggtcacttaagcgaccgggtgggacgcaagattatatgcaaactgtgtttcttacagctggctattagcaatacctgtgctgcttttgcccccacttttcttgtttactgtatactgcgtttcctggctggctttagcactatgacaatcttaggtaacacatttatcctctccctcgagtggacccttcctaggtctcgctcaatgacgataatggtgctcttgtgttcctattctgtgggtcagatgctgcttggaggcttggccttcgccatccaggattggcacatcctacagctgaccgtgtcaacaccaatcatcgtgctcttcctgagctcctggaaaatggtagagtctgccagatggttaattattaacaaccagttggacgaggggctgaaggaactccggagagtggcccacattaacggaaaaaagaacacagaagaaacgctcactaccgagctggtgcgctcaactatgaaaaaggagctggacgctgtcagaatcaaaacttcaattttctccctttttcgtgcgcccaaactgcgtatgcgagtctttggcctctgctttgtgcgatttgcgataaccgtgccattttacgggcttatcttgaatctgcaacacctgggctcaaatgtttcactattccagatactctgtggcgctgtgacattcactgctcggtgcgtctccttgctcaccctaaatcacatgggaagacggatctctcagatcctcttcacttttcccgtaggtttatttattctggtgaataccttcctgccacaggaaatgcagatcctgcgggtggtactggccaccttaggaattggcagcgtatcagccgcatcgaacagcgcatcggtccaccataacgaacttgtgccaaccatactgagaagcacggtggccggtatcaatgccgtatcaggtagaaccggcgccgccctggcgccgctgttaatgaccctgatggcctattcaccccacctgccgtggatcagctacggggtgtttcccattcttgccgttccagtgatccttctcctgcccgagacccgggatctccccttaccaaatactatccaggacgtggagaatgagaaggactccaggaacattaaacaggaagatacatgcatgaaagtgacacagttttag

SEQ ID NO: 52352 - DNA, 1656 bp, Artificial Sequence
  derived and/or modified sequence
atgggctttgacgtgctgctggatcaggttgggggaatggggagattccagatttgcttaattgccttcttctgtatcactaatattctcctgttcccaaatattgttcttgagaactttaccgccttcacaccgagtcaccgctgctgggttcctctgttggacaatgataccgtctctgacaatgacactggaacactgagcaaggacgacctgctaagaataagtattcccttggacagcaatctaagaccacagaagtgccaaagatttattcatcctcagtggcagctgctccatctcaatggcacatttcctaataccaacgagcctgacaccgagccgtgcgttgacggttgggtctacgaccgatcttcttttttgtcaaccatcgtcactgagtgggatttagtgtgtgagtcccagtctctgaaaagcatggtccagtccttgtttatggccggtagcctacttggaggactgatttacggccatctatccgacagagtcggacgcaagatcatctgtaagttgtgttttctccagctggccattagtaacacatgcgccgcttttgcaccaacatttctggtatattgtatcctacggttcctggccggttttagcactatgaccatactcgggaacacatttattctaagtctggaatggaccttgccacgttccaggtccatgaccattatggtgttgctatgctcatactccgtcggccaaatgctgctaggcggtcttgccttcgccattcaggattggcatatcctgcaactgacagtttctacacccatcatcgtgttattcctgtcttcctggaaaatggtcgaatctgcacggtggctcatcatcaacaaccaactagatgaagggttgaaagagctccgcagggtcgctcatattaatggcaagaagaacacggaagaaacgctgaccacggaattggtgcggtctactatgaagaaagagcttgacgccgtcagaatcaagacttctatcttctccctctttagagctccaaaactcagaatgcgcgttttcggcctgtgtttcgtgaggtttgccatcacagtccccttctacggcctgatcctgaatctccagcatctaggctctaacgtaagcctgttccaaattctgtgcggggctgtgacattcactgcccgatgtgtttctcttctaactctgaatcatatgggtcgcaggatttcccagatcctgttcacattccccgtcggcctttttatcctggttaatacatttttaccccaggagatgcagatcctaagagtggtgctggctactcttgggataggctccgtaagcgcagcctcgaattccgcctctgtgcaccataatgaattggtccccaccatcctgaggtccaccgtcgccggtattaacgctgttagtggtaggaccggggctgccttggcacccttgctaatgactctcatggcctactcgccgcatcttccgtggatatcctatggagttttccctattctcgcggtgcccgtgatactcttgttgccagaaacgcgcgatctgcccctacccaacacgatccaagacgttgagaacgagaaggactctaggaatataaagcaggaggatacatgtatgaaagttacgcagttttag

SEQ ID NO: 52353 - DNA, 2098 bp, Artificial Sequence
  derived and/or modified sequence
gcaattcactttggattttctaatatcccatttctaagaagaatggcagactattgaacaggtgtattttaggtcacgtggggactgcatccacctgaaaatccaccgttgacttatcaggaaactcagagatcaggatctttcacagagtagtcttttaagaagattcagttgtcaacagctagcagtctctttgccaaataattatatctgtgacttctgaaactatttggctgcctaaagttaaaggacttggggaaagtccttccactgctcttctgcagtagtgtcacaccactcagtgcagggcccaccaagaagaaagcagtgtcaggatccacatggcactatggtaactttgtgaaaggggacattttctccctctgaacttctcttcataaagtcattgtgcttcctcttggggatcacctgttcagtctcaatgggctttgatgtgctcctggatcaagtgggtggcatggggagattccagatttgtctgatagctttcttttgcatcaccaacatcctactgttccctaatattgtgttggagaacttcactgcattcacccctagtcatcgctgctgggtccccctcctggacaatgacactgtgtctgacaatgataccgggaccctcagcaaggatgacctcctgagaatctccatcccactggactcaaacctgaggccacagaagtgtcagcgctttatccatccccagtggcagctccttcacctgaacgggaccttccccaacacaaatgagccagacacggagccctgtgtggatggctgggtgtacgacagaagctctttcctctccaccatcgtgactgagtgggacctggtatgtgaatctcagtcactaaaatcaatggttcaatccctatttatggctgggtcacttctgggaggtctaatatatggccatctttcagacagggttggacggaagatcatatgcaaattgtgtttcctccagctggccatctctaacacctgtgcggccttcgctcccaccttccttgtttactgcatactgcgcttcttggcagggttctccaccatgactattttgggaaacacttttattctcagcttagagtggacattgccccggtcacgatctatgacaataatggtgctattatgttcctacagtgttgggcagatgctcctaggagggctggcttttgccattcaggactggcacatattgcaactgactgtgtctacacccataattgtcctcttcttgtcctcttggaagatggtggagtctgctcggtggctgattatcaacaatcagctagatgagggcttaaaggagcttagaagagttgcacacataaatggaaaaaagaatactgaagagacactgaccactgagcttgtgagatccaccatgaagaaggagttggatgcagtccgaattaaaacatccattttttccctgttccgtgcacccaaattgcgaatgagagtcttcggcctgtgctttgtgagattcgcaatcactgtacccttttatggcctgatactcaacttgcagcacttagggagcaatgtctccctgttccagattctctgtggagctgtcacattcacagccagatgtgtttcccttttgacactgaatcatatgggtcgtcgaataagccagatattgttcacgttcccggtgggacttttcattctggtcaacacctttttgccccaagaaatgcagatcctgcgtgtggttttagcaactttgggaattggtagtgtttctgctgctagcaacagtgcttctgtccaccacaacgagctcgtccccaccatattgaggtcaacagttgcaggaatcaatgcagtgtccggtaggactggggcagcactggctcctctgttgatgaccttaatggcgtattctccccacctaccctggatttcctatggagtcttccccatccttgctgtccctgttatcctcctccttccagaaaccagggatctacctcttcctaacaccatccaggatgtggaaaatgaaaaagattcaagaaacataaagcaggaagatacttgcatgaaagtaacacagttttaa

SEQ ID NO: 52354 - DNA, 1656 bp, Artificial Sequence
  derived and/or modified sequence
atgggcttcgacgtgctgctggaccaggtgggcggcatgggcagattccagatctgcctgatcgccttcttctgcatcaccaacatcctgctgttccccaacatcgtgctggagaacttcaccgccttcacccccagccacagatgctgggtgcccctgctggacaacgacaccgtgagcgacaacgacaccggcaccctgagcaaggacgacctgctgagaatcagcatccccctggacagcaacctgagaccccagaagtgccagagattcatccacccccagtggcagctgctgcacctgaacggcaccttccccaacaccaacgagcccgacaccgagccctgcgtggacggctgggtgtacgacagaagcagcttcctgagcaccatcgtgaccgagtgggacctggtgtgcgagagccagagcctgaagagcatggtgcagagcctgttcatggccggcagcctgctgggcggcctgatctacggccacctgagcgacagagtgggcagaaagatcatctgcaagctgtgcttcctgcagctggccatcagcaacacctgcgccgccttcgcccccaccttcctggtgtactgcatcctgagattcctggccggcttcagcaccatgaccatcctgggcaacaccttcatcctgagcctggagtggaccctgcccagaagcagaagcatgaccatcatggtgctgctgtgcagctacagcgtgggccagatgctgctgggcggcctggccttcgccatccaggactggcacatcctgcagctgaccgtgagcacccccatcatcgtgctgttcctgagcagctggaagatggtggagagcgccagatggctgatcatcaacaaccagctggacgagggcctgaaggagctgagaagagtggcccacatcaacggcaagaagaacaccgaggagaccctgaccaccgagctggtgagaagcaccatgaagaaggagctggacgccgtgagaatcaagaccagcatcttcagcctgttcagagcccccaagctgagaatgagagtgttcggcctgtgcttcgtgagattcgccatcaccgtgcccttctacggcctgatcctgaacctgcagcacctgggcagcaacgtgagcctgttccagatcctgtgcggcgccgtgaccttcaccgccagatgcgtgagcctgctgaccctgaaccacatgggcagaagaatcagccagatcctgttcaccttccccgtgggcctgttcatcctggtgaacaccttcctgccccaggagatgcagatcctgagagtggtgctggccaccctgggcatcggcagcgtgagcgccgccagcaacagcgccagcgtgcaccacaacgagctggtgcccaccatcctgagaagcaccgtggccggcatcaacgccgtgagcggcagaaccggcgccgccctggcccccctgctgatgaccctgatggcctacagcccccacctgccctggatcagctacggcgtgttccccatcctggccgtgcccgtgatcctgctgctgcccgagaccagagacctgcccctgcccaacaccatccaggacgtggagaacgagaaggacagcagaaacatcaagcaggaggacacctgcatgaaggtgacccagttctag

SEQ ID NO: 52355 - protein, 42 aa, Artificial Sequence
  derived and/or modified sequence
MNWHLPLFLLASVTLPSICSHFNPLSLEELGSNTGIQVFNQI

SEQ ID NO: 52356 - DNA, 1194 bp, Artificial Sequence
  derived and/or modified sequence
atgaattggcacttgccactttttttacttgccagtgtgactttacccagcatctgttcccattttaaccctctatcactagaggaactggggtcaaatacaggtattcaagtgttcaaccaaatagtgaagtcccgaccacatgataatattgttatcagccctcacggtatcgccagcgtcctgggtatgctacagctgggagcggatggacgcactaagaagcaattagccatggtcatgcgctacggcgtcaacggcgttgggaagatcttgaagaagattaataaggccattgtgtccaagaagaacaaggatatagtgaccgtggctaacgcggtcttcgttaagaatgctagcgagatcgaggtacctttcgtcactaggaataaggatgttttccagtgtgaggtacggaatgtgaacttcgaagatccagctagcgcatgtgacagtatcaatgcttgggtcaagaacgaaaccagggacatgatcgacaatctgttatctcctgaccttatcgatggagtactgaccaggcttgtactagtgaatgcagtttacttcaagggattatggaaatctagattccaaccggagaatacaaaaaagaggacattcgtggccgccgatggcaagagttatcaagtgccaatgctagcccaactctccgtgtttcgatgtgggtctacttcagccccaaatgatctatggtataatttcatcgaactcccataccacggcgaaagcatctctatgctcatcgccctacctactgagtcatctacccctctttcagccatcatcccacatatctctactaagacaatcgatagctggatgtccataatggtgcctaagagagtccaagtgatcctgccaaagttcaccgctgtcgcccagaccgacctgaaggaacccctgaaagtcctgggaattactgacatgtttgactccagcaaagcaaactttgctaaaattacacggagtgaaaatctgcacgtgtcacatatcctgcagaaagctaagattgaagtgagcgaagacgggacgaaagcttccgccgctacgacagccatccttatcgctcggtcatcaccaccctggttcattgtcgatcgcccattcctgtttttcattaggcataacccaacaggtgctgtgctgttcatgggccagattaataagccttag

SEQ ID NO: 52357 - DNA, 1194 bp, Artificial Sequence
  derived and/or modified sequence
atgaattggcaccttccgctgttcctgctcgccagcgtaactctaccctcaatctgcagtcacttcaaccccctgagtctcgaggagctggggtccaataccgggattcaggtattcaatcaaattgtgaagtcaaggccacacgacaatatcgtcataagtccacacgggatcgctagcgtgctggggatgttgcagctgggggccgatggaagaaccaagaagcaattggccatggtgatgcggtacggcgtgaacggcgtaggtaaaattctgaagaaaataaataaggctatagtgagtaagaagaacaaggatatagtcaccgtggcaaacgccgtatttgtgaaaaatgcatctgaaatcgaggtcccattcgtgactcgcaataaggatgttttccagtgtgaagtcaggaacgtaaacttcgaggatcctgcctctgcttgcgacagtattaacgcatgggtgaaaaatgagacccgggatatgatcgataatcttctgtcaccagatctgattgacggagtccttacaaggctcgtgctggtgaacgccgtgtacttcaagggactgtggaagtcccgattccaacccgagaacaccaaaaagcggaccttcgtggcggcggatggaaagtcttatcaagtgcccatgttagcacagctgagtgtatttcggtgtggttctacgtcggcccccaatgacctgtggtacaattttatcgaattgccgtatcacggcgagtccatctccatgcttatagccctgcccaccgagagttccacacctctttccgcaatcattccacacatttccacaaaaactatcgactcatggatgtctataatggtgccaaaacgagtgcaagtcatactgcccaagttcaccgctgttgcccagaccgatctcaaggagcccttgaaggtcctagggattactgatatgtttgattcaagcaaggcaaactttgcgaagataacaaggtctgaaaacctacatgtgagccacatcttgcagaaagctaaaatcgaggtgtctgaggacgggacaaaggctagtgccgccaccaccgccatccttattgcgcgttctagcccaccttggtttatagtcgaccgtccatttttattttttatccggcataatcccacaggggcggtgctttttatggggcagattaataagccctag

SEQ ID NO: 52358 - DNA, 129 bp, Artificial Sequence
  derived and/or modified sequence
atgaactggcacctccccctgtttctcctcgcctcagtcaccctaccttctatctgcagtcacttcaatccactttcactggaagaactggggtctaatacaggcatccaggtttttaatcagatctag

SEQ ID NO: 52359 - DNA, 831 bp, Artificial Sequence
  derived and/or modified sequence
atgaattggcaccttcccctgttcctgctcgcatctgtgacgctccccagtatttgctcccacttcaatccactgtccctggaggagctgggcagtaatacaggaatacaggttttcaaccaaatagttaaaagcagaccacacgataatattgtgattagcccacatggcatcgcctcggtactcggaatgctgcagttgggagctgatggacgaacgaaaaaacaactggccatggtcatgcggtacggggtcaacggggtaggaaagatactcaagaagatcaacaaggctatcgtgtctaaaaaaaataaggacatcgtaacagtggcgaatgccgttttcgtgaagaatgctagtgagatcgaggtcccttttgtaacccggaataaggatgtgtttcagtgtgaggttaggaacgtgaactttgaggatcctgctagcgcatgtgacagcattaacgcctgggtaaaaaatgaaacaagggatatgatagacaatcttctgagccccgatttgatcgacggcgtgctgacacgcctcgttttggtaaacgccgtgtattttaagggactatggaaaagcagattccagcccgagaacacaaagaaacgaacatttgtcgctgcagacggtaagtcctatcaggtgccgatgctggctcagctgtctgtattccgctgcgggtcaacaagcgccccaaatgacttgtggtacaatttcatcgagttgccttaccacggggagagtatctcaatgctgatcgccctgcccacagagagcagtactcccctctccgctatcatcccccacatatccacgaaaacctag

SEQ ID NO: 52360 - DNA, 264 bp, Artificial Sequence
  derived and/or modified sequence
atgaattggcacctcccactatttctcctggccagtgtgacactcccatccatttgcagccacttcaaccccctcagcctggaagaactgggatccaacaccggcatccaggtgtttaaccagattgtgaagtccaggccacacgacaatatcgttatctctccacacggcattgcatcagtgttgggaatgcttcagttgggcgccgacggccgaaccaagaaacagctcgccatggtgatgaggtatggcgtcaacggttag

SEQ ID NO: 52361 - DNA, 1194 bp, Artificial Sequence
  derived and/or modified sequence
atgaactggcacctgcccctcttcctgctggcctctgtgaccctgcccagcatctgcagccacttcaaccccctgagcctggaggagctgggcagcaacacaggcatccaggtgttcaaccagatcgtgaagagccggccccatgacaacatcgtcatcagcccccacggcatcgcctctgtgctgggcatgctgcagctgggcgcagatggccgcaccaagaagcagctggccatggtgatgagatatggagtgaatggagtgggcaagatcctgaagaagatcaacaaggccatcgtgtccaagaagaacaaggacatcgtgacagtggccaatgctgtgtttgtgaagaatgccagcgagattgaggtgccctttgtgaccaggaacaaggatgtgttccagtgtgaggtgagaaatgtgaactttgaggaccctgccagcgcctgtgacagcatcaatgcctgggtgaagaatgagacccgggacatgattgacaacctgctgagcccagacctgattgatggagtgctgacccggctggtgctggtgaatgctgtgtacttcaagggcctgtggaagagccgcttccagcctgagaacaccaagaagaggacctttgtggccgcagatggcaagagctaccaggtgcccatgctggcccagctgagcgtcttccgctgtggcagcaccagcgccccaaatgacctgtggtacaacttcatcgagctgccctaccatggagagagcatctccatgctgattgccctgcccacagagagcagcacccccctgagcgccatcatcccccacatcagcaccaagaccatcgacagctggatgagcatcatggtgcccaagagggtgcaggtgatcctgcccaagttcaccgctgtggcccagacagacctgaaggagcccctgaaggtgctgggcatcacagacatgtttgacagcagcaaggccaactttgccaagatcaccaggtctgagaacctgcacgtgagccacatcctgcagaaggccaagattgaggtgtctgaagatggcaccaaggccagcgctgccaccacagccatcctgattgcccggagcagccccccctggttcatcgtggaccggcccttcctgttcttcatccgccacaaccccactggagctgtgctcttcatgggccagatcaacaagccctag

SEQ ID NO: 52362 - DNA, 129 bp, Artificial Sequence
  derived and/or modified sequence
atgaactggcacctgcccctcttcctgctggcctctgtgaccctgcccagcatctgcagccacttcaaccccctgagcctggaggagctgggcagcaacacaggcatccaggtgttcaaccagatctag

SEQ ID NO: 52363 - DNA, 831 bp, Artificial Sequence
  derived and/or modified sequence
atgaactggcacctgcccctcttcctgctggcctctgtgaccctgcccagcatctgcagccacttcaaccccctgagcctggaggagctgggcagcaacacaggcatccaggtgttcaaccagatcgtgaagagccggccccatgacaacatcgtcatcagcccccacggcatcgcctctgtgctgggcatgctgcagctgggcgcagatggccgcaccaagaagcagctggccatggtgatgagatatggagtgaatggagtgggcaagatcctgaagaagatcaacaaggccatcgtgtccaagaagaacaaggacatcgtgacagtggccaatgctgtgtttgtgaagaatgccagcgagattgaggtgccctttgtgaccaggaacaaggatgtgttccagtgtgaggtgagaaatgtgaactttgaggaccctgccagcgcctgtgacagcatcaatgcctgggtgaagaatgagacccgggacatgattgacaacctgctgagcccagacctgattgatggagtgctgacccggctggtgctggtgaatgctgtgtacttcaagggcctgtggaagagccgcttccagcctgagaacaccaagaagaggacctttgtggccgcagatggcaagagctaccaggtgcccatgctggcccagctgagcgtcttccgctgtggcagcaccagcgccccaaatgacctgtggtacaacttcatcgagctgccctaccatggagagagcatctccatgctgattgccctgcccacagagagcagcacccccctgagcgccatcatcccccacatcagcaccaagacctag

SEQ ID NO: 52364 - DNA, 264 bp, Artificial Sequence
  derived and/or modified sequence
atgaactggcacctgcccctcttcctgctggcctctgtgaccctgcccagcatctgcagccacttcaaccccctgagcctggaggagctgggcagcaacacaggcatccaggtgttcaaccagatcgtgaagagccggccccatgacaacatcgtcatcagcccccacggcatcgcctctgtgctgggcatgctgcagctgggcgcagatggccgcaccaagaagcagctggccatggtgatgagatatggagtgaatggatag

SEQ ID NO: 52365 - DNA, 1194 bp, Artificial Sequence
  derived and/or modified sequence
atgaactggcacctgcccctgttcctgctggccagcgtgaccctgccatctatctgttcacactttaaccccctgtctcttgaggagctgggcagtaacacaggcatccaggtgttcaatcaaattgtcaagagccgaccgcacgataatatcgtgatctccccccatggcatcgcttccgttttgggcatgctgcaattgggagccgatggccgcaccaaaaaacagcttgcgatggttatgaggtatggggtgaacggggtaggtaagatcctgaaaaagattaataaggcaattgtgagtaaaaagaataaggatatagtgactgtggccaacgccgtgtttgtcaaaaacgcatctgaaatcgaggttccttttgttacccggaacaaagacgtttttcaatgtgaggtcaggaatgtcaactttgaagacccagccagcgcatgcgattcgattaatgcttgggttaaaaacgaaacccgggatatgatcgacaatctgcttagccctgacctgatcgatggtgttctgaccagactggtgctggtgaacgcggtgtacttcaaaggcctttggaagtccaggttccagcctgaaaataccaaaaaaaggaccttcgtcgccgcggatggtaagtcttatcaggtgcccatgttagcccagctctccgtcttcagatgtgggagtacctcagccccaaatgatctgtggtataacttcatcgagcttccataccacggcgagagcatctcgatgttgatcgctctccctaccgaatccagtacacccttatccgctattatcccccatatttccactaaaacgatcgacagttggatgtcaatcatggtccccaagagggtgcaggttatcctgcctaagtttactgccgttgctcagaccgatcttaaggagccactgaaggtgctgggcataacagacatgttcgactcctccaaggctaatttcgcgaaaattacccgctctgagaaccttcatgtgtcccacatcttacagaaagctaagatagaagtgagcgaggatggtaccaaggcctcagctgccacgacagccattctgatcgcccggtcttccccgccctggttcatcgtggaccggccattcctcttctttatcaggcataaccccaccggagctgtgctttttatgggccagattaataaaccatag

SEQ ID NO: 52366 - DNA, 1194 bp, Artificial Sequence
  derived and/or modified sequence
atgaactggcacctgcccctgttcctgctggccagcgtgaccctgccctccatctgcagccattttaatccactgagcctggaggaactgggaagtaatacgggaatacaagttttcaatcagattgtgaagagccggccccacgataatatcgtgatctctccccatggcattgcctccgtgctggggatgttgcagctgggggctgatgggcgtacaaaaaaacagctagccatggtgatgcggtacggcgtgaacggggttggcaagatcctgaagaaaatcaataaggctatagtctctaaaaaaaataaggacatagtgacggtggcgaacgcagttttcgtgaagaacgcctctgagattgaagttccgtttgtgacgagaaataaagatgtattccagtgcgaggttcgtaacgtgaattttgaagaccccgcttcagcatgtgattccattaacgcatgggtaaagaatgagacgcgggacatgatcgacaacttgctcagcccagatttaatagatggggtcttgacccgccttgtactcgtaaacgcggtgtatttcaaggggctgtggaaatctcgcttccagccagaaaataccaagaaacgcacattcgtcgccgcagacggcaagagctaccaggtgcctatgctcgctcagctgagcgtattcaggtgcggctccaccagcgcgcccaacgacctttggtataactttatcgagctgccataccacggcgagtcaattagcatgctcattgcattgcctaccgagagctccacgcctctgtctgctataatcccccacatctcaactaagactatcgacagttggatgtctatcatggtccccaagcgcgtacaggtaatcttgcccaagttcactgcagtggcgcagacagacttaaaggaacccctcaaagtgctcgggataaccgatatgtttgatagttcgaaggcgaatttcgctaaaatcactcgttccgaaaatcttcatgtaagtcacatcttgcagaaggcaaagatcgaagttagcgaggacgggactaaagctagtgctgctactacagcaatcttgatcgcaaggagttcgccaccatggtttattgtggataggccgttccttttcttcattcgccacaatcccaccggggctgtgctcttcatgggccagatcaataagccatag

SEQ ID NO: 52367 - DNA, 129 bp, Artificial Sequence
  derived and/or modified sequence
atgaactggcacctgcccctgttcctgctggccagcgtgaccctgccatcaatctgttctcatttcaaccccttgtccctagaggagttaggctcgaatactggtattcaggtcttcaatcagatctag

SEQ ID NO: 52368 - DNA, 831 bp, Artificial Sequence
  derived and/or modified sequence
atgaactggcacctgcccctgttcctgctggccagcgtgaccctgccttcaatctgcagccacttcaaccctctcagcctagaggagctgggatccaacacaggtattcaggtattcaaccagatcgttaagagtcgaccacatgataatatcgtcatctccccgcatggtatcgcgagtgtgctgggcatgctgcaactcggagccgatggccggactaaaaaacaacttgccatggtgatgaggtatggcgtgaatggtgttggaaaaatcctgaaaaagattaacaaggcaatcgtgagtaagaaaaataaggacatcgtaaccgtagctaatgccgtgtttgttaagaatgcttcggaaatcgaagttccattcgtgactagaaacaaggatgtcttccagtgcgaggtgcggaacgttaatttcgaggatccggcatcagcctgtgactccatcaatgcttgggtaaaaaacgagacgcgtgacatgatagataaccttctgtctcccgacttaatcgatggagtgctcacaagactggtactggtgaacgcagtctatttcaaaggcctttggaagagcaggttccaaccggagaatactaagaagagaactttcgttgccgctgatggaaagtcctaccaagttcctatgctggcccagttgtctgtttttcggtgcgggtctacatcagcccccaatgacttatggtacaactttatcgagttgccatatcacggtgaaagtatctctatgcttatcgcacttcctactgagtcaagcacacctctgagcgctataatcccgcacatcagcacgaaaacttag

SEQ ID NO: 52369 - DNA, 264 bp, Artificial Sequence
  derived and/or modified sequence
atgaactggcacctgcccctgttcctgctggccagcgtgaccctgccgagcatctgctctcactttaaccccctgtccctagaggaacttgggtctaacacagggatccaggttttcaaccaaatagtaaagtctcggccacacgacaatattgttatctccccacatgggatcgcaagtgtgcttgggatgcttcagctcggcgccgatggccgtacaaaaaagcagctggctatggttatgagatatggtgttaacggctag

SEQ ID NO: 52370 - DNA, 1194 bp, Artificial Sequence
  derived and/or modified sequence
atgaactggcacctgcctttattcctcctggccagcgtgacccttccctctatttgttcacactttaatcccctcagcctcgaagagctggggtctaacactggcatccaggtctttaaccagatcgttaagtcccggcctcacgataacatagttatctctccacacggtatagcctccgttttgggaatgttacagttgggcgcagatggacgcaccaagaaacagctggcaatggttatgcgatacggcgttaatggcgtcggtaaaatactgaaaaagataaacaaagcaatcgtttcaaagaagaataaagatatcgtgacagtcgcaaatgccgtattcgtaaagaatgcctctgagattgaggtcccatttgtaacccggaataaggatgtgtttcagtgcgaggtgcgcaacgttaactttgaagaccccgcaagcgcctgcgactccattaatgcctgggtcaagaatgaaacccgggacatgatcgacaatctgctgtcccctgacttgattgacggagttcttaccagactggttctggtcaacgctgtgtactttaagggcctttggaaatcccggtttcagccagagaatactaagaagaggacatttgtagccgctgatggcaagagctaccaggttcctatgctggctcagctcagtgtttttaggtgcggatccaccagtgctcctaatgacctgtggtacaattttatcgaactcccttatcatggagaatcgatctcaatgttgattgccctccccacagagagctcgacccctctttcagctatcattcctcacatttccactaagacaatcgacagttggatgtcaatcatggttcccaagcgtgtgcaggtgatcctgccaaagtttacagctgtggctcagaccgatttgaaagagcctctgaaggttcttgggattaccgatatgttcgatagcagcaaagcgaacttcgcaaagattacacggagtgagaatctgcatgtgagccacatactgcagaaggctaaaattgaggtgtccgaggacggcaccaaagccagcgctgctaccacagctatcctaatagcgaggtccagcccaccctggtttatagtagatcgaccctttctgttcttcatccgtcacaacccaacgggcgctgtgttgtttatgggccagatcaataaaccctag

SEQ ID NO: 52371 - DNA, 1194 bp, Artificial Sequence
  derived and/or modified sequence
atgaattggcacctgcctctgtttctgctcgcgagcgtaaccttacctagtatttgttctcactttaacccactttcacttgaagaattgggctccaatacggggatccaagtgtttaaccaaatagtaaaatctcgccctcacgacaacattgttatcagtcctcacggcatcgcgtccgtcctgggaatgttacagctgggagcagacgggcgaactaaaaaacagttagctatggttatgaggtacggggtcaatggggtgggcaaaatactgaaaaaaattaataaggccatcgtgagtaaaaagaacaaggacatcgtgactgtggctaacgccgtttttgtgaaaaacgcctcagagatcgaggtgcccttcgtcactcgcaacaaagatgtttttcagtgtgaagtaagaaacgtcaacttcgaggatccagcgagcgcctgcgactctatcaacgcttgggtaaagaatgaaactcgggacatgatagacaacctgcttagcccagaccttattgatggagtgttgacccgcctggtgttagtaaatgcagtttacttcaagggcctatggaagtcacgctttcaaccagaaaataccaagaaaagaacgtttgtagccgcagacggtaaatcataccaagtaccgatgctggctcagctgagtgtttttaggtgtggttcaacgagcgcccctaatgatctatggtacaactttatcgaactgccttatcacggagagtcaattagcatgctgatcgcactgcctacagaatccagtacacccctatctgccatcataccacacatttctacaaagaccatcgattcttggatgtcaattatggtgcccaagagagtgcaggttattctgccaaaatttacagctgtggcccagacagatctgaaagagcccctgaaagtgctgggcattaccgacatgtttgacagcagcaaggcgaatttcgccaagattacaaggtccgaaaatctgcacgtcagtcacatacttcagaaagccaaaattgaggtatcagaggacggcaccaaagcctctgctgcaaccactgcaattctgatagccagaagcagtcctccgtggttcatcgtggaccgccctttcctcttctttatccgtcacaaccccaccggtgccgtactgttcatggggcagattaacaagccttag

SEQ ID NO: 52372 - DNA, 129 bp, Artificial Sequence
  derived and/or modified sequence
atgaactggcacctaccacttttcttactggcaagtgtgacccttccgagtatctgctcccacttcaaccccttaagcctggaagagttgggcagtaacacagggattcaagtgttcaatcaaatctag

SEQ ID NO: 52373 - DNA, 831 bp, Artificial Sequence
  derived and/or modified sequence
atgaactggcatctgcctctgtttttgcttgcctccgtgacactgccaagtatctgttcacattttaaccctctaagtctggaggagctcggctctaacaccgggatccaggtatttaaccaaatcgtcaagagtcggcctcatgataacatcgttatctctccccatgggattgcgagtgtcttaggaatgttgcagctcggagccgacggaaggaccaagaaacagctcgcaatggttatgcggtacggagtcaatggggtgggcaagattctcaagaagataaacaaggctatcgtgagcaagaagaacaaagacattgttacagtcgcgaatgcagtctttgtgaagaacgcatccgagattgaggtcccctttgtcacaagaaacaaagacgtcttccagtgcgaagtacggaatgttaactttgaggatcctgcaagtgcatgtgacagtattaatgcatgggttaaaaatgagacccgagatatgatcgacaacctattgagccctgatctcattgacggcgtgctgactcgcctcgtgctggtaaacgccgtgtactttaagggtctgtggaagtcaaggtttcagcctgagaacacaaagaagcggaccttcgtagcagccgacggcaagagctatcaggttccgatgctggctcagctctccgtgtttaggtgcggatccactagtgctcctaacgatctgtggtacaattttatcgaactgccctaccacggtgagtcgatatctatgttgattgctttaccgaccgaatcaagcacccccctgtccgcaatcatcccccatatctctaccaaaacctag

SEQ ID NO: 52374 - DNA, 264 bp, Artificial Sequence
  derived and/or modified sequence
atgaactggcatctgccactctttctgctggcctctgttactttgccaagcatttgcagccacttcaacccactgtccctagaagaactcggaagtaataccggaatccaggtgttcaatcagatcgtgaaaagtaggccacacgacaatattgtaatctcacctcacggaatagccagtgtgctcggcatgttgcaactaggcgcagacggacggaccaaaaagcagctggccatggtgatgcggtacggcgtgaacggctag

SEQ ID NO: 52375 - DNA, 1194 bp, Artificial Sequence
  derived and/or modified sequence
atgaattggcacctacccttattcttactcgcctctgtgacactgccatcaatttgctctcacttcaaccctctgtctctcgaagagcttgggtccaatacaggcatccaagtgttcaatcagattgtgaaatcaagacctcatgacaacatcgtgatcagcccgcatggaattgctagcgtgcttgggatgttgcagctaggcgcggacggaaggactaagaaacaacttgcaatggtgatgagatacggagtgaatggcgtcggcaagattctgaaaaaaatcaataaggctatcgtttccaaaaagaacaaagatatcgtgacagttgcgaatgctgtcttcgtgaagaacgcttcagagattgaagtgccatttgtgactcggaataaagacgtatttcagtgcgaagtgagaaatgttaacttcgaggatccagcctccgcttgtgattctattaatgcttgggtaaagaacgaaaccagggatatgatcgacaatcttctcagtcccgacctaattgacggagtcctgacgcggctggtgctggtcaacgcggtgtattttaagggcttgtggaagagcagatttcaacccgagaacactaaaaagaggacattcgtggctgccgacggaaaaagttatcaagtgccaatgctagcccagctgtcggtattcagatgtgggagcacctcagcccctaacgatctgtggtacaatttcattgaacttccttaccacggagaaagcatctccatgcttattgcacttcctaccgagtcctcgactccgctgtccgctatcattccccatattagtacgaaaactatcgatagttggatgtcaatcatggtacctaagagggtacaagtgattctgcctaagtttactgccgttgcacagaccgatctcaaggaacccctcaaagtgctgggaattaccgatatgttcgactcttctaaggccaatttcgccaagattacgaggtctgaaaacctccatgtgagccatatcttgcagaaggcaaagattgaagtgagcgaggacggaacaaaagcctcagcagcgacaactgcgattctcatcgcccggtcttcccctccctggttcattgtcgatcgcccattcctatttttcatcaggcataacccaacaggggccgtacttttcatgggacagatcaataaaccatag

SEQ ID NO: 52376 - DNA, 1194 bp, Artificial Sequence
  derived and/or modified sequence
atgaattggcacctccccctctttttgctggcaagtgtaactctgccgtcgatttgctctcactttaatcccctgtcccttgaggaactcgggagcaatactggcatccaagtcttcaaccagatcgtgaagtcaagaccacacgataacattgttatcagcccccacggaatcgctagtgtgttaggcatgctacagttgggagctgacggtaggacaaagaaacagttagccatggtgatgagatatggagtcaacggtgtgggaaagatcctgaagaaaatcaacaaggcgattgtgagcaaaaagaataaggatatcgtcaccgtagccaacgcggtttttgtgaaaaacgcctccgagatcgaggtccccttcgtgacgaggaacaaagatgtgttccaatgtgaagtaaggaacgtgaacttcgaagatccggcctccgcttgtgacagcattaatgcgtgggtgaaaaacgagacccgggacatgatagataacctgctcagccccgatttgatcgatggagtgctcacacgattagttcttgtgaatgctgtgtacttcaagggactgtggaaaagccgattccagcctgagaacaccaagaaaaggacttttgtggccgccgacggtaaatcgtaccaggtacctatgttagcccagctgagcgtgtttaggtgtggatcgacctctgcccccaatgatttatggtacaacttcattgaactgccttaccatggcgagtccatctctatgctcatagcacttcctacagagtcctccactcccctctccgccattattcctcacatctctacaaagaccatcgattcctggatgagtatcatggtcccaaaacgtgtacaggtgatcctgcccaagttcacagccgtggctcagactgatttgaaagaacctctaaaggtgcttgggattacagacatgtttgattcctcaaaagcgaattttgccaaaattactcgatcagaaaatctgcacgtctcccacattcttcagaaggccaagattgaagtctccgaggatggaaccaaggctagcgctgcaactactgccatactgattgcgaggtcttctccaccttggttcatcgtggatcgcccttttcttttcttcataaggcacaacccaacgggagcggttttatttatgggccagattaataagccttag

SEQ ID NO: 52377 - DNA, 129 bp, Artificial Sequence
  derived and/or modified sequence
atgaactggcatttacccctctttcttttggcttctgtcaccctgccatccatttgctcacactttaatcctctgtccctcgaagaactcgggtccaacaccggaattcaggtttttaatcagatttag

SEQ ID NO: 52378 - DNA, 831 bp, Artificial Sequence
  derived and/or modified sequence
atgaattggcacctgccattgttcctgcttgctagcgtaacactgccttccatttgcagccacttcaatccgctgagcctggaggagctagggagtaacacgggaatacaggtcttcaatcagatagtgaaaagcaggcctcatgataacatcgtcatctcaccgcacggaatcgcctcggttctcggaatgttgcaactcggcgctgacgggaggactaagaagcagctcgccatggtgatgcgttatggggtgaatggagttggaaaaatccttaagaaaattaacaaagcaattgtgtcaaaaaagaacaaagatatcgtaactgtggccaatgctgtattcgtgaaaaacgcaagtgaaatcgaagtgccatttgttacaagaaacaaagacgtctttcagtgtgaagtcaggaacgttaattttgaggacccagcttcggcatgcgatagtattaacgcttgggttaaaaacgagacgcgggacatgattgataatttgctttctcctgacctgattgacggtgtcttaaccagactagtcttggtgaatgcagtgtattttaagggtctttggaagtccaggttccaaccagaaaatactaagaaacgaaccttcgtcgctgccgatgggaagtcatatcaggtgccgatgctggcacagctgtctgtgtttcgatgtgggagtacaagtgcacccaacgatctttggtataacttcatcgaactaccttaccacggcgaatctatctctatgctgatcgctctgccaaccgaatcgagcacccctctgtccgctattattccccacatctctactaaaacctag

SEQ ID NO: 52379 - DNA, 264 bp, Artificial Sequence
  derived and/or modified sequence
atgaattggcacctgccactcttccttttagcgtcagtgaccctcccttcgatttgctcccactttaacccgctttcacttgaggaactaggttcaaacacaggtatccaagtctttaatcagattgttaagtcccgccctcatgataacattgtcattagcccccacggcattgcctccgtgctcgggatgcttcaactgggagctgatggccgtacaaagaagcaactggcaatggtaatgaggtacggcgtcaacggatag

SEQ ID NO: 52380 - DNA, 1194 bp, Artificial Sequence
  derived and/or modified sequence
atgaattggcatttacccctcttcctattggcaagtgtaacgctaccctcgatttgttcccattttaacccattgtcgctcgaagaacttgggtcaaacaccggcatccaggtctttaaccagatagtaaagagtcgcccccatgacaatattgtaatctctccacacggcatcgcttcagtgcttggaatgctgcaactaggggcagacgggagaaccaagaagcagttggccatggtgatgcgttatggtgtgaatggagttggtaagattctgaagaagatcaataaagctatcgtgtcaaaaaaaaacaaggacattgtgacggttgctaatgctgtgtttgtaaaaaatgcctccgaaatcgaggttcctttcgtcacacgcaataaggatgtattccaatgtgaagtccgcaacgtgaattttgaggatcctgcttccgcttgcgacagtattaacgcttgggtcaagaatgagacacgtgacatgatcgacaatctccttagcccagatctgattgatggcgtgctgactcgccttgtgttggttaatgccgtgtactttaaaggactgtggaaatcaagatttcagccggagaacactaagaagaggacctttgtcgcagctgacggcaaaagctaccaagttcccatgctcgcgcaattgtctgtgtttcgatgtggtagcacttctgcacccaatgatctttggtataactttatcgaactgccataccatggagaaagcatttccatgttgatagccctgcccactgaatcttccactcctttgtccgctattatcccccatatctccaccaagactatcgacagctggatgtctattatggttccaaagcgagtccaggtgatactgcctaagttcactgccgtagcacagactgatttaaaagagcctttgaaggttttaggtataactgacatgtttgatagcagtaaagctaattttgcaaaaattacaagatccgagaatctccatgtgtcacacattctccagaaggccaaaattgaggtgagcgaagacggcacaaaagcgagcgctgcaactaccgcaatcctgatcgccagatctagtcctccttggtttatagttgacagaccttttctgtttttcatcagacacaatccaaccggcgctgtgctgtttatgggacagatcaataagccgtag

SEQ ID NO: 52381 - DNA, 1194 bp, Artificial Sequence
  derived and/or modified sequence
atgaactggcatcttcccctctttctccttgctagcgttactctcccgtccatctgttcacacttcaaccccctgagtttggaagaactcggcagcaacactggaattcaggtctttaaccagattgtgaaatctcggcctcacgataatattgtaatttcaccgcatggaattgcctccgtcctagggatgcttcagctcggtgcagacgggaggacgaagaaacaacttgccatggtcatgagatatggcgtgaatggggtcggaaaaattttaaagaaaattaacaaggccatagtgagtaaaaaaaataaggacattgtgacagttgccaatgccgtctttgttaaaaacgcttcagaaatagaagtgccctttgtgacaagaaataaagacgtctttcagtgtgaggttaggaacgttaactttgaagaccccgccagtgcctgcgactcaataaatgcctgggtaaaaaatgagaccagagacatgattgataatctgttaagtcccgatctgatcgacggtgtgctgacccgactcgtcctcgtgaacgctgtgtatttcaagggcctctggaagtcacgatttcagcccgagaatactaagaagcgcacgtttgtcgctgcagatggaaaatcttaccaagtacctatgcttgcccagttgtccgtgttccgatgtggctcgacatccgctcctaatgacctctggtacaattttatagagctcccttatcacggggaatcaattagcatgctaatcgcccttccaactgaaagtagtacaccactgtcagcgattatcccacatatatctactaagaccatcgattcatggatgtctataatggtaccaaaacgcgtgcaggttatccttcctaaatttaccgccgtggcccaaaccgacctgaaagagccattaaaagtgcttggaattactgacatgtttgattcaagcaaagcaaatttcgccaagataacacgttctgaaaacctgcacgtgtctcacatccttcagaaagccaaaattgaagttagcgaggatggcacgaaagctagcgcagccactacagcaattctcatcgccaggagttccccaccatggttcatcgtggatcggccgttcctgttcttcatcaggcacaatccgactggggcagttctctttatgggccagattaataagccatag

SEQ ID NO: 52382 - DNA, 831 bp, Artificial Sequence
  derived and/or modified sequence
atgaattggcacctccccctgttcctgctggcatccgttactctgccatccatctgttctcacttcaacccactgtcacttgaggagttaggaagcaatacagggatacaagtgttcaaccagatcgtcaaatcgagacctcacgacaatatagtcatctcccctcacggaatagccagtgttctagggatgctgcagctgggcgcagacggacgcaccaagaaacagctcgccatggttatgcgatatggggtaaacggcgtaggaaaaatactgaagaagatcaataaggctattgtctcaaagaaaaataaagatattgtcaccgtagcaaatgctgtgtttgtgaaaaatgctagcgagatagaggtgcccttcgtaactcgcaacaaagatgtgttccagtgtgaagttagaaacgtcaattttgaagaccctgcctccgcctgcgactctatcaacgcatgggtgaagaacgagacgcgcgatatgattgacaatctgctgagtcctgacctgattgatggtgtgcttacacgcctggtcttagtgaatgcagtatatttcaaaggtctttggaaatctagattccagcctgaaaacaccaaaaaacgtacttttgttgctgccgatggaaaaagttatcaggtcccaatgctcgcccagctaagtgtcttcagatgtgggagcacctccgccccaaatgacctctggtataactttatcgaactgccctaccacggagagtctataagcatgttaatcgcgctccccacagagtccagtacacctctaagcgcaatcatccctcacatatccaccaaaacttag

SEQ ID NO: 52383 - DNA, 1194 bp, Artificial Sequence
  derived and/or modified sequence
atgaactggcacctgcccctgttcctgctggccagcgtgaccctgcccagcatctgcagccacttcaaccccctgagcctggaggagctgggcagcaacaccggcatccaggtgttcaaccagatcgtgaagagcagaccccacgacaacatcgtgatcagcccccacggcatcgccagcgtgctgggcatgctgcagctgggcgccgacggcagaaccaagaagcagctggccatggtgatgagatacggcgtgaacggcgtgggcaagatcctgaagaagatcaacaaggccatcgtgagcaagaagaacaaggacatcgtgaccgtggccaacgccgtgttcgtgaagaacgccagcgagatcgaggtgcccttcgtgaccagaaacaaggacgtgttccagtgcgaggtgagaaacgtgaacttcgaggaccccgccagcgcctgcgacagcatcaacgcctgggtgaagaacgagaccagagacatgatcgacaacctgctgagccccgacctgatcgacggcgtgctgaccagactggtgctggtgaacgccgtgtacttcaagggcctgtggaagagcagattccagcccgagaacaccaagaagagaaccttcgtggccgccgacggcaagagctaccaggtgcccatgctggcccagctgagcgtgttcagatgcggcagcaccagcgcccccaacgacctgtggtacaacttcatcgagctgccctaccacggcgagagcatcagcatgctgatcgccctgcccaccgagagcagcacccccctgagcgccatcatcccccacatcagcaccaagaccatcgacagctggatgagcatcatggtgcccaagagagtgcaggtgatcctgcccaagttcaccgccgtggcccagaccgacctgaaggagcccctgaaggtgctgggcatcaccgacatgttcgacagcagcaaggccaacttcgccaagatcaccagaagcgagaacctgcacgtgagccacatcctgcagaaggccaagatcgaggtgagcgaggacggcaccaaggccagcgccgccaccaccgccatcctgatcgccagaagcagccccccctggttcatcgtggacagacccttcctgttcttcatcagacacaaccccaccggcgccgtgctgttcatgggccagatcaacaagccctag

SEQ ID NO: 52384 - DNA, 129 bp, Artificial Sequence
  derived and/or modified sequence
atgaactggcacctgcccctgttcctgctggccagcgtgaccctgcccagcatctgcagccacttcaaccccctgagcctggaggagctgggcagcaacaccggcatccaggtgttcaaccagatctag

SEQ ID NO: 52385 - DNA, 831 bp, Artificial Sequence
  derived and/or modified sequence
atgaactggcacctgcccctgttcctgctggccagcgtgaccctgcccagcatctgcagccacttcaaccccctgagcctggaggagctgggcagcaacaccggcatccaggtgttcaaccagatcgtgaagagcagaccccacgacaacatcgtgatcagcccccacggcatcgccagcgtgctgggcatgctgcagctgggcgccgacggcagaaccaagaagcagctggccatggtgatgagatacggcgtgaacggcgtgggcaagatcctgaagaagatcaacaaggccatcgtgagcaagaagaacaaggacatcgtgaccgtggccaacgccgtgttcgtgaagaacgccagcgagatcgaggtgcccttcgtgaccagaaacaaggacgtgttccagtgcgaggtgagaaacgtgaacttcgaggaccccgccagcgcctgcgacagcatcaacgcctgggtgaagaacgagaccagagacatgatcgacaacctgctgagccccgacctgatcgacggcgtgctgaccagactggtgctggtgaacgccgtgtacttcaagggcctgtggaagagcagattccagcccgagaacaccaagaagagaaccttcgtggccgccgacggcaagagctaccaggtgcccatgctggcccagctgagcgtgttcagatgcggcagcaccagcgcccccaacgacctgtggtacaacttcatcgagctgccctaccacggcgagagcatcagcatgctgatcgccctgcccaccgagagcagcacccccctgagcgccatcatcccccacatcagcaccaagacctag

SEQ ID NO: 52386 - DNA, 264 bp, Artificial Sequence
  derived and/or modified sequence
atgaactggcacctgcccctgttcctgctggccagcgtgaccctgcccagcatctgcagccacttcaaccccctgagcctggaggagctgggcagcaacaccggcatccaggtgttcaaccagatcgtgaagagcagaccccacgacaacatcgtgatcagcccccacggcatcgccagcgtgctgggcatgctgcagctgggcgccgacggcagaaccaagaagcagctggccatggtgatgagatacggcgtgaacggctag

SEQ ID NO: 52387 - RNA, 129 nt, Artificial Sequence
  derived and/or modified sequence
augaacuggcauuuaccccucuuucuuuuggcuucugucacccugccauccauuugcucacacuuuaauccucugucccucgaagaacucggguccaacaccggaauucagguuuuuaaucagauuuag

SEQ ID NO: 52388 - RNA, 264 nt, Artificial Sequence
  derived and/or modified sequence
augaauuggcaccugccacucuuccuuuuagcgucagugacccucccuucgauuugcucccacuuuaacccgcuuucacuugaggaacuagguucaaacacagguauccaagucuuuaaucagauuguuaagucccgcccucaugauaacauugucauuagcccccacggcauugccuccgugcucgggaugcuucaacugggagcugauggccguacaaagaagcaacuggcaaugguaaugagguacggcgucaacggauag

SEQ ID NO: 52389 - protein, 397 aa, Artificial Sequence
  derived and/or modified sequence
MNWHLPLFLLASVTLPSICSHFNPLSLEELGSNTGIQVFNQIVKSRPHDNIVISPHGIASVLGMLQLGADGRTKKQLAMVMRYGVNGVGKILKKINKAIVSKKNKDIVTVANAVFVKNASEIEVPFVTRNKDVFQCEVRNVNFEDPASACDSINAWVKNETRDMIDNLLSPDLIDGVLTRLVLVNAVYFKGLWKSRFQPENTKKRTFVAADGKSYQVPMLAQLSVFRCGSTSAPNDLWYNFIELPYHGESISMLIALPTESSTPLSAIIPHISTKTIDSWMSIMVPKRVQVILPKFTAVAQTDLKEPLKVLGITDMFDSSKANFAKITRSENLHVSHILQKAKIEVSEDGTKASAATTAILIARSSPPWFIVDRPFLFFIRHNPTGAVLFMGQINKP

SEQ ID NO: 52390 - protein, 276 aa, Artificial Sequence
  derived and/or modified sequence
MNWHLPLFLLASVTLPSICSHFNPLSLEELGSNTGIQVFNQIVKSRPHDNIVISPHGIASVLGMLQLGADGRTKKQLAMVMRYGVNGVGKILKKINKAIVSKKNKDIVTVANAVFVKNASEIEVPFVTRNKDVFQCEVRNVNFEDPASACDSINAWVKNETRDMIDNLLSPDLIDGVLTRLVLVNAVYFKGLWKSRFQPENTKKRTFVAADGKSYQVPMLAQLSVFRCGSTSAPNDLWYNFIELPYHGESISMLIALPTESSTPLSAIIPHISTKT

SEQ ID NO: 52391 - protein, 409 aa, Artificial Sequence
  derived and/or modified sequence
MSDCRSSLVEGTMNWHLPLFLLASVTLPSICSHFNPLSLEELGSNTGIQVFNQIVKSRPHDNIVISPHGIASVLGMLQLGADGRTKKQLAMVMRYGVNGVGKILKKINKAIVSKKNKDIVTVANAVFVKNASEIEVPFVTRNKDVFQCEVRNVNFEDPASACDSINAWVKNETRDMIDNLLSPDLIDGVLTRLVLVNAVYFKGLWKSRFQPENTKKRTFVAADGKSYQVPMLAQLSVFRCGSTSAPNDLWYNFIELPYHGESISMLIALPTESSTPLSAIIPHISTKTIDSWMSIMVPKRVQVILPKFTAVAQTDLKEPLKVLGITDMFDSSKANFAKITRSENLHVSHILQKAKIEVSEDGTKASAATTAILIARSSPPWFIVDRPFLFFIRHNPTGAVLFMGQINKP

SEQ ID NO: 52392 - protein, 87 aa, Artificial Sequence
  derived and/or modified sequence
MNWHLPLFLLASVTLPSICSHFNPLSLEELGSNTGIQVFNQIVKSRPHDNIVISPHGIASVLGMLQLGADGRTKKQLAMVMRYGVNG

SEQ ID NO: 52393 - DNA, 1230 bp, Artificial Sequence
  derived and/or modified sequence
atgtcggattgtcgcagtagcttagtggaggggactatgaattggcaccttccgctgttcctacttgcttccgttacccttcccagcatctgctcccacttcaatccattgtccctcgaggaactgggatccaacacagggattcaggtcttcaaccagatcgtgaagagccgaccccacgataacattgtgatcagtccgcacggaattgcgagcgttctggggatgctgcagctgggggccgacggcaggacaaagaagcaactggcgatggtgatgagatacggagtcaatggcgtgggcaagatcctgaagaaaattaataaggccatcgtaagcaaaaagaataaggacattgttaccgtcgctaacgccgtctttgtgaaaaacgccagtgaaattgaggtcccattcgtcacacggaataaagacgtcttccagtgtgaggttcgcaacgtgaattttgaggatcctgccagtgcatgtgatagtatcaacgcctgggtgaaaaacgagacaagggacatgattgataacttgttgagccccgacctcatagacggggtcctaacccggttggttctcgtgaatgctgtgtactttaagggtctgtggaaatctcggtttcagcccgagaatactaaaaagcgaacgttcgtggccgccgatggtaaaagctatcaagtacccatgctggcacagcttagcgtcttccgctgcggtagcacaagcgccccaaacgacctttggtacaatttcatcgaacttccctaccatggggagtcaatctcaatgctgatagccctcccaactgagtccagcacacccctgtccgctattatcccccacattagcactaagaccatcgactcctggatgtcaattatggtgcccaagcgggtgcaggtgatcctgccaaagtttactgccgtggctcagacggatctaaaagagccgctaaaagtccttggaatcacagatatgtttgactcatctaaagccaatttcgccaaaatcaccaggtccgaaaatcttcacgtttcacatattttacagaaggccaaaattgaggtttcagaagatggcacaaaggcaagtgcggccactaccgccatattaatagccaggtcttcccccccttggtttatcgtcgacaggccctttctgtttttcatcaggcacaatccaacaggggcggtcctttttatggggcagatcaataagccctag

SEQ ID NO: 52394 - DNA, 1230 bp, Artificial Sequence
  derived and/or modified sequence
atgtctgactgccgcagcagcctggtggagggcaccatgaactggcacctgcccctcttcctgctggcctctgtgaccctgcccagcatctgcagccacttcaaccccctgagcctggaggagctgggcagcaacacaggcatccaggtgttcaaccagatcgtgaagagccggccccatgacaacatcgtcatcagcccccacggcatcgcctctgtgctgggcatgctgcagctgggcgcagatggccgcaccaagaagcagctggccatggtgatgagatatggagtgaatggagtgggcaagatcctgaagaagatcaacaaggccatcgtgtccaagaagaacaaggacatcgtgacagtggccaatgctgtgtttgtgaagaatgccagcgagattgaggtgccctttgtgaccaggaacaaggatgtgttccagtgtgaggtgagaaatgtgaactttgaggaccctgccagcgcctgtgacagcatcaatgcctgggtgaagaatgagacccgggacatgattgacaacctgctgagcccagacctgattgatggagtgctgacccggctggtgctggtgaatgctgtgtacttcaagggcctgtggaagagccgcttccagcctgagaacaccaagaagaggacctttgtggccgcagatggcaagagctaccaggtgcccatgctggcccagctgagcgtcttccgctgtggcagcaccagcgccccaaatgacctgtggtacaacttcatcgagctgccctaccatggagagagcatctccatgctgattgccctgcccacagagagcagcacccccctgagcgccatcatcccccacatcagcaccaagaccatcgacagctggatgagcatcatggtgcccaagagggtgcaggtgatcctgcccaagttcaccgctgtggcccagacagacctgaaggagcccctgaaggtgctgggcatcacagacatgtttgacagcagcaaggccaactttgccaagatcaccaggtctgagaacctgcacgtgagccacatcctgcagaaggccaagattgaggtgtctgaagatggcaccaaggccagcgctgccaccacagccatcctgattgcccggagcagccccccctggttcatcgtggaccggcccttcctgttcttcatccgccacaaccccactggagctgtgctcttcatgggccagatcaacaagccctag

SEQ ID NO: 52395 - DNA, 1230 bp, Artificial Sequence
  derived and/or modified sequence
atgagcgactgccggagcagcctggtggagggcaccatgaactggcatctccccttattcctgctggcctcagtcacactgcctagcatttgcagtcacttcaaccctctatcactggaagagcttgggagcaacaccgggattcaggtgttcaatcagatagtcaagagtcgcccccatgataacattgtgattagcccccacggcatcgcaagtgtattaggcatgctccagttgggggccgacggaagaacgaagaagcaacttgcaatggtgatgcgctacggagtcaacggggtaggtaagatcctcaaaaagattaacaaggcaattgtgtcaaagaagaacaaagatatcgtgacagtagcaaacgctgtgtttgtgaagaacgccagcgaaatcgaggtcccctttgttacacggaacaaagatgtatttcagtgtgaggttcggaacgtgaacttcgaggaccccgcaagcgcatgcgactccataaacgcctgggtgaaaaacgagacacgggacatgatcgataatttgctgagcccagacctcattgatggtgtgctcactaggttggtgttagtcaacgcagtctactttaaggggctgtggaaatcccggttccaaccagagaatacgaaaaagcgcactttcgtggcggctgatggcaagtcctatcaagtgcccatgctggctcagctgtcagttttccggtgcggctcaacttctgcgcctaacgatctgtggtacaacttcattgagcttccttaccatggggagtcgatttcgatgctcatagcgttacctactgagagtagcacacctcttagtgcaatcattccgcacatttcaaccaagaccatcgacagctggatgtctataatggtccccaaaagagtgcaagttatactcccaaagtttaccgctgtcgctcagacagacctaaaagagcccctgaaagtactcggcattactgatatgtttgatagtagtaaggccaattttgcaaaaatcactcggtcagagaacttacacgtaagtcacattctgcagaaggctaagattgaagtgagcgaggacgggaccaaggctagcgcagcaaccacagctatactgattgcacgaagcagtccgccatggttcattgtcgatcggccttttctattcttcatcaggcataaccccacaggagccgtcctgttcatgggacagatcaataagccatag

SEQ ID NO: 52396 - DNA, 1230 bp, Artificial Sequence
  derived and/or modified sequence
atgtccgactgccgatccagcttagtggaaggcactatgaactggcacctaccactgttcctcttagcttccgtgacactccccagcatctgctctcacttcaacccgctgtcgttggaggagcttggctcaaacaccggtattcaggtttttaatcagatagttaaatcccgaccacacgataatatcgtgatctccccccacggtatcgccagcgtcttgggaatgctccaattaggcgcagacggcaggaccaaaaagcagctggctatggtgatgagatacggcgtaaacggcgtggggaaaattctaaaaaaaattaacaaggccattgtatccaagaaaaacaaagatattgtaacagtggccaacgccgtgtttgtaaaaaatgcatctgaaattgaggttccattcgtcacgcgcaacaaggacgtgtttcagtgtgaggtccgcaacgtgaatttcgaagaccccgcttctgcatgcgactccatcaacgcttgggttaagaatgaaaccagggacatgatcgataatctccttagcccagaccttatcgacggagtccttacaagattagtccttgtgaacgccgtgtactttaaaggattgtggaaatcacgcttccagcctgagaacaccaagaagcggacattcgtcgccgctgacggcaagtcataccaggtgcctatgttggctcagctgtccgttttcagatgcggcagcacctctgctcccaatgacttgtggtataactttatagagcttccctatcacggtgaaagtatcagcatgctgatagctctacccacagagagctcaacccctttaagtgcgattatcccgcatatctcgacaaaaactatcgattcttggatgtcaatcatggtcccaaaacgtgtgcaggtcattttgcccaaatttactgctgtcgcccagaccgacctcaaagagcctctgaaggtcttgggaatcacggacatgttcgactcgtcgaaggcaaactttgccaaaataactcgttctgagaatcttcatgttagccatattcttcagaaggccaaaatcgaggtgtctgaggacggcacaaaagctagcgctgccaccactgccatactgattgcacgtagttcacctccatggttcatcgtcgacagaccattccttttcttcattaggcataacccaacaggggctgtattgtttatgggccagatcaataagccttag

SEQ ID NO: 52397 - DNA, 1230 bp, Artificial Sequence
  derived and/or modified sequence
atgtccgattgcagaagctctctcgtggagggaacaatgaactggcatctgcctctcttcctgttagcatccgtgaccctgcctagtatatgctcccactttaatcctttatcactcgaggagctcggttccaatactggcattcaggtgttcaaccagatcgttaaatctcggccacatgataatatagtgatcagtccgcacgggatagcctctgttctgggtatgttacaacttggcgctgacggacggactaaaaagcagcttgccatggtgatgagatacggcgtaaatggagtgggaaagattcttaagaagatcaataaggcaattgtgagtaaaaagaataaggacatcgtgacggtcgccaacgctgtgttcgttaagaatgcatcagagattgaggtccctttcgtgactcggaataaagacgttttccagtgtgaggtgcgcaatgtaaatttcgaagacccggcaagtgcttgtgattccattaatgcttgggtgaagaacgagaccagagacatgatcgacaacctactctctcctgatctgatcgatggcgtgctgacacgcctagtcctcgtgaatgcagtatactttaagggcttgtggaagagtcgctttcaacctgagaatacaaagaagcgcacctttgtggctgctgatggcaaatcataccaagtaccaatgttggcgcagctgagcgtgtttagatgtgggtcaacatccgcccctaatgatctgtggtacaattttattgaactgccctaccatggcgagtctatcagcatgctgatcgccctgccgacggagagttctacaccgctgagcgccatcatccctcacatttcgacgaagacaatcgactcctggatgtctatcatggtgccaaaacgcgtgcaggtcatccttcctaaattcactgctgtcgctcagactgatctgaaagaaccactaaaggtgcttgggatcactgatatgttcgattcatcaaaggccaattttgctaaaatcacccgcagcgaaaacctgcacgtctcccatattcttcagaaagcgaaaattgaggtcagcgaggacggaaccaaagcatccgctgccaccaccgcaattctcatagcccgttcgagtccaccatggtttatcgtggatcgtccgtttctgttttttatccgccacaaccccacgggcgctgtgttattcatgggacagattaacaagccgtag

SEQ ID NO: 52398 - DNA, 1230 bp, Artificial Sequence
  derived and/or modified sequence
atgtccgattgcagaagctctctcgtggagggaacaatgaactggcatctgcctctcttcctgttagcatccgtgaccctgcctagtatatgctcccactttaatcctttatcactcgaggagctcggttccaatactggcattcaggtgttcaaccagatcgttaaatctcggccacatgataatatagtgatcagtccgcacgggatagcctctgttctgggtatgttacaacttggcgctgacggacggactaaaaagcagcttgccatggtgatgagatacggcgtaaatggagtgggaaagattttaaagaaaatcaacaaggcaattgtatccaaaaaaaataaagatattgtaactgtagcaaacgctgtttttgtaaagaatgcatctgagatcgaggtaccctttgtgacaaggaataaggatgtttttcagtgcgaagtacgcaacgtaaatttcgaggaccctgcctccgcgtgtgactccatcaacgcctgggtaaagaacgagacaagggacatgattgacaatctgttaagtccagatcttatcgacggagtattaacacggctggtgctagtaaacgcagtttacttcaagggcttgtggaaatcaagattccagcctgaaaacaccaagaaacgtactttcgtagcagctgacggtaaaagctaccaggttcccatgctggcccaactgtctgtgtttcgttgtgggagcacttccgcacctaacgatctgtggtacaatttcatcgagctgccctatcacggcgagtccatttctatgctgatcgcccttcctactgaatcatcaacccctctctcagctatcatcccgcacatttctactaagacaatcgatagctggatgtcaattatggtccctaagagagtgcaggtcatcctccccaagttcacagccgtagctcagacagacctgaaagagcccctcaaagttcttggcattacagatatgttcgattcaagtaaagcaaacttcgccaagataactagatctgaaaatttacacgtctctcatattctccagaaggccaagatagaggtatccgaggatggtacaaaggcttcggctgccactaccgctatcctgatcgcccggtcctccccaccatggtttattgtcgatcgccccttcttgtttttcattagacacaatcctacaggcgctgtcttatttatgggccagattaacaaaccttag

SEQ ID NO: 52399 - DNA, 2161 bp, Artificial Sequence
  derived and/or modified sequence
ttgcgctgtggggctgcccgggctgcgcggcgtctgcaggcgccaccgctgcctctttccggctgtgaccctcctcgccgccgccgcttggctgcgtcctccgactccccgcgccgccgagaccaggctcccgctccggttgcggccgcaccgccctccgcggccgccccctggggatccagcgagcgcggtcgtccttggtggaaggaaccatgaactggcatctccccctcttcctcttggcctctgtgacgctgccttccatctgctcccacttcaatcctctgtctctcgaggaactaggctccaacacggggatccaggttttcaatcagattgtgaagtcgaggcctcatgacaacatcgtgatctctccccatgggattgcgtcggtcctggggatgcttcagctgggggcggacggcaggaccaagaagcagctcgccatggtgatgagatacggcgtaaatggagttggtaaaatattaaagaagatcaacaaggccatcgtctccaagaagaataaagacattgtgacagtggctaacgccgtgtttgttaagaatgcctctgaaattgaagtgccttttgttacaaggaacaaagatgtgttccagtgtgaggtccggaatgtgaactttgaggatccagcctctgcctgtgattccatcaatgcatgggttaaaaatgaaaccagggatatgattgacaatctgctgtccccagatcttattgatggtgtgctcaccagactggtcctcgtcaacgcagtgtatttcaagggtctgtggaaatcacggttccaacccgagaacacaaagaaacgcactttcgtggcagccgacgggaaatcctatcaagtgccaatgctggcccagctctccgtgttccggtgtgggtcgacaagtgcccccaatgatttatggtacaacttcattgaactgccctaccacggggaaagcatcagcatgctgattgcactgccgactgagagctccactccgctgtctgccatcatcccacacatcagcaccaagaccatagacagctggatgagcatcatggtgcccaagagggtgcaggtgatcctgcccaagttcacagctgtagcacaaacagatttgaaggagccgctgaaagttcttggcattactgacatgtttgattcatcaaaggcaaattttgcaaaaataacaaggtcagaaaacctccatgtttctcatatcttgcaaaaagcaaaaattgaagtcagtgaagatggaaccaaagcttcagcagcaacaactgcaattctcattgcaagatcatcgcctccctggtttatagtagacagaccttttctgtttttcatccgacataatcctacaggtgctgtgttattcatggggcagataaacaaaccctgaagagtatacaaaagaaaccatgcaaagcaacgactactttgctacgaagaaagactcctttcctgcatctttcatagttctgttaaatatttttgtacatcgcttctttttcaaaactagttcttaggaacagactcgatgcaagtgtttctgttctgggaggtattggagggaaaaaacaagcaggatggctggaacactgtactgaggaatgaatagaaaggcttccagatgtctaaaagattctttaaactactgaactgttacctaggttaacaaccctgttgagtatttgctgtttgtccagttcaggaatttttgttttgttttgtctatatgtgcggcttttcagaagaaatttaatcagtgtgacagaaaaaaaaatgttttatggtagcttttactttttatgaaaaaaaaattatttgccttttaaattcttttcccccatccccctccaaagtcttgatagcaagcgttattttggtggtagaaacggtgaaatctctagcctctttgtgtttttgttgttgttgttgttgttgttttatataatgcatgtattcactaaaataaaatttaaaaaactcctgtcttgctagacaaggttgctgttgtgcagtgtgcctgtcactactggtctgtactccttggatttgcatttttgtattttgtacaaagtaaaaataaactgttatgagtagtaaaaataaagctatttctctgctatttgaaaatacaatagaagaaactga

SEQ ID NO: 52400 - DNA, 2569 bp, Artificial Sequence
  derived and/or modified sequence
aatccttggttaggaggaaagggagtggagaggaccgtgctgcctggcgttccccagctgcctttctttctgttttccccccaacggaatctctatgtggtctcctagagcctcgtgcctgcctctcagctagatgctgatatcattcccactcatgtagttgggaaggaagggtgtggcagagataaagggtccacggtcacgcagtatgtggggggtcacacagcctgtatgccaaagtggcacaccctgtgaatatgtagggtcgcacagcctttatgtgtcagtgccagagcctggacccgggtctgtagatgtgtgaaccgtgagctgataccatggatattcaaagatttacatcccatcaatgtttataccttcttgagaagaaatttgtgtcaaagcacactcctcctttcaagactacctcctcgccgtgctgcgtgatagccctagtatcacaaccaaaacacatgatacagaaagaggccagtatctgtgtggcttcaggctcttgtgcgttggccatgaagcaaaggaaggctgttgcatgaaataacctccttctgactccacccttgcatttgtgagatgtaaacagcagtgttaccaagaggtcttccagggaacacgttgcaggtcgtccttggtggaaggaaccatgaactggcatctccccctcttcctcttggcctctgtgacgctgccttccatctgctcccacttcaatcctctgtctctcgaggaactaggctccaacacggggatccaggttttcaatcagattgtgaagtcgaggcctcatgacaacatcgtgatctctccccatgggattgcgtcggtcctggggatgcttcagctgggggcggacggcaggaccaagaagcagctcgccatggtgatgagatacggcgtaaatggagttggtaaaatattaaagaagatcaacaaggccatcgtctccaagaagaataaagacattgtgacagtggctaacgccgtgtttgttaagaatgcctctgaaattgaagtgccttttgttacaaggaacaaagatgtgttccagtgtgaggtccggaatgtgaactttgaggatccagcctctgcctgtgattccatcaatgcatgggttaaaaatgaaaccagggatatgattgacaatctgctgtccccagatcttattgatggtgtgctcaccagactggtcctcgtcaacgcagtgtatttcaagggtctgtggaaatcacggttccaacccgagaacacaaagaaacgcactttcgtggcagccgacgggaaatcctatcaagtgccaatgctggcccagctctccgtgttccggtgtgggtcgacaagtgcccccaatgatttatggtacaacttcattgaactgccctaccacggggaaagcatcagcatgctgattgcactgccgactgagagctccactccgctgtctgccatcatcccacacatcagcaccaagaccatagacagctggatgagcatcatggtgcccaagagggtgcaggtgatcctgcccaagttcacagctgtagcacaaacagatttgaaggagccgctgaaagttcttggcattactgacatgtttgattcatcaaaggcaaattttgcaaaaataacaaggtcagaaaacctccatgtttctcatatcttgcaaaaagcaaaaattgaagtcagtgaagatggaaccaaagcttcagcagcaacaactgcaattctcattgcaagatcatcgcctccctggtttatagtagacagaccttttctgtttttcatccgacataatcctacaggtgctgtgttattcatggggcagataaacaaaccctgaagagtatacaaaagaaaccatgcaaagcaacgactactttgctacgaagaaagactcctttcctgcatctttcatagttctgttaaatatttttgtacatcgcttctttttcaaaactagttcttaggaacagactcgatgcaagtgtttctgttctgggaggtattggagggaaaaaacaagcaggatggctggaacactgtactgaggaatgaatagaaaggcttccagatgtctaaaagattctttaaactactgaactgttacctaggttaacaaccctgttgagtatttgctgtttgtccagttcaggaatttttgttttgttttgtctatatgtgcggcttttcagaagaaatttaatcagtgtgacagaaaaaaaaatgttttatggtagcttttactttttatgaaaaaaaaattatttgccttttaaattcttttcccccatccccctccaaagtcttgatagcaagcgttattttggtggtagaaacggtgaaatctctagcctctttgtgtttttgttgttgttgttgttgttgttttatataatgcatgtattcactaaaataaaatttaaaaaactcctgtcttgctagacaaggttgctgttgtgcagtgtgcctgtcactactggtctgtactccttggatttgcatttttgtattttgtacaaagtaaaaataaactgttatgagtagtaaaaataaa

SEQ ID NO: 52401 - DNA, 581 bp, Artificial Sequence
  derived and/or modified sequence
atcacagaacaagtgtgccatgacttttcaaacatgcctaattgaactctgtttgcgatttaacttctttttcaaaggtttatagttacctttatttcaaaatttgtcattttaaaatatgtgtttcctccttttcctccactgtatagtaattaagagtgtggaggatttggaggccagcgggctttggtttgaatctagaggctacatattggagggtatgagccaaagccaaatttctaaacatctccaagcccatccgtgagttgggcctaaaggtgtttaggcttaagggccacccctgaagtgttgtgaggatgaagcgaagagtatatcttaggcgctaagcacagtggcaggaatggagctgactttcgggacacgaggtggctgtggttgtggcattgggtaatatttgtcacagaagtacaggtcgtccttggtggaaggaaccatgaactggcatctccccctcttcctcttggcctctgtgacgctgccttccatctgctcccacttcaatcctctgtctctcgaggaactaggctccaacacggggatccaggttttcaatcagattg

SEQ ID NO: 52402 - DNA, 988 bp, Artificial Sequence
  derived and/or modified sequence
agcccaggttcatctacatcctgttgagaagtttggcagctggaggtggacatgcacacactacactgaacctcctgcaacaagcactgcggaagggaccatttggatgttgctgccatacttttcagcggctgaaaaggtcgtccttggtggaaggaaccatgaactggcatctccccctcttcctcttggcctctgtgacgctgccttccatctgctcccacttcaatcctctgtctctcgaggaactaggctccaacacggggatccaggttttcaatcagattgtgaagtcgaggcctcatgacaacatcgtgatctctccccatgggattgcgtcggtcctggggatgcttcagctgggggcggacggcaggaccaagaagcagctcgccatggtgatgagatacggcgtaaatggagttggtaaaatattaaagaagatcaacaaggccatcgtctccaagaagaataaagacattgtgacagtggctaacgccgtgtttgttaagaatgcctctgaaattgaagtgccttttgttacaaggaacaaagatgtgttccagtgtgaggtccggaatgtgaactttgaggatccagcctctgcctgtgattccatcaatgcatgggttaaaaatgaaaccagggatatgattgacaatctgctgtccccagatcttattgatggtgtgctcaccagactggtcctcgtcaacgcagtgtatttcaagggtctgtggaaatcacggttccaacccgagaacacaaagaaacgcactttcgtggcagccgacgggaaatcctatcaagtgccaatgctggcccagctctccgtgttccggtgtgggtcgacaagtgcccccaatgatttatggtacaacttcattgaactgccctaccacggggaaagcatcagcatgctgattgcactgccgactgagagctccactccgctgtctgccatcatcccacacatcagcaccaagac

SEQ ID NO: 52403 - DNA, 1716 bp, Artificial Sequence
  derived and/or modified sequence
agtgatacccgcagctgggagcaccggggccggcgtggctcctgcccggccatccgagccggccctgaccctgaacctgaggtttccagctgctcgccggcaacccctaccccggacttaggctgcgcgccgccggatggggagagactggcgcactcttacttgttacctctgcctgggcagagggaggtgacgcgcggtgtggggaaagcctttaacttggcctctggcagccgatttaacccgagcgagcaggtctttgctattttcatcatctgtagaaacgggagttgcgaggcggatgagtgactgcaggtcgtccttggtggaaggaaccatgaactggcatctccccctcttcctcttggcctctgtgacgctgccttccatctgctcccacttcaatcctctgtctctcgaggaactaggctccaacacggggatccaggttttcaatcagattgtgaagtcgaggcctcatgacaacatcgtgatctctccccatgggattgcgtcggtcctggggatgcttcagctgggggcggacggcaggaccaagaagcagctcgccatggtgatgagatacggcgtaaatggagttggtaaaatattaaagaagatcaacaaggccatcgtctccaagaagaataaagacattgtgacagtggctaacgccgtgtttgttaagaatgcctctgaaattgaagtgccttttgttacaaggaacaaagatgtgttccagtgtgaggtccggaatgtgaactttgaggatccagcctctgcctgtgattccatcaatgcatgggttaaaaatgaaaccagggatatgattgacaatctgctgtccccagatcttattgatggtgtgctcaccagactggtcctcgtcaacgcagtgtatttcaagggtctgtggaaatcacggttccaacccgagaacacaaagaaacgcactttcgtggcagccgacgggaaatcctatcaagtgccaatgctggcccagctctccgtgttccggtgtgggtcgacaagtgcccccaatgatttatggtacaacttcattgaactgccctaccacggggaaagcatcagcatgctgattgcactgccgactgagagctccactccgctgtctgccatcatcccacacatcagcaccaagaccatagacagctggatgagcatcatggtgcccaagagggtgcaggtgatcctgcccaagttcacagctgtagcacaaacagatttgaaggagccgctgaaagttcttggcattactgacatgtttgattcatcaaaggcaaattttgcaaaaataacaaggtcagaaaacctccatgtttctcatatcttgcaaaaagcaaaaattgaagtcagtgaagatggaaccaaagcttcagcagcaacaactgcaattctcattgcaagatcatcgcctccctggtttatagtagacagaccttttctgtttttcatccgacataatcctacaggtgctgtgttattcatggggcagataaacaaaccctgaagagtatacaaaagaaaccatgcaaagcaacgactactttgctacgaagaaagactcctttcctgcatctttcatagttctgttaaatatttttgtacatcgcttctttttcaaaactagttcttaggaacagactcgatgcaagtgtttctgttctgggaggtattggagggaaaaaacaagca

SEQ ID NO: 52404 - DNA, 546 bp, Artificial Sequence
  derived and/or modified sequence
gataaagcccccgccgccgcggcagccagcttgcgctgtggggctgcccgggctgcgcggcgtctgcaggcgccaccgctgcctctttccggctgtgaccctcctcgccgccgccgcttggctgcgtcctccgactccccgcgccgccgagaccaggctcccgctccggttgcggccgcaccgccctccgcggccgccccctggggatccagcgagcgcgggaccatttggatgttgctgccatacttttcagcggctgaaaaggtcgtccttggtggaaggaaccatgaactggcatctccccctcttcctcttggcctctgtgacgctgccttccatctgctcccacttcaatcctctgtctctcgaggaactaggctccaacacggggatccaggttttcaatcagattgtgaagtcgaggcctcatgacaacatcgtgatctctccccatgggattgcgtcggtcctggggatgcttcagctgggggcggacggcaggaccaagaagcagctcgccatggtgatgagatacggcgtaaatgg

SEQ ID NO: 52405 - DNA, 1230 bp, Artificial Sequence
  derived and/or modified sequence
atgagcgactgcagaagcagcctggtggagggcaccatgaactggcacctgcccctgttcctgctggccagcgtgaccctgcccagcatctgcagccacttcaaccccctgagcctggaggagctgggcagcaacaccggcatccaggtgttcaaccagatcgtgaagagcagaccccacgacaacatcgtgatcagcccccacggcatcgccagcgtgctgggcatgctgcagctgggcgccgacggcagaaccaagaagcagctggccatggtgatgagatacggcgtgaacggcgtgggcaagatcctgaagaagatcaacaaggccatcgtgagcaagaagaacaaggacatcgtgaccgtggccaacgccgtgttcgtgaagaacgccagcgagatcgaggtgcccttcgtgaccagaaacaaggacgtgttccagtgcgaggtgagaaacgtgaacttcgaggaccccgccagcgcctgcgacagcatcaacgcctgggtgaagaacgagaccagagacatgatcgacaacctgctgagccccgacctgatcgacggcgtgctgaccagactggtgctggtgaacgccgtgtacttcaagggcctgtggaagagcagattccagcccgagaacaccaagaagagaaccttcgtggccgccgacggcaagagctaccaggtgcccatgctggcccagctgagcgtgttcagatgcggcagcaccagcgcccccaacgacctgtggtacaacttcatcgagctgccctaccacggcgagagcatcagcatgctgatcgccctgcccaccgagagcagcacccccctgagcgccatcatcccccacatcagcaccaagaccatcgacagctggatgagcatcatggtgcccaagagagtgcaggtgatcctgcccaagttcaccgccgtggcccagaccgacctgaaggagcccctgaaggtgctgggcatcaccgacatgttcgacagcagcaaggccaacttcgccaagatcaccagaagcgagaacctgcacgtgagccacatcctgcagaaggccaagatcgaggtgagcgaggacggcaccaaggccagcgccgccaccaccgccatcctgatcgccagaagcagccccccctggttcatcgtggacagacccttcctgttcttcatcagacacaaccccaccggcgccgtgctgttcatgggccagatcaacaagccctag

SEQ ID NO: 52406 - protein, 109 aa, Artificial Sequence
  derived and/or modified sequence
MSQYAPSPDFKRALDSSPEANTEDDKTEEDVPMPKNYLWLTIVSCFCPAYPINIVALVFSIMSLNSYNDGDYEGARRLGRNAKWVAIASIIIGLLIIGISCAVHFTRNA

SEQ ID NO: 52407 - DNA, 330 bp, Artificial Sequence
  derived and/or modified sequence
atgagccagtacgcccccagccccgacttcaagagagccctggacagcagccccgaggccaacaccgaggacgacaagaccgaggaggacgtgcccatgcccaagaactacctgtggctgaccatcgtgagctgcttctgccccgcctaccccatcaacatcgtggccctggtgttcagcatcatgagcctgaacagctacaacgacggcgactacgagggcgccagaagactgggcagaaacgccaagtgggtggccatcgccagcatcatcatcggcctgctgatcatcggcatcagctgcgccgtgcacttcaccagaaacgcctag

SEQ ID NO: 52408 - DNA, 330 bp, Artificial Sequence
  derived and/or modified sequence
atgtcccagtacgccccctcaccggactttaaaagggctcttgatagtagtccagaggccaacaccgaggacgacaagaccgaagaggatgtccccatgcctaaaaattatctgtggctgaccattgtgagctgtttttgccctgcctatccgatcaacatcgtggccttagtgttctccattatgagcctcaattcctataacgacggtgactatgaaggggcacgcaggctgggacgcaacgcaaagtgggtggcaatcgcctcaattatcatcggattgctaatcatcggtatatcctgcgcagtacacttcacccgcaatgcatag

SEQ ID NO: 52409 - DNA, 330 bp, Artificial Sequence
  derived and/or modified sequence
atgagccagtatgcccccagcccagacttcaagagggccctggacagcagccctgaggccaacacagaagatgacaagacagaagaagatgtgcccatgcccaagaactacctgtggctgaccatcgtgtcctgcttctgcccagcctaccccatcaacatcgtggccctggtgttcagcatcatgagcctgaacagctacaatgatggagactatgagggcgcccggcggctgggcagaaatgccaagtgggtggccatcgccagcatcatcatcggcctgctgatcatcggcatcagctgtgctgtgcacttcaccagaaatgcctag

SEQ ID NO: 52410 - DNA, 330 bp, Artificial Sequence
  derived and/or modified sequence
atgagccagtacgcccccagccccgacttcaagcgggccctggacagtagccccgaagctaataccgaagatgacaagacagaggaagatgtccctatgccgaaaaattacctgtggctgacaatagtgtcctgcttctgccctgcctaccccattaatatcgtggcattggttttttcaattatgtcacttaactcctataacgatggcgattatgagggcgctcggcggctaggccgtaacgccaagtgggtcgccattgccagcattatcatcgggctgctgattatcggcatatcttgcgccgtgcatttcactagaaatgcttag

SEQ ID NO: 52411 - DNA, 330 bp, Artificial Sequence
  derived and/or modified sequence
atgtcccaatacgcaccatctcctgattttaagcgcgctctggacagcagccctgaggccaacactgaggacgataaaactgaggaagacgtcccaatgcctaagaactacttgtggcttactatcgtgtcctgcttttgtcccgcttaccctatcaacattgtcgcccttgttttctctattatgtccctaaactcctataacgacggggactatgagggcgcaaggcggctggggaggaatgctaaatgggtcgcgatcgcatcaatcatcatcggactcctgatcatcggaataagctgtgccgtgcattttacaagaaatgcctag

SEQ ID NO: 52412 - DNA, 1573 bp, Artificial Sequence
  derived and/or modified sequence
aatttggaacttaatgggcctttgcgtcctccttccctgagcctccttttattccagacttctcagtgtgagtctgtgcgtccctccgacgatctcagggagtggggtgccttcatctgcctgttccctgttcctcaggctgacgctcccgctgtcctccccgcctcccctcactccttttctccctcccttcctccttgtggggaggctcttggccagggtccctgagcccgggcgggtgctggcagaggacgcagaaggggtgaggtcacgtctcccttgagccccgagccgctggcttttcagagcctcgccacaagccggcggccagagccccagaccacacagaccgtgcgctcctccgccctcccggcgccgccggcctcgcccatgtctcagtacgcccctagcccggacttcaagagggctttggacagcagtcccgaggccaacactgaagatgacaagaccgaggaggacgtgcccatgcccaagaactacctgtggctcaccatcgtctcgtgtttttgccctgcgtaccccatcaacatcgtggctttggtcttttccatcatgtctctgaacagctacaacgatggagactacgaaggagccaggcggcttgggcggaatgctaagtgggtagccatcgcctccatcatcattggccttctcatcatcggcatttcttgtgcagttcacttcacaaggaatgcctgaggaaccagcggtcagtgggctgtgagcgtggaggatggacctcatccacacacaccccaaaggagtttctaaggaatggatccttgacttcagactgtgagatcttttcctccaggactctccagaggcaggtccctggcaaatgaacaagaaaaaaaaaaaaaaaaagtccaaaatttaggcaatccaagctgcacagccggatcagccaaagtcattgatttgtaaaaatgaaaagaaaacagaaaaaagaaaaatgaagtctcactgtctcagtttagcgaatcccgttgtgtccactcctgtcctccagaggcgagcctcaggaaatcacataacttttcactgaggggatccagggggtctccatatagggggagatggaggtttctaggaagagcagcaggtgctggtatttacaatgttgagcacaaacatttgcagcatgtttaaaattgtctagtagagttcaagttgtggatttgcttttccttttattcttataaccttcagtaactcctcctctgggagtcagcactcccatgcccagagttcacccatctggtcatcaaacactcaaagaaggggcttttctggccttttgtcttgatgcttatatttccaaataggccccctcccttgcttgcatccacgttggtcaacttgaccaaaacctcactcttcactcaaacaggctctgagaatggacttagtggccaattctaggtacatgagcacttcctgtatcccagttttgggaataaactggctgtatttatagaatgtgctttttttttttcaatttctcactctctctcctatctctagcaagtctcaggcaagatctttgatt

SEQ ID NO: 52413 - DNA, 1851 bp, Artificial Sequence
  derived and/or modified sequence
atgtgcctggagaagagatacctggacgtgctgagcgacgtgaccggcccccaggtgagctgctacatcaccgcccccagctacgtgctgcagcagctggagtgcagaatcatcaaccacatgagcagcctgatcgtgggcgacaacgaggagctggtgagcaacgtgatcaccatcgagtgcagcgacaaggagaagagagtgcccttccccatcggcatcgccatccccttcaccgccagatacagaggcaactacagagacatcatggtgaaggtgtgcgacatcaacctgcagagcagctacctgaaccccaacagcctggagggcatgaagggcggctacaagggcacctgcgccagcgtgaaggtgtacaagctgggcatcttcagcgtggtgagctgcctgaagaaggagagcttcaccgtgaccaagaagggcctggccctgaagagcagcatggacagcagaatcagcctgaactacccccccggcgtgttcaccagccccgtgctggtgcagctgaagatccagcccgtggaccccgccctggtggcccacctgaaggcccagcaggacaccttctacagcgtgcagagcaccagccccctgatccacatccagcaccccagcacctaccccttccagaagcccgtgaccctgttcctgccctgcagcccctacctggacaagaacaacctgggcagcgagatcgaccacaagagaagagccagcgccaccatcaacagaatcacccccagctacttcaacagaaccaagatcgccagcatcagaaagcccagaaagaacgccagcgagtgcctgaagctgctgggcttcagaagccaggacagcggctggtgcggcctggacgacgtggtgaagaccatccagagcggcctggtgagcgtggagctgtacgagcacctggagagattcatcgtgctgcacctgagcagcaccatggacaacagccacctggtgaccttcgtgaagagcctggaggaggccatgctgagcaccaccgcctgcatcgtgctgagccaccagaaggacaacccccacagaatcgccgtgctggtggtgcccagcaaggacctgagccaggtgctgaaggacctgcacctggagggcttcggcggcccccccgagcccagcagacacttccaggtgagagagggcgagcagctgctgctgagattcaccggcaacatcttcgccagcagcaacggcaaggactacggcaaggactacaccctgatcttccacctgcagagaaagcccagactggagctgcagatcaaggaggtggacgagttcggcaactacagctgcccccactacaagggcaccatcgtggtgtacaaggtgcccaagggcaagatcgtgcccaacctgaaccagagcctggtgatcaacgagaaccacagccagctgcccatctgcaagctgcccctgaagctgcccaagcacaagaagctgatcaacagaccccagagcaccaagagagtgagcaaggaccccgtggaggccctgtgggacaacctgctgcactggctggccgaggagctgagcgaggagaacgccgagagcctgagcagcaccctgcccctgagaagaagcaccatccagctgatcaagctgaagaaccccgacgacctgaccgagcagatccacgagttcctgtgcttctggaagaagagcctgcccaccttcaccgacaagctgagactgctggccagacacctgagaaagatcggcagaagcgacctggccgaggagctgaagttcaagtgggagaacaaggtgttcaccgagccccagcagtgcttcgacgtggcccccgagtag

SEQ ID NO: 52414 - DNA, 3203 bp, Artificial Sequence
  derived and/or modified sequence
atgttgtgagaaagtgctgggctagctgactcggatcatctcctagagtttaggagaaataacaatcacaaagtttgaatttgcaaaacctttaggctttgctggcaggagagaaaataccacttttggatcataaaatggatatggaatacatgggctcaggtaaactgggccaaatattgaagcagatttggagacaaaaccagatgctaaagcaggcactcttgggtgatgacctttgtgagggggctggtggggccacttggatggccactgtggtctttctgggtcaggaactcagcagtgcccttcaccagctgctggagcacacctcaggcaccctgcgttccacctgccagcagctgcatgtgctgcttgacaaagagaatcaatgtgtctcgagaaaaggtatcttgatgtgctgagtgatgttactggcccccaagtgtcttgttatattacagcaccatcatatgttctacaacaactagaatgccggataataaatcacatgagttctttaatagtgggtgataatgaagagttagttagcaacgtcataactattgaatgctcagataaggaaaagagagttccatttccaataggcattgcaattccatttactgcacgttacagaggaaattacagagatatcatggtgaaagtgtgtgacataaaccttcaatcaagttacctaaacccaaattcactagaaggaatgaagggaggttataaggggacctgtgcttcagtaaaagtttacaaattgggtatcttttctgttgtgtcttgtttaaagaaagagtcgttcacagtaacaaagaaaggcctcgctcttaagtcaagcatggattcccgaatatccttaaattaccctccaggagtttttacctctccagtgctggtgcagttaaagatccaaccagttgacccagctctggtggcacatttaaaagcacagcaagatactttctactcagtccaatccacaagccctctgattcacattcagcacccatcaacttatccttttcagaagccagtcactttgtttttaccttgttctccataccttgataaaaacaaccttggttctgagatagatcataaaagaagagcaagtgccacaataaataggattacaccttcgtatttcaaccggacaaaaattgcctccataagaaaacctaggaaaaatgccagtgaatgtttgaaattactgggattcagaagccaagacagtggttggtgtgggcttgatgatgttgtgaaaaccatacagagcggcttggtatcagttgaattgtatgaacatttggagaggtttattgtacttcacctctcttccaccatggacaatagtcatttggttacttttgtgaaatctttagaggaagccatgctcagcaccactgcctgcatagtactgtctcaccagaaggacaatccacatagaatagctgttttagtggtgccttccaaagatttaagccaggtgcttaaggacctgcacttggaagggtttggaggacctccagagccatctcgtcatttccaagttcgagaaggagaacaacttcttttaagatttactggaaacatatttgcttcaagcaacgggaaggattatggaaaagactacacacttatttttcacttgcaaagaaaacctaggctggaactccaaatcaaagaagtggacgaatttggaaactatagttgccctcattacaaaggcaccattgtcgtttataaagtacctaaaggaaagatagtccccaacttgaatcaatctctcgtaattaatgaaaaccattctcagttgccaatttgcaaattaccattgaaattgccaaagcataagaaattaatcaaccgtccacagagtaccaaaagagtttctaaggatcctgtagaagccctttgggataacttgctccattggctggctgaggagctctcagaagaaaatgctgagtctctttcctcaactctccctctgcgccgtagcaccattcagctcatcaaactcaagaaccctgatgatctcacagaacagatccacgagtttctttgcttctggaaaaaatcgcttccaactttcaccgacaaacttcgcctcctggctcgacatctccgcaagattggcaggagtgatcttgcagaagagctcaaattcaagtgggaaaataaagtgttcactgaaccacagcagtgttttgatgtagcccctgagtaaaagcctgatctctcttcctttacccctaggaaaaggcacacggtgggtttttgtttctgtcaacattttcctggaagtttccgaatgatattatttgaagtcagtctatttaatgatgtgctatttaatgatgtgagacaaagggagaagcacggatcagataatagaaagcattcctgggtgtgagcgctcctctctggttgagtgattatgttttgcaaccatgactgtcttgagtttggcctcacttaatagcatttgcaattgagtttgacttgttcacattttaaaagctaagtgtgaagaaaagatctgatatatgtaattacttattaattggtatctacataaaattaaactagttttctgtgacttcaagtgtgagcccaaaaatatctgagacagttctcaatcaatttagaaagattattttgccaaggttaaggacaggcccgtaacagcctcagaagatcctgatgacatatgcccaaggtgttcggggtagagcttgcttttatgcattttagggagttataatatatcaatcaatacatgtaaggtgtacattggctcaatctggaaaggtaggacaactcaaagcaggggcttccagatcacaggtagatttaaagattcttgattggcattgattgaacagttattatctaaagacctggaatcaataggaaggaaatgcctgggctatgataagaagttatggagaccaaagttttataatgcagatgaagcctccaggtagcagactttagagggaatagattgtaaatatttctgatcagtcctaaggtctgttgaaatttatgctggccagcttttcctgaattccaaaagagaggagggtattatggagtcatgtccaacctccccttcccagcatggcctaaactagtttttcaggataactttgaaatgcccttggctgagagaaggggcttgttca

SEQ ID NO: 52415 - DNA, 1851 bp, Artificial Sequence
  derived and/or modified sequence
atgtgtttagaaaagaggtatctggacgttctcagcgatgttacggggccacaggtttcatgctatatcactgctccatcgtatgtgctgcagcagctagagtgccgtataatcaaccacatgtcttccctcatcgtcggcgataatgaggaacttgtgtctaacgtcattaccattgaatgtagtgataaagagaagagagttcctttcccgattggaatagcaatccccttcactgctaggtatcgtggaaactacagagacatcatggtgaaagtctgtgacatcaaccttcagtcgagctatctcaaccccaatagcttggagggaatgaagggggggtataagggcacatgtgcctccgtaaaggtgtacaaactcggcatttttagtgttgtgtcctgcctcaagaaagaatctttcactgtgactaagaaagggctggccttgaagtcaagcatggattccaggatttcactgaactaccccccaggggtcttcacaagcccggtcctggtccaactcaagatccagcctgttgacccagcactggtggcccacctgaaggctcagcaggacacgttctatagcgtgcaaagtacctctccattaattcacatacagcacccatccacgtacccttttcaaaagcctgtcaccctgtttctcccttgttcgccataccttgataagaataatctgggaagcgaaatagaccacaaaaggcgggcctcagccacaattaatcgaatcacacctagttacttcaaccgaaccaaaattgcgtctattaggaagcccaggaagaatgctagcgagtgtctgaagttactgggatttcgcagtcaggattccggctggtgcggcttggatgacgtcgtgaagaccattcagagcggtttggttagtgttgagctgtacgagcacctggaacgattcatcgtcttgcatctgagttcaactatggataattcgcatttggtcacattcgtcaagtctctggaagaagctatgcttagcaccacagcttgcatcgttctgagccaccagaaggacaatccacaccgcatagcggtcttagtagtgccctcgaaggatctgtctcaggtgctgaaagatttgcacctggagggtttcggcggcccccctgagccatctcggcactttcaggtacgggagggagaacagctgctactgagatttaccgggaatattttcgcatcctcgaatggtaaggactatggcaaagattatactcttattttccacctccagaggaaacccaggctggaactccagattaaggaggtagacgaatttggaaactactcctgcccccattataaagggaccatagtggtatataaagtgcccaagggcaaaatcgtgcccaacctcaatcaaagcctcgttattaatgagaatcactcccaacttccgatttgcaaattaccgctaaagcttccaaaacacaagaagctgattaatcgccctcagtcaaccaagagggtgtccaaagatccagttgaggctctgtgggacaatcttctccactggctcgccgaagagctgtcagaggagaacgccgagtctttgtcctccactcttccccttcgaaggagtaccattcagttgataaagctgaaaaatccagacgaccttactgagcaaatccacgagttcctgtgcttctggaaaaagagccttccgacttttaccgataaactgcgactgctggcccgccatctgcgaaagatcggacgcagcgacctcgccgaggagctgaagtttaagtgggagaacaaggtctttactgagccccagcagtgtttcgacgtcgcccccgagtag

SEQ ID NO: 52416 - DNA, 1851 bp, Artificial Sequence
  derived and/or modified sequence
atgtgcctggagaagcgctacctggatgtgctgagtgatgtgacaggcccccaggtgtcctgctacatcacagcccccagctatgtgctgcagcagctggagtgccgcatcatcaaccacatgagcagcctgattgtgggggacaatgaggagctggtgtccaatgtcatcaccatcgagtgcagcgacaaggagaagagggtgcccttccccatcggcatcgccatccccttcaccgcccgctaccggggcaactacagagacatcatggtgaaggtgtgtgacatcaacctgcagagcagctacctgaaccccaacagcctggagggcatgaagggcggctacaagggcacctgtgcctctgtgaaggtgtacaagctgggcatcttctctgtggtgtcctgcctgaagaaggagagcttcaccgtgaccaagaagggcctggccctgaagagctccatggacagccgcatcagcctgaactacccacctggggtcttcaccagccctgtgctggtgcagctgaagatccagcctgtggaccctgccctggtggcccacctgaaggcccagcaggacaccttctacagcgtgcagagcaccagccccctcatccacatccagcaccccagcacctaccccttccagaagcctgtgaccctcttcctgccctgcagcccctacctggacaagaacaacctgggcagcgagattgaccacaagaggcgggccagcgccaccatcaaccgcatcacccccagctacttcaacagaaccaagatcgccagcatcaggaagcccaggaagaatgcctctgaatgtctgaagctgctgggcttccgcagccaggacagcggctggtgtggcctggatgatgtggtgaagaccatccagagcggcctggtgtctgtggagctgtatgagcacctggagcgcttcatcgtgctgcacctgagcagcaccatggacaacagccacctggtgacctttgtgaagagcctggaggaggccatgctgagcaccacagcctgcatcgtgctgagccaccagaaggacaacccccacagaattgctgtgctggtggtgcccagcaaggacctgagccaggtgctgaaggacctgcacctggagggctttggaggccccccagagcccagccgccacttccaggtgcgggagggggagcagctgctgctgcgcttcaccggcaacatctttgccagcagcaatggcaaggactatggcaaggactacaccctcatcttccacctgcagaggaagccccggctggagctgcagatcaaggaggtggatgaatttggaaactacagctgcccccactacaagggcaccatcgtggtgtacaaggtgcccaagggcaagatcgtgcccaacctgaaccagagcctggtgatcaatgaaaaccacagccagctgcccatctgcaagctgcccctgaagctgcccaagcacaagaagctgatcaaccggccccagagcaccaagagggtgtccaaggaccctgtggaggccctgtgggacaacctgctgcactggctggccgaggagctgtctgaagaaaatgctgagagcctgagcagcaccctgcccctgcggcgcagcaccatccagctgatcaagctgaagaacccagatgacctgacagagcagatccacgagttcctgtgcttctggaagaagagcctgcccaccttcacagacaagctgcggctgctggcccggcacctgaggaagattggccgcagtgacctggccgaggagctgaagttcaagtgggagaacaaggtgttcacagagccccagcagtgctttgatgtggcccctgagtag

SEQ ID NO: 52417 - DNA, 1851 bp, Artificial Sequence
  derived and/or modified sequence
atgtgcctggagaagcggtacctggacgtgctgagcgacgtgaccggacctcaggtgagctgttacatcaccgcaccttcatacgttttacaacaactggaatgccgcattattaatcacatgtcatccctcatcgttggtgacaatgaagagctggtgtccaacgtaatcacaattgaatgctcagataaggagaagcgcgttcccttcccaatcggtatcgctatcccttttactgccaggtacagaggcaattatcgggatattatggtaaaggtctgtgacatcaacttgcaaagctcctacttgaaccccaacagtttggaaggcatgaagggaggatacaaaggcacctgcgcaagtgtgaaggtctacaagctgggtatattctcagtagtgtcctgccttaagaaggaaagcttcactgtgaccaaaaagggcctggcgctgaaatcatccatggattccagaatttcgcttaattatcctcctggtgtgtttacaagcccagttttggttcagcttaaaatacagcccgtggatcccgctctcgtggcccaccttaaagcacaacaagacactttttattccgtgcagagcactagcccactcatccacattcagcatccgagtacttatccatttcagaagcctgtgacgctttttctcccatgttctccctacctcgacaaaaataaccttggctcggagattgaccacaagcgccgcgcgagcgcaaccataaaccgtattaccccttcctacttcaaccgcacaaaaatcgctagcatcaggaagccacggaagaacgcttccgaatgcctgaaattattaggctttcgcagtcaagactcaggatggtgtggactggacgatgtggtgaagactatccagtctggcctggtgagtgtggagctgtacgagcacctcgaaagattcatcgtgttacatttaagtagtactatggataatagtcatctggtgacctttgttaagagcttggaggaagctatgctctctactacagcttgcattgtactgtcccatcagaaagataatcctcataggattgccgtgctcgttgttccaagtaaagacctgtcgcaggtgcttaaagatcttcatttggagggttttggcggcccccctgaacccagtaggcattttcaggtccgagagggcgagcagctactgcttagattcactggtaacatttttgcttcctcaaacggcaaggattatgggaaggattatactctgatattccacctgcagaggaaacctagattggaacttcagataaaggaagtcgacgagttcgggaactattcgtgcccacactacaaggggactatagttgtgtacaaagtccccaaaggtaagatcgtgccgaacctcaatcagtcactagtgataaacgagaatcatagtcagttgccaatttgcaaactccccctaaaactacctaaacataagaaattaataaatcggccgcagtcgacaaaacgagtttccaaggacccagttgaggcgctatgggacaatttgttgcactggctcgccgaggaactgtctgaggagaacgctgaatccctgtcctcgacattgcctcttcgacgcagtacgatccagctgattaagcttaaaaacccagatgatttgacagagcaaatccacgagttcctatgcttttggaaaaaatcgcttcccaccttcaccgacaaactcagattgctggctcggcatctgaggaagataggcaggagcgacctcgccgaggaactaaagtttaaatgggaaaacaaggtgtttacagaaccccaacagtgttttgacgtcgctcctgagtag

SEQ ID NO: 52418 - DNA, 1851 bp, Artificial Sequence
  derived and/or modified sequence
atgtgccttgagaaacgatacctcgatgtccttagcgatgttaccggccctcaggtcagctgttacattactgctccctcttatgtgctccagcagctagagtgtagaatcatcaaccatatgagtagtctgatcgtgggggacaatgaggaactcgtttccaacgtaataaccatcgaatgcagcgacaaggaaaagagagttccctttcctatcggaattgccatacccttcacagcaagatacaggggaaattacagagatataatggtgaaggtgtgcgatataaacttacaatcatcgtacctgaaccctaattctctggaggggatgaagggcggttacaaggggacctgcgcttcggtgaaggtgtataaattgggcatttttagcgtagttagctgccttaaaaaagagtccttcactgttactaaaaaggggctggctctgaagtcctctatggactctcgaatttccttaaattatccccctggcgtcttcacgagccctgtgctggtccagctcaaaattcagcctgtcgacccggcattagtcgcccatcttaaggcccagcaggataccttttactccgtacagagcacctctccgctgattcacattcagcatccctcaacatatcctttccagaaaccagtcactcttttcctgccgtgttccccttatctagacaagaacaatctcggttctgagattgaccacaagagaagagcatccgcgacaatcaatagaattacccctagctacttcaatcgtaccaagatagcctctattcgcaagccacgtaagaatgcaagcgaatgtctaaaactgctggggtttagatctcaagatagcgggtggtgcgggctggatgatgtggtgaagacgattcagagcgggttagtgagcgtggagctgtacgaacatctcgagagattcattgttctgcacttgtctagtaccatggataattcacatctggtgactttcgtgaaaagcctggaagaagcaatgctgagcaccaccgcttgtatcgtgctctcccatcagaaagacaaccctcatcggatagctgtgctggtggtcccctccaaagatttgtcacaggtcctaaaagatctgcacctcgagggctttggagggccacccgaaccctcccgccactttcaggtgcgcgaaggggaacagctgttgctgaggttcacgggaaacatcttcgcgagctcaaacggaaaagattacgggaaagactatacactgatcttccacctccagaggaagccgcgactcgaacttcagattaaagaagtagacgaatttggtaattatagctgcccgcactacaaaggaactatcgtggtttacaaagtccccaaaggaaaaatcgtgcccaatctgaaccagagcctggttattaatgagaaccattcacagctacccatttgcaagcttcccctgaagctccctaagcacaagaaactcattaataggcctcaaagcacaaagagagtgtccaaagatcctgtagaggccttgtgggacaatctcctgcactggctggctgaggagctctccgaagaaaatgcggagtctctttcgtccaccctgccattgcgccgtagcacaattcagctaattaagctgaaaaaccccgacgatctgactgagcagattcatgagttcttatgtttttggaagaagagcttgccaacctttaccgataagttgaggctgctagcacgacacttgaggaagatcggcaggagcgacctcgccgaagagctcaaattcaaatgggagaacaaggtcttcactgaacctcagcagtgctttgatgtggcacccgagtag

SEQ ID NO: 52419 - protein, 492 aa, Artificial Sequence
  derived and/or modified sequence
MLEYLSLTFLISVKIQGDYIPRQVRTWVKQYRASETSTIPAMERLIEWLPLHLPRQQRTTVVHGDFRLDNLVFHPEEPEVLAVLDWELSTLGDPLADVAYSCLAHYLPSSFPVLRGINDCDLTQLGIPAAEEYFRMYCLQMGLPPTENWNFYMAFSFFRVAAILQGVYKRSLTGQASSTYAEQTGKLTEFVSNLAWDFAVKEGFRVFKEMPFTNPLTRSYHTWARPQSQWCPTGSRSYSSVPEASPAHTSRGGLVISPESLSPPVRELYHRLKHFMEQRVYPAEPELQSHQASAARWSPSPLIEDLKEKAKAEGLWNLFLPLEADPEKKYGAGLTNVEYAHLCELMGTSLYAPEVCNCSAPDTGNMELLVRYGTEAQKARWLIPLLEGKARSCFAMTEPQVASSDATNIEASIREEDSFYVINGHKWWITGILDPRCQLCVFMGKTDPHAPRHRQQSVLLVPMDTPGIKIIRPLTVYGLEDAPGCFLPSFSL

SEQ ID NO: 52420 - protein, 1090 aa, Artificial Sequence
  derived and/or modified sequence
MCVRSCFQSPRLQWVWRTAFLKHTQRRHQGSHRWTHLGGSTYRAVIFDMGGVLIPSPGRVAAEWEVQNRIPSGTILKALMEGGENGPWMRFMRAEITAEGFLREFGRLCSEMLKTSVPVDSFFSLLTSERVAKQFPVMTEAITQIRAKGLQTAVLSNNFYLPNQKSFLPLDRKQFDVIVESCMEGICKPDPRIYKLCLEQLGLQPSESIFLDDLGTNLKEAARLGIHTIKRQGFAVLPKLVSNSWAQAIYPPYPPKVVRLQVNDPETAVKELEALLGFTLRVGVPNTRPVKKTMEIPKDSLQKYLKDLLGIQTTGPLELLQFDHGQSNPTYYIRLANRDLVLRKKPPGTLLPSAHAIEREFRIMKALANAGVPVPNVLDLCEDSSVIGTPFYVMEYCPGLIYKDPSLPGLEPSHRRAIYTAMNTVLCKIHSVDLQAVGLEDYGKQGDYIPRQVRTWVKQYRASETSTIPAMERLIEWLPLHLPRQQRTTVVHGDFRLDNLVFHPEEPEVLAVLDWELSTLGDPLADVAYSCLAHYLPSSFPVLRGINDCDLTQLGIPAAEEYFRMYCLQMGLPPTENWNFYMAFSFFRVAAILQGVYKRSLTGQASSTYAEQTGKLTEFVSNLAWDFAVKEGFRVFKEMPFTNPLTRSYHTWARPQSQWCPTGSRSYSSVPEASPAHTSRGGLVISPESLSPPVRELYHRLKHFMEQRVYPAEPELQSHQASAARWSPSPLIEDLKEKAKAEGLWNLFLPLEADPEKKYGAGLTNVEYAHLCELMGTSLYAPEVCNCSAPDTGNMELLVRYGTEAQKARWLIPLLEGKARSCFAMTEPQVASSDATNIEASIREEDSFYVINGHKWWITGILDPRCQLCVFMGKTDPHAPRHRQQSVLLVPMDTPGIKIIRPLTVYGLEDAPGGHGEVRFEHVRVPKENMVLGPGRGFEIAQGRLGPGRIHHCMRLIGFSERALALMKARVKSRLAFGKPLVEQGTVLADIAQSRVEIEQARLLVLRAAHLMDLAGNKAAALDIAMIKMVAPSMASRVIDRAIQAFGAAGLSSDYPLAQFFTWARALRFADGPDEVHRATVAKLELKHRI

SEQ ID NO: 52421 - DNA, 1479 bp, Artificial Sequence
  derived and/or modified sequence
atgctggagtacctgagcctgaccttcctgatcagcgtgaagatccagggcgactacatccccagacaggtgagaacctgggtgaagcagtacagagccagcgagaccagcaccatccccgccatggagagactgatcgagtggctgcccctgcacctgcccagacagcagagaaccaccgtggtgcacggcgacttcagactggacaacctggtgttccaccccgaggagcccgaggtgctggccgtgctggactgggagctgagcaccctgggcgaccccctggccgacgtggcctacagctgcctggcccactacctgcccagcagcttccccgtgctgagaggcatcaacgactgcgacctgacccagctgggcatccccgccgccgaggagtacttcagaatgtactgcctgcagatgggcctgccccccaccgagaactggaacttctacatggccttcagcttcttcagagtggccgccatcctgcagggcgtgtacaagagaagcctgaccggccaggccagcagcacctacgccgagcagaccggcaagctgaccgagttcgtgagcaacctggcctgggacttcgccgtgaaggagggcttcagagtgttcaaggagatgcccttcaccaaccccctgaccagaagctaccacacctgggccagaccccagagccagtggtgccccaccggcagcagaagctacagcagcgtgcccgaggccagccccgcccacaccagcagaggcggcctggtgatcagccccgagagcctgagcccccccgtgagagagctgtaccacagactgaagcacttcatggagcagagagtgtaccccgccgagcccgagctgcagagccaccaggccagcgccgccagatggagccccagccccctgatcgaggacctgaaggagaaggccaaggccgagggcctgtggaacctgttcctgcccctggaggccgaccccgagaagaagtacggcgccggcctgaccaacgtggagtacgcccacctgtgcgagctgatgggcaccagcctgtacgcccccgaggtgtgcaactgcagcgcccccgacaccggcaacatggagctgctggtgagatacggcaccgaggcccagaaggccagatggctgatccccctgctggagggcaaggccagaagctgcttcgccatgaccgagccccaggtggccagcagcgacgccaccaacatcgaggccagcatcagagaggaggacagcttctacgtgatcaacggccacaagtggtggatcaccggcatcctggaccccagatgccagctgtgcgtgttcatgggcaagaccgacccccacgcccccagacacagacagcagagcgtgctgctggtgcccatggacacccccggcatcaagatcatcagacccctgaccgtgtacggcctggaggacgcccccggctgcttcctgcccagcttcagcctgtag

SEQ ID NO: 52422 - DNA, 3273 bp, Artificial Sequence
  derived and/or modified sequence
atgtgcgtgagaagctgcttccagagccccagactgcagtgggtgtggagaaccgccttcctgaagcacacccagagaagacaccagggcagccacagatggacccacctgggcggcagcacctacagagccgtgatcttcgacatgggcggcgtgctgatccccagccccggcagagtggccgccgagtgggaggtgcagaacagaatccccagcggcaccatcctgaaggccctgatggagggcggcgagaacggcccctggatgagattcatgagagccgagatcaccgccgagggcttcctgagagagttcggcagactgtgcagcgagatgctgaagaccagcgtgcccgtggacagcttcttcagcctgctgaccagcgagagagtggccaagcagttccccgtgatgaccgaggccatcacccagatcagagccaagggcctgcagaccgccgtgctgagcaacaacttctacctgcccaaccagaagagcttcctgcccctggacagaaagcagttcgacgtgatcgtggagagctgcatggagggcatctgcaagcccgaccccagaatctacaagctgtgcctggagcagctgggcctgcagcccagcgagagcatcttcctggacgacctgggcaccaacctgaaggaggccgccagactgggcatccacaccatcaagagacagggcttcgccgtgctgcccaagctggtgagcaacagctgggcccaggccatctaccccccctacccccccaaggtggtgagactgcaggtgaacgaccccgagaccgccgtgaaggagctggaggccctgctgggcttcaccctgagagtgggcgtgcccaacaccagacccgtgaagaagaccatggagatccccaaggacagcctgcagaagtacctgaaggacctgctgggcatccagaccaccggccccctggagctgctgcagttcgaccacggccagagcaaccccacctactacatcagactggccaacagagacctggtgctgagaaagaagccccccggcaccctgctgcccagcgcccacgccatcgagagagagttcagaatcatgaaggccctggccaacgccggcgtgcccgtgcccaacgtgctggacctgtgcgaggacagcagcgtgatcggcacccccttctacgtgatggagtactgccccggcctgatctacaaggaccccagcctgcccggcctggagcccagccacagaagagccatctacaccgccatgaacaccgtgctgtgcaagatccacagcgtggacctgcaggccgtgggcctggaggactacggcaagcagggcgactacatccccagacaggtgagaacctgggtgaagcagtacagagccagcgagaccagcaccatccccgccatggagagactgatcgagtggctgcccctgcacctgcccagacagcagagaaccaccgtggtgcacggcgacttcagactggacaacctggtgttccaccccgaggagcccgaggtgctggccgtgctggactgggagctgagcaccctgggcgaccccctggccgacgtggcctacagctgcctggcccactacctgcccagcagcttccccgtgctgagaggcatcaacgactgcgacctgacccagctgggcatccccgccgccgaggagtacttcagaatgtactgcctgcagatgggcctgccccccaccgagaactggaacttctacatggccttcagcttcttcagagtggccgccatcctgcagggcgtgtacaagagaagcctgaccggccaggccagcagcacctacgccgagcagaccggcaagctgaccgagttcgtgagcaacctggcctgggacttcgccgtgaaggagggcttcagagtgttcaaggagatgcccttcaccaaccccctgaccagaagctaccacacctgggccagaccccagagccagtggtgccccaccggcagcagaagctacagcagcgtgcccgaggccagccccgcccacaccagcagaggcggcctggtgatcagccccgagagcctgagcccccccgtgagagagctgtaccacagactgaagcacttcatggagcagagagtgtaccccgccgagcccgagctgcagagccaccaggccagcgccgccagatggagccccagccccctgatcgaggacctgaaggagaaggccaaggccgagggcctgtggaacctgttcctgcccctggaggccgaccccgagaagaagtacggcgccggcctgaccaacgtggagtacgcccacctgtgcgagctgatgggcaccagcctgtacgcccccgaggtgtgcaactgcagcgcccccgacaccggcaacatggagctgctggtgagatacggcaccgaggcccagaaggccagatggctgatccccctgctggagggcaaggccagaagctgcttcgccatgaccgagccccaggtggccagcagcgacgccaccaacatcgaggccagcatcagagaggaggacagcttctacgtgatcaacggccacaagtggtggatcaccggcatcctggaccccagatgccagctgtgcgtgttcatgggcaagaccgacccccacgcccccagacacagacagcagagcgtgctgctggtgcccatggacacccccggcatcaagatcatcagacccctgaccgtgtacggcctggaggacgcccccggcggccacggcgaggtgagattcgagcacgtgagagtgcccaaggagaacatggtgctgggccccggcagaggcttcgagatcgcccagggcagactgggccccggcagaatccaccactgcatgagactgatcggcttcagcgagagagccctggccctgatgaaggccagagtgaagagcagactggccttcggcaagcccctggtggagcagggcaccgtgctggccgacatcgcccagagcagagtggagatcgagcaggccagactgctggtgctgagagccgcccacctgatggacctggccggcaacaaggccgccgccctggacatcgccatgatcaagatggtggcccccagcatggccagcagagtgatcgacagagccatccaggccttcggcgccgccggcctgagcagcgactaccccctggcccagttcttcacctgggccagagccctgagattcgccgacggccccgacgaggtgcacagagccaccgtggccaagctggagctgaagcacagaatctag

SEQ ID NO: 52423 - DNA, 2691 bp, Artificial Sequence
  derived and/or modified sequence
actgctcttccggacgcaattttgaggaggtcggagcggaaggacgtcgtggagattgcttgcgctggggtgccacacttaggctgagctgcaggttttcgcacagtcgcgagttaacctctgcttgctccagaggcctcgtcctaatccacctcggctgacggcgcgggatccctggctccgcgagcctcagcctcaccatgtgtgtcaggagctgtttccagtccccccgtctccagtgggtgtggagaacagccttcctgaaacacacccagcgcaggcaccaggggtcccaccgatggacacaccttggaggcagcacctacagagcggtgattttcgacatgggcggagttctcattccttctccagggagagtcgctgcagaatgggaggtacagaatcgtatcccttctggaactatattaaaggccttgatggaaggtggtgaaaatgggccctggatgagatttatgagagcagaaataacagcagagggttttttacgagaatttgggagactttgctctgaaatgttaaagacctccgtgcctgtggactcatttttctctctgttgaccagtgagcgagtggcaaagcagttcccagtgatgactgaggccataactcaaattcgggcaaaaggtcttcagactgcagtcttgagcaataatttttatcttcccaaccagaaaagctttttgcccctggaccggaaacagtttgatgtgattgtggagtcctgcatggaagggatctgtaagccagaccctaggatctacaagctgtgcttggagcagctcggcctgcagccctctgagtccatctttcttgatgaccttggaacaaatctaaaagaagctgccagacttggtattcacaccattaaggttaatgacccagagactgcagtaaaggaattagaagctctcttgggttttacattgagagtaggtgttccaaacactcggcctgtgaaaaagacgatggaaattccgaaagattccttgcagaagtacctcaaagacttactgggtatccagaccacaggcccattggaactacttcagtttgatcacgggcagtcaaatccaacttactacatcaggctggctaatcgtgatctagttctgaggaagaagcccccagggacactccttccatctgcccatgccatagagagggagttcaggattatgaaagcccttgcaaatgctggagtacctgtccctaacgttcttgatctctgtgaagattcaaggggactatattccacgccaggtacgaacctgggttaagcagtatcgagcttccgaaactagcaccatcccagccatggagaggctgatcgaatggctgcccctccatcttccccgtcagcagaggaccacagtggtgcacggggacttcaggctcgacaacctggtgtttcatccagaagagccagaggtgcttgctgtccttgactgggaactttctaccttgggcgacccccttgctgatgtggcctacagctgcctggctcattacctgccatccagttttcccgtgctgagaggtattaatgactgtgacttgacacagctgggaatccctgctgcagaggagtatttcaggatgtactgtctccaaatggggctccctcccactgagaactggaacttctatatggctttttcctttttccgtgtggctgcaatcctacagggagtctacaagcgatcactcacagggcaagcaagctccacatatgcggaacaaactggaaagctgaccgaatttgtgtctaacctggcgtgggatttcgcagtcaaagaagggttccgggttttcaaagagatgcccttcacaaatccgttaacaaggtcctaccacacgtgggccaggccccagtcccagtggtgccccacaggcagcaggagttatagctccgttccagaagcttccccagctcatacctcaaggggaggtctggttatctctccagagagcctctctccacctgtcagagagctgtatcaccggctgaagcacttcatggagcaacgtgtgtaccctgcagagccagagctgcagagtcaccaggcctcagcagccaggtggagcccctccccactgatcgaagacctcaaggagaaagccaaagctgaaggactttggaaccttttcctacccttagaggctgatcccgagaaaaaatacggagcaggactgaccaatgtggaatatgcacatctgtgtgagctcatgggcacgtccctgtatgcccccgaggtatgtaactgctctgcgcctgacacgggcaacatggagctgctggtgaggtatggcaccgaagcgcagaaggctcgctggctgattcctctgctggaggggaaagcccgctcctgttttgctatgaccgagccccaggttgcctcttcagatgccaccaacattgaggcttccatcagagaggaggacagcttctatgtcataaacggtcacaaatggtggatcacaggcatcctggatcctcgttgccaactctgtgtgtttatgggaaaaacagacccacatgcaccaagacaccggcagcagtctgtgctcttggttcccatggataccccagggataaaaatcatccggcctctgacggtgtatggactggaagatgcaccaggctgtttcctgccgtccttttccctttaa

SEQ ID NO: 52424 - DNA, 4071 bp, Artificial Sequence
  derived and/or modified sequence
gaggaggtcggagcggaaggacgtcgtggagattgcttgcgctggggtgccacacttaggctgagctgcaggttttcgcacagtcgcgagttaacctctgcttgctccagaggcctcgtcctaatccacctcggctgacggcgcgggatccctggctccgcgagcctcagcctcaccatgtgtgtcaggagctgtttccagtccccccgtctccagtgggtgtggagaacagccttcctgaaacacacccagcgcaggcaccaggggtcccaccgatggacacaccttggaggcagcacctacagagcggtgattttcgacatgggcggagttctcattccttctccagggagagtcgctgcagaatgggaggtacagaatcgtatcccttctggaactatattaaaggccttgatggaaggtggtgaaaatgggccctggatgagatttatgagagcagaaataacagcagagggttttttacgagaatttgggagactttgctctgaaatgttaaagacctccgtgcctgtggactcatttttctctctgttgaccagtgagcgagtggcaaagcagttcccagtgatgactgaggccataactcaaattcgggcaaaaggtcttcagactgcagtcttgagcaataatttttatcttcccaaccagaaaagctttttgcccctggaccggaaacagtttgatgtgattgtggagtcctgcatggaagggatctgtaagccagaccctaggatctacaagctgtgcttggagcagctcggcctgcagccctctgagtccatctttcttgatgaccttggaacaaatctaaaagaagctgccagacttggtattcacaccattaagagacagggttttgccgtgttgcccaagctggtgtcgaactcctgggctcaagcgatctacccaccttaccctcccaaagtggtgagattacaggttaatgacccagagactgcagtaaaggaattagaagctctcttgggttttacattgagagtaggtgttccaaacactcggcctgtgaaaaagacgatggaaattccgaaagattccttgcagaagtacctcaaagacttactgggtatccagaccacaggcccattggaactacttcagtttgatcacgggcagtcaaatccaacttactacatcaggctggctaatcgtgatctagttctgaggaagaagcccccagggacactccttccatctgcccatgccatagagagggagttcaggattatgaaagcccttgcaaatgctggagtacctgtccctaacgttcttgatctctgtgaagattcaagtgtcattggcacccccttctatgtgatggagtactgcccaggtctcatctacaaagacccttccctgccaggcttggagcccagccacagacgagccatatacactgccatgaacacagtcctgtgcaaaattcacagtgtggatctgcaggctgtgggacttgaagactatgggaagcaaggggactatattccacgccaggtacgaacctgggttaagcagtatcgagcttccgaaactagcaccatcccagccatggagaggctgatcgaatggctgcccctccatcttccccgtcagcagaggaccacagtggtgcacggggacttcaggctcgacaacctggtgtttcatccagaagagccagaggtgcttgctgtccttgactgggaactttctaccttgggcgacccccttgctgatgtggcctacagctgcctggctcattacctgccatccagttttcccgtgctgagaggtattaatgactgtgacttgacacagctgggaatccctgctgcagaggagtatttcaggatgtactgtctccaaatggggctccctcccactgagaactggaacttctatatggctttttcctttttccgtgtggctgcaatcctacagggagtctacaagcgatcactcacagggcaagcaagctccacatatgcggaacaaactggaaagctgaccgaatttgtgtctaacctggcgtgggatttcgcagtcaaagaagggttccgggttttcaaagagatgcccttcacaaatccgttaacaaggtcctaccacacgtgggccaggccccagtcccagtggtgccccacaggcagcaggagttatagctccgttccagaagcttccccagctcatacctcaaggggaggtctggttatctctccagagagcctctctccacctgtcagagagctgtatcaccggctgaagcacttcatggagcaacgtgtgtaccctgcagagccagagctgcagagtcaccaggcctcagcagccaggtggagcccctccccactgatcgaagacctcaaggagaaagccaaagctgaaggactttggaaccttttcctacccttagaggctgatcccgagaaaaaatacggagcaggactgaccaatgtggaatatgcacatctgtgtgagctcatgggcacgtccctgtatgcccccgaggtatgtaactgctctgcgcctgacacgggcaacatggagctgctggtgaggtatggcaccgaagcgcagaaggctcgctggctgattcctctgctggaggggaaagcccgctcctgttttgctatgaccgagccccaggttgcctcttcagatgccaccaacattgaggcttccatcagagaggaggacagcttctatgtcataaacggtcacaaatggtggatcacaggcatcctggatcctcgttgccaactctgtgtgtttatgggaaaaacagacccacatgcaccaagacaccggcagcagtctgtgctcttggttcccatggataccccagggataaaaatcatccggcctctgacggtgtatggactggaagatgcaccaggtggccatggtgaagtccgatttgagcacgtgcgtgtgcccaaagagaacatggtcctgggccctggccgaggctttgagatcgcccagggcagactgggccccggcaggatccatcactgcatgaggctgatcgggttctcagagagggccctggcactcatgaaggcccgcgtgaagtcccgcttggcttttgggaagcccctggtggagcagggcacagtgctggcggacatcgcgcagtcgcgcgtggagattgagcaggcacggctgctggtgctgagagctgcccacctcatggacctggcaggaaacaaggctgcagccttggatatagccatgattaaaatggtcgccccgtccatggcctcccgagtgattgatcgtgcgattcaggcctttggagcagcaggcctgagcagcgactacccactggctcagttcttcacctgggcccgagccctgcgctttgccgacggccctgacgaggtgcaccgggccacggtggccaagctagagctgaagcaccgcatttagagccttggggctgcagtggctcaatgtcctggctggtccagctgtgcccagatctgtcactgatgtgcctcgaaagatccggtgtttgtggctcctgcaccctgctcagcagctctgtcccgggacagtcagggtggactcaatctttctggttctccacagaagacgtctctgcaagaagcctggagtctgtttcaggccaggaggaggggatttgctgagggccaagggggttctgggacagagtctggaaagctggtcttcaggctctcagtcccaggctgggcaggcacggtcacttcacttcagcctttcagtccctctctctctgcctgtgggaatctggacacattttgggaggcctcccaaggctgtgggacgtgcttgctctggcagctgcagggttcctgtctggcctccctggtgagcagaggggcggccacggcgggcggtggcctagagacccaggacctgggcgcctgggaaaatggaatgcaacccacattgtaaagccactggcatctgattatctccatttgaacacacagcacagaacaatcatttaaatgttattttggaaaggggttttggggacacagaagaataagtaaacacatctcg

SEQ ID NO: 52425 - DNA, 1479 bp, Artificial Sequence
  derived and/or modified sequence
atgttagaatacttgtcattaacattcctaatctccgtgaagatccagggggactacatcccacgacaggtgcgaacatgggtgaaacaataccgggcgagcgaaaccagcacgattccagctatggaacgactgatcgaatggcttcccctgcacctgccaaggcagcagagaaccaccgtggtacacggagattttcggctggacaaccttgtctttcatcccgaagagccggaggtactcgcagtcctggattgggagttgtctaccctgggggatcctctagctgatgtcgcctactcatgtctggcgcactatcttccgtcaagcttccctgtattaagaggaatcaatgattgtgatctgacacagctcggaattcctgcagctgaggagtactttagaatgtattgtttacagatgggcctgccccccacagagaattggaatttctatatggcctttagtttctttcgtgtcgctgctatcctacaaggcgtgtataagaggagcttgaccgggcaggcaagtagtacatatgccgagcaaaccgggaagctgaccgaattcgtttcaaacctggcttgggacttcgctgtgaaagagggattccgagtgttcaaggagatgcccttcaccaacccgctgacgaggagctatcacacctgggctcggccacagtcccagtggtgcccgacaggctcccgttcgtactcttccgtccctgaggcttcccccgcacacacatcaagaggaggcctggtcatatctccagagtcactctcacctcccgtacgggagctgtatcatcgcctcaagcatttcatggagcagcgagtgtaccccgcggagcccgagcttcagtcacaccaggcttcagccgctcgctggtccccctccccattaatagaggatcttaaagagaaggccaaagccgaaggtctctggaatctattcctgccgctggaggccgacccagagaaaaaatatggagctggcttgactaatgtggagtatgctcacttgtgtgagctgatgggcacttccttgtacgccccagaagtttgcaactgtagcgcaccagataccggaaatatggaactgctcgtgagatatgggactgaagcccagaaggcccgctggctcattccactgctggaggggaaagctagatcgtgcttcgctatgaccgagcctcaagttgccagctctgatgccacaaacattgaggcaagcataagagaggaagactccttttatgttatcaacggccacaaatggtggatcactggcattctggatcccaggtgtcaactctgcgtatttatggggaaaactgaccctcacgctccgagacatcgccagcagagtgtactcctggtcccaatggatacaccaggaattaagattatcaggcccctcactgtctacggcttggaggatgcaccaggctgttttctcccatcttttagtctgtag

SEQ ID NO: 52426 - DNA, 3273 bp, Artificial Sequence
  derived and/or modified sequence
atgtgcgttcggtcgtgtttccaatcaccaagactccagtgggtatggcggactgcctttctgaaacatacccagagacggcatcaggggtcccataggtggacccaccttggtggcagcacatacagagcggtcatcttcgacatgggcggagtccttatcccatcccctggccgcgtggcggccgaatgggaggtccagaaccgtatcccctccggaacaattcttaaagcactgatggagggaggcgagaatggcccatggatgcggttcatgagagccgaaattacggccgaagggttcttacgcgagttcgggaggctttgcagtgaaatgctcaagaccagcgtgcccgtggactccttcttctcgcttctgacatccgagagggtcgcaaaacagtttcctgtcatgaccgaggctattacccagatccgcgccaaggggcttcaaacagcagtcctgtcaaacaacttctatctgccgaaccaaaagtctttcttaccgttggaccggaagcagtttgacgttattgtcgaaagttgcatggaaggtatttgtaaacctgacccacgaatttacaagctttgcttggaacagctgggtctccagccttccgagtcaatattcctggacgacctgggaaccaatctaaaggaagccgcccggctagggattcatacaataaagcgacagggatttgcggtgttgccaaaattggtgtccaacagctgggcccaggctatttatcccccttacccaccaaaggtggttcggttgcaggtcaatgaccccgaaactgccgtaaaggagctggaggcgctgctagggtttactctacgcgtgggggttcctaacaccaggcctgttaaaaaaacgatggagataccgaaggatagcctacaaaaatatttaaaggatcttctggggattcagaccaccggccccttggaactgttgcagttcgatcacggacaaagcaatcccacttactacatccggcttgcgaacagagacctagtgctgcggaagaagccacccggcactctgctgcccagcgcgcatgccattgagagggagttcaggattatgaaggcgttggctaatgccggcgttccagtccccaatgtcctagatctctgtgaagactctagcgtcataggaacccctttctacgtgatggagtactgcccaggcttgatatataaggaccccagcctgccagggctcgagccatcgcatcggcgagccatctacaccgccatgaacaccgtgctttgtaagatccactccgtggatctgcaagccgttgggctggaggactatgggaaacaaggcgattacatccccaggcaggtgaggacctgggttaagcagtaccgagcatctgaaaccagcacgatcccagcaatggagaggctcatagagtggcttccattacacttgccccggcagcagagaaccacggtggtgcatggtgattttcgactggataacctcgtgttccatcctgaggagcccgaggtactcgcagtccttgattgggagctctccaccctcggcgatcctctggcagacgtcgcctattcctgcctggcccattatctgccgtctagcttccccgtcctgaggggtatcaatgactgtgacctgactcagctcgggatcccagcagccgaagagtactttcggatgtactgtctccagatgggacttccccccacagagaactggaatttctacatggccttctcgttttttcgagtggctgctattctgcagggggtttacaagcgttccctgaccggccaggctagttcaacttacgccgaacagaccggcaagctgacagagttcgtatccaatctggcctgggacttcgccgttaaggaggggtttagagttttcaaggagatgcctttcaccaatccacttacaagaagctatcacacttgggcccgaccacagtcacagtggtgtccaacgggttcccgctcgtactcctctgtgccagaggcctccccagcacacaccagccgcggcggcctggtcatttccccagagtcactgagccctccagtcagagaactttaccaccgactcaaacactttatggaacagagggtgtaccccgccgagccagagttgcagtctcatcaggcttcagccgcacgatggtcaccctcacctctgatcgaagacttgaaggagaaagccaaagctgagggtctttggaacctgttccttcctctggaggctgaccccgaaaagaagtatggagccgggttgactaacgtggagtacgcccatctctgtgagctgatgggcacaagcctgtatgcccctgaggtctgtaactgttcagcaccagacacgggaaacatggaactcctggtgcgttacgggacggaggcacaaaaagcgcgatggctgatccccctcctggaagggaaagctcgttcatgcttcgccatgacagagccacaagtcgcatcctccgacgctacaaacattgaagccagcattcgcgaggaggacagcttttacgtgatcaacgggcacaagtggtggatcacaggcattctcgaccctcgttgccagctttgtgtgttcatgggaaaaactgacccccatgccccccgccaccggcagcagtcggttttactggttcccatggacaccccaggcattaagatcattagaccgctcaccgtgtatggtctggaggacgcccctgggggccacggcgaggtgcggttcgaacacgttagggttcctaaagagaatatggttcttgggcccggccgaggattcgagatcgcccagggacgccttggcccagggcggatccatcactgcatgcgccttatcgggttcagcgaacgcgcgctggccctgatgaaggcaagagtcaaatctcggctggcatttgggaagcccctggttgaacagggcaccgttcttgctgatattgcgcaatcaagagtagagattgaacaggcacgtctgctggtgttgcgcgccgcccatctgatggatctcgctggcaataaagccgccgccctcgacatcgctatgatcaaaatggtggcaccctcgatggccagcagggttatcgatagggcaatacaagcgttcggggctgcgggcctgtcctctgattaccctctggctcaattctttacgtgggctcgcgccctgcggttcgcggacggaccagacgaagtccaccgcgccacagtcgccaagttggagctgaaacatagaatttag

SEQ ID NO: 52427 - DNA, 1479 bp, Artificial Sequence
  derived and/or modified sequence
atgctggagtacctgagcctgaccttcctgatctctgtgaagatccagggcgactacatcccccggcaggtgaggacctgggtgaagcagtaccgggccagcgagaccagcaccatcccagccatggagcggctcatcgagtggctgcccctgcacctgccccggcagcagaggaccaccgtggtgcatggagacttccggctggacaacctggtgttccaccctgaggagcctgaggtgctggccgtgctggactgggagctgagcaccctgggggaccccctggctgatgtggcctacagctgcctggcccactacctgcccagcagcttccctgtgctgcggggcatcaatgactgtgacctgacccagctgggcatcccagctgctgaggagtacttcaggatgtactgcctgcagatgggcctgcccccaacagagaactggaacttctacatggccttctccttcttccgggtggccgccatcctgcagggcgtgtacaagaggagcctgaccggccaggccagcagcacctatgcagagcagacaggcaagctgacagaatttgtgagcaacctggcctgggactttgctgtgaaggagggcttccgggtcttcaaggagatgcccttcaccaaccccctgaccaggagctaccacacctgggcccggccccagagccagtggtgccccaccggcagccgcagctacagctctgtgcctgaggccagccctgcccacaccagccggggcggcctggtgatcagccctgagagcctgagcccccctgtgcgggagctgtaccaccggctgaagcacttcatggagcagagggtgtacccagctgagcctgagctgcagagccaccaggccagcgctgcccgctggagccccagccccctgattgaggacctgaaggagaaggccaaggccgagggcctgtggaacctcttcctgcccctggaggccgaccctgagaagaagtacggggccggcctgaccaacgtggagtatgcccacctgtgtgagctgatgggcaccagcctgtatgcccctgaggtgtgcaactgcagcgccccagacaccggcaacatggagctgctggtgcgctatggaacagaggcccagaaggcccgctggctgatccccctgctggagggcaaggcccggagctgctttgccatgacagagccccaggtggccagcagtgatgccaccaacatcgaggccagcatccgggaggaggacagcttctacgtgatcaatggccacaagtggtggatcaccggcatcctggacccccgctgccagctgtgtgtgttcatgggcaagacagacccccacgcccccaggcaccggcagcagagcgtgctgctggtgcccatggacaccccaggcatcaagatcatccggcccctgactgtgtatggcctggaggatgcccctggctgcttcctgcccagcttcagcctgtag

SEQ ID NO: 52428 - DNA, 3273 bp, Artificial Sequence
  derived and/or modified sequence
atgtgtgtgcgcagctgcttccagagcccccggctgcagtgggtgtggaggacagccttcctgaagcacacccagaggaggcaccagggcagccaccgctggacccacctgggcggcagcacctaccgggccgtcatctttgacatgggcggcgtgctgatccccagccctggccgggtggccgctgagtgggaggtgcagaaccgcatccccagcggcaccatcctgaaggccctgatggagggcggggagaatggcccctggatgaggttcatgagagctgagatcacagctgagggcttcctgcgggagtttggccgcctgtgcagcgagatgctgaagacctctgtgcctgtggacagcttcttcagcctgctgaccagcgagcgggtggccaagcagtttcctgtgatgacagaggccatcacccagatccgggccaagggcctgcagacagctgtgctgagcaacaacttctacctgcccaaccagaagagcttcctgcccctggacaggaagcagtttgatgtgattgtggagagctgcatggagggcatctgcaagccagacccccgcatctacaagctgtgcctggagcagctgggcctgcagcccagcgagagcatcttcctggatgacctgggcaccaacctgaaggaggccgcccggctgggcatccacaccatcaagaggcagggctttgctgtgctgcccaagctggtgagcaacagctgggcccaggccatctacccaccctacccacccaaggtggtgcggctgcaggtgaatgaccctgagacagctgtgaaggagctggaggccctgctgggcttcaccctgcgggtgggcgtgcccaacaccaggcctgtgaagaagaccatggagatccccaaggacagcctgcagaagtacctgaaggacctgctgggcatccagaccaccggccccctggagctgctgcagtttgaccacggccagagcaaccccacctactacatccggctggccaacagagacctggtgctgaggaagaagcccccaggcaccctgctgcccagcgcccacgccatcgagcgggagttccgcatcatgaaggccctggccaatgctggggtgcctgtgcccaacgtgctggacctgtgtgaggacagctctgtgattggcacccccttctacgtgatggagtactgccccggcctcatctacaaggaccccagcctgcccggcctggagcccagccacagaagagccatctacacagccatgaacacagtgctgtgcaagatccacagcgtggacctgcaggccgtgggcctggaggactatggcaagcagggcgactacatcccccggcaggtgaggacctgggtgaagcagtaccgggccagcgagaccagcaccatcccagccatggagcggctgattgagtggctgcccctgcacctgccccggcagcagaggaccaccgtggtgcacggggacttccggctggacaacctggtgttccaccctgaggagcctgaggtgctggccgtgctggactgggagctgagcaccctgggggaccccctggctgatgtggcctacagctgcctggcccactacctgcccagcagcttccctgtgctgcggggcatcaatgactgtgacctgacccagctgggcatcccagctgctgaggagtacttcaggatgtactgcctgcagatgggcctgcccccaacagagaactggaacttctacatggccttctccttcttccgggtggccgccatcctgcagggcgtgtacaagaggagcctgaccggccaggccagcagcacctacgccgagcagacaggcaagctgacagaatttgtgagcaacctggcctgggactttgctgtgaaggagggcttccgggtcttcaaggagatgcccttcaccaaccccctgaccaggagctaccacacctgggcccggccccagagccagtggtgccccaccggcagccgcagctacagctctgtgcctgaggccagccctgcccacaccagcagaggaggcctggtgatcagccctgagagcctgagcccccctgtgcgggagctgtaccaccggctgaagcacttcatggagcagagggtgtacccagctgagcctgagctgcagagccaccaggccagcgctgcccgctggagccccagccccctgattgaggacctgaaggagaaggccaaggccgagggcctgtggaacctcttcctgcccctggaggccgaccctgagaagaagtatggagctggcctgaccaacgtggagtatgcccacctgtgtgagctgatgggcaccagcctgtatgcccctgaggtgtgcaactgcagcgccccagacaccggcaacatggagctgctggtgcgctatggaacagaggcccagaaggcccgctggctgatccccctgctggagggcaaggcccggagctgctttgccatgacagagccccaggtggccagcagtgatgccaccaacatcgaggccagcatccgggaggaggacagcttctacgtgatcaatggccacaagtggtggatcaccggcatcctggacccccgctgccagctgtgtgtgttcatgggcaagacagacccccacgcccccaggcaccggcagcagagcgtgctgctggtgcccatggacaccccaggcatcaagatcatccggcccctgactgtgtatggcctggaggatgcccctgggggccatggagaggtgcgctttgagcacgtgcgggtgcccaaggagaacatggtgctgggccctggccggggctttgagatcgcccagggccgcctgggccctggccgcatccaccactgcatgaggctgattggcttcagcgagcgggccctggccctgatgaaggcccgggtgaagagccggctggccttcggcaagcccctggtggagcagggcaccgtgctggccgacatcgcccagagccgggtggagattgagcaggcccggctgctggtgctgcgggccgcccacctgatggacctggccggcaacaaggccgccgccctggacatcgccatgatcaagatggtggcccccagcatggccagccgggtgattgaccgggccatccaggccttcggggctgctggcctgagcagtgactaccccctggcccagttcttcacctgggcccgggccctgcgctttgctgatggcccagatgaggtgcaccgggccaccgtggccaagctggagctgaagcaccgcatctag

SEQ ID NO: 52429 - DNA, 1479 bp, Artificial Sequence
  derived and/or modified sequence
atgctggagtacctgagcctgaccttcctgatcagcgtgaagatccagggcgactacatacctcgccaggtgaggacctgggtcaagcagtatcgggcaagtgaaacatccacaatccctgccatggaaagattaatagagtggttgcctctccacttgcctagacaacagcgaactacggtcgttcacggcgacttccggctcgacaacttagtttttcatccagaagagcctgaagtgcttgcggtcctcgattgggaactatcaacactgggagatccgcttgcagacgtggcctattcctgtttagcacattatctgcctagctcttttcctgtcctgcgcggcatcaacgactgtgatctgacccagcttggcatccccgccgccgaagagtactttcgcatgtactgtctccagatggggttgccacccactgagaactggaacttctatatggccttctctttcttccgggtcgctgccattctgcagggggtgtacaaacggtctctcaccggccaggcctcatcaacttatgccgagcaaactggcaaacttactgaatttgtgagcaatctcgcatgggactttgcagtgaaagagggcttccgggtttttaaggagatgcctttcactaatccactgacacggtcttaccacacatgggctagaccgcagagccagtggtgcccaaccggctcccggtcttactcctctgttcctgaagcctccccggcccacacaagcaggggaggccttgttatatctcctgagagcctcagtcctcctgttagagagctgtaccaccgcctgaagcatttcatggaacaacgggtgtatcctgcggaaccagagttacaatctcatcaggcatctgccgccagatggtcccctagccccctcattgaggatttaaaggagaaggccaaagcagaagggttatggaacctgttcctgcccctcgaagccgatcctgagaagaagtatggcgccggccttaccaacgtggagtacgcccatttgtgcgagctcatgggcaccagcctttacgcccctgaagtttgcaactgcagtgctccggacactggaaatatggaattgctcgtgcgatatggcactgaagcacagaaagccaggtggctgatccccctgctggaggggaaagcacgctcttgttttgcgatgaccgaaccgcaggtggcatcatctgacgccacaaatattgaggcctccatccgcgaggaagattctttttatgtgatcaacggacacaaatggtggataacagggattctcgatccccggtgccagctctgtgtcttcatgggcaagactgatccacacgcccctagacatagacagcaatcagtgttgctggtgcccatggataccccaggcattaaaatcattcgcccattaacagtctatggcctggaagatgcaccaggatgctttctgccgagcttctccctctag

SEQ ID NO: 52430 - DNA, 3273 bp, Artificial Sequence
  derived and/or modified sequence
atgtgcgtgcggagctgcttccagagcccccggctgcagtgggtgtggcggaccgcgttcttaaagcatacccaacggcggcatcaaggaagccatcgatggacccacctgggtgggtccacatatcgtgctgtgatcttcgacatgggcggggtcctaatcccgtccccagggagagtggctgccgagtgggaggtacagaacagaattccatcggggaccattctcaaggccttgatggaaggaggtgaaaacggaccctggatgcggttcatgcgggcagagattaccgcagaagggtttctgagagaattcggccgcttgtgttcggagatgctcaaaacttcagtccctgtagactctttcttttctctgctgacatccgaacgagtggcaaaacaattcccagtgatgacggaggcaattacccagatcagagccaaaggacttcaaactgctgtgttgagcaataacttctacttgcctaatcagaaatcctttttgccactcgatcggaaacagttcgatgtgatcgtggagtcctgtatggagggaatatgcaagccagatccccggatctacaagctatgtctggagcaactgggtttgcagccttccgagtctatatttctagacgatctcggaacaaatctcaaggaggccgccagactggggattcacaccataaaaagacagggattcgctgtcctgccaaagctcgtcagtaactcatgggcacaggccatctatcctccctatccacccaaggtggtgcggctgcaggtgaatgatcccgaaaccgccgtgaaggaactggaagccttgctcggattcacactcagggtgggcgtccctaatactcgtcctgtcaaaaagactatggagattcccaaagactccctgcagaagtatttgaaggacctgctggggatccagacaacaggccctttggagctgctccagtttgatcacggccagtccaaccccacctactacatacgtcttgccaatagagatctggtcctgcgcaagaagcctccaggcacgctattaccctccgcacacgccatagagagggaatttagaatcatgaaagcccttgccaacgccggggtacctgtacctaatgtgctggacctgtgcgaagatagtagtgtaatagggacccctttctacgtcatggagtactgccccggactgatatacaaggacccatctctaccaggtttggaaccaagccaccggagggctatctacacagccatgaatactgtcctgtgtaagatccattcagttgatctacaggccgtgggactggaggattatggaaaacagggagactacatacccagacaggtacggacttgggtgaaacagtaccgggcttcagagacgtctactataccagcgatggaacgactgatcgagtggctgccccttcatctaccacggcagcagagaaccaccgtggttcatggagatttcagactggataatctggtgtttcaccctgaggagccagaggtcctcgccgttctggactgggagctttccaccctgggggaccccttggctgatgtggcctattcctgtctggcgcactatctgccgtcatctttccccgtgctcagaggtatcaatgattgcgatttgacccaactgggtattcccgcagccgaagaatactttcgcatgtactgtctgcagatgggacttcccccaactgagaattggaacttctatatggccttttcatttttcagggtggcggcaatcctccaaggtgtgtacaaacgctctttgacaggccaggcctcgagcacatacgccgagcaaaccggcaagttgactgagtttgtgagtaatcttgcatgggatttcgccgttaaggagggctttcgcgtcttcaaagagatgccatttacaaatccactcacccggtcctatcacacgtgggccagaccccaatcacaatggtgtcctactggatctcgatcctattctagtgtgcctgaagccagtcccgcccatacaagtcggggaggcctggtgattagccctgagagcctctcccctccggttagggagctctatcatcgcctaaaacacttcatggagcagagggtataccccgccgaaccggagctccagtctcatcaggcctctgccgcgaggtggtctccatcaccccttattgaagacctgaaggagaaggctaaagcagagggtctctggaatctgttcctgccactggaggcggaccctgagaagaaatacggcgccggcctcactaatgtggaatatgctcatctgtgcgagctaatggggaccagcctctacgcccctgaggtttgtaactgcagtgcacctgacactgggaacatggagctgctggtgcggtatggtaccgaggcccagaaggcccggtggctcatacccctcctggaggggaaagcccggagctgtttcgccatgaccgagccccaagtggcttctagtgatgcaacaaacatcgaggcctcaattcgtgaggaagatagcttttacgtgatcaacggtcacaaatggtggatcacaggaattctggaccctagatgccagctttgcgtctttatggggaagactgatcctcacgccccccgccatcgacaacagtcagtgctgctggttcccatggacaccccgggaatcaagattattcggcccctcaccgtttatggcctcgaagacgcacccgggggccacggggaggtcaggttcgaacacgtccgggtccctaaggaaaacatggtcctgggtccgggacggggatttgaaatagcccagggtcggctgggtcccggacgcatccaccactgcatgagacttataggattttctgagagagccctcgcattaatgaaagccagggtaaagtctagactcgcgtttggaaagcctctagtggagcaagggaccgtgttagcagacatcgctcagtctagggtcgaaattgagcaggcccgactgttggttctccgggcagcgcatctaatggacttggccggaaacaaggctgccgcccttgacatcgccatgattaagatggtcgccccaagcatggcatcccgggtcatcgatcgcgccatccaggcctttggcgcagccggtctgtcttctgactacccccttgctcagttcttcacatgggccagagctctccggttcgctgacggccctgacgaggttcacagagccacggttgccaagctggagctaaagcacagaatttag

SEQ ID NO: 52431 - DNA, 1479 bp, Artificial Sequence
  derived and/or modified sequence
atgctagagtacctctcactgactttcctgatcagtgtcaagatccagggggactacattcctcgtcaggtacggacatgggtaaagcaatatagggccagcgaaacatccaccattccagcaatggagcggctgatagaatggctacccctgcacctgccaagacagcaaagaaccacagtagtccatggggattttcgactggacaatctggtctttcaccccgaggaaccagaggtgctggcagtccttgactgggaacttagcaccctcggcgaccccctggctgatgtggcatattcctgcctggcccattacttaccttcctcctttcccgttctccggggaatcaatgactgtgacctgacccagttgggcatccctgccgcagaggagtattttcgcatgtactgcctccagatggggttacctcctaccgagaactggaatttctatatggcattttctttttttcgggtggcggcaattcttcaaggcgtgtacaagcgctcattaacaggacaggcgtctagtacttatgctgagcagaccggaaagctaaccgagttcgtgagcaaccttgcgtgggattttgctgtcaaggagggttttcgggtgttcaaggaaatgccctttaccaatccactcacccggtcgtaccacacctgggccagaccccagtcacaatggtgccctacagggtctcgcagttacagtagcgtcccagaggcctctcccgcacatacaagcagagggggactggtgatttcaccagagtctctttccccccctgtccgcgagctgtaccatcgactgaaacattttatggagcagagggtgtatcccgctgagcccgaattacaaagccatcaggcttctgcggcacggtggagcccatccccactgatcgaagatctgaaggaaaaagccaaggccgaggggctctggaacctcttcctgcctctcgaggcagatcccgaaaagaagtacggtgccggtctaacaaacgtggagtacgctcatttatgcgaattgatgggtaccagtctatacgcccctgaggtgtgtaactgctccgctccagacactgggaacatggagcttttggtgcgttacggcaccgaggcccaaaaggccagatggctgatccctctgctcgaagggaaagctcggtcctgtttcgcgatgacagaacctcaggtcgccagttcagatgcaactaacatcgaggctagcattcgcgaggaagactctttttatgtgatcaacggtcacaagtggtggattactggaatacttgatccccgatgtcaactttgtgtgttcatgggcaaaactgatcctcatgcgccacgccatcgacaacagtccgtactgctcgtgccgatggatacacctgggattaagattatccgccctcttacagtctacggcctggaagacgctcctggctgttttctgccaagcttctcactgtag

SEQ ID NO: 52432 - DNA, 3273 bp, Artificial Sequence
  derived and/or modified sequence
atgtgtgtgaggagctgctttcagtctccacggttgcagtgggtgtggagaaccgcttttttgaagcacacccagcgcagacaccagggctcccaccggtggacccatttggggggatctacctatagggcagtaatctttgacatggggggagttttaatcccttctccgggtcgcgtcgccgcagagtgggaggtgcaaaacaggatcccaagcgggacaatattgaaagccctcatggagggcggagagaacggaccttggatgcgattcatgcgcgcagagataactgccgaggggttcctcagggaattcgggagattgtgcagcgaaatgctcaagacaagtgtacccgttgatagcttcttttcgcttctaacctctgagagagtggcaaagcagtttcctgtaatgactgaggctatcacccagatacgcgcaaagggcctgcaaacagcagtcctctccaataatttctacctccctaaccaaaagtcctttctgccactagatcgtaagcagtttgatgtaattgtggagtcttgcatggaaggcatctgtaagccagaccccaggatttataagctgtgcctggagcaacttggattgcagccaagcgagtccattttcctcgacgatctgggcaccaacctcaaggaggcagcaaggttgggaatccatacaattaaacggcagggcttcgccgtgcttcccaagctggtcagcaactcatgggcacaggcgatttatcccccatatccacctaaggtcgtgagactgcaggtgaatgacccagagactgctgttaaggagctcgaggcgttactgggcttcaccctgcgggtcggggtccccaatacaagaccagtgaaaaagaccatggaaatcccaaaggactctctgcaaaagtacctgaaggacctgttgggcatccaaaccaccggccctctcgagctgttacaatttgatcatgggcagtctaatccaacgtattacattaggctggctaatcgagatttagtgctgaggaagaagcctccagggactctgttaccctccgcccacgcaattgagagagaattcagaatcatgaaagccctcgccaatgcgggagtacctgtaccaaacgtattagacctatgtgaggatagctctgtcatcgggactcctttttatgtgatggagtactgccctgggctcatctacaaggacccttcactcccgggtttggagccttctcacaggagagccatctacaccgccatgaacactgtgttgtgcaaaattcattctgtggaccttcaagccgtggggctagaggattatggaaagcagggagattacatccctcgacaggtgaggacctgggtgaagcagtaccgagcaagcgagacctctactatccctgcgatggagcggctcatcgaatggcttcctctgcacctaccaagacagcagagaaccacagtggtgcatggcgacttccggctcgacaatctggtttttcaccccgaggaacctgaggtgctcgccgtgttagactgggagctttcgactctgggagatccattagctgacgttgcctactcttgtttagcccactaccttccctcatcctttcccgtactgcggggtattaacgattgcgatctcacccagttggggatccccgcagcggaggagtactttagaatgtattgccttcagatgggcctgccaccaactgaaaactggaacttctacatggcgttttctttttttcgcgtggctgccatcctgcagggcgtctacaaacggtctctcactggacaggcaagcagcacatacgccgagcagacgggcaagctgaccgagttcgtctcgaatctggcatgggacttcgcagtgaaggaaggtttcagggttttcaaggagatgccattcacaaatcctttgacacgttcctatcacacttgggccaggcctcaatcacagtggtgtcctactggctcaaggtcgtatagctctgttccggaggcctccccagcccacacatcccgaggagggctggtgatttctcctgagagcctttctcccccagttcgagaactgtaccaccgtctgaaacattttatggaacagagggtgtatcctgcagagccagagctgcagagccaccaagcatccgccgcaaggtggtcccccagtccattaattgaggatctcaaagagaaagccaaagccgaagggttatggaacctattcttgccgcttgaagcagatcccgagaagaagtacggggctgggctgacaaatgtggagtacgcgcatctgtgcgagttgatgggtaccagcctatacgcacctgaagtctgtaactgtagtgccccagataccgggaacatggagcttctggtgcggtacggaactgaagcgcagaaggccaggtggctaattcctttgctcgagggtaaggcaagaagttgtttcgccatgactgagcctcaggtagcttcctcggatgcaactaacatcgaagcgagcattagagaggaggactcattctacgtgataaacggccacaagtggtggattaccggcatactggacccacggtgccaactctgcgtgtttatgggaaagactgacccccacgctcctcgtcacaggcagcaatccgtgctattggtgcccatggatacacccggtattaagatcattagacccctcactgtgtacggcctggaggacgcgcctggcggtcacggagaggtgaggttcgagcacgtccgcgtgcccaaagaaaacatggtgctgggtccgggacgcggatttgagattgctcaaggtcgactggggcctggacgtatccatcattgcatgagactaatcggatttagtgagcgagccttagcgttgatgaaagcaagagtcaagtctaggcttgcattcgggaagccactggtcgagcaggggactgtgttagccgatattgcacagtctagggtcgagatagagcaggctaggctgctcgttctgagagctgctcacctgatggatttggcaggaaataaagccgctgctctcgatatagccatgattaaaatggtggccccatccatggcatcacgtgtaattgatcgcgcaatccaggcttttggagccgcaggtttgtcttccgattatccactggctcagttcttcacttgggccagagcgctccgctttgctgatgggccagatgaggtccaccgggctactgttgccaagctggagctgaaacacaggatatag

SEQ ID NO: 52433 - protein, 380 aa, Artificial Sequence
  derived and/or modified sequence
MEGAALLRVSVLCIWVQQNVPSGTDTGDPQSKPLGDWAAGTMDPESSIFIEDAIKYFKEKVSTQNLLLLLTDNEAWNGFVAAAELPRNEADELRKALDNLARQMIMKDKNWHDKGQQYRNWFLKEFPRLKSELEDNIRRLRALADGVQKVHKGTTIANVVSGSLSISSGILTLVGMGLAPFTEGGSLVLLEPGMELGITAALTGITSSTMDYGKKWWTQAQAHDLVIKSLDKLKEVREFLGENISNFLSLAGNTYQLTRGIGKDIRALRRARANLQSVPHASASRPRVTEPISAESGEQVERVNEPSILEMSRGVKLTDVAPVSFFLVLDVVYLVYESKHLHEGAKSETAEELKKVAQELEEKLNILNNNYKILQADQEL

SEQ ID NO: 52434 - DNA, 1143 bp, Artificial Sequence
  derived and/or modified sequence
atggaaggtgcggcccttctgagggtgtctgttctgtgcatctgggtacaacagaatgttccctccggcacagatactggcgatccacagagcaaaccactgggcgattgggctgccggaacaatggatccagagtcaagtatcttcatcgaggatgccattaagtattttaaggagaaggtctccacccaaaatctgttactgttgctcactgataacgaggcatggaatggcttcgtggctgctgcggaacttcctaggaatgaagccgatgagcttcgcaaggccttggacaacctcgccagacagatgatcatgaaggataagaattggcatgacaagggacaacaatacaggaattggtttcttaaggagtttccccggttgaagagtgagctcgaggataacatacgcagactgcgcgccttggctgacggtgtgcaaaaagtgcacaagggaacaacaattgcaaatgtcgtgtcaggatccctatccattagctctggtatcttgactttggtggggatggggctcgcgcccttcactgaggggggtagtctagtgctcctggagccagggatggagctggggatcacagccgcgctaactggcatcaccagctcgaccatggactacggaaagaagtggtggacccaggcacaggctcacgatctggtgatcaagtctctcgataagctgaaggaagtccgggagttcttaggcgagaatatctctaacttcctgagcctcgccgggaatacgtatcagctaacgcggggcatcgggaaggacatcagggcccttcgtcgcgcccgcgctaatctgcaatctgtgccccacgcttccgcaagtaggcctcgtgtgacagaaccgatatctgctgagtccggcgagcaggtggagagagtgaacgagccttcgattctggaaatgagtcggggggtcaaacttacggatgttgccccggtgtctttttttctggtgctggatgtcgtgtatctggtttatgagtcgaagcaccttcatgagggagctaaatccgagaccgctgaggaactgaaaaaggttgcacaggaattggaggaaaagctaaacattctgaacaacaactacaagattctgcaggcggaccaggaattatag

SEQ ID NO: 52435 - DNA, 1143 bp, Artificial Sequence
  derived and/or modified sequence
atggagggcgccgccctgctgcgggtgtctgtgctgtgcatctgggtgcagcagaatgtgcccagcggcacagacaccggggacccccagagcaagcccctgggggactgggccgccggcaccatggaccctgagagcagcatcttcattgaagatgccatcaagtacttcaaggagaaggtgtccacccagaacctgctgctgctgctgacagacaatgaggcctggaatggatttgtggccgctgctgagctgcccagaaatgaagcagatgagctgaggaaggccctggacaacctggcccggcagatgatcatgaaggacaagaactggcatgacaagggccagcagtacagaaactggttcctgaaggagttcccccggctgaagtctgagctggaggacaacatccggcggctgcgggccctggctgatggagtgcagaaggtgcacaagggcaccaccatcgccaacgtggtgtctggcagcctgagcatcagcagcggcatcctgaccctggtgggcatgggcctggcccccttcacagagggcggcagcctggtgctgctggagcccggcatggagctgggcatcacagctgccctgaccggcatcaccagcagcaccatggactatggcaagaagtggtggacccaggcccaggcccatgacctggtgatcaagagcctggacaagctgaaggaggtgcgggagttcctgggggagaacatcagcaacttcctgagcctggccggcaacacctaccagctgacccggggcatcggcaaggacatccgggccctgcggcgggcccgggccaacctgcagagcgtgccccacgccagcgccagccggccccgggtgacagagcccatctctgctgagagcggggagcaggtggagcgggtgaatgagcccagcatcctggagatgagccggggcgtgaagctgacagatgtggcccctgtgtccttcttcctggtgctggatgtggtgtacctggtgtatgagagcaagcacctgcacgagggcgccaagtcagaaacagctgaggagctgaagaaggtggcccaggagctggaggagaagctgaacatcctgaacaacaactacaagatcctgcaggccgaccaggagctgtag

SEQ ID NO: 52436 - DNA, 1143 bp, Artificial Sequence
  derived and/or modified sequence
atggagggcgccgccctgctgcgggtgagcgtgctgtgcatctgggtccaacaaaatgtccctagcggaacagataccggggatccacagagtaaacctctcggcgactgggctgcgggtaccatggatccagagagttctatcttcatcgaagatgccattaagtatttcaaggaaaaggtctccacacaaaacttactgttactgctcacagataacgaggcctggaatggattcgttgccgcagccgaactgccacggaacgaggccgacgagctcaggaaggcactggacaacctcgcccggcagatgatcatgaaagacaagaattggcacgacaaaggccagcagtataggaattggtttctcaaggagttccctcggcttaaaagtgaactagaagataatattcgtcgtctcagagcactggctgatggagtgcagaaggtccacaaaggcacaactattgctaatgtcgtctccggctcactctctatttcctctggaattctgacgcttgttgggatgggactggctccgtttaccgagggcggatccctcgtcttgctggagccaggcatggagctcgggattaccgcagctcttactggaatcaccagcagtactatggactacgggaaaaaatggtggacccaggcacaggctcatgacctggttataaagagcctggacaagctgaaggaggtgagggagttcctgggcgagaatatttccaacttcctatccctcgctgggaacacctaccagcttactagagggattggtaaagacattcgagcattaagaagagcccgcgcaaacctgcaatcagtacctcacgcgtccgcatccaggcctagagtgaccgaacccataagcgccgagtctggagagcaggtcgagcgggtcaacgaaccttctatcctggagatgagccggggagtgaagctgactgacgtggcaccagtgagctttttcctggtccttgacgtggtgtatttggtctatgagtcaaagcacctgcatgaaggcgctaagagcgagacagcggaggaacttaagaaggtggcccaggaactggaagaaaaactgaacatcttgaataacaattacaagattctacaggctgatcaggaactgtag

SEQ ID NO: 52437 - DNA, 1143 bp, Artificial Sequence
  derived and/or modified sequence
atggagggtgcggctttgctgcgcgtcagtgtgctgtgtatttgggtgcagcagaatgttccctccgggaccgatactggggatccccagtccaagccattaggggattgggcggctggcaccatggacccagagtcttctattttcatcgaggacgccataaagtactttaaggaaaaggtgtccacccagaacctacttctgcttcttaccgataacgaggcttggaatggttttgtggccgctgccgagctgcctcgcaatgaagcagacgagctgagaaaggcattggataacctggcacgacagatgataatgaaggacaagaattggcatgataagggtcaacagtaccgtaactggttcctgaaggagttccctcggttgaagtccgaactcgaggacaacattcggagactgcgcgctctcgccgatggggtccaaaaagtccacaagggcacaactattgcaaatgtggtgtccggaagtctgtctatcagcagtgggatcctgacactagtgggtatgggcctcgctccttttacagagggcggatcactggtgctcctggagccaggtatggagttaggaatcaccgctgctctgaccggcatcacatcatccaccatggactatggtaagaaatggtggacacaggcccaggcccacgacctggtaatcaaaagcctcgacaaacttaaagaagtgcgtgagtttctcggcgaaaatatttctaatttccttagtctagccggaaatacgtaccagctaacaagaggaattggaaaagacatcagagctctaagacgggctagagcgaaccttcagtctgttccgcacgcgagcgcttcccgtccaagggtgaccgagccaatcagtgctgaaagtggtgaacaggtggagagggtcaatgaaccatcaatcctggaaatgtcaaggggcgtgaaacttaccgacgtcgcgccagtgtctttcttcttggtcctagacgtagtgtatctggtgtatgaatctaagcacctgcacgaaggagcaaagtctgagactgctgaggagttgaagaaggtcgcacaggagctggaggaaaagttaaacattctgaataataattacaagattttacaggcagaccaggagctctag

SEQ ID NO: 52438 - DNA, 1223 bp, Artificial Sequence
  derived and/or modified sequence
tatacagacgcataactggaggtgggatccacacagctcagaacagctggatcttgctcagtctctgccaggggaagattccttgagagcagtatctttattgaggatgccattaagtatttcaaggaaaaagtgagcacacagaatctgctactcctgctgactgataatgaggcctggaacggattcgtggctgctgctgaactgcccaggaatgaggcagatgagctccgtaaagctctggacaaccttgcaagacaaatgatcatgaaagacaaaaactggcacgataaaggccagcagtacagaaactggtttctgaaagagtttcctcggttgaaaagtgagcttgaggataacataagaaggctccgtgcccttgcagatggggttcagaaggtccacaaaggcaccaccatcgccaatgtggtgtctggctctctcagcatttcctctggcatcctgaccctcgtcggcatgggtctggcacccttcacagagggaggcagccttgtactcttggaacctgggatggagttgggaatcacagccgctttgaccgggattaccagcagtaccatggactacggaaagaagtggtggacacaagcccaagcccacgacctggtcatcaaaagccttgacaaattgaaggaggtgagggagtttttgggtgagaacatatccaactttctttccttagctggcaatacttaccaactcacacgaggcattgggaaggacatccgtgccctcagacgagccagagccaatcttcagtcagtaccgcatgcctcagcctcacgcccccgggtcactgagccaatctcagctgaaagcggtgaacaggtggagagggttaatgaacccagcatcctggaaatgagcagaggagtcaagctcacggatgtggcccctgtaagcttctttcttgtgctggatgtagtctacctcgtgtacgaatcaaagcacttacatgagggggcaaagtcagagacagctgaggagctgaagaaggtggctcaggagctggaggagaagctaaacattctcaacaataattataagattctgcaggcggaccaagaactgtgaccacagggcagggcagccaccaggagagatatgcctggcaggggccaggacaaaatgcaaacttttttttttttctgagacagagtcttgctctgtcgccaagttggagtgcaatggtgcgatctcag

SEQ ID NO: 52439 - DNA, 1033 bp, Artificial Sequence
  derived and/or modified sequence
atccacacagctcagaacagctggatcttgctcagtctctgccaggggaagattccttggaggagcacactgtctcaacccctcttttcctgctcaaggaggaggccctgcagcgacatggagggagctgctttgctgagagtctctgtcctctgcatctggatgagtgcacttttccttggtgtgggagtgagggcagaggaagctggagcgagggtgcaacaaaacgttccaagtgggacagatactggagatcctcaaagtaagcccctcggtgactgggctgctggcaccatggacccaggcccagctgggtccagaggtgacagtggagagccgtgtaccctgagaccagcctgcagaggacagaggcaacatggaggtgcctcaaggatcagtgctgagggtcccgcccccatgccccgtcgaagaaccccctccactgcccatctgagagtgcccaagaccagcaggaggaatctcctttgcatgagagcagtatctttattgaggatgccattaagtatttcaaggaaaaagtgagcacacagaatctgctactcctgctgactgataatgaggcctggaacggattcgtggctgctgctgaactgcccaggaatgaggcagatgagctccgtaaagctctggacaaccttgcaagacaaatgatcatgaaagacaaaaactggcacgataaaggccagcagtacagaaactggtttctgaaagagtttcctcggttgaaaagtgagcttgaggataacataagaaggctccgtgcccttgcagatggggttcagaaggtccacaaaggcaccaccatcgccaatgtggtgtctggctctctcagcatttcctctggcatcctgaccctcgtcggcatgggtctggcacccttcacagagggaggcagccttgtactcttggaacctgggatggagttgggaatcacagccgctttgaccgggattaccagcagtaccatggactacggaaagaagtggtggacacaagcccaagcccacgacct

SEQ ID NO: 52440 - DNA, 1143 bp, Artificial Sequence
  derived and/or modified sequence
atggaaggggccgccctgttgcgagtatcagtgttgtgtatttgggtgcagcagaacgttcctagcggcactgatactggcgacccccaatctaagcccctcggagactgggcagcaggaactatggaccctgaatctagcatatttatagaggacgccatcaaatactttaaagagaaggtgtcaacacagaacttactgctacttctgactgacaatgaagcatggaacggatttgtggccgccgccgagctcccccgtaacgaggctgatgagctgcgtaaggcactggataaccttgcaaggcaaatgatcatgaaagacaaaaattggcatgacaaaggccaacaatatcgaaactggtttctcaaggaattcccacggctgaagtccgaacttgaagacaacattcgaaggttaagagccttggcagatggggtccaaaaggttcacaaaggcacaactatcgccaacgttgtgagcgggtctctgtcaatctcctctggaatcttaacactcgtgggaatgggattagccccgttcacagagggcggatcactggtactgctggaacccgggatggaactgggaatcactgcagccctcactggaatcaccagcagcaccatggactacggcaaaaagtggtggacccaagctcaagctcacgacctcgtaatcaaatcactggataaactcaaagaagtcagagaattccttggagaaaatatttcgaatttcttaagcctggctggaaatacctaccaactcacacgtggaatcggcaaagatatacgagcgctgcgccgagcaagggcaaacttgcaaagcgtgccccatgcaagtgctagtaggccaagagtaacggagccaatttcggcggagagtggggaacaggttgagagagtgaatgagccaagtatcttagagatgtctcgaggcgttaaactcacagatgtggctcccgtgtcattctttctggtgctcgacgtggtttacctggtgtatgagtctaagcacctgcatgagggcgcgaaaagcgagacagcagaggaactcaagaaggtggcccaggagctcgaagagaaactcaatatcctgaacaataactacaagattctccaagctgatcaagagctatag

SEQ ID NO: 52441 - DNA, 1143 bp, Artificial Sequence
  derived and/or modified sequence
atggaaggtgctgctttacttagagtttctgtattgtgcatttgggtgcagcaaaacgttccctctggtacagataccggcgaccctcagtcaaaacctctgggcgattgggccgctggtacgatggaccccgaaagctcaatcttcatcgaggacgctatcaaatacttcaaagaaaaggtcagcacccagaatcttttgctgctactgaccgataacgaagcttggaatgggttcgtagctgcagcagagctccctagaaatgaagccgatgagctgcgcaaggccctggataacctagcccgccaaatgataatgaaagataaaaactggcatgacaagggccagcaatatcgtaattggtttctgaaggaatttcctagactcaaaagcgaactcgaggataatatcagacgattaagggccttagctgacggggtccagaaggtacacaaaggtacaacaattgctaacgtggttagtggctcactttcgatttcaagtggaattctcaccttagtgggcatgggattagcacctttcactgagggtggcagcctcgtgctgctggaaccaggtatggagctcggcattacagctgccctcactggaatcaccagcagcaccatggactacggcaaaaagtggtggacccaagctcaagctcacgacctcgtaatcaaatcactggataaactcaaagaagtcagagaattccttggagaaaatatttcgaatttcttaagcctggctggaaatacctaccaactcacacgtggaatcggcaaagatatacgagcgctgcgccgagcaagggcaaacttgcaaagcgtgccccatgcaagtgctagtaggccaagagtaacggagccaatttcggcggagagtggggaacaggttgaacgcgtgaatgagccctctattttagaaatgtcccgaggcgttaagctcaccgacgtggccccagtgtcgttttttttagtgctcgatgtagtctacctggtgtatgaaagcaaacatttacatgaaggcgccaaaagcgagaccgcagaagagctcaaaaaggtcgctcaggaattggaggagaagcttaatatactcaataacaactataagatcttacaggctgatcaggagctgtag

SEQ ID NO: 52442 - DNA, 1143 bp, Artificial Sequence
  derived and/or modified sequence
atggagggcgccgccctgctgagagtgagcgtgctgtgcatctgggtgcagcagaacgtgcccagcggcaccgacaccggcgacccccagagcaagcccctgggcgactgggccgccggcaccatggaccccgagagcagcatcttcatcgaggacgccatcaagtacttcaaggagaaggtgagcacccagaacctgctgctgctgctgaccgacaacgaggcctggaacggcttcgtggccgccgccgagctgcccagaaacgaggccgacgagctgagaaaggccctggacaacctggccagacagatgatcatgaaggacaagaactggcacgacaagggccagcagtacagaaactggttcctgaaggagttccccagactgaagagcgagctggaggacaacatcagaagactgagagccctggccgacggcgtgcagaaggtgcacaagggcaccaccatcgccaacgtggtgagcggcagcctgagcatcagcagcggcatcctgaccctggtgggcatgggcctggcccccttcaccgagggcggcagcctggtgctgctggagcccggcatggagctgggcatcaccgccgccctgaccggcatcaccagcagcaccatggactacggcaagaagtggtggacccaggcccaggcccacgacctggtgatcaagagcctggacaagctgaaggaggtgagagagttcctgggcgagaacatcagcaacttcctgagcctggccggcaacacctaccagctgaccagaggcatcggcaaggacatcagagccctgagaagagccagagccaacctgcagagcgtgccccacgccagcgccagcagacccagagtgaccgagcccatcagcgccgagagcggcgagcaggtggagagagtgaacgagcccagcatcctggagatgagcagaggcgtgaagctgaccgacgtggcccccgtgagcttcttcctggtgctggacgtggtgtacctggtgtacgagagcaagcacctgcacgagggcgccaagagcgagaccgccgaggagctgaagaaggtggcccaggagctggaggagaagctgaacatcctgaacaacaactacaagatcctgcaggccgaccaggagctgtag

SEQ ID NO: 52443 - protein, 718 aa, Artificial Sequence
  derived and/or modified sequence
MDELHSLDPRRQELLEARFTGVASGSTGSTGSCSVGAKASTNNESSNHSFGSLGSLSDKESETPEKKQSESSRGRKRKAENQNESSQGKSIGGRGHKISDYFEYQGGNGSSPVRGIPPAIRSPQNSHSHSTPSSSVRPNSPSPTALAFGDHPIVQPKQLSFKIIQTDLTMLKLAALESNKIQDLEKKEGRIDDLLRANCDLRRQIDEQQKLLEKYKERLNKCISMSKKLLIEKSTQEKLSSREKSMQDRLRLGHFTTVRHGASFTEQWTDGFAFQNLVKQQEWVNQQREDIERQRKLLAKRKPPTANNSQAPSTNSEPKQRKNKAVNGAENDPFVRPNLPQLLTLAEYHEQEEIFKLRLGHLKKEEAEIQAELERLERVRNLHIRELKRINNEDNSQFKDHPTLNERYLLLHLLGRGGFSEVYKAFDLYEQRYAAVKIHQLNKSWRDEKKENYHKHACREYRIHKELDHPRIVKLYDYFSLDTDTFCTVLEYCEGNDLDFYLKQHKLMSEKEARSIVMQIVNALRYLNEIKPPIIHYDLKPGNILLVDGTACGEIKITDFGLSKIMDDDSYGVDGMDLTSQGAGTYWYLPPECFVVGKEPPKISNKVDVWSVGVIFFQCLYGRKPFGHNQSQQDILQENTILKATEVQFPVKPVVSSEAKAFIRRCLAYRKEDRFDVHQLANDPYLLPHMRRSNSSGNLHMAGLTASPTPPSSSIITY

SEQ ID NO: 52444 - DNA, 2157 bp, Artificial Sequence
  derived and/or modified sequence
atggacgagctccatagtctcgacccccggcgccaggagctccttgaagcccggtttactggagtggcttccggatccactggctcgaccggctcttgcagcgtcggagccaaggcaagtactaacaatgagtcttctaaccactcctttggttcgctcggctctttaagcgacaaagagtctgaaacccccgaaaaaaaacagagcgagtcgtccaggggccgcaagagaaaggccgaaaatcagaacgaaagttcccaaggtaagtccatcggtggccgcggccacaaaattagcgactacttcgaataccagggggggaacggttcatcacctgtccgcgggatacccccagcgattaggtcccctcaaaattcccacagccactcaacaccctccagcagcgtgcgacctaacagccctagccccacagccctcgcctttggcgatcacccaatcgtccagcctaagcaactatccttcaagatcattcagacagatctgacgatgctgaagctggccgcacttgagtctaataaaattcaggaccttgagaagaaggaagggcggattgatgatctgctcagagctaattgtgatctgagacgccagatcgacgagcagcagaagctcctggagaaatataaggaacggttgaacaagtgtatctccatgagcaagaagcttctgattgagaagtcaacacaagaaaaactgtcttctcgcgagaagtctatgcaggaccgactgcgattagggcacttcactaccgtgaggcatggcgcctccttcacagagcagtggacggatggctttgccttccagaacctggtgaagcagcaggagtgggtgaaccagcagcgcgaggacatcgagaggcaacgaaaactcctggccaagaggaagccacctaccgcaaacaacagtcaggctcccagtaccaactctgagcccaaacaacggaagaacaaagcggtgaacggggcagaaaacgatccttttgtacgacctaacctcccccagctattgacactagccgaatatcacgagcaggaggagatctttaaattgaggcttgggcaccttaaaaaggaggaggccgagattcaggccgaactcgaacggttggagcgcgtcaggaacctgcatatcagggagttaaagcgtataaacaatgaggataactcccaatttaaggaccatcctaccctgaacgagagatatcttctcctccacctgttagggcggggaggattttcagaggtatacaaggctttcgatctatacgagcagcggtacgccgcagtgaagatacaccaactgaacaaaagttggagagatgaaaaaaaggagaattatcataaacatgcctgcagggagtaccgcatacacaaagaactggatcatccccggatcgtaaagctctatgattatttcagcttagatactgacacgttttgtactgtgctggagtactgcgaaggtaatgacctagatttttatttgaagcagcataaattgatgtcagagaaggaggccaggtctatcgttatgcagatcgtcaatgctctccgctatctgaatgagatcaagccacccatcatacattacgatcttaaaccaggaaatatcctgcttgttgatggcactgcctgcggggaaattaaaatcactgacttcggcctgagtaaaatcatggatgacgactcctacggcgtggacggcatggatctgacatcacagggcgcaggcacctactggtacctcccccctgaatgcttcgtcgtgggcaaagagccaccaaaaatatcaaacaaggtcgatgtctggtccgtgggggtgattttctttcagtgtctgtatgggcgtaagcccttcgggcacaaccaatcccagcaggatatcctgcaggagaacacaattctgaaagcgaccgaagttcagtttccggttaagcctgttgtgtcgagcgaggccaaggcgttcataagaaggtgtttagcctatcggaaagaggataggtttgacgtgcatcaactcgccaatgacccatatcttctgccccatatgcgccgatcaaacagttcaggtaacttgcatatggccgggcttacggcaagtcccactccccctagtagtagtatcatcacttattag

SEQ ID NO: 52445 - DNA, 2157 bp, Artificial Sequence
  derived and/or modified sequence
atggacgagctgcatagcttggatccgcgccgccaagagctgctggaagctaggtttaccggagtcgcctcaggtagtactggctcaaccggatcgtgttccgtaggagccaaggcaagtacaaataacgagtctagcaaccatagtttcggctcgctcgggtctcttagcgataaagagagtgagacacccgagaaaaaacagtccgagtcctcaagagggagaaagcggaaagctgaaaatcagaacgaatcctcacaggggaaatccattggcgggcggggccataagatcagcgattatttcgagtatcaaggtggcaatggtagcagccccgtcaggggcattcctcctgccattagatccccccaaaactcgcactcccactccaccccatcatcttcagtccggccaaattctccctctccgaccgccttggcattcggtgaccaccccatcgttcagcctaagcagctgtcttttaagataatccaaactgatcttaccatgctgaagttggctgcccttgagagtaataaaatacaggaccttgaaaagaaagaaggtagaatcgacgaccttctccgggcaaattgcgatctgcgcaggcagatcgatgagcagcagaaattactcgagaagtataaagagaggctgaataaatgcattagcatgtccaagaaactactgatagagaagtccacgcaggagaagctcagcagccgggaaaagtctatgcaggaccgtcttcgtctcgggcactttactactgtacggcacggcgccagcttcacggagcaatggaccgacggcttcgcctttcagaacctggtcaagcagcaggaatgggtcaaccagcagcgtgaggacatcgagagacaacgcaagttgctcgctaagcggaagccgcccacggcaaataacagccaagctcctagtacaaattcagaacccaaacaacgtaagaacaaggccgtcaacggcgcagaaaacgatccattcgtaaggccaaacctgccacagttattgactcttgccgaatatcacgagcaggaggaaattttcaagcttaggctgggccatcttaagaaggaggaggcggagatccaggcagaacttgagcgccttgaaagggtgcgtaatctccatatcagagaactaaagcgcataaacaatgaggataattcgcagttcaaagaccatcctacactgaacgagagatatcttctacttcacctgttggggaggggggggttcagcgaggtgtacaaggcctttgacctgtacgagcagcggtacgcggctgtgaagattcaccagttaaacaagtcatggcgggatgagaagaaagagaattaccataagcacgcttgccgtgagtatcgcattcacaaagagttagatcacccccgcatcgtcaaactttatgactattttagcctggacaccgacaccttctgtaccgtgctggaatactgcgagggtaatgatctggatttttatctgaaacagcacaaactaatgtccgagaaagaggcgcgctctattgtgatgcagattgttaatgcgctgaggtatcttaatgagattaaaccccccataattcactacgatttaaaaccagggaacatcctacttgtagacgggacagcctgcggcgagattaagatcaccgatttcgggttgagcaagattatggatgacgattcctacggtgttgatggaatggacttgactagtcaaggagcaggcacatactggtatctacctcctgaatgcttcgtggtgggaaaggagccccccaaaattagcaacaaagtggacgtctggagtgtgggcgtgattttcttccagtgtttatatggccgcaaaccctttgggcataatcagagtcagcaggatatactgcaagaaaacaccatactaaaggcaacagaagtgcagtttcctgtgaaacctgtggtgtcaagcgaggcgaaggcctttatccgtcgttgcttagcatacagaaaagaagatcgcttcgacgtgcaccagctggcaaatgacccctacttactcccacacatgaggcgctccaactcttccgggaacctgcacatggccggcctgacagcctcacccactcccccctcaagctcaattatcacttactag

SEQ ID NO: 52446 - DNA, 2157 bp, Artificial Sequence
  derived and/or modified sequence
atggatgagctgcacagcctggacccccggcggcaggagctgctggaggcccgcttcaccggggtggccagcggcagcacaggcagcacaggcagctgcagcgtgggcgccaaggccagcaccaacaatgaaagcagcaaccacagctttggcagcctgggcagcctgagtgacaaggagagcgagaccccagagaagaagcagagcgagagcagccggggcaggaagaggaaggccgagaaccagaatgaaagcagccagggcaagagcattggaggccggggccacaagatcagtgactactttgagtaccagggcggcaatggcagcagccctgtgcggggcatccccccagccatccgcagcccccagaacagccacagccacagcacccccagcagctctgtgcggcccaacagccccagccccacagccctggccttcggggaccaccccatcgtgcagcccaagcagctgtccttcaagatcatccagacagacctgaccatgctgaagctggccgccctggagagcaacaagatccaggacctggagaagaaggagggcagaattgatgacctgctgcgggccaactgtgacctgcggcggcagattgatgagcagcagaagctgctggagaagtacaaggagcggctgaacaagtgcatctccatgagcaagaagctgctgattgagaagagcacccaggagaagctgagcagccgggagaagtccatgcaggaccggctgcggctgggccacttcaccaccgtgcgccacggggccagcttcacagagcagtggacagatggctttgccttccagaacctggtgaagcagcaggagtgggtgaaccagcagagagaagatattgagcggcagaggaagctgctggccaagaggaagcccccaacagccaacaacagccaggcccccagcaccaacagcgagcccaagcagaggaagaacaaggctgtgaatggagcagaaaatgacccctttgtgcggcccaacctgccccagctgctgaccctggccgagtaccacgagcaggaggagatcttcaagctgcggctgggccacctgaagaaggaggaggccgagatccaggccgagctggagcggctggagcgggtgaggaacctgcacatccgggagctgaagaggatcaacaatgaagacaacagccagttcaaggaccaccccaccctgaatgaaagatacctgctgctgcacctgctgggccggggcggcttcagcgaggtgtacaaggcctttgacctgtatgagcagagatatgctgctgtgaagatccaccagctgaacaagtcctggagagatgagaagaaggagaactaccacaagcacgcctgccgggagtaccgcatccacaaggagctggaccacccccgcatcgtgaagctgtatgactacttcagcctggacacagacaccttctgcaccgtgctggagtactgtgagggcaatgacctggacttctacctgaagcagcacaagctgatgtctgagaaggaggcccggagcatcgtgatgcagatcgtgaatgccctgcgctacctgaatgagatcaagccacccatcatccactatgacctgaagccaggcaacatcctgctggtggatggaacagcctgtggggagatcaagatcacagactttggcctgagcaagatcatggatgatgacagctatggagtggatggcatggacctgaccagccagggcgccggcacctactggtacctgcccccagagtgctttgtggtgggcaaggagccccccaagatcagcaacaaggtggatgtgtggagcgtgggcgtcatcttcttccagtgcctgtatggcaggaagcccttcggccacaaccagagccagcaggacatcctgcaggagaacaccatcctgaaggccacagaggtgcagtttcctgtgaagcctgtggtgtcctctgaggccaaggccttcatccgccgctgcctggcctacaggaaggaggacagatttgatgtgcaccagctggccaatgacccctacctgctgccccacatgagaagaagcaacagcagcggcaacctgcacatggccggcctgacagccagccccaccccacccagcagcagcatcatcacctactag

SEQ ID NO: 52447 - DNA, 2157 bp, Artificial Sequence
  derived and/or modified sequence
atggacgagctgcacagcctggacccccggcggcaggagctgctggaagcacggttcacaggcgtggcttctggcagcacgggttccaccggctcctgtagcgtgggtgcaaaagcctctactaacaatgaatccagcaaccattcttttggaagcctcggcagcttgtctgacaaggaatctgagactcccgagaagaagcagtctgaaagctcacggggacggaagagaaaagccgaaaaccagaacgaaagcagccagggcaaatctattggaggccgcggacataaaatctcagattacttcgagtatcaaggtggcaatggcagctctccggtccggggaatacctccggccatcaggagccctcagaactcccactcacactccacccccagctcctcggtgagaccaaattccccctctccaacagcattggccttcggtgaccaccctattgtgcagcccaagcagttaagttttaagattatccagacagacctgactatgctgaagctagcagccctcgaatccaacaagattcaggatctcgagaaaaaggaagggcggattgatgatctgcttcgtgccaattgtgacctgcgcaggcaaatagatgaacaacagaagctgctggagaagtataaggagcgactaaataagtgcatttccatgtccaaaaagctactgattgaaaaaagcacccaagagaaactttcctcgagggagaagtcgatgcaggatcgcctccgccttggacacttcaccacggtcagacacggcgcttcctttacggagcaatggactgacgggttcgccttccagaatctggtgaaacagcaagagtgggttaatcagcaaagagaggacattgaacggcagagaaaactgctggctaaaagaaagccaccaacagccaataactcccaggcccctagcacaaatagtgagcccaagcagagaaaaaataaagccgtgaacggggctgaaaatgatccatttgtgcgccccaatctcccccaactcctgacattggcagaataccacgaacaagaagagatctttaagctgcggctgggacacctgaaaaaggaggaggcagagatccaggccgagctggaaaggctggaaagggttcgcaatttgcacattcgcgagctgaagcgcatcaacaacgaggataactcacagttcaaagaccacccaaccctgaacgagcgctacctgctactgcacttacttggcagagggggcttttcggaggtgtacaaggcattcgatctgtacgaacagaggtacgcagccgtgaagatccatcagttaaacaagtcctggcgggatgagaaaaaagagaactaccataaacacgcctgccgagagtaccgcattcacaaggaactcgaccacccacgcattgtcaagctctatgattattttagcctggacaccgatacgttctgcactgtgctggagtattgcgagggtaacgacctggatttttatcttaagcagcataagcttatgtcagagaaggaggctagaagtatcgttatgcaaattgtgaacgcactcagatatttgaatgaaatcaaaccgcccataatccactacgatttgaagccgggaaatatcctactggtcgacgggactgcatgcggcgagatcaaaattacggattttggactgagtaaaatcatggacgatgactcttatggcgtagatggaatggaccttacctcacagggcgccggtacatactggtacctcccgcccgagtgcttcgtggttggaaaggaaccccccaaaattagcaataaggtcgacgtgtggtccgtaggcgttatctttttccagtgtctatacggacggaaacctttcggccacaatcaaagtcagcaagatattctgcaagaaaatacaatcctaaaggctacagaagtgcagttccctgtgaagcccgtggtgtcctctgaggcgaaggcgttcatcaggaggtgcctggcatatcggaaggaggatcggtttgatgttcaccagctggccaatgatccttacttgcttccgcacatgcgccgaagcaactcgtccggtaatttgcatatggctggcttgaccgctagccccacccccccgagttcatctatcataacatactag

SEQ ID NO: 52448 - DNA, 2157 bp, Artificial Sequence
  derived and/or modified sequence
atggacgagctgcacagcctggacccccggcggcaggagctgctggaggcccggtttacgggtgtggcctcggggtccacagggagtactggatcctgctcagtgggtgcaaaagcttccactaacaacgaaagcagtaatcacagcttcggctcactgggtagtctgagcgacaaggagagtgaaactcctgagaagaagcagtccgagtctagccggggaaggaaaaggaaggcggagaaccagaatgagagcagccagggaaagagtattggaggccggggccacaagatttccgactattttgaataccaaggaggcaatggtagtagcccagtaagaggaattccccctgccatccgctcacctcaaaattcacacagccatagtaccccttcatcttccgtgagacctaattctccgtcacccactgctctcgcgttcggggaccatccgatcgttcagcctaagcaattgtcatttaaaataatccagactgacctgaccatgctcaagttggctgccctcgaatcgaacaagatccaggatctagagaaaaaggagggacggatagatgacctactgcgggctaactgcgatctgcgacggcagatagatgaacagcaaaagctgctcgaaaagtacaaggaacgattgaacaagtgtattagtatgtcaaagaaattattgattgaaaagtctacccaggaaaaactcagctctagggaaaaaagcatgcaagaccgtctgagactgggacactttacgacagtccggcacggggcatcctttactgagcagtggacagatggctttgcttttcagaatctggtcaaacagcaagaatgggtaaatcaacaacgtgaagacatcgagcgtcagaggaaactgttagccaagcggaagccaccaactgccaataacagccaggcccctagcactaactctgagccgaagcagcgaaaaaataaggccgtgaatggggcggagaatgacccctttgtaagacccaacctgccgcagcttttgaccctggctgagtaccacgagcaggaagaaattttcaaactgcgcctcggccacctgaagaaggaagaggccgaaatccaggccgaactcgagcgcctcgagagagtgcgaaacctccacattcgagagttgaaacggatcaataatgaagataacagccagtttaaagatcaccctacactgaacgaaagatacctgctgctccacctcctggggaggggcgggtttagcgaagtctacaaggcctttgatttgtacgagcagcgttacgccgccgtgaagattcaccaattgaacaaaagctggcgagatgagaaaaaggagaactaccataaacacgcttgccgcgagtaccgtattcacaaggagctcgaccatcctaggatcgtgaaactctacgactacttttccttggacactgacacattctgtacagtcctggagtactgcgaaggcaatgacctcgatttttacctgaagcagcataagctgatgtctgagaaagaagccagatctatcgttatgcaaatcgtcaacgccctcaggtatctgaacgagatcaagccaccaatcattcactacgatctgaagccaggcaacatcctgctggtggatgggactgcctgtggggagataaagattacagacttcggcctatctaagattatggatgatgattcttacggcgtcgacgggatggatcttacttctcaaggagctggcacctactggtatttacctcctgaatgcttcgttgtcgggaaggagcctcctaagatctctaacaaagtggacgtatggtccgtgggggtgatattctttcagtgcctttatggccgcaaacctttcggacacaaccagtcccagcaggatatcttgcaggagaataccattctcaaggcaaccgaggtccaattcccggtgaagccagtggtgagctctgaggctaaagcattcatcagacggtgccttgcgtaccgcaaggaagatagatttgatgttcaccagctggctaacgacccctatttgttgccccatatgcgccgcagcaatagttctggaaatctccacatggccggcctgaccgccagccctaccccaccctcctcatcaatcatcacctactag

SEQ ID NO: 52449 - DNA, 2157 bp, Artificial Sequence
  derived and/or modified sequence
atggacgagttgcatagcttggatcctcggcgtcaagaactgttggaggccaggtttaccggggtggcttcaggaagcacaggaagtacgggcagctgctctgtgggggcaaaagcttctactaacaacgaaagttcaaaccattcattcggcagtctgggctctctgagcgacaaagagagcgaaacccccgagaagaagcagtctgaaagttctcggggtcggaagcgcaaggccgagaatcagaacgaatccagtcagggtaaatctattggcggacggggacacaaaatcagcgactactttgaatatcaggggggaaatggatcatccccagtgcgaggtatccccccagctattcgctccccccagaatagtcactctcatagcaccccaagttcttctgtgagaccaaactccccttcccccaccgctctcgcattcggagaccaccctattgtccagcccaagcaactctccttcaaaatcattcagaccgacttgaccatgctgaaacttgccgctttggagtctaataagatccaagacctggaaaagaaagagggtcgcattgatgatttactgcgtgcaaattgcgacttgcgcaggcagatagatgagcagcagaaactcctcgaaaaatataaagagaggctgaataagtgcatttcgatgtctaagaaacttctaatcgagaagtcaacacaggaaaaactctccagtagagaaaaaagtatgcaggaccgtctgcggctggggcatttcacgacagttagacacggcgcatcttttaccgagcagtggacagacggctttgcctttcagaatctggtcaaacagcaggaatgggtcaatcagcagagagaagacatcgaacgccagcgcaagctcctcgcgaagagaaaacctcccaccgctaataacagccaggccccatccacaaattccgaaccgaaacagcgcaaaaacaaggccgttaacggggctgaaaacgacccgttcgtgagacctaatttaccacagctgctcacactggccgagtaccacgagcaagaagagatcttcaagttgaggctggggcatctcaagaaagaggaggctgagatccaggccgaactggagcgactggagcgagtgcgaaatctgcatatacgagagctgaaaaggattaataacgaagataattctcagttcaaggatcacccaacacttaatgaacgataccttctcctgcacctgctggggaggggcggattctccgaagtttataaagcttttgacctttatgaacagcgctacgcggctgtcaaaattcaccagctgaataaaagctggcgggacgagaaaaaggagaattatcacaagcatgcttgtagggagtacaggattcacaaagaactggaccacccacggatcgtgaagttatatgactactttagcctcgacaccgatacgttttgtacggtgcttgagtactgcgagggcaatgacctggacttttatctcaaacaacataaattgatgtccgagaaagaagcaagaagtatcgtcatgcagattgtgaacgcgctacgttatctcaacgaaatcaagcctccaataattcactatgatttgaagccagggaacatactcctcgttgacggtactgcttgcggagagatcaaaatcaccgactttggcctgagtaagatcatggacgacgacagctatggtgtcgatggaatggatctgactagtcagggcgcagggacttactggtatctgccacctgagtgctttgtagtgggaaaggagcccccaaaaatctccaataaagtggatgtctggtcagtgggggtcatcttcttccagtgtctctatggccgaaaaccgtttggtcacaatcaaagccagcaagatatcctgcaagagaataccattctcaaggccactgaggtgcagttccccgttaagcctgtggtctcttctgaagccaaagctttcattaggaggtgtttagcctatcgcaaagaagacagatttgacgtgcatcagctcgccaacgacccttacctgcttccgcacatgcgaaggtcaaactctagcggcaacctgcatatggcaggactgaccgcatcacctactcccccttccagctccatcattacctattag

SEQ ID NO: 52450 - DNA, 2157 bp, Artificial Sequence
  derived and/or modified sequence
atggatgaattgcactcactggatcccagaagacaggagctattagaggctcggttcacaggagtggcctcaggatcaactggatctacaggcagctgtagtgtcggcgcaaaagcctccacaaacaatgaaagcagcaaccatagcttcggatcactggggtccctgtccgacaaggaaagcgaaaccccagaaaagaagcagagcgagagttcacgagggagaaaacgcaaagcggagaaccagaacgagtcatcacaggggaaaagcataggcggaaggggtcacaagatttcagattattttgagtaccagggcggaaacggatcttcacccgtgcgcggaattccgccagcgattaggagtccacagaattcccatagtcacagcaccccaagctcttcagtgaggcccaattcaccctcccctactgccctggccttcggggatcatcctatagtgcaacccaaacaactgtcctttaagattattcaaactgacttgactatgctcaagctggcggctttggaatccaataagatccaggatttggaaaaaaaagagggtcgaatcgacgatctgttgcgggctaactgcgatctgagacggcagatagacgagcagcaaaaactccttgagaagtacaaggaacgtctgaataaatgtatttccatgtctaagaagctgttgattgaaaagagcactcaagagaagctttcctcacgagaaaagtccatgcaggatcgcctaagactgggacacttcactacagtcaggcatggagcctccttcactgagcagtggactgacggatttgcttttcagaacctggtgaaacagcaggaatgggtaaaccagcagcgagaagacatagaaaggcagagaaagctgttggccaaaaggaaaccccctaccgccaacaatagccaggccccatccaccaattcagaacctaaacaaaggaagaacaaggcagtgaacggtgccgagaatgatccttttgttcggcctaacctgccccagctgctgacactagccgagtatcacgagcaggaggagatttttaaactcaggctgggacatctgaaaaaagaagaggccgagatccaggcggagctggaacggctagagcgagttagaaacttgcacatacgggagctcaaacgcatcaacaacgaggacaattcacagtttaaggaccaccccaccttaaatgaacggtatctgctgttgcacctcctcggcaggggtggctttagcgaagtgtacaaagcctttgacctttacgaacaacgctacgccgcagttaaaatccaccaattgaacaagagttggcgcgacgagaagaaggagaattaccacaagcacgcttgtcgagagtaccgtatccacaaggaattggaccacccaagaatcgtgaagctgtacgactacttcagtctagacacagataccttctgtaccgtcctggaatactgtgagggtaacgatcttgacttttacctgaagcagcataagctcatgtccgagaaagaagcaaggtccatcgtaatgcagatagtcaatgccctgcgctatctaaacgagatcaaaccccctataatccactacgatttgaaaccaggcaatatacttctggtggacggaaccgcgtgtggagaaattaaaataaccgacttcggactgtccaagatcatggatgacgactcatatggcgtggatggaatggacctcacaagccaaggggctggcacctattggtacctgcccccagaatgtttcgtggttggaaaggaaccaccgaagatttcaaataaagtggacgtgtggagtgttggagtcatcttctttcagtgcctctatggcagaaagccattcggccataatcagtcccaacaggacatcctacaagagaacaccatcctgaaagcaaccgaagtgcaattccctgtgaagccggtcgtgtcatctgaggctaaggcgttcatcaggagatgcctggcgtaccgaaaggaggataggttcgatgtacaccagcttgccaacgatccttatctgttgccacatatgcgtcgttctaatagctccggtaatctgcacatggcaggcctgactgcctctccaacacctccaagctctagtatcattacgtactag

SEQ ID NO: 52451 - DNA, 2157 bp, Artificial Sequence
  derived and/or modified sequence
atggacgagctgcacagcctggaccccagaagacaggagctgctggaggccagattcaccggcgtggccagcggcagcaccggcagcaccggcagctgcagcgtgggcgccaaggccagcaccaacaacgagagcagcaaccacagcttcggcagcctgggcagcctgagcgacaaggagagcgagacccccgagaagaagcagagcgagagcagcagaggcagaaagagaaaggccgagaaccagaacgagagcagccagggcaagagcatcggcggcagaggccacaagatcagcgactacttcgagtaccagggcggcaacggcagcagccccgtgagaggcatcccccccgccatcagaagcccccagaacagccacagccacagcacccccagcagcagcgtgagacccaacagccccagccccaccgccctggccttcggcgaccaccccatcgtgcagcccaagcagctgagcttcaagatcatccagaccgacctgaccatgctgaagctggccgccctggagagcaacaagatccaggacctggagaagaaggagggcagaatcgacgacctgctgagagccaactgcgacctgagaagacagatcgacgagcagcagaagctgctggagaagtacaaggagagactgaacaagtgcatcagcatgagcaagaagctgctgatcgagaagagcacccaggagaagctgagcagcagagagaagagcatgcaggacagactgagactgggccacttcaccaccgtgagacacggcgccagcttcaccgagcagtggaccgacggcttcgccttccagaacctggtgaagcagcaggagtgggtgaaccagcagagagaggacatcgagagacagagaaagctgctggccaagagaaagccccccaccgccaacaacagccaggcccccagcaccaacagcgagcccaagcagagaaagaacaaggccgtgaacggcgccgagaacgaccccttcgtgagacccaacctgccccagctgctgaccctggccgagtaccacgagcaggaggagatcttcaagctgagactgggccacctgaagaaggaggaggccgagatccaggccgagctggagagactggagagagtgagaaacctgcacatcagagagctgaagagaatcaacaacgaggacaacagccagttcaaggaccaccccaccctgaacgagagatacctgctgctgcacctgctgggcagaggcggcttcagcgaggtgtacaaggccttcgacctgtacgagcagagatacgccgccgtgaagatccaccagctgaacaagagctggagagacgagaagaaggagaactaccacaagcacgcctgcagagagtacagaatccacaaggagctggaccaccccagaatcgtgaagctgtacgactacttcagcctggacaccgacaccttctgcaccgtgctggagtactgcgagggcaacgacctggacttctacctgaagcagcacaagctgatgagcgagaaggaggccagaagcatcgtgatgcagatcgtgaacgccctgagatacctgaacgagatcaagccccccatcatccactacgacctgaagcccggcaacatcctgctggtggacggcaccgcctgcggcgagatcaagatcaccgacttcggcctgagcaagatcatggacgacgacagctacggcgtggacggcatggacctgaccagccagggcgccggcacctactggtacctgccccccgagtgcttcgtggtgggcaaggagccccccaagatcagcaacaaggtggacgtgtggagcgtgggcgtgatcttcttccagtgcctgtacggcagaaagcccttcggccacaaccagagccagcaggacatcctgcaggagaacaccatcctgaaggccaccgaggtgcagttccccgtgaagcccgtggtgagcagcgaggccaaggccttcatcagaagatgcctggcctacagaaaggaggacagattcgacgtgcaccagctggccaacgacccctacctgctgccccacatgagaagaagcaacagcagcggcaacctgcacatggccggcctgaccgccagccccaccccccccagcagcagcatcatcacctactag

SEQ ID NO: 52452 - protein, 670 aa, Artificial Sequence
  derived and/or modified sequence
MAVLFLYDLKTTGKTPEKKQSESSRGRKRKAENQNESSQGKSIGGRGHKISDYFEYQGGNGSSPVRGIPPAIRSPQNSHSHSTPSSSVRPNSPSPTALAFGDHPIVQPKQLSFKIIQTDLTMLKLAALESNKIQDLEKKEGRIDDLLRANCDLRRQIDEQQKLLEKYKERLNKCISMSKKLLIEKSTQEKLSSREKSMQDRLRLGHFTTVRHGASFTEQWTDGFAFQNLVKQQEWVNQQREDIERQRKLLAKRKPPTANNSQAPSTNSEPKQRKNKAVNGAENDPFVRPNLPQLLTLAEYHEQEEIFKLRLGHLKKEEAEIQAELERLERVRNLHIRELKRINNEDNSQFKDHPTLNERYLLLHLLGRGGFSEVYKAFDLYEQRYAAVKIHQLNKSWRDEKKENYHKHACREYRIHKELDHPRIVKLYDYFSLDTDTFCTVLEYCEGNDLDFYLKQHKLMSEKEARSIVMQIVNALRYLNEIKPPIIHYDLKPGNILLVDGTACGEIKITDFGLSKIMDDDSYGVDGMDLTSQGAGTYWYLPPECFVVGKEPPKISNKVDVWSVGVIFFQCLYGRKPFGHNQSQQDILQENTILKATEVQFPVKPVVSSEAKAFIRRCLAYRKEDRFDVHQLANDPYLLPHMRRSNSSGNLHMAGLTASPTPPSSSIITY

SEQ ID NO: 52453 - DNA, 2013 bp, Artificial Sequence
  derived and/or modified sequence
atggccgtcctgtttctatatgacctgaagaccacaggaaagaccccagagaaaaagcagtccgaaagtagtcgcgggcggaaacgcaaggcagaaaatcaaaatgaatcttctcaaggcaaaagcatcgggggcagagggcacaagatttcagactattttgaataccagggcggtaatggctcatctcctgttagaggcattccacctgctatccgcagcccacaaaacagccactcgcactccacacctagctcatccgtgcggcctaactctccctcccctaccgcactggcttttggggaccatcctatcgtgcagccaaagcagctgagctttaagatcattcagaccgacctgactatgctaaagctggctgcactagaatcaaataagattcaggatttggagaagaaggagggaagaattgacgacttactgcgtgcgaactgtgatctccgacgacagatagatgagcagcaaaaactcctggaaaagtacaaggaacgcctgaataaatgcatttcaatgagtaagaagctgctgatcgaaaaaagtacccaggaaaagctctcatcgcgcgaaaaaagtatgcaggatcggctgagactgggtcactttacaactgtgaggcatggagcgtcattcacagaacagtggacagacgggtttgccttccagaatctggtgaagcagcaagagtgggtgaaccaacaacgggaggacatcgaaaggcagaggaaactgcttgcaaagaggaagccgcctacggcaaacaacagtcaggccccatcgactaattctgaacctaagcaacgaaagaataaagccgtcaatggcgccgaaaacgacccgtttgtgagacccaacttaccacagctactgacgcttgccgagtaccacgaacaggaggagatctttaaactgcggttggggcatctgaagaaggaggaggccgaaatacaggctgaactggagagactggaaagagtgcgtaacctgcacattagggaactcaaacgcatcaacaacgaggacaacagtcaatttaaagaccatcctacactcaatgagcgctatctcctgctccacttactaggcaggggtggattttcagaagtgtacaaagcctttgacttgtatgagcagcggtatgctgccgtcaaaatccatcagctcaacaaatcatggagggacgagaagaaggagaattaccataaacacgcatgtcgggagtacagaatccataaggagctcgatcatcctcgaatcgtgaagctctatgattactttagcctcgacactgatacattttgtaccgtccttgagtactgcgagggtaatgatttggacttctatcttaaacagcacaagttgatgagtgagaaagaagctaggtccatcgtgatgcaaattgtcaatgctcttcgatatctgaatgaaatcaaacctcccatcatacattatgacctgaagcccggtaacatactactggtggatggcaccgcatgcggagagataaaaataacagacttcgggctgtcaaagatcatggacgatgattcatacggtgtagacgggatggaccttacgtcacagggtgcagggacttactggtaccttcctcccgagtgttttgtcgtgggaaaagaacctccaaagatttcaaataaggtggatgtttggtcagtgggcgtcatatttttccaatgcttgtatggccgtaaaccatttggacacaaccaatcgcagcaggatatcctgcaagaaaacacaatactgaaggccactgaggtacagttccccgtaaaaccagtggtgtctagtgaagccaaagctttcattagacgttgcctagcctacagaaaagaagaccggtttgacgtgcatcagctagccaatgacccgtatctccttccacatatgagacggtctaattctagcggcaacctacacatggccgggctgactgcttcaccaacacccccgtcttccagcatcattacatactag

SEQ ID NO: 52454 - DNA, 2013 bp, Artificial Sequence
  derived and/or modified sequence
atggctgtgctcttcctgtatgacctgaagaccaccgggaagaccccagagaagaagcagagcgagagcagccggggcaggaagaggaaggccgagaaccagaatgaaagcagccagggcaagagcattggaggccggggccacaagatcagtgactactttgagtaccagggcggcaatggcagcagccctgtgcggggcatccccccagccatccgcagcccccagaacagccacagccacagcacccccagcagctctgtgcggcccaacagccccagccccacagccctggccttcggggaccaccccatcgtgcagcccaagcagctgtccttcaagatcatccagacagacctgaccatgctgaagctggccgccctggagagcaacaagatccaggacctggagaagaaggagggcagaattgatgacctgctgcgggccaactgtgacctgcggcggcagattgatgagcagcagaagctgctggagaagtacaaggagcggctgaacaagtgcatctccatgagcaagaagctgctgattgagaagagcacccaggagaagctgagcagccgggagaagtccatgcaggaccggctgcggctgggccacttcaccaccgtgcgccacggggccagcttcacagagcagtggacagatggctttgccttccagaacctggtgaagcagcaggagtgggtgaaccagcagagagaagatattgagcggcagaggaagctgctggccaagaggaagcccccaacagccaacaacagccaggcccccagcaccaacagcgagcccaagcagaggaagaacaaggctgtgaatggagcagaaaatgacccctttgtgcggcccaacctgccccagctgctgaccctggccgagtaccacgagcaggaggagatcttcaagctgcggctgggccacctgaagaaggaggaggccgagatccaggccgagctggagcggctggagcgggtgaggaacctgcacatccgggagctgaagaggatcaacaatgaagacaacagccagttcaaggaccaccccaccctgaatgaaagatacctgctgctgcacctgctgggccggggcggcttcagcgaggtgtacaaggcctttgacctgtatgagcagagatatgctgctgtgaagatccaccagctgaacaagtcctggagagatgagaagaaggagaactaccacaagcacgcctgccgggagtaccgcatccacaaggagctggaccacccccgcatcgtgaagctgtatgactacttcagcctggacacagacaccttctgcaccgtgctggagtactgtgagggcaatgacctggacttctacctgaagcagcacaagctgatgtctgagaaggaggcccggagcatcgtgatgcagatcgtgaatgccctgcgctacctgaatgagatcaagccacccatcatccactatgacctgaagccaggcaacatcctgctggtggatggaacagcctgtggggagatcaagatcacagactttggcctgagcaagatcatggatgatgacagctatggagtggatggcatggacctgaccagccagggcgccggcacctactggtacctgcccccagagtgctttgtggtgggcaaggagccccccaagatcagcaacaaggtggatgtgtggagcgtgggcgtcatcttcttccagtgcctgtatggcaggaagcccttcggccacaaccagagccagcaggacatcctgcaggagaacaccatcctgaaggccacagaggtgcagtttcctgtgaagcctgtggtgtcctctgaggccaaggccttcatccgccgctgcctggcctacaggaaggaggacagatttgatgtgcaccagctggccaatgacccctacctgctgccccacatgagaagaagcaacagcagcggcaacctgcacatggccggcctgacagccagccccaccccacccagcagcagcatcatcacctactag

SEQ ID NO: 52455 - DNA, 2013 bp, Artificial Sequence
  derived and/or modified sequence
atggccgtgctgttcctgtacgacctgaagaccaccggcaagaccccagagaagaaacaatctgaatcctccaggggcagaaagcgaaaggctgagaatcagaacgagtcgtcccagggcaaaagtattgggggccggggccataaaatttcggactacttcgaataccaaggtggtaacggatcaagtcccgttcgcggaataccacccgcaattcgtagccctcagaactcgcacagccactctacccctagttccagtgtgcgaccgaattctcctagtcccaccgcactggccttcggcgatcatcccattgtgcagccgaaacaattgagttttaagatcattcagacagatcttactatgcttaagcttgccgccttggagtccaacaagatccaagaccttgaaaaaaaggaaggacgtatcgacgacttgcttagggctaactgcgatctgcgcaggcagatagacgaacaacaaaagctcttggagaagtacaaggaaagactgaataagtgcatctctatgtctaagaagctacttatcgagaagagtacgcaggagaaactctctagccgtgagaagagcatgcaggaccgccttaggctcggccactttaccactgtacgacacggcgcctcttttactgaacagtggaccgacggcttcgccttccagaacctggtgaagcagcaggagtgggtgaatcagcagagggaggatattgagagacagcgaaagctgttggctaagcgaaaaccaccaactgccaataactctcaggctccgagcaccaattctgaaccaaagcagagaaagaataaagccgtgaacggtgccgaaaacgacccatttgtgcggcccaatttgcctcagctgctgactctcgcagagtaccacgagcaagaggaaatctttaagttgaggctagggcacctcaaaaaggaagaggcagagatacaagccgagctcgagcgtctggaacgtgtgcgcaacctgcacattcgtgagttgaaacgcataaacaacgaagataactcccagttcaaggaccatcccaccctcaatgaaaggtacctcctgcttcatctgctcggtcgtgggggcttcagcgaggtgtataaggctttcgacctttacgaacagcggtacgcggccgttaagattcaccagttaaataagagctggagagacgagaaaaaagagaattatcacaagcatgcttgtagggaatatcgcattcataaggaattagaccatcctcggatagtcaaactctatgactacttcagcctggatactgacaccttctgtaccgtactggagtactgcgaagggaatgatcttgacttctatctgaaacaacataagctcatgtctgaaaaagaagcccggtcaatcgtcatgcagatcgtgaatgcgctgcgatatttaaacgagattaaaccacccattatccactatgacctcaagcctggtaacattctgctcgttgacggtacagcttgcggcgaaatcaagataactgattttggactatctaaaatcatggatgacgactcatacggggtggacgggatggaccttacttctcagggagccggtacatactggtatctgcctccagagtgtttcgtggtcggcaaagagccacctaagatttcaaacaaggtggatgtttggtctgtaggagtcatcttcttccagtgcctgtacggccgaaaacccttcggtcacaaccagtcacagcaggatatcctgcaggaaaacacaattctcaaagccacagaagtacagttccccgtgaagcccgtcgtaagcagtgaggcaaaggcctttatccgcaggtgcctcgcttacaggaaggaagacaggttcgatgttcaccagctggcaaacgacccttacctgctgccgcatatgaggcggtctaacagctccggaaatctccacatggccggcctgacagccagtcctacccctcccagtagtagcattataacttattag

SEQ ID NO: 52456 - DNA, 2156 bp, Artificial Sequence
  derived and/or modified sequence
attacaagcactttcaaaatgccaacatttccagaataaattatctgaaagtgttacttcccaacccccacccttcagcagttgttctaaatggctgttttattcttgtatgatttgaaaactactggcaagacaccggagaagaaacaatcggaatcatccaggggaagaaagagaaaagcagaaaaccagaatgaaagtagtcagggaaaaagtattgggggacgtggccacaaaattagcgactattttgaataccagggtggaaatggctcaagtccagtaagaggcatacctcctgcaatccgttctcctcaaaattcacattcacattccactccttcctcatctgttcgaccgaatagcccttctcctactgcattagcatttggggaccaccctattgtacaaccaaagcaattatcctttaaaattattcagactgatctcacaatgctgaaattagcagcattagaaagtaataaaatccaggacctggaaaagaaggagggacgtatagatgatttgctcagggctaactgtgatctcagacggcaaatagatgaacaacaaaaattacttgaaaaatacaaagaacgattaaataagtgcatatcaatgagcaagaaacttcttattgaaaagagtacacaagaaaagctgtcaagcagagagaagagtatgcaagatcgattacgcctcgggcactttacaacagttagacatggcgcttcatttactgaacaatggacagatggttttgcatttcagaatcttgtgaagcaacaagaatgggtgaatcagcaaagggaagatattgaaaggcaaaggaaacttctagccaaacgcaaacctcccacagctaataattctcaggcaccctctaccaattctgaaccaaaacaaaggaaaaacaaagcagtcaatggagcagagaatgatccctttgttagaccaaatttaccacaactgttgactttggcagaatatcatgaacaggaagaaattttcaaacttagactaggacatctcaaaaaggaagaggcagaaatccaggcagaacttgaacgtttggaaagagtcagaaatcttcacatacgtgagctgaaaagaataaacaatgaagataattcacagttcaaagatcacccaacattaaatgaaagatatttattacttcatctgcttggtagaggtggctttagtgaagtgtataaggcttttgacctttatgaacaaagatatgctgctgtgaagatacatcagcttaataaaagctggagagatgagaagaaagaaaactaccacaaacatgcctgcagagagtatagaatacacaaagaactggatcaccccagaatagttaaactctatgattatttctccttggatacagatacgttttgtacagtgttagaatactgtgaaggcaatgacttggatttctatctgaagcaacacaagttaatgtcagagaaagaagctcggtctattgtaatgcagattgtaaatgcactaagatatctcaatgagatcaaaccccctattatacattatgatcttaagccaggaaacatcctactggtagatggaacagcatgtggtgaaatcaaaatcactgattttggtctgtccaagattatggatgatgatagctatggtgtagatggaatggatctaacttcccagggggcaggcacttactggtatttacctcctgagtgttttgtagttggaaaagagccaccaaagatttccaacaaggttgatgtatggtcggttggagtcatcttctttcagtgtctttatggtagaaagccatttggtcacaatcaatctcaacaagacattcttcaagaaaatacaatattaaaagccacagaagtccagttccctgtaaaaccggttgtaagcagtgaagccaaggcatttataagacgctgtttggcatatcgaaaagaagatcgatttgatgtgcaccagctggcaaatgacccataccttctcccacacatgagaagatcaaattcttcaggaaacctacacatggctgggctgacagcatcccctacacccccttcttcaagcataattacttactgactttcctccaagattggcatgatatctttgaatttgcttccagatgcacactt

SEQ ID NO: 52457 - DNA, 2013 bp, Artificial Sequence
  derived and/or modified sequence
atggccgtcttatttttatatgatctaaaaacaaccggaaagacccctgagaagaagcaatccgaatcttctagagggcgaaaaagaaaggctgagaaccagaacgagtccagccagggtaaaagtatagggggtaggggacacaaaatttccgattacttcgagtaccagggtgggaacggctcatcccccgttcggggaatcccccctgccatccgctcacctcaaaactcccacagccattctacaccatcctcctcggtgaggcccaactccccaagtcccaccgctctcgctttcggcgaccaccccatagtgcagcctaaacagctctctttcaaaattattcagactgatctgactatgctgaagctggcagccctcgaatcaaataaaatccaggacctggagaaaaaagaaggcaggattgatgacctgcttcgggcaaattgcgatctgcgccgtcagattgacgaacagcagaagttgctagaaaagtacaaggaacgtttgaataagtgcattagtatgagtaagaaattgcttatcgagaaatcaacccaagaaaaactcagctccagggaaaagagcatgcaagacaggctgcgcctgggtcatttcaccactgtcagacatggggcaagctttaccgaacaatggaccgacgggttcgcctttcagaacctggtgaaacagcaagagtgggtgaatcaacagagggaagatatcgaacggcagcgtaagttattggcaaagcgtaaacctccgaccgctaacaattctcaggcaccatccactaattccgaacctaagcagcgcaagaataaagctgtcaacggagctgagaacgatccgtttgtaaggccaaatttgcctcagctgctcacgctcgctgagtatcatgaacaggaagagatattcaagctgcggttggggcacctgaagaaggaagaggccgaaattcaggcagaacttgagagacttgaacgcgtgcgtaacctccatatccgggagctgaaacggatcaataatgaggacaattcccaatttaaagaccatcccacattaaacgagcgttacctcctcctccacctgttgggtcggggagggttctccgaggtttataaagccttcgatctctatgagcagcggtatgctgccgtgaagattcaccaactgaacaagtcctggagggatgagaagaaggagaattaccacaagcatgcctgtagagagtatcgcattcataaggagctggaccatcccaggatcgttaaactgtatgattattttagcctcgacacagataccttttgcacagtgttagagtactgcgaggggaatgaccttgacttttacctaaagcagcataagctcatgtccgagaaagaggccagatccattgtcatgcaaatagtgaacgcgctaaggtaccttaatgagattaagcctccgatcattcactatgatcttaaacctggaaacatactgctggtggatgggactgcctgcggcgagatcaagatcacagattttgggctgtctaaaatcatggatgacgactcctatggcgttgatgggatggacctcacgtcccagggggctggtacatattggtacctacccccagaatgtttcgttgtcggtaaggaacctcctaagatatctaacaaggtggacgtgtggtccgtgggcgttatattctttcaatgtttgtacggccgaaaaccattcggacataaccaatcacagcaggacatactccaggagaacactatactcaaggccactgaggtgcagtttccagtgaagcccgtggtttctagtgaagctaaggcttttattcgcagatgtttggcttaccgcaaggaggataggtttgacgtccatcagctggcaaacgacccgtatttactcccacatatgaggcggagcaacagttccggtaatctgcatatggctgggcttacagcgtcacccacccccccttcaagtagcattatcacgtattag

SEQ ID NO: 52458 - DNA, 2013 bp, Artificial Sequence
  derived and/or modified sequence
atggccgtgctgttcctgtacgacctgaagaccaccggcaagacccccgagaagaagcagagcgagagcagcagaggcagaaagagaaaggccgagaaccagaacgagagcagccagggcaagagcatcggcggcagaggccacaagatcagcgactacttcgagtaccagggcggcaacggcagcagccccgtgagaggcatcccccccgccatcagaagcccccagaacagccacagccacagcacccccagcagcagcgtgagacccaacagccccagccccaccgccctggccttcggcgaccaccccatcgtgcagcccaagcagctgagcttcaagatcatccagaccgacctgaccatgctgaagctggccgccctggagagcaacaagatccaggacctggagaagaaggagggcagaatcgacgacctgctgagagccaactgcgacctgagaagacagatcgacgagcagcagaagctgctggagaagtacaaggagagactgaacaagtgcatcagcatgagcaagaagctgctgatcgagaagagcacccaggagaagctgagcagcagagagaagagcatgcaggacagactgagactgggccacttcaccaccgtgagacacggcgccagcttcaccgagcagtggaccgacggcttcgccttccagaacctggtgaagcagcaggagtgggtgaaccagcagagagaggacatcgagagacagagaaagctgctggccaagagaaagccccccaccgccaacaacagccaggcccccagcaccaacagcgagcccaagcagagaaagaacaaggccgtgaacggcgccgagaacgaccccttcgtgagacccaacctgccccagctgctgaccctggccgagtaccacgagcaggaggagatcttcaagctgagactgggccacctgaagaaggaggaggccgagatccaggccgagctggagagactggagagagtgagaaacctgcacatcagagagctgaagagaatcaacaacgaggacaacagccagttcaaggaccaccccaccctgaacgagagatacctgctgctgcacctgctgggcagaggcggcttcagcgaggtgtacaaggccttcgacctgtacgagcagagatacgccgccgtgaagatccaccagctgaacaagagctggagagacgagaagaaggagaactaccacaagcacgcctgcagagagtacagaatccacaaggagctggaccaccccagaatcgtgaagctgtacgactacttcagcctggacaccgacaccttctgcaccgtgctggagtactgcgagggcaacgacctggacttctacctgaagcagcacaagctgatgagcgagaaggaggccagaagcatcgtgatgcagatcgtgaacgccctgagatacctgaacgagatcaagccccccatcatccactacgacctgaagcccggcaacatcctgctggtggacggcaccgcctgcggcgagatcaagatcaccgacttcggcctgagcaagatcatggacgacgacagctacggcgtggacggcatggacctgaccagccagggcgccggcacctactggtacctgccccccgagtgcttcgtggtgggcaaggagccccccaagatcagcaacaaggtggacgtgtggagcgtgggcgtgatcttcttccagtgcctgtacggcagaaagcccttcggccacaaccagagccagcaggacatcctgcaggagaacaccatcctgaaggccaccgaggtgcagttccccgtgaagcccgtggtgagcagcgaggccaaggccttcatcagaagatgcctggcctacagaaaggaggacagattcgacgtgcaccagctggccaacgacccctacctgctgccccacatgagaagaagcaacagcagcggcaacctgcacatggccggcctgaccgccagccccaccccccccagcagcagcatcatcacctactag

SEQ ID NO: 52459 - protein, 65 aa, Artificial Sequence
  derived and/or modified sequence
MFYTHVLMSKRGPLAKIWLAAHWEKKLTKAHVFECNLEITIEKILSPKVKIALRTSGHLLLGVVR

SEQ ID NO: 52460 - protein, 521 aa, Artificial Sequence
  derived and/or modified sequence
MFYTHVLMSKRGPLAKIWLAAHWEKKLTKAHVFECNLEITIEKILSPKVKIALRTSGHLLLGVVRIYNRKAKYLLADCSEAFLKMKMTFCPGLVDLPKENFEASYNAITLPEEFHDFDTQNMNAIDVSEHFTQNQSRPEEITLRENFDNDLIFQAESFGEESEILRRHSFFDDNILLNSSGPLIEHSSGSLTGERSLFYDSGDGFGDEGAAGEMIDNLLQDDQNILLEDMHLNREISLPSEPPNSLAVEPDNSECICVPENEKMNETILLSTEEEGFTLDPIDISDIAEKRKGKKRRLLIDPIKELSSKVIHKQLTSFADTLMVLELAPPTQRLMMWKKRGGVHTLLSTAAQDLIHAELKMLFTKCFLSSGFKLGRKMIQKESVREEVGNQNIVETSMMQEPNYQQELSKPQTWKDVIGGSQHSSHEDTNKNINSEESLSNEENIETERWNGRILQMLNRLRVADQGQAAAAATAEALRQAGPEWCEPAGLRRASGLSPRDTAHPTPYSDPQPHGHVPARK

SEQ ID NO: 52461 - protein, 556 aa, Artificial Sequence
  derived and/or modified sequence
MFYTHVLMSKRGPLAKIWLAAHWEKKLTKAHVFECNLEITIEKILSPKVKIALRTSGHLLLGVVRIYNRKAKYLLADCSEAFLKMKMTFCPGLVDLPKENFEASYNAITLPEEFHDFDTQNMNAIDVSEHFTQNQSRPEEITLRENFDNDLIFQAESFGEESEILRRHSFFDDNILLNSSGPLIEHSSGSLTGERSLFYDSGDGFGDEGAAGEMIDNLLQDDQNILLEDMHLNREISLPSEPPNSLAVEPDNSECICVPENEKMNETILLSTEEEGFTLDPIDISDIAEKRKGKKRRLLIDPIKELSSKVIHKQLTSFADTLMVLELAPPTQRLMMWKKRGGVHTLLSTAAQDLIHAELKMLFTKCFLSSGFKLGRKMIQKESVREEVGNQNIVETSMMQEPNYQQELSKPQTWKDVIGGSQHSSHEDTNKNINSEQDIVEMVSLAAEESSLMNDLFAQEIEYSPVELESLSNEENIETERWNGRILQMLNRLRESNKMGMQSFSLMKLCRNSDRKQAAAKFYSFLVLKKQLAIELSQSAPYADIIATMGPMFYNI

SEQ ID NO: 52462 - DNA, 1566 bp, Artificial Sequence
  derived and/or modified sequence
atgttctacactcatgtacttatgtcaaagcggggcccgctcgccaagatttggctggccgcccactgggagaaaaagctgactaaggcccatgtttttgagtgcaatctggaaatcactattgaaaagatcttgtcaccaaaggttaagatcgccctgagaaccagcggccatctgttactgggtgtagtgcggatctacaatagaaaagctaagtacctgctggctgactgtagtgaagcttttctgaagatgaaaatgactttctgtcccggtctggtagacctcccaaaggaaaacttcgaagcaagttacaatgctatcaccttacctgaggaatttcacgattttgacacacagaatatgaatgccatcgacgtgagcgagcacttcacgcagaatcaaagcagacccgaggagatcacgctaagggaaaatttcgataacgaccttatctttcaagctgagtcttttggcgaggaaagcgagatcctgcggcgccactctttttttgatgacaacatactcctcaatagcagcgggcctctcattgaacactccagcggctccctaactggcgaacgaagtctattttatgacagcggcgacggctttggcgacgagggggccgccggagagatgattgataaccttctgcaagatgaccaaaatattctactagaggacatgcacctgaatcgggagatcagcctgccctctgaaccacccaatagcctggccgtggaacccgataattctgagtgcatctgtgtgccggagaatgagaagatgaatgaaacaatcctcctgtctacagaggaagaaggctttacgttggatcccattgacatctcagacatcgcagagaagaggaaaggcaagaaacggagactgctaatcgaccctatcaaggaactaagctcaaaggtgatccataagcagttgacctcctttgctgatacgctaatggtactggagctagcacctccgacccagagactcatgatgtggaagaaacggggaggagttcacaccctgctgtcaaccgccgcccaggatctgattcatgccgagctgaaaatgctcttcactaagtgcttcctttcctccggattcaaactgggtaggaagatgatccagaaagagtcagtgagggaggaggtcggcaatcaaaatattgtggagacatctatgatgcaagagccgaactatcagcaggagctctccaagccccagacctggaaggatgtcatcgggggcagccagcatagttcacacgaggatactaataagaatattaattcagaggagtccttatccaatgaggagaatatcgaaacagagcggtggaatggccgaattctgcagatgctgaatcgcctcagggtggctgaccaaggccaggcggcagcggcggccaccgctgaggccctgcgacaggcgggacccgagtggtgcgaaccggctggtttgaggcgagcctccgggctgtctcctagagacacggctcacccgactccctatagcgacccacaaccccatggccatgtcccggcccgaaaatag

SEQ ID NO: 52463 - DNA, 1566 bp, Artificial Sequence
  derived and/or modified sequence
atgttttatacgcatgtcctcatgagcaaacgcggccctctggcaaagatctggctcgccgcccactgggagaagaagcttacgaaagcccatgtgtttgagtgcaaccttgaaatcaccatagagaaaatactcagccccaaagtgaaaatcgctctgcgcacaagcggccatctccttcttggggtcgtgaggatctataatcgcaaagccaaataccttctggctgattgctctgaggcattcctcaagatgaaaatgactttttgcccggggttagtggacctccccaaagaaaactttgaagccagttacaacgcaatcactctccccgaagaattccacgactttgatacccaaaacatgaatgccattgatgtgtcagagcactttacccaaaatcaaagccgacctgaggagatcactttgcgagagaactttgacaatgacttgattttccaggccgaaagctttggtgaagagtcagaaatactgaggcgacattcattctttgatgataacattttgcttaattcctcaggaccactcatagagcatagctctggctctctgactggagagcggtcacttttctacgactccggagacggttttggtgatgagggggccgctggtgaaatgattgacaatcttctccaggacgatcagaatatcctcctggaagatatgcatctcaatagggagatttctctcccctccgagccaccaaatagcctggcagtcgagcccgacaattccgaatgcatttgtgttccagagaatgaaaagatgaatgagacaatacttctatccaccgaagaagagggtttcaccctggaccccatcgacattagtgatattgccgagaagcggaaagggaagaaacggcggctgcttattgatccaattaaggaactctcttcaaaggtcatacacaagcagcttaccagttttgcagacactttgatggtgctggaacttgcgcctcctacgcaacggctcatgatgtggaaaaagcggggtggggtgcatacgctgctcagcacagccgctcaagacttgatccatgccgagctaaaaatgctctttaccaaatgcttcctcagcagcggctttaaactaggcagaaagatgatacagaaagagtccgtcagggaagaggtcgggaaccagaatattgtcgagacgtctatgatgcaggagcccaattatcaacaagagctgtccaaacctcagacgtggaaggacgtgatcgggggaagtcagcatagctcccatgaggacactaacaaaaacataaacagtgaggagtccctatccaatgaggaaaacattgaaaccgagagatggaacggaaggatattgcaaatgctgaaccgactaagggtcgcagatcaggggcaagcagccgccgctgcgacagctgaagcactccgccaagcggggcctgaatggtgcgaacctgcgggactgagacgcgcctcaggccttagccccagggatacagcccatcctaccccttattctgacccacagccacatgggcatgtgccagcccgcaagtag

SEQ ID NO: 52464 - DNA, 1671 bp, Artificial Sequence
  derived and/or modified sequence
atgttttacacccacgtgctgatgagcaagcgcggcccactcgccaagatctggttggccgctcactgggagaagaaactcacaaaggcccacgtgttcgaatgtaacctggaaattactatagagaagatcctttcacctaaggttaagattgctctgcgcacaagcggacatctcctcctgggggtcgtgaggatctacaatcgtaaggccaaatacctgttggccgactgcagtgaggctttcctcaagatgaaaatgacattctgcccgggtttagttgatctgccaaaagaaaactttgaggctagctataacgcgatcactctgcccgaggagttccatgactttgatacccaaaatatgaatgccattgatgttagcgaacattttacacagaatcagtcaagaccggaagaaattactttgcgcgaaaacttcgataacgatttgatcttccaagccgaatccttcggcgaggaatccgagatccttagacggcactccttttttgatgataacatattgctaaactcgtccgggccattaattgagcactcatccggatctctgaccggagagcgctcactgttttacgattctggggacggttttggggacgagggcgctgccggggaaatgatagataatctgctgcaggatgaccaaaacatcctcctggaggatatgcaccttaaccgagagatttctctgccctctgaaccccctaacagcttagccgtggaacctgacaatagtgaatgtatctgtgtgccggaaaatgaaaaaatgaacgagactattcttctgtctaccgaggaggaggggtttactctcgacccaatcgatatcagcgatatcgcggagaagagaaagggcaaaaaacgacggttgctcatagatccaattaaggaactgagctccaaggtgatccacaagcaacttacttccttcgccgacacactcatggtgttagagctagccccgcctacgcagagactgatgatgtggaagaagcgaggaggcgtgcatactctgctgagtactgcagcgcaagacctgattcacgccgaacttaagatgttatttacaaagtgtttcctgtcttcgggattcaaactgggaaggaagatgatccagaaagagagcgttagagaggaagtggggaaccagaacatagtggagacaagcatgatgcaagaaccaaactatcagcaggagctgtccaagcctcagacctggaaggacgtgattggtggaagtcagcacagtagtcacgaggatactaataagaatattaattccgagcaagacatcgttgaaatggtgtctctggcggcagaggagtctagcttgatgaacgatctcttcgcacaggaaattgagtattcaccggtcgaattggaaagtcttagtaatgaagaaaatattgagaccgagcggtggaatgggcgaatcctgcagatgctgaatcggctccgggaaagcaacaagatgggaatgcagtctttttctctgatgaaattgtgtaggaactccgatcggaagcaggcagcagctaaattctactcatttcttgtgctgaaaaagcagctcgctatcgagctctcccagtctgcaccttatgccgacattattgccaccatgggtcctatgttctacaacatttag

SEQ ID NO: 52465 - DNA, 1566 bp, Artificial Sequence
  derived and/or modified sequence
atgttctacacccacgtgctgatgagcaagaggggccccctggccaagatctggctggccgcccactgggagaagaagctgaccaaggcccacgtgtttgagtgcaacctggagatcaccatcgagaagatcctgagccccaaggtgaagatcgccctgcggaccagcggccacctgctgctgggcgtggtgcgcatctacaacaggaaggccaagtacctgctggccgactgcagcgaggccttcctgaagatgaagatgaccttctgccccggcctggtggacctgcccaaggaaaattttgaggccagctacaatgccatcaccctgcctgaggagttccatgactttgacacccagaacatgaatgccattgatgtgtctgagcacttcacccagaaccagagcaggcctgaggagatcaccctgagagaaaattttgacaatgacctgatcttccaggccgagagctttggagaggagagcgagatcctgcggcggcacagcttctttgatgacaacatcctgctgaacagcagcggccccctcatcgagcacagcagcggcagcctgaccggggagaggagcctcttctatgattctggagatggctttggagatgaaggagctgctggggagatgattgacaacctgctgcaggatgaccagaacatcctgctggaggacatgcacctgaaccgggagatcagcctgcccagcgagccccccaacagcctggccgtggagccagacaacagcgagtgcatctgtgtgcctgaaaatgagaagatgaatgagaccatcctgctgagcacagaggaggagggcttcaccctggaccccatcgacatcagtgacattgctgagaagaggaagggcaagaagaggcggctgctgattgaccccatcaaggagctgagcagcaaggtgatccacaagcagctgaccagctttgctgacaccctgatggtgctggagctggccccacccacccagaggctgatgatgtggaagaagagaggaggagtgcacaccctgctgagcacagctgcccaggacctgattcatgctgagctgaagatgctgttcaccaagtgcttcctgagcagcggcttcaagctgggcaggaagatgatccagaaggagagcgtgcgggaggaggtgggcaaccagaacatcgtggagacctccatgatgcaggagcccaactaccagcaggagctgagcaagccccagacctggaaggatgtgattggaggcagccagcacagcagccatgaggacaccaacaagaacatcaacagcgaggagagcctgagcaatgaagaaaatattgaaacagagcgctggaatggccgcatcctgcagatgctgaaccggctgcgggtggccgaccagggccaggccgctgctgctgccacagctgaggccctgcggcaggccggccctgagtggtgtgagcctgctggcctgcggcgggccagcggcctgagcccccgggacacagcccaccccaccccctacagcgacccccagccccacggccacgtgcctgccaggaagtag

SEQ ID NO: 52466 - DNA, 1671 bp, Artificial Sequence
  derived and/or modified sequence
atgttctacacccacgtgctgatgagcaagaggggccccctggccaagatctggctggccgcccactgggagaagaagctgaccaaggcccacgtgtttgagtgcaacctggagatcaccatcgagaagatcctgagccccaaggtgaagatcgccctgcggaccagcggccacctgctgctgggcgtggtgcgcatctacaacaggaaggccaagtacctgctggccgactgcagcgaggccttcctgaagatgaagatgaccttctgccccggcctggtggacctgcccaaggaaaattttgaggccagctacaatgccatcaccctgcctgaggagttccatgactttgacacccagaacatgaatgccattgatgtgtctgagcacttcacccagaaccagagcaggcctgaggagatcaccctgagagaaaattttgacaatgacctgatcttccaggccgagagctttggagaggagagcgagatcctgcggcggcacagcttctttgatgacaacatcctgctgaacagcagcggccccctcatcgagcacagcagcggcagcctgaccggggagaggagcctcttctatgattctggagatggctttggagatgaaggagctgctggggagatgattgacaacctgctgcaggatgaccagaacatcctgctggaggacatgcacctgaaccgggagatcagcctgcccagcgagccccccaacagcctggccgtggagccagacaacagcgagtgcatctgtgtgcctgaaaatgagaagatgaatgagaccatcctgctgagcacagaggaggagggcttcaccctggaccccatcgacatcagtgacattgctgagaagaggaagggcaagaagaggcggctgctgattgaccccatcaaggagctgagcagcaaggtgatccacaagcagctgaccagctttgctgacaccctgatggtgctggagctggccccacccacccagaggctgatgatgtggaagaagagaggaggagtgcacaccctgctgagcacagctgcccaggacctgattcatgctgagctgaagatgctgttcaccaagtgcttcctgagcagcggcttcaagctgggcaggaagatgatccagaaggagagcgtgcgggaggaggtgggcaaccagaacatcgtggagacctccatgatgcaggagcccaactaccagcaggagctgagcaagccccagacctggaaggatgtgattggaggcagccagcacagcagccatgaggacaccaacaagaacatcaacagcgagcaggacatcgtggagatggtgtccctggccgctgaggagagcagcctgatgaatgacctgtttgcccaggagattgagtacagccctgtggagctggagagcctgagcaatgaagaaaatattgaaacagagcgctggaatggccgcatcctgcagatgctgaaccggctgcgggagagcaacaagatgggcatgcagagcttcagcctgatgaagctgtgcaggaacagcgacaggaagcaggccgccgccaagttctacagcttcctggtgctgaagaagcagctggccatcgagctgagccagagcgccccctatgctgacatcatcgccaccatgggccccatgttctacaacatctag

SEQ ID NO: 52467 - DNA, 1659 bp, Artificial Sequence
  derived and/or modified sequence
acctcagacgaggctttgaaagtagggcgcagcctgagaggccggccggaccccgagtgcttttgttaaatacaagtaaggaacacaggcaacatgttctacacacatgtgcttatgagtaaacgagggccattggccaaaatatggcttgcagctcactgggagaagaaactcacaaaggcccatgtatttgaatgtaatctagagataaccattgaaaaaattctttcacccaaggtgaaaatagcacttcgaacttcaggacaccttcttttgggagttgttcgaatctataacaggaaggcaaaatatcttttggcagattgcagtgaagcatttcttaaaatgaagatgacattttgcccaggactggttgaccttccaaaagagaattttgaagcatcttacaatgctatcacattgccagaagaatttcatgattttgacacccaaaatatgaatgctattgatgtttcagaacactttactcagaaccaaagcagaccagaagaaatcactcttagagaaaattttgacaatgatctaattttccaagctgagagctttggggaggaatctgaaattctcagaagacatagcttctttgatgacaacatattactgaattccagtggtcctttaattgaacatagttctggaagcctcactggagaacgatctctattctatgacagtggagatgggtttggagatgaaggagctgcaggagaaatgattgacaatctattgcaagatgatcagaatatcctgttagaagacatgcatttgaacagagaaatttccctgccttctgagcctcccaatagtttagcagttgaaccagataactcagagtgtatatgtgtacctgaaaatgaaaaaatgaatgaaacaatattattatcaactgaagaggaaggatttacccttgatccaattgatatttcagacattgctgagaaaaggaaaggcaaaaagaggagattgctcatagatcctatcaaggagctcagtagcaaagttatacataaacagcttacttcctttgcggacacactcatggttttggaacttgcacctcctacccaaagattgatgatgtggaagaagaggggaggagtgcatacacttctgtcaactgctgcccaggatttgattcatgctgaactgaaaatgttgtttacaaaatgctttctgtcctctggctttaaacttggaagaaaaatgatacagaaggagtcagtaagggaagaagtgggaaaccaaaatatagtagagacatccatgatgcaagagccaaattaccagcaagagttaagtaaaccccaaacttggaaggatgtgattggtggatctcagcatagctctcatgaggataccaataaaaatattaactctgaggagtcattgagcaatgaagaaaatattgagacagagagatggaatggaagaatacttcagatgttaaatcgtttacgggtcgctgatcagggccaggcggctgcagcagcgactgcagaggcgctgcgccaagccgggccggagtggtgcgagccggcggggctgcggagggccagtggactcagcccccgggataccgcccatcccaccccttactcggacccacagcctcatggccatgtccctgccaggaagtag

SEQ ID NO: 52468 - DNA, 1707 bp, Artificial Sequence
  derived and/or modified sequence
cggcgccaagaacccggccaagctgacttggcgactcctcgcagcccctgctctggcacgccacacctcagacgaggctttgaaatttgttaaatacaagtaaggaacacaggcaacatgttctacacacatgtgcttatgagtaaacgagggccattggccaaaatatggcttgcagctcactgggagaagaaactcacaaaggcccatgtatttgaatgtaatctagagataaccattgaaaaaattctttcacccaaggtgaaaatagcacttcgaacttcaggacaccttcttttgggagttgttcgaatctataacaggaaggcaaaatatcttttggcagattgcagtgaagcatttcttaaaatgaagatgacattttgcccaggactggttgaccttccaaaagagaattttgaagcatcttacaatgctatcacattgccagaagaatttcatgattttgacacccaaaatatgaatgctattgatgtttcagaacactttactcagaaccaaagcagaccagaagaaatcactcttagagaaaattttgacaatgatctaattttccaagctgagagctttggggaggaatctgaaattctcagaagacatagcttctttgatgacaacatattactgaattccagtggtcctttaattgaacatagttctggaagcctcactggagaacgatctctattctatgacagtggagatgggtttggagatgaaggagctgcaggagaaatgattgacaatctattgcaagatgatcagaatatcctgttagaagacatgcatttgaacagagaaatttccctgccttctgagcctcccaatagtttagcagttgaaccagataactcagagtgtatatgtgtacctgaaaatgaaaaaatgaatgaaacaatattattatcaactgaagaggaaggatttacccttgatccaattgatatttcagacattgctgagaaaaggaaaggcaaaaagaggagattgctcatagatcctatcaaggagctcagtagcaaagttatacataaacagcttacttcctttgcggacacactcatggttttggaacttgcacctcctacccaaagattgatgatgtggaagaagaggggaggagtgcatacacttctgtcaactgctgcccaggatttgattcatgctgaactgaaaatgttgtttacaaaatgctttctgtcctctggctttaaacttggaagaaaaatgatacagaaggagtcagtaagggaagaagtgggaaaccaaaatatagtagagacatccatgatgcaagagccaaattaccagcaagagttaagtaaaccccaaacttggaaggatgtgattggtggatctcagcatagctctcatgaggataccaataaaaatattaactctgaggagtcattgagcaatgaagaaaatattgagacagagagatggaatggaagaatacttcagatgttaaatcgtttacgggtcgctgatcagggccaggcggctgcagcagcgactgcagaggcgctgcgccaagccgggccggagtggtgcgagccggcggggctgcggagggccagtggactcagcccccgggataccgcccatcccaccccttactcggacccacagcctcatggccatgtccctgccaggaagtagacggacctctgctggatcacgcag

SEQ ID NO: 52469 - DNA, 1808 bp, Artificial Sequence
  derived and/or modified sequence
acctcagacgaggctttgaaagtagggcgcagcctgagaggccggccggaccccgagtgcttttgttaaatacaagtaaggaacacaggcaacatgttctacacacatgtgcttatgagtaaacgagggccattggccaaaatatggcttgcagctcactgggagaagaaactcacaaaggcccatgtatttgaatgtaatctagagataaccattgaaaaaattctttcacccaaggtgaaaatagcacttcgaacttcaggacaccttcttttgggagttgttcgaatctataacaggaaggcaaaatatcttttggcagattgcagtgaagcatttcttaaaatgaagatgacattttgcccaggactggttgaccttccaaaagagaattttgaagcatcttacaatgctatcacattgccagaagaatttcatgattttgacacccaaaatatgaatgctattgatgtttcagaacactttactcagaaccaaagcagaccagaagaaatcactcttagagaaaattttgacaatgatctaattttccaagctgagagctttggggaggaatctgaaattctcagaagacatagcttctttgatgacaacatattactgaattccagtggtcctttaattgaacatagttctggaagcctcactggagaacgatctctattctatgacagtggagatgggtttggagatgaaggagctgcaggagaaatgattgacaatctattgcaagatgatcagaatatcctgttagaagacatgcatttgaacagagaaatttccctgccttctgagcctcccaatagtttagcagttgaaccagataactcagagtgtatatgtgtacctgaaaatgaaaaaatgaatgaaacaatattattatcaactgaagaggaaggatttacccttgatccaattgatatttcagacattgctgagaaaaggaaaggcaaaaagaggagattgctcatagatcctatcaaggagctcagtagcaaagttatacataaacagcttacttcctttgcggacacactcatggttttggaacttgcacctcctacccaaagattgatgatgtggaagaagaggggaggagtgcatacacttctgtcaactgctgcccaggatttgattcatgctgaactgaaaatgttgtttacaaaatgctttctgtcctctggctttaaacttggaagaaaaatgatacagaaggagtcagtaagggaagaagtgggaaaccaaaatatagtagagacatccatgatgcaagagccaaattaccagcaagagttaagtaaaccccaaacttggaaggatgtgattggtggatctcagcatagctctcatgaggataccaataaaaatattaactctgagcaggatattgttgaaatggtgtctttagctgctgaggaatcatctttaatgaatgacttatttgcacaagaaattgaatatagtccagttgaattggagtcattgagcaatgaagaaaatattgagacagagagatggaatggaagaatacttcagatgttaaatcgtttacgggaatctaacaagatgggaatgcagtcctttagtctgatgaagctctgtagaaatagtgaccgaaaacaagcagctgccaaattttatagctttcttgtcctaaagaaacagctggctattgagctgagccagagtgctccctatgcagatattatagctacgatgggaccaatgttttataacatatgaaggaaacccagacatacagatttatggcatcactggaatttctg

SEQ ID NO: 52470 - DNA, 1566 bp, Artificial Sequence
  derived and/or modified sequence
atgttctacacccacgtgctgatgagcaagcggggccccctggccaagatctggttagctgcccattgggaaaagaaactgaccaaagcgcatgttttcgaatgtaatttggagatcacgattgagaagatactgtcccctaaggtcaaaattgccctgagaacatctggtcaccttttattaggtgtggtgcggatctacaatagaaaggcaaagtatctgcttgctgattgttccgaggcctttctgaagatgaaaatgacattttgcccaggtttagtggatctacccaaggagaatttcgaagcttcttacaacgctatcactcttccggaggagttccacgactttgacacgcagaacatgaatgctatcgatgtgagcgagcactttacacagaaccagtctagaccagaagaaattactctccgggagaatttcgacaatgacctgatctttcaggcagagagctttggggaagaaagcgaaatcttacgccgtcattcgttcttcgacgataatatactactaaactcatcgggcccgctgatcgagcacagttcaggttcgctgaccggtgaacggagcctgttctacgattctggcgatggttttggcgatgaaggtgctgcgggcgagatgatcgataacttgctgcaggatgaccagaacatcctgctggaggacatgcaccttaatagggaaatcagtctacccagcgagccacctaacagcctggctgtcgaaccagacaacagcgagtgcatatgcgttcctgaaaatgaaaagatgaacgaaacgattttgctctcaacggaggaggagggctttaccttggatccaatcgatatcagtgatattgccgagaaaaggaagggcaagaaaaggcgtctgttaattgatccgatcaaggagctctcaagtaaggtgatccacaagcagttgacctcatttgcggacacactgatggttctggagttggcccctcccacccagaggttgatgatgtggaaaaagcgcggcggggttcacacattgctcagcacggccgcacaggatcttattcacgcggagttgaagatgctgttcacaaaatgtttcctctcttctggtttcaaactgggtaggaaaatgattcaaaaggaaagtgtgcgggaggaggttggaaaccagaacatcgtggagacaagtatgatgcaggaaccaaactaccaacaggagctcagtaaacctcagacatggaaggacgtaataggagggtcccaacactcttcccatgaagacacaaacaaaaacatcaactccgaagaaagcctctccaacgaagagaacatcgaaaccgaaagatggaacggacgtattctccagatgctcaatcggctaagggtagccgatcagggccaggccgccgcggccgcaaccgccgaggcactgagacaggcgggacctgaatggtgcgagcctgcgggtctgcggagagcgtctgggctgtctcctcgagacaccgctcatccaacgccgtactcagatccacagccccatggtcatgtgcctgccagaaagtag

SEQ ID NO: 52471 - DNA, 1566 bp, Artificial Sequence
  derived and/or modified sequence
atgttctacacccacgtgctgatgagcaagcggggccccctggccaaaatttggctagccgcccattgggaaaaaaagctcaccaaagcacacgtgtttgagtgcaacttggaaataaccattgagaaaatccttagtccaaaggtaaaaatcgcactacgaacctccgggcacctgcttctcggggtagtgcgaatttataaccggaaggccaagtatttactggccgactgttcggaagcatttctcaaaatgaaaatgaccttctgtcctggcctggtggacctgcctaaggaaaattttgaagcctcatacaatgccattaccctccctgaggaattccacgacttcgacacacagaacatgaacgctatcgatgtgagcgaacactttacacaaaaccagagccggcctgaggaaatcacactccgcgagaactttgacaatgatctcatttttcaggccgagagctttggggaggagagcgaaatcctgcggcgccactcgtttttcgatgataacattctcctcaactcctcgggtcctctaatagagcacagttcggggtcattgacaggggaaagaagcttattttacgattctggagatggcttcggggacgagggggccgccggcgagatgatcgataatctgcttcaggacgatcagaacatcctcttggaagacatgcacctgaaccgcgagatctccttgccctctgaacctccgaactcgctggcagtcgaaccggacaacagcgagtgcatctgcgtgcccgaaaacgagaagatgaatgagaccattcttcttagcacggaagaagaaggcttcacacttgatcccatcgatatttcagatattgcggaaaagcggaagggtaagaaacgaagactcttaatcgatcctatcaaggagctgagctcaaaggtgattcacaaacagcttactagcttcgccgacaccctgatggtgctggaattagcgccacctacccagagactgatgatgtggaagaaacgcggaggagttcatactctgctctccaccgctgcacaagatctgatccacgcagagctcaagatgctgtttaccaaatgcttcctcagtagcggtttcaagttgggtcgtaagatgattcagaaagaatcagtgcgagaggaagtcgggaatcagaacatcgttgagaccagcatgatgcaggaacccaactaccagcaggaactgagtaagcctcaaacatggaaggacgtgatcggggggtctcagcattcgtcccacgaagacaccaacaaaaacattaactctgaggaatccctgagtaacgaagagaatatagaaacggagcgctggaacggccggatcctacagatgctaaatagactcagagtggctgaccaggggcaggccgcagcggcagccactgctgaggcactccgccaggccgggccagaatggtgcgagcccgccggccttagacgcgcctccggtctgtcaccgagagatactgcacatccgacgccctacagcgatccgcagccccacggccatgtgcccgccagaaaatag

SEQ ID NO: 52472 - DNA, 1671 bp, Artificial Sequence
  derived and/or modified sequence
atgttctacacccacgtgctgatgagcaagcggggccccctggccaagatttggctagcagctcattgggaaaaaaaactgaccaaggcgcatgtctttgagtgcaacctcgaaattactatcgaaaagatcttgtcgcccaaagtgaaaattgctctgagaacatccggtcacctgctgttgggagtggtaagaatctacaatcgcaaagcaaagtatctcctggccgactgttccgaggcattcctcaaaatgaagatgaccttctgccccggcctggtcgatctgccaaaggagaactttgaagcttcatacaacgcaatcacactccctgaggaatttcacgattttgatacacaaaacatgaatgcgatcgacgtctccgagcacttcacacaaaaccagtcaaggccggaggagatcaccttaagagaaaacttcgataacgacctgatatttcaggccgagtcctttggggaagagtctgaaatcttgcgaagacactcgtttttcgatgacaatattctgctgaatagcagcgggccactaatcgagcacagttccggatcgctcacgggcgagcggtcactgttttacgactcaggagatgggtttggagacgaaggcgccgccggggagatgattgataatctcttacaagatgaccagaacatcttgctcgaagatatgcacctcaacagagagatctccctgccctctgagcccccaaatagtctggcggtggagcctgataattccgaatgtatctgcgtgccagaaaatgagaagatgaatgagacgatcctgctgagtactgaggaggaaggattcaccttagacccaattgatattagcgacatcgcggagaagcggaaaggcaagaaacggaggctgctcattgaccctattaaggaactgtcctccaaagtgatccataaacagctcacctccttcgcagacaccctgatggttttggagctggcccctcccacccaacgacttatgatgtggaagaagcgaggcggagttcacactttactgtccacggctgctcaagacctcattcacgcagaattgaagatgctgttcacaaaatgcttcctttctagtgggtttaaactgggcaggaaaatgatccagaaagaaagcgtgagggaagaggtgggaaaccaaaatatcgttgagacctctatgatgcaggaacctaactaccaacaggaactctccaagccgcagacctggaaagacgtgattggcggatctcagcactcctctcacgaggacaccaacaagaacataaactccgagcaggatatagtggaaatggtgtcgcttgccgccgaggaaagcagtctaatgaacgacctcttcgcccaggaaatcgaatattcgcctgtggaacttgagtctctatcaaacgaagagaacatagagacagaaaggtggaatggccgcattctgcagatgctgaacaggctgagggaatcaaataaaatgggaatgcagtccttttcactgatgaaactgtgccgcaattcagaccgcaaacaggcggcagccaagttctacagcttcctcgtactgaagaaacaactcgccatcgagctgtcgcaatctgccccatacgctgacattattgccacaatggggcccatgttttataacatttag

SEQ ID NO: 52473 - DNA, 1566 bp, Artificial Sequence
  derived and/or modified sequence
atgttttatacacacgtcctcatgagcaagagaggtcccctagcgaaaatctggcttgcagcccactgggagaaaaaacttaccaaggcccatgtcttcgagtgtaatttggaaattactatcgagaagatcctcagtccgaaggtgaagatcgctctgagaacctcagggcacctcctcctgggagtggtgcgaatctacaatcgcaaggccaagtatctcctagccgactgtagcgaggcgtttctcaaaatgaagatgactttctgccccggactagttgaccttcctaaggagaacttcgaggccagctataacgccatcaccctccccgaagagtttcacgattttgacactcagaacatgaatgccattgacgtcagtgaacactttacacagaaccagtcccgcccagaggaaatcaccctccgggagaacttcgacaacgatctgatttttcaggcagaaagcttcggagaggagagcgaaatccttagacgccactccttcttcgacgacaacatccttctgaattcctctggaccactgatcgagcacagttccggatctctcactggagagaggtccctcttttacgacagcggcgatggattcggcgacgagggggcagcaggcgaaatgatcgacaaccttctccaggatgatcaaaatatcttactggaagatatgcatctgaatcgagagataagcttacccagcgagcctcctaattcactggccgtggagccggataactcagagtgtatctgtgtgcccgagaatgaaaaaatgaatgagacaattctattgagtaccgaggaagaaggctttaccctggaccccattgatatatccgatattgcagagaagagaaaaggtaagaaaagaagactgctgatagaccctattaaagagctatcctcaaaggtgatccataaacagttgacctcttttgctgatacccttatggtgctggagttagcccctcctacccagcgactcatgatgtggaagaagagaggaggcgtacacaccctccttagcacagccgctcaggacctcatccatgccgagctgaaaatgcttttcaccaaatgcttcctgtcttcaggattcaagctgggcagaaaaatgattcagaaggagtccgtccgggaagaggtgggaaaccagaacatcgtggagacctccatgatgcaggagcctaactaccaacaagaattaagtaagccgcaaacttggaaagacgttattggcggtagtcaacactcttctcatgaagacaccaacaagaatatcaacagtgaagagtcactgagcaacgaggagaatatcgaaacagaaaggtggaacggacgcatactacaaatgttgaataggctgagagtcgccgaccagggacaggccgctgcggcagcaacagctgaggctctgcgccaggctggcccagaatggtgcgagccagcaggacttcgtcgcgctagcggactatcgccgagggacacggcccatcccacgccatactctgatcctcaacctcacggacacgtacctgccaggaaatag

SEQ ID NO: 52474 - DNA, 1566 bp, Artificial Sequence
  derived and/or modified sequence
atgttttacacgcatgtgctgatgtctaaacgcggtccgctcgccaagatatggctggccgctcactgggagaagaaattgacaaaagctcacgtgttcgaatgcaaccttgaaattaccatagaaaagatactgagcccaaaggttaaaatagctttacgcacctccggccatctgcttctgggcgtggttcgaatttacaatagaaaggccaagtacctactagctgattgttcagaagcttttcttaaaatgaaaatgacattttgcccgggactggtagacctcccaaaggaaaatttcgaggccagctacaatgcgatcacccttcccgaggagtttcacgacttcgatactcagaatatgaacgccattgacgtgtccgaacactttacccaaaatcagtcaaggccagaggagatcactctgagggagaatttcgacaacgatttgatttttcaagcagaatcttttggagaagaatctgagattctgcggagacatagcttcttcgacgataatatcctgctcaactcttccggcccactgatcgaacatagtagcggctccctgaccggagaacgtagcctattctacgattcaggcgacggtttcggcgatgagggagccgctggagaaatgattgacaatctgctccaggacgatcagaacatcctcctcgaggacatgcatcttaaccgtgaaatctcattgccatccgagccgcctaacagcctggctgttgagcccgataattctgagtgcatttgtgtccccgaaaacgaaaaaatgaacgaaactatacttctgagtaccgaggaggagggatttaccttagaccccatagatatatctgacattgccgagaaacggaaggggaagaagaggcggctattaattgatcccatcaaggaattgtcctccaaagtgattcacaagcagttgacttcctttgccgacacactcatggtactcgagctagcgccacccacgcagaggctgatgatgtggaagaagagaggcggtgttcatactctgctgagtacagcagcgcaggacctgatccacgccgagcttaagatgctgttcacaaagtgcttcctcagctcgggcttcaaacttgggaggaaaatgatacagaaggagtcagtgcgggaggaagttggaaatcaaaatatagttgagacctccatgatgcaagagcctaattatcagcaggagctgagcaaaccgcagacatggaaagacgtaattgggggtagtcagcattccagccacgaggacaccaacaaaaatatcaactccgaggaatcgttgtctaatgaagagaatatagaaacagagcggtggaatggaaggatccttcagatgctgaataggctgcgggtggctgaccagggccaggcagcagctgccgcaaccgccgaggcactcagacaggccggacctgagtggtgtgagcctgccggacttaggcgcgcaagcggtctttcaccacgagacacagctcaccctaccccatattccgatcctcagccccatgggcatgtgcctgccaggaagtag

SEQ ID NO: 52475 - DNA, 1671 bp, Artificial Sequence
  derived and/or modified sequence
atgttttacactcacgtacttatgtctaaaagaggccctttggcaaagatttggctggcagcgcattgggagaagaagctcacgaaggctcacgtgttcgagtgtaatctcgagatcacaattgagaaaattctgtctcctaaggtgaaaatcgccctgaggacatccgggcacctgctactgggggtggtccgcatttacaaccgcaaggccaagtatttgttggccgactgcagcgaagcattcctcaagatgaagatgacgttctgtccaggcctggtggacttgccaaaggaaaactttgaggctagctacaacgctatcactctcccagaagagttccatgatttcgatactcagaacatgaacgcaattgacgtgagtgagcacttcacacagaaccagagcaggcctgaggagattactttaagagagaacttcgacaacgatctgatcttccaagcggagagctttggcgaggaaagtgaaatcttaaggaggcactccttttttgatgacaacatcctgctgaactcatctggccctctgattgaacacagttccggctctctgaccggtgagcgttctctgttttatgattccggcgatgggtttggtgacgagggggctgccggagagatgatcgataatcttctgcaggacgaccaaaatattctgctcgaggacatgcacctgaaccgagagatttccttgccctcagagccgcctaactcgctggcagtggagcccgacaattcggagtgcatatgcgttccagaaaacgagaagatgaatgagacaattctgctgtccacggaggaagaaggattcacgctggacccaattgatatctctgacattgccgagaagcgcaaagggaaaaagcggcgactccttattgatcccatcaaggagttgtcttcaaaggtgattcataaacagctgacgtcctttgcagacacactgatggtactcgagctggccccacccacacagcggctcatgatgtggaagaaaagaggtggagtccataccctcctgtcaacggctgcacaggatctgatccacgctgagttaaagatgctcttcactaagtgtttcctctcctcaggctttaaacttggtcgcaaaatgatacagaaagagtccgtcagagaagaggtaggaaatcaaaacatagtagaaacttccatgatgcaggagcccaactaccaacaggaacttagtaagcctcaaacctggaaggatgtgatcgggggatcacagcattcctcccacgaggatacaaataagaatatcaactctgagcaggatatagttgaaatggtctctctggctgccgaggagagctctctgatgaacgacctcttcgcgcaggaaattgaatacagccctgttgaactggaatcactctccaacgaggagaacatagagacggaacgttggaacgggaggatcctacagatgctgaatcgtctcagagagtcaaacaaaatggggatgcagtccttttcactgatgaaattatgcagaaactccgacagaaagcaagccgctgccaaattctactctttcctcgtgctcaaaaaacaactggcaatcgagctctctcaatctgccccatacgctgacatcatcgctacaatgggaccaatgttttacaatatttag

SEQ ID NO: 52476 - DNA, 1566 bp, Artificial Sequence
  derived and/or modified sequence
atgttctacacccacgtgctgatgagcaagagaggccccctggccaagatctggctggccgcccactgggagaagaagctgaccaaggcccacgtgttcgagtgcaacctggagatcaccatcgagaagatcctgagccccaaggtgaagatcgccctgagaaccagcggccacctgctgctgggcgtggtgagaatctacaacagaaaggccaagtacctgctggccgactgcagcgaggccttcctgaagatgaagatgaccttctgccccggcctggtggacctgcccaaggagaacttcgaggccagctacaacgccatcaccctgcccgaggagttccacgacttcgacacccagaacatgaacgccatcgacgtgagcgagcacttcacccagaaccagagcagacccgaggagatcaccctgagagagaacttcgacaacgacctgatcttccaggccgagagcttcggcgaggagagcgagatcctgagaagacacagcttcttcgacgacaacatcctgctgaacagcagcggccccctgatcgagcacagcagcggcagcctgaccggcgagagaagcctgttctacgacagcggcgacggcttcggcgacgagggcgccgccggcgagatgatcgacaacctgctgcaggacgaccagaacatcctgctggaggacatgcacctgaacagagagatcagcctgcccagcgagccccccaacagcctggccgtggagcccgacaacagcgagtgcatctgcgtgcccgagaacgagaagatgaacgagaccatcctgctgagcaccgaggaggagggcttcaccctggaccccatcgacatcagcgacatcgccgagaagagaaagggcaagaagagaagactgctgatcgaccccatcaaggagctgagcagcaaggtgatccacaagcagctgaccagcttcgccgacaccctgatggtgctggagctggccccccccacccagagactgatgatgtggaagaagagaggcggcgtgcacaccctgctgagcaccgccgcccaggacctgatccacgccgagctgaagatgctgttcaccaagtgcttcctgagcagcggcttcaagctgggcagaaagatgatccagaaggagagcgtgagagaggaggtgggcaaccagaacatcgtggagaccagcatgatgcaggagcccaactaccagcaggagctgagcaagccccagacctggaaggacgtgatcggcggcagccagcacagcagccacgaggacaccaacaagaacatcaacagcgaggagagcctgagcaacgaggagaacatcgagaccgagagatggaacggcagaatcctgcagatgctgaacagactgagagtggccgaccagggccaggccgccgccgccgccaccgccgaggccctgagacaggccggccccgagtggtgcgagcccgccggcctgagaagagccagcggcctgagccccagagacaccgcccaccccaccccctacagcgacccccagccccacggccacgtgcccgccagaaagtag

SEQ ID NO: 52477 - DNA, 1671 bp, Artificial Sequence
  derived and/or modified sequence
atgttctacacccacgtgctgatgagcaagagaggccccctggccaagatctggctggccgcccactgggagaagaagctgaccaaggcccacgtgttcgagtgcaacctggagatcaccatcgagaagatcctgagccccaaggtgaagatcgccctgagaaccagcggccacctgctgctgggcgtggtgagaatctacaacagaaaggccaagtacctgctggccgactgcagcgaggccttcctgaagatgaagatgaccttctgccccggcctggtggacctgcccaaggagaacttcgaggccagctacaacgccatcaccctgcccgaggagttccacgacttcgacacccagaacatgaacgccatcgacgtgagcgagcacttcacccagaaccagagcagacccgaggagatcaccctgagagagaacttcgacaacgacctgatcttccaggccgagagcttcggcgaggagagcgagatcctgagaagacacagcttcttcgacgacaacatcctgctgaacagcagcggccccctgatcgagcacagcagcggcagcctgaccggcgagagaagcctgttctacgacagcggcgacggcttcggcgacgagggcgccgccggcgagatgatcgacaacctgctgcaggacgaccagaacatcctgctggaggacatgcacctgaacagagagatcagcctgcccagcgagccccccaacagcctggccgtggagcccgacaacagcgagtgcatctgcgtgcccgagaacgagaagatgaacgagaccatcctgctgagcaccgaggaggagggcttcaccctggaccccatcgacatcagcgacatcgccgagaagagaaagggcaagaagagaagactgctgatcgaccccatcaaggagctgagcagcaaggtgatccacaagcagctgaccagcttcgccgacaccctgatggtgctggagctggccccccccacccagagactgatgatgtggaagaagagaggcggcgtgcacaccctgctgagcaccgccgcccaggacctgatccacgccgagctgaagatgctgttcaccaagtgcttcctgagcagcggcttcaagctgggcagaaagatgatccagaaggagagcgtgagagaggaggtgggcaaccagaacatcgtggagaccagcatgatgcaggagcccaactaccagcaggagctgagcaagccccagacctggaaggacgtgatcggcggcagccagcacagcagccacgaggacaccaacaagaacatcaacagcgagcaggacatcgtggagatggtgagcctggccgccgaggagagcagcctgatgaacgacctgttcgcccaggagatcgagtacagccccgtggagctggagagcctgagcaacgaggagaacatcgagaccgagagatggaacggcagaatcctgcagatgctgaacagactgagagagagcaacaagatgggcatgcagagcttcagcctgatgaagctgtgcagaaacagcgacagaaagcaggccgccgccaagttctacagcttcctggtgctgaagaagcagctggccatcgagctgagccagagcgccccctacgccgacatcatcgccaccatgggccccatgttctacaacatctag

SEQ ID NO: 52478 - protein, 321 aa, Artificial Sequence
  derived and/or modified sequence
MERFVRVPYGLYQGYGSTVPLGQPGLSGHKQPDWRQNMGPPTFLARPGLLVPANAPDYCIDPYKRAQLKAILSQMNPSLSPRLCKPNTKEVGVQVSPRVDKAVQCSLGPRTLSSCSPWDGRDPQEPLPACGVTSPATGRRGLIRLRRDGDEAESKALPGPAEASQPQPPSRRSGADRQEEPGQLEESGEKDAPCPQETKSKQVPGDAASEPLRRPNFQFLEPKYGYFHCKDCKTRWESAYVWCISGTNKVYFKQLCCKCQKSFNPYRVEAIQCQTCSKSHCSCPQKKRHIDLRRPHRQELCGRCKDKRFSCGNIYSFKYVM

SEQ ID NO: 52479 - protein, 25 aa, Artificial Sequence
  derived and/or modified sequence
MERFVRVPYGLYQGYGSTVPLGQPG

SEQ ID NO: 52480 - DNA, 966 bp, Artificial Sequence
  derived and/or modified sequence
atggagagattcgtgagagtgccctacggcctgtaccagggctacggcagcaccgtgcccctgggccagcccggcctgagcggccacaagcagcccgactggagacagaacatgggcccccccaccttcctggccagacccggcctgctggtgcccgccaacgcccccgactactgcatcgacccctacaagagagcccagctgaaggccatcctgagccagatgaaccccagcctgagccccagactgtgcaagcccaacaccaaggaggtgggcgtgcaggtgagccccagagtggacaaggccgtgcagtgcagcctgggccccagaaccctgagcagctgcagcccctgggacggcagagacccccaggagcccctgcccgcctgcggcgtgaccagccccgccaccggcagaagaggcctgatcagactgagaagagacggcgacgaggccgagagcaaggccctgcccggccccgccgaggccagccagccccagccccccagcagaagaagcggcgccgacagacaggaggagcccggccagctggaggagagcggcgagaaggacgccccctgcccccaggagaccaagagcaagcaggtgcccggcgacgccgccagcgagcccctgagaagacccaacttccagttcctggagcccaagtacggctacttccactgcaaggactgcaagaccagatgggagagcgcctacgtgtggtgcatcagcggcaccaacaaggtgtacttcaagcagctgtgctgcaagtgccagaagagcttcaacccctacagagtggaggccatccagtgccagacctgcagcaagagccactgcagctgcccccagaagaagagacacatcgacctgagaagaccccacagacaggagctgtgcggcagatgcaaggacaagagattcagctgcggcaacatctacagcttcaagtacgtgatgtag

SEQ ID NO: 52481 - DNA, 966 bp, Artificial Sequence
  derived and/or modified sequence
atggagagatttgtgcgggtgccttacgggctgtatcagggctatgggagcacagtccccttgggacagcccggcctttccggacacaaacagcctgattggcgccaaaatatgggacctccaacctttctggcgagacccggcctgctcgtgcccgctaacgcgcctgattactgcattgatccctataaacgcgcccagctcaaagctatcttgtcacagatgaatcccagcctgtccccacgcctgtgcaagccgaacaccaaggaggttggggtccaagtgtcaccacgagtggataaggccgtccagtgctccctcggaccacgaacgctgtctagttgctcaccttgggacggccgcgatcctcaagagccccttccggcgtgcggggtaacatctccggccactggccgacgcggactcattcgtctgaggagggacggcgacgaggcggaaagcaaggcactgcccggccccgcggaggcctctcagcctcagcccccttcacggcgctccggcgcagacagacaggaagagcctggtcagctcgaagagtcaggtgagaaagacgctccatgcccacaggagacaaagtccaagcaagtccccggagacgccgcctctgaaccactcaggcgccccaacttccaattcttagagccaaaatatggctacttccactgtaaggattgcaagacgcggtgggagtctgcttatgtctggtgtatttctgggactaacaaggtgtatttcaaacagctctgctgtaagtgtcaaaaatcttttaatccatatcgggttgaagccatccagtgtcagacttgctcaaaatcccactgtagctgcccccagaagaagagacacatcgatctgagaagaccacaccgacaggagctctgtgggcgctgtaaagacaagcgattcagttgtggaaacatctacagttttaaatatgtcatgtag

SEQ ID NO: 52482 - DNA, 966 bp, Artificial Sequence
  derived and/or modified sequence
atggagagatttgtgcgggtgccctacggcctgtaccagggctacggcagcacagtgcccctgggccagcccggcctgagcggccacaagcagcctgactggaggcagaacatgggcccccccaccttcctggcccggcccggcctgctggtgcctgccaatgccccagactactgcatcgacccctacaagagggcccagctgaaggccatcctgagccagatgaaccccagcctgagcccccggctgtgcaagcccaacaccaaggaggtgggcgtgcaggtgagcccccgggtggacaaggctgtgcagtgcagcctgggccccaggaccctgagcagctgcagcccctgggatggccgggacccccaggagcccctgcctgcctgtggggtgaccagccctgccactggaagaagaggcctcatccggctgcggagagatggagatgaggccgagagcaaggccctgcccggccctgctgaggccagccagccccagccccccagcagaagaagtggagctgaccggcaggaggagcccggccagctggaggagagcggggagaaggatgccccctgcccccaggagaccaagagcaagcaggtgcctggagatgctgccagcgagcccctgcggcggcccaacttccagttcctggagcccaagtatggctacttccactgcaaggactgcaagacccgctgggagagcgcctacgtgtggtgcatcagcggcaccaacaaggtgtacttcaagcagctgtgctgcaagtgccagaagagcttcaacccctacagagtggaggccatccagtgccagacctgcagcaagagccactgcagctgcccccagaagaagaggcacatcgacctgcggcggccccaccggcaggagctgtgtggccgctgcaaggacaagcgcttcagctgtggcaacatctacagcttcaagtatgtgatgtag

SEQ ID NO: 52483 - DNA, 966 bp, Artificial Sequence
  derived and/or modified sequence
atggagcggttcgtgcgggtgccctacggcctgtaccagggctacggcagtaccgtccctctaggacagcccggtctgagtgggcataagcagccggactggagacagaacatgggccccccaacatttctcgctcgccctggtttattggtgccggccaatgctccagattactgcatagacccttataaacgcgcccagctaaaggctattttatcacagatgaacccaagcctatccccacggctttgtaagcctaatacaaaagaggtcggggtgcaagtgtccccccgggtggacaaggcagtccaatgctctctgggaccaagaacgttatcgtcctgcagtccttgggacgggcgggatccccaagaacccctgcccgcctgtggtgttacctcccctgctactggccgacgcggtcttattaggcttcgaagggacggtgatgaagctgaatccaaggcgcttcctggcccggcagaagcatcccaaccccagcccccatcgcgacgcagcggagccgaccgccaggaagaaccgggacagttggaagagagtggggaaaaggatgccccctgccctcaggagaccaaatcaaaacaggtcccaggcgacgcagcaagcgagccactgcgtagaccgaacttccagttcctggagcccaagtacggctacttccattgcaaggattgcaagacaagatgggaatctgcttacgtgtggtgcatttccgggactaacaaagtgtacttcaagcagttgtgctgcaagtgtcaaaagagtttcaacccctacagagtcgaggccatccagtgtcaaacttgctcaaaatcacactgttcctgccctcagaaaaaaaggcatatcgatctccgccgtccacacaggcaggagctgtgcggtcggtgtaaagataagcgcttctcctgtggcaatatatactcttttaaatatgtaatgtag

SEQ ID NO: 52484 - DNA, 966 bp, Artificial Sequence
  derived and/or modified sequence
atggagaggtttgtgcgggtgccgtatggcttgtaccaaggatacggcagtacagtgcctctcggacagccaggcctgtcgggtcataaacagccggattggcgacagaacatggggccacccaccttcttagctaggccaggcctgctcgtcccggcaaatgctcctgactactgcatcgatccctacaaacgtgctcagcttaaagctatattaagtcagatgaacccaagcctgagtcccagactttgcaaacccaacacaaaagaagtcggagtccaggtgtcgcccagggtcgataaggccgttcagtgctccctgggcccaaggacattaagctcatgttctccttgggatggcagggacccccaggaaccactccccgcatgtggagtgacttcacctgccacaggaaggagaggtttaatccggcttagacgggacggcgacgaggcggaatcaaaggcactcccaggccctgctgaagcgtcccaaccgcagccaccatcacggaggagcggtgcggaccgccaggaagagcccggacaactagaagaatcaggcgagaaggacgcaccctgcccccaggaaaccaagtcaaaacaggttcccggagatgccgcatcggagcccctgagaaggcccaacttccaattcttggaaccaaaatacgggtacttccactgtaaagactgtaagactcggtgggaatcagcctacgtgtggtgcatcagtgggactaataaggtctatttcaaacagttatgttgtaaatgtcaaaagtcttttaacccttatagagtcgaagccattcagtgtcagacttgttcaaagagccactgttcatgtccacagaaaaagaggcatattgatctgagaagaccacacaggcaggagctgtgcggaagatgtaaggataagcggttctcctgcggcaacatatatagttttaagtatgtgatgtag

SEQ ID NO: 52485 - DNA, 1174 bp, Artificial Sequence
  derived and/or modified sequence
ttagactgcgcctgagcacctgagagcggatggagcgctttgtccgtgttccctatggcttgtaccagggttatgggagcacagtgcctttgggccagcctggactctcagggcacaaacagcccgactggaggcaaaatatgggtcctcccacttttctggccaggccagggctgctggtgcccgcgaacgcccctgactactgcattgacccttacaagagggcgcagcttaaggccattctctcccagatgaaccccagcctgagcccgcggctgtgcaagcccaacaccaaggaggtgggcgtgcaggtgagcccgcgggtggacaaggctgtgcagtgctctctggggcctcgcaccctcagcagctgctccccctgggacggcagagacccccaggagcccctgccagcctgtggggtcacttcgcccgccaccggccgcaggggcttgatccgcctgcggagagatggggacgaagcggagagcaaggcgctcccgggccctgcggaggccagccagccgcagccaccatcacggaggtcaggagctgacaggcaggaggagcccgggcagctggaggaatcgggggagaaagacgccccgtgccctcaggagacgaagagcaagcaggtgcctggagacgccgcctccgagccgctccggaggcccaacttccagtttttggaaccaaaatatggctatttccactgtaaagattgtaagaccaggtgggagagtgcttacgtgtggtgcatttctggaacgaacaaggtttatttcaaacaactctgttgtaaatgccaaaagagttttaacccttatcgagtagaagcaatccaatgtcagacctgctcaaagtctcattgttcctgtcctcaaaagaagagacacattgatctaaggaggcctcatcgacaggaactgtgtggtcgctgcaaagacaagagattctcctgtggcaatatttacagctttaaatatgtgatgtgacttgtacagtgtgacttgtaatggacccctgagctcttcttgtaacttactgtgctgtcttccttttttgcaacttggctctgacctggcatcggaaaatggctaggcttttgtactttttgtagattgtgtaacaattgtacaatgtgaatagaataaaataaatgcatgtgaactag

SEQ ID NO: 52486 - protein, 196 aa, Artificial Sequence
  derived and/or modified sequence
MAQRAFPNPYADYNKSLAEGYFDAAGRLTPEFSQRLTNKIRELLQQMERGLKSADPRDGTGYTGWAGIAVLYLHLYDVFGDPAYLQLAHGYVKQSLNCLTKRSITFLCGDAGPLAVAAVLYHKMNNEKQAEDCITRLIHLNKIDPHAPNEMLYGRIGYIYALLFVNKNFGVEKIPQSHIQQICETILTSGENLARK

SEQ ID NO: 52487 - DNA, 1200 bp, Artificial Sequence
  derived and/or modified sequence
atggcgcagcgggccttcccaaatccttacgctgattacaataaaagtcttgcagaaggctatttcgatgccgcggggaggctgacacctgaattctcccaacgactgaccaacaaaatccgagagctgctgcaacaaatggagagaggtctgaagagcgccgatccccgcgatggaactgggtacacaggctgggcagggattgccgtgctgtacctacatctctacgatgtctttggagacccggcatatctccagttggcacatgggtatgtgaagcagtcacttaactgtcttacaaaaagaagcatcacgttcctctgcggtgacgcagggcctctagccgttgcggcagtgctgtatcataaaatgaataacgaaaagcaggcggaagactgcatcactcggcttattcacctgaacaagattgaccctcacgccccaaacgagatgctgtacggtaggatcggatacatctacgcgctgctatttgtgaataagaacttcggcgtcgagaagatcccgcagtcacatattcaacagatctgtgaaacgattctgacctcaggggagaatttagcacgcaaaagaaacttcactgctaagtccccactaatgtatgaatggtaccaagaatattatgtgggcgccgctcatggcctcgcgggaatctattattacctgatgcaaccctccctgcaggtttcccagggcaaactccactctctcgtgaaaccgtctgtcgactatgtgtgccagctcaagttccctagtggcaactacccaccatgtatcggggataacagggatctgttagtgcattggtgtcatggcgcgcccggcgtcatctatatgctcattcaggcctataaagtattcagggaggaaaaatatctgtgcgacgcttatcagtgtgcggacgtgatctggcaatatggactgctgaagaaaggatatggcctctgccatgggtctgctggcaacgcttacgcgtttctgacattgtataacctaacccaggacatgaaatacctctaccgggcatgcaagttcgcagaatggtgcctcgaatatggcgaacacggctgtcggaccccagacactcctttttccctgtttgaaggaatggccggcacgatttattttttggccgatctccttgtccctaccaaagctcgattccccgcgttcgaactgtag

SEQ ID NO: 52488 - DNA, 1200 bp, Artificial Sequence
  derived and/or modified sequence
atggctcaacgcgccttcccaaatccctatgccgactacaacaagtctctggctgagggttactttgatgccgccgggaggcttaccccggagtttagccagaggctgactaataagatccgggaacttctgcagcagatggagcgcggcctcaaatctgctgacccgcgggacgggacaggttatactggctgggctggcatcgcggtcttgtatctccacctttacgatgtctttggggatccagcctacctgcagctcgcccatggttatgtcaagcaatccctgaattgtcttactaagagatcaattacctttctatgtggggatgctggaccacttgcggtggccgccgttctgtaccacaaaatgaacaatgagaaacaggcagaagattgcattacgcggcttattcacctgaataagattgacccacacgcccctaatgagatgctgtacgggaggattggttacatttacgctttgctcttcgtgaacaagaacttcggcgtcgaaaaaattccccaatcccacatccagcagatttgtgagactattctgacaagtggagagaacctggctagaaaaaggaatttcaccgctaagtctcccctgatgtacgagtggtatcaagaatactacgtgggggcggctcacgggctcgctggcatctattactatctgatgcagccaagcctgcaagttagccaagggaaattgcacagcttggtcaagcctagtgttgactacgtgtgtcaacttaagtttccttccgggaattaccccccttgtataggcgataatagggacttgctggtgcactggtgtcacggagccccaggcgtgatctacatgcttatccaagcgtacaaagtcttccgggaggaaaaatacctgtgtgacgcctatcaatgtgctgacgttatctggcagtatggcctcctgaaaaaaggatacggcctgtgtcatggaagcgccggaaacgcctatgcctttctgaccctttataacctgactcaggacatgaaatatctgtacagggcatgcaagttcgccgaatggtgcctggaatacggcgagcacggttgcagaacccctgataccccttttagcctgttcgaaggtatggccggaacgatatactttcttgctgatttgctggtcccaaccaaagctcgcttccctgccttcgaactctag

SEQ ID NO: 52489 - DNA, 1200 bp, Artificial Sequence
  derived and/or modified sequence
atggcgcagcgggcatttcctaatccttatgcggactacaataaatctttggcagagggatatttcgacgccgcaggccgtcttacccccgagttctctcagaggctcactaacaaaatcagagagctgcttcagcagatggagcggggtcttaagtcagctgatcctagggacggaactggctacaccggttgggcagggatagccgtcctttatctgcatctttatgatgtgttcggagatcctgcctatttgcaactggcccatgggtacgtaaagcaatccctgaattgcctgacaaagcggtctatcacctttctctgtggagacgccggacccctcgcagtggccgctgtgctataccacaaaatgaacaacgagaagcaggctgaagactgcataacccggctgattcatctgaataaaatcgacccacatgcacctaatgagatgctgtacggtaggattgggtatatttatgctctccttttcgtgaataagaactttggcgtagagaagataccccagtctcatatccagcagatctgtgaaaccattctgactagcggcgagaaccttgctcgcaaaaggaacttcaccgccaaaagcccattaatgtatgaatggtaccaagagtactatgtgggggccgcccacggactggccggaatctattactacctcatgcagcccagcttgcaggtgtcgcaaggcaagcttcattccctcgtgaagccctccgttgattacgtgtgtcaacttaaattccccagcgggaactaccctccctgtatcggcgacaatcgcgatcttctggtacattggtgtcacggtgcccccggagtcatttatatgctcatccaggcttataaagtgtttcgcgaagaaaagtacctctgtgacgcctaccagtgtgctgacgtgatctggcaatatggtctgctgaagaagggctacgggttgtgccatggaagtgccggtaatgcatacgcatttttgacattgtacaatctcacgcaagacatgaaatacttgtatcgggcctgcaaatttgccgagtggtgtcttgaatatggggagcatggctgccgaacgcccgatactccattttctctctttgagggaatggccgggacgatctattttctcgccgacctcttagtgcctaccaaagccaggttcccggcttttgagctatag

SEQ ID NO: 52490 - DNA, 591 bp, Artificial Sequence
  derived and/or modified sequence
atggcccagagagcatttcccaacccatatgctgattataataaatcgctcgccgagggttatttcgatgctgcaggtagattgacaccagaatttagtcagcgattgacaaataagatcagagagcttcttcagcagatggagcgcggattgaaatctgccgacccccgcgacggaaccggatataccggctgggccggcattgctgtcctgtacctgcatctgtacgatgtttttggggatccggcctacctgcagcttgcccacggttatgtgaaacagtcccttaattgcctgacaaaaaggagcattacattcctttgtggcgacgctggcccacttgccgtagctgccgtcctttaccacaagatgaataatgagaagcaggctgaagactgcattacaagactgatccacctcaacaagatcgatccccacgctccaaacgagatgctgtatggacgaatcggttatatctacgcgctgctctttgtgaacaaaaactttggggtggaaaagattcctcagtctcatatccagcagatttgtgagacgatccttacatcaggcgaaaaccttgctcgcaaatag

SEQ ID NO: 52491 - DNA, 1200 bp, Artificial Sequence
  derived and/or modified sequence
atggcccagcgcgctttccctaatccctatgctgattacaacaaatccctcgcggaggggtacttcgatgcggccggtcgcctcacgccagagttttcacagaggctcacaaacaaaattcgggagttgctgcagcaaatggagcgaggtttgaaatcagcggacccgcgggacggaaccggctacacaggctgggccggcatcgctgtgctatacctgcacctgtacgacgtgtttggagatccggcatatcttcagctcgcgcatggttatgtgaaacagtccctaaattgcctgactaaaaggagcatcacctttttatgcggcgatgccgggcccttggctgtggctgccgtcctgtatcacaaaatgaataatgaaaagcaggccgaagactgtatcacaaggctcattcaccttaataagatcgaccctcatgctcccaacgagatgttatatggacggattggatacatttatgcactgctctttgtcaacaaaaactttggggtggagaagattccacagtctcatattcagcagatctgcgagacgattctcacgtccggagagaatctggcccgcaaacgcaattttacagcgaagagcccactcatgtatgagtggtatcaggagtactatgtgggagccgctcacggactcgcaggaatatactactacctgatgcagccttcgctacaggtttcacagggcaaattgcacagtcttgtgaagccgtccgtggactacgtgtgtcagcttaagttcccgtctgggaattaccccccctgcatcggcgacaaccgggaccttcttgtgcactggtgtcatggagcgcccggcgtgatctatatgttgattcaggcttacaaagtgtttagggaggagaagtatctgtgcgacgcatatcagtgtgctgacgtgatctggcaatatgggctccttaaaaagggatatgggctgtgtcacgggagcgcaggcaatgcatacgcattcttgaccctatacaatctgacccaggatatgaagtatctatacagagcttgcaagtttgcagagtggtgtttagaatatggggagcacggctgtaggacacccgacaccccattctccctattcgaagggatggcaggcacgatctacttcctggccgatctcctggtcccaacaaaagctaggttccctgccttcgagctttag

SEQ ID NO: 52492 - DNA, 1200 bp, Artificial Sequence
  derived and/or modified sequence
atggcgcaaagggctttcccaaacccttacgcagattataacaagtcactcgcggagggatacttcgatgccgcgggacggctcactcccgagttttcgcagagactgaccaacaagatcagagaactgttgcaacagatggaaagaggcttaaagtccgcagacccccgggatgggaccggctatacggggtgggctgggatcgccgttctctacctgcacctgtacgacgtatttggggacccagcttacctgcaattggcccacgggtacgtgaagcaaagcctgaattgccttacaaagagaagcatcacattcttgtgcggtgacgccgggcccttggctgtggccgctgtcctctatcataagatgaacaacgaaaaacaggccgaggattgcatcacgcggctcattcacttaaacaagatagaccctcacgcccctaatgagatgctgtatggccgcatcggctacatctacgccctcctgttcgtgaacaagaattttggagtggagaaaattccccaaagccacatccagcagatttgcgaaacaatcctgactagtggagaaaatttggcacggaagcgcaactttaccgccaagtccccgctcatgtacgaatggtaccaggaatactatgtgggtgcagctcacggcttggccggcatctactattacctgatgcagccgtcattacaagtgtcacagggaaaactgcattctttggtgaagcctagtgttgattatgtgtgccagctgaagttcccctctggcaattaccctccgtgtattggcgacaatcgagatttgctggtacattggtgccatggggccccgggcgtgatttacatgctcattcaagcatataaagtctttcgagaggagaagtacctttgtgatgcttaccagtgtgccgacgtcatatggcagtacggcctgctcaagaaaggttacggcctctgccacggatctgccggcaacgcatatgcgttcctcacactctataatctgactcaggacatgaaatatttgtaccgggcatgtaaattcgcagaatggtgtttggagtacggtgaacatggatgcaggacaccagacacccccttcagtctttttgagggcatggccgggactatatactttctggccgatctgctggtgccgactaaagctcgctttcccgcattcgaactgtag

SEQ ID NO: 52493 - DNA, 1200 bp, Artificial Sequence
  derived and/or modified sequence
atggcccagagggccttccccaacccctatgctgactacaacaagagcctggccgagggctactttgatgctgctggccgcctgaccccagagttcagccagaggctgaccaacaagatccgggagctgctgcagcagatggagcggggcctgaagtctgctgaccccagagatggcaccggctacacaggctgggccggcattgctgtgctgtacctgcacctgtatgatgtgtttggagaccctgcctacctgcagctggcccacggctacgtgaagcagagcctgaactgcctgaccaagaggagcatcaccttcctgtgtggagatgctggccccctggccgtggccgctgtgctgtaccacaagatgaacaatgagaagcaggccgaggactgcatcaccaggctcatccacctgaacaagattgacccccacgccccaaatgagatgctgtatggccgcatcggctacatctatgccctgctgtttgtgaacaagaactttggagtggagaagatcccccagagccacatccagcagatctgtgagaccatcctgaccagcggggagaacctggccaggaagaggaacttcaccgccaagagccccctgatgtatgagtggtaccaggagtactacgtgggcgccgcccacggcctggccggcatctactactacctgatgcagcccagcctgcaggtgtcccagggcaagctgcacagcctggtgaagcccagcgtggactatgtgtgccagctgaagttccccagcggcaactacccaccctgcattggagacaacagagacctgctggtgcactggtgccacggggcccctggggtcatctacatgctgatccaggcctacaaggtgttccgggaggagaagtacctgtgtgatgcctaccagtgtgctgatgtgatctggcagtatggcctgctgaagaagggctacggcctgtgccacggcagcgctggaaatgcctatgccttcctgaccctgtacaacctgacccaggacatgaagtacctgtaccgggcctgcaagtttgctgagtggtgcctggagtatggagaacatggctgcaggaccccagacacccccttcagcctgtttgagggcatggccggcaccatctacttcctggccgacctgctggtgcccaccaaggcccgcttccctgcctttgagctgtag

SEQ ID NO: 52494 - DNA, 591 bp, Artificial Sequence
  derived and/or modified sequence
atggcccagagggccttccccaacccctatgctgactacaacaagagcctggccgagggctactttgatgctgctggccgcctgaccccagagttcagccagaggctgaccaacaagatccgggagctgctgcagcagatggagcggggcctgaagtctgctgaccccagagatggcaccggctacacaggctgggccggcattgctgtgctgtacctgcacctgtatgatgtgtttggagaccctgcctacctgcagctggcccacggctacgtgaagcagagcctgaactgcctgaccaagaggagcatcaccttcctgtgtggagatgctggccccctggccgtggccgctgtgctgtaccacaagatgaacaatgagaagcaggccgaggactgcatcaccaggctcatccacctgaacaagattgacccccacgccccaaatgagatgctgtatggccgcatcggctacatctatgccctgctgtttgtgaacaagaactttggagtggagaagatcccccagagccacatccagcagatctgtgagaccatcctgaccagcggggagaacctggccaggaagtag

SEQ ID NO: 52495 - DNA, 1200 bp, Artificial Sequence
  derived and/or modified sequence
atggcccagcgggccttccccaacccctacgccgactacaacaagagcttggcagaaggctactttgacgcagccggcagactgaccccagagttcagccagcgcctcaccaataaaattcgagagctattgcaacagatggagagagggctcaagagcgcggaccctcgggatgggacaggctacaccggttgggccggtatcgctgtgctgtatctccatctgtacgatgtgttcggtgacccggcgtacctccagctcgcacacggatacgttaagcagtcactgaactgtttgactaagaggagtatcacctttctgtgcggagatgctggtcctcttgccgtcgcagcggtactctaccataagatgaataacgaaaagcaggccgaagactgcatcactcggttgatacacttgaacaaaatagacccacatgcgcccaatgagatgttatacgggaggatcggctacatttatgcactgctattcgttaacaaaaatttcggcgtagaaaagataccccaatcccacattcagcagatttgcgaaaccattctcacaagcggtgaaaacctcgctcgcaagcgtaactttactgccaagagtcccctaatgtatgagtggtaccaggaatactacgtcggggctgcccacggattggccggcatctattactacctcatgcagccaagcctgcaagtgtcccaaggaaagctccacagccttgtaaaaccctccgttgattacgtgtgtcagctgaaattcccatccggcaattaccccccttgtattggggacaatagggatctcctggtccactggtgtcacggggcccctggcgttatctacatgctgatacaagcttacaaagtcttcagagaggagaagtacctgtgtgatgcgtatcaatgcgcggacgtcatatggcaatacggactccttaaaaaagggtatggcctatgccacgggtccgcaggtaacgcttatgcttttctgaccttgtacaatttgacacaagatatgaaatacctctacagagcgtgtaagtttgccgagtggtgtttggagtacggtgagcatggatgtcgtacccctgacacaccattttccctcttcgagggcatggccggaactatttactttctcgccgacctgctggttccaaccaaagcgaggttccctgcctttgagctgtag

SEQ ID NO: 52496 - DNA, 1200 bp, Artificial Sequence
  derived and/or modified sequence
atggcccagcgggccttccccaacccctacgccgactacaacaagtcattggcagaaggttacttcgacgccgcaggaaggttgacccccgagttctcgcagaggcttaccaacaaaatccgggagcttctgcagcagatggaacgggggcttaaatccgccgaccccagagacggcactgggtacacaggctgggctggtatcgcggttctgtacttgcacctctatgatgtgtttggagaccctgcatacctgcagcttgctcacggctatgtcaagcaatccctgaattgcctaactaaaagatccatcacctttttgtgcggtgacgctgggcctctagccgtggctgcggtcttataccacaaaatgaataacgagaagcaggccgaagactgtattactagacttatccatcttaataaaattgatccccacgcccctaacgagatgttgtacggaagaatcggatacatctatgcgcttctttttgtgaataagaactttggcgtggagaagatccctcaaagccacatccagcagatttgcgagacgatactcactagcggagagaatctagctcgcaagcgcaatttcaccgctaagagcccattaatgtacgagtggtaccaggagtactacgtgggagccgcacacggactcgctggcatctattactacctcatgcagccttctctccaagtatcccaggggaagttgcatagcctggtgaaacccagtgtcgactacgtttgccagcttaagttcccttcgggcaactaccccccgtgtattggcgataacagagacctgctggtgcactggtgccacggcgctccgggtgtgatttacatgttgatacaggcatacaaagtgttccgggaagagaaatatctgtgtgacgcctaccagtgtgccgatgttatctggcagtatggtcttctcaagaaggggtacggtctgtgccatggttccgccgggaatgcgtacgcatttcttacactctataacctgacacaggacatgaagtatctgtacagggcctgcaaatttgccgagtggtgtttggaatatggagagcatggctgccgaactcctgatacacccttcagtctctttgaggggatggcaggtacaatctattttctagcagaccttctagtccccactaaggcaagattccccgcctttgagttatag

SEQ ID NO: 52497 - DNA, 1200 bp, Artificial Sequence
  derived and/or modified sequence
atggcccagcgggccttccccaacccctacgccgactacaacaagtcattagccgagggctatttcgacgccgctgggagactaacgccagagttttcccagaggctgacgaataagatccgggaactgctccagcagatggagcgaggtctgaaatcagcagatccgagagacgggacaggctacaccggctgggctggaatagcagtcctctacctgcatctctacgatgttttcggagatcccgcatatctccaactggcccacggatacgtcaagcagagcctcaattgtctgaccaagcgatccatcacctttttatgcggtgatgccgggcccctggccgttgccgccgtcctgtaccacaagatgaacaatgaaaagcaagccgaagattgcataacccgactcatccatctgaataagattgacccccatgctccaaatgagatgttatatgggcggattggatatatctacgccctgctgttcgtgaacaagaattttggtgtcgaaaaaatcccccaaagtcacatacaacagatctgtgagaccattctaacgtctggtgagaatctagcacgtaaacggaacttcactgctaaaagcccgcttatgtatgagtggtatcaggaatattatgtcggagcggcgcacggactagctggaatctattactacctcatgcagccaagcttacaggtctcccagggaaagctgcactccttggtgaagccatccgtggattacgtgtgtcaattgaagttccctagcggtaactacccaccttgtatcggggacaacagggacctgttggtgcactggtgccatggcgctcccggcgtgatttatatgcttattcaagcatacaaggtgttcagagaggaaaagtacctgtgtgacgcgtaccagtgtgcggacgtgatctggcagtacgggctcttgaagaagggttatggactgtgtcatggctcagccgggaatgcctatgccttcctgactctctacaatctgacacaagatatgaaatatctgtatagggcttgtaagttcgccgagtggtgcctggaatacggcgagcacgggtgtaggacaccagacacacctttcagcttattcgagggaatggctggaaccatttactttcttgccgatttgttggtgccaaccaaggctaggtttccggcgttcgagctgtag

SEQ ID NO: 52498 - DNA, 591 bp, Artificial Sequence
  derived and/or modified sequence
atggcccagcgggccttccccaacccctacgccgactacaacaagagccttgcggaagggtattttgacgccgctggacgactcacccctgagttcagccagaggctgactaacaagatccgcgagctgctacaacaaatggagagagggctgaagtccgctgacccacgcgatggtacggggtacaccgggtgggctgggatcgccgttctctatctgcatctatacgatgtgttcggcgacccggcatatctccagctcgcacatgggtacgttaaacaatcgctgaattgcctgaccaaaaggtcgattacctttctgtgcggggatgccgggcctctggcggttgctgcagtgttgtaccacaagatgaataacgagaagcaggctgaggattgtatcacgagacttatccatcttaataaaatcgatccccacgcccctaacgagatgttgtatggcaggatcgggtacatatacgccctgctgttcgtgaataaaaacttcggggtggagaaaattccccagagtcatattcagcagatttgtgaaaccatcttgacctccggcgaaaatctggcccgaaaatag

SEQ ID NO: 52499 - DNA, 1200 bp, Artificial Sequence
  derived and/or modified sequence
atggcccagcgggccttccccaacccctacgccgactacaacaagtccctggccgaaggatatttcgatgccgccggcaggcttactcccgagttctcacagcgcctcacgaacaagattcgtgaactactccaacagatggagcggggcctcaagtcagctgatcccagagacggcacagggtacactgggtgggctggaatagccgtgctgtacctgcacctgtacgacgtgtttggcgatccggcatacctccagctcgcgcacggatacgttaaacagagtcttaactgtctgacgaaaaggtctattaccttcctttgtggtgacgctggacctctggctgtcgccgctgtgctttatcacaagatgaataacgaaaagcaggcagaggattgtatcacccgcttaatccacctgaataagatcgacccgcatgccccgaacgagatgctttacgggcggattggctatatctatgccctgttatttgtaaacaagaatttcggtgtggaaaagattccccagagtcacattcagcagatctgcgaaaccatacttacatcgggcgagaatctggcaagaaaacggaacttcacagccaaaagccccctgatgtatgagtggtaccaggaatattatgttggcgcagctcacggtcttgccggcatttactattacctgatgcagccttccctgcaggtgagccagggcaaactgcattcactggtaaagccgtcagtcgactacgtgtgtcagctgaagtttccatcagggaactacccaccgtgcatcggcgataaccgggatctcttggttcattggtgccacggggcccccggcgtaatatatatgctgatccaggcatataaggtctttcgagaggagaaatacttatgcgacgcatatcagtgcgcagacgtgatatggcagtatggcttgctgaagaaaggatacggcctgtgccacggatcagctgggaacgcctatgcttttctgactctgtataacctcacacaggatatgaaatatctctatcgcgcctgtaaatttgccgaatggtgtctcgagtacggagaacatggctgccgaacccctgacaccccttttagcctgttcgaaggcatggctggaactatttacttcctggccgaccttcttgtgccgaccaaagctcgattccccgccttcgaactgtag

SEQ ID NO: 52500 - DNA, 1200 bp, Artificial Sequence
  derived and/or modified sequence
atggcccagcgggccttccccaacccctacgccgactacaacaagagcttagctgagggatactttgatgctgcgggtcgcttgacaccggagttttcccagagactaactaacaagattcgtgagctgctgcagcagatggagagaggcttgaaatctgccgatccacgggatggtactggctataccggctgggctgggatcgccgttctttaccttcatctctacgacgtgtttggcgatccggcttacctccagctggcccacggatacgtgaagcagagtctgaactgccttacgaaacgcagcattactttcttgtgcggcgatgccgggccacttgccgtggcggccgttctctatcacaaaatgaacaacgaaaagcaggccgaggactgcatcacgaggctgatacacttgaataagatcgacccacacgctcctaacgagatgctgtatggtcgaatcggctacatctacgctctgctcttcgtcaacaaaaatttcggggtggaaaaaataccacagtcccacattcagcagatttgtgaaaccatcctcacctcaggcgaaaacctggcacgcaaacggaacttcacagccaagagtcctcttatgtacgagtggtatcaggaatactacgtaggagctgcccatggtctggccggcatctattactacttgatgcagcccagcctgcaggtgagccaaggtaagctgcactctctagtcaaaccgtctgtggattatgtttgccagctgaagtttccgagtggcaattatcccccttgtattggcgacaatcgggatctgctggtgcactggtgtcatggggcaccgggcgtaatttacatgctgattcaggcttacaaggtctttcgggaggaaaagtacctatgcgacgcatatcagtgtgctgatgtgatttggcagtacgggctactcaagaaggggtacggcctgtgccacggctcagccggcaacgcatacgcattcctgacactctataatttaactcaagatatgaaatacctctatcgggcctgtaagttcgcagaatggtgcctggagtatggggagcacggttgtagaacccctgatacgccatttagcctctttgagggtatggcagggacaatatacttcctggccgacctattagtgcctacaaaggctagattccccgcttttgagctgtag

SEQ ID NO: 52501 - DNA, 1200 bp, Artificial Sequence
  derived and/or modified sequence
atggctcaacgcgctttcccaaacccttacgcagattataacaagagcctggccgaaggctatttcgatgctgccggtagactgactccagaattctctcagaggttaacaaacaaaattagagaactgctgcagcagatggagcgcggactgaaaagcgccgaccctagggatgggacaggatacactgggtgggcaggtattgcagtcttgtatcttcacctgtatgatgtgttcggggaccctgcttatcttcagctggcccatggctacgttaagcaatcactgaactgcttaacaaaacgctctattacctttctgtgtggagacgcaggcccacttgcggtcgcagccgtgctgtaccacaagatgaacaatgaaaaacaagcggaggattgcatcacccgtctgatacatttgaataagatagatccacatgcacccaatgaaatgctctacggtcgaattggctatatctatgccctacttttcgtgaataagaattttggcgtggagaaaatcccgcagtctcatatacagcagatctgtgaaaccattctgactagcggtgaaaacctggctcgcaagagaaatttcaccgccaagagtcccctgatgtatgagtggtatcaggaatactacgttggcgcagcacacggactcgcaggcatctactactacctgatgcaaccctctcttcaggtgagtcaggggaaacttcactcgttagttaaaccgagcgtggactacgtgtgccaattgaagttcccctccggtaattaccccccatgcattggcgacaatagagatctactagtccactggtgccacggagcccctggcgttatttatatgcttatccaggcgtacaaggtattccgggaggaaaaatatctgtgtgatgcatatcagtgcgcggatgtgatctggcagtatggcttgttgaaaaagggttacggattgtgccacggatctgccggtaatgcctatgcgtttttgaccctttacaatctcacccaggatatgaaatacttatatagagcctgtaagttcgcagagtggtgcctggagtatggagaacatggctgcagaacccctgatacccccttttctctcttcgaaggcatggcgggtactatctactttctggccgatttgctcgtgcccaccaaggcgcgttttccagccttcgaactctag

SEQ ID NO: 52502 - DNA, 1200 bp, Artificial Sequence
  derived and/or modified sequence
atggcccagcgcgcatttcctaatccatacgctgattacaataagtcactggctgagggatacttcgacgcggctggtaggctcaccccagagttctcacagaggctgaccaacaagatccgagaattactgcagcagatggagcgcggtctcaagtctgccgatcctcgggatgggacagggtacaccggatgggctgggatcgccgtgctatatcttcacctgtacgacgtgttcggcgatcctgcctacctacaactcgcccacgggtatgtcaagcagtcgctcaattgcctaactaagagatcaattactttcctatgtggagacgctggccctctggcagtagcagctgtgctttatcacaaaatgaataacgaaaagcaggcagaagactgcataacaaggcttatccatctcaataagatagacccgcacgccccaaacgagatgctgtacggcagaatcgggtatatctatgctctgttgtttgtgaataaaaatttcggggttgaaaaaattcctcaaagccatatccagcagatctgcgaaacgatactcacctcaggagagaacctggcacgtaaacgaaattttactgccaagagcccgcttatgtacgaatggtaccaagagtattacgtcggcgctgcccacggactggctggaatttactattacctgatgcagccctctctgcaggtcagccaggggaagcttcactcactcgttaaaccatctgtcgattatgtatgccaattaaagtttccctctgggaactatcctccatgcattggggacaatagagatctcctggtccactggtgtcatggcgcaccaggtgttatttacatgcttatccaggcgtacaaagtgttcagagaagaaaagtacctctgtgatgcctaccagtgcgccgatgttatctggcagtatggccttcttaaaaaagggtatggtctctgccatggcagcgccggaaatgcttacgcctttctgacattgtataatctaactcaagatatgaagtatttgtaccgtgcatgcaagttcgcagagtggtgtctggaatatggcgagcatggttgcagaactcctgataccccattctcactgtttgaggggatggccggtacgatttatttcttagcagacctgttggtcccaaccaaagctagatttccagcattcgagctctag

SEQ ID NO: 52503 - DNA, 1200 bp, Artificial Sequence
  derived and/or modified sequence
atggcgcagagagcctttcctaacccgtacgccgactacaacaagtcgctcgctgagggttacttcgacgccgctgggaggctgacacccgagttttcacagcggctgacgaacaaaattagggagctcttgcagcaaatggagcgaggactgaaatctgccgatcctagggatgggactgggtatacgggttgggcgggaattgctgtactctatttgcacttgtacgacgtgttcggcgaccctgcctatctgcagcttgctcatgggtatgttaagcagagccttaattgcctgacaaagcggagcatcacatttctctgcggggacgctggccctttggccgtcgccgcagtgctttatcacaaaatgaataatgagaagcaggccgaggactgtattacacggctgattcacctgaacaagattgacccacatgcgccaaatgaaatgctctacggtagaatcgggtatatttacgccctactctttgtaaataagaacttcggcgtggagaaaattccacagtcgcacattcaacagatctgtgaaacaatactgactagtggggagaacctcgcaaggaaaagaaacttcacagccaaaagtcccctgatgtatgaatggtaccaggagtattacgttggagctgcgcacggtctggctgggatttactactacttgatgcaacccagtctgcaggtttctcagggcaaactgcatagtcttgttaaacccagtgtcgattatgtttgccagctgaagttcccttctgggaactacccgccatgcattggtgacaacagggacctgcttgtgcactggtgccacggggctcctggcgtaatctatatgctgattcaggcatataaggtcttcagagaagagaaatacctgtgtgacgcctaccaatgtgcagacgtgatctggcagtacggcctgctgaaaaaggggtacggactgtgccacggcagtgcaggtaacgcctacgcctttttgactctttacaatctgactcaggatatgaaatatctgtatcgagcatgcaagtttgctgagtggtgtctcgagtatggagagcacggatgtagaacacccgatacaccattttccctcttcgagggcatggctggcactatttattttctggccgacctgcttgtgccaaccaaggccaggtttcctgccttcgaactctag

SEQ ID NO: 52504 - DNA, 591 bp, Artificial Sequence
  derived and/or modified sequence
atggcgcagagagcattccctaacccgtacgccgattacaataagtctcttgctgagggttactttgatgcggctggaaggctgacccccgaattctcacaacggctcaccaataagatacgcgagctactgcagcagatggagcggggtctaaagtctgcggacccacgtgacgggaccgggtacacggggtgggccggaatcgctgtgctttatttgcacctttacgatgttttcggggatccagcttatttgcagctcgcccatggttacgtcaagcagagcctcaactgtctgaccaagaggtctataacgtttttgtgcggtgatgctggaccactcgctgtagcagctgtgttatatcataagatgaataacgagaagcaagccgaggattgtatcacgcgattaatccatcttaacaagatcgaccctcacgcccctaatgaaatgttgtacggcagaatcggctatatctacgcattgttattcgttaataagaatttcggcgtagagaagatcccccagagccatatccaacagatatgtgagacgattctgacgagcggcgagaatctggccaggaagtag

SEQ ID NO: 52505 - DNA, 1200 bp, Artificial Sequence
  derived and/or modified sequence
atggcccagagggcatttcccaacccctacgccgattataataagtcgctcgccgaaggctatttcgacgccgctggtaggctgaccccggaattttcgcagcggctgaccaacaagattcgggagttgctgcagcagatggagcgagggttgaagagcgctgacccacgcgatgggactggctacaccggatgggcaggcatcgctgtgctgtatctacacctgtacgacgtcttcggagaccctgcatacctgcaacttgctcatggctatgttaaacaatcactgaattgtctcacaaaaagatcaatcactttcctgtgtggcgatgccggacccctcgccgttgccgctgtgctctaccataaaatgaacaatgagaagcaggccgaagattgcataaccaggttaattcacctgaataagatcgatcctcacgcacccaatgagatgctgtacggtcggatcgggtacatttatgccttgctgttcgtcaataagaatttcggtgttgaaaagatccctcagtctcacattcaacaaatctgcgagactatactcacgtcaggggagaacctggccagaaagcgcaacttcaccgcaaaatcccccttaatgtacgaatggtatcaggagtattacgtcggggcagctcacggactcgctggcatatattactatctgatgcagccctctttgcaggtcagtcaggggaaactgcattccctggtgaaaccttccgtggattatgtgtgccagctgaaatttccgtccggcaattacccaccttgtattggggacaatagagatttgctggtgcattggtgtcacggggcacctggcgtgatatatatgctcattcaggcctacaaagtcttcagagaggagaaatacctgtgtgacgcatatcagtgcgctgatgtcatctggcagtacggtctgcttaagaaaggctacggtctctgccacgggagcgctggtaatgcctatgccttcctcaccttgtacaacctgactcaggatatgaagtatttgtatagagcatgcaaatttgcagaatggtgcctcgagtacggcgagcatggttgccgtacgcccgacactcccttcagcctgtttgaaggcatggctggaaccatttactttctggccgacctcctggttcctactaaggccagattcccagcattcgagctgtag

SEQ ID NO: 52506 - DNA, 1200 bp, Artificial Sequence
  derived and/or modified sequence
atggcccagcgggctttccctaatccatacgcagattataacaaaagtctcgctgagggctactttgatgccgcagggcgacttactcctgaattttcccagcggttgactaataaaattagagagctcctgcaacagatggaaagaggtttaaagtctgccgaccctagggacggaacaggatataccgggtgggctggcatcgcagttctctacttacatctgtatgatgtgtttggcgatcctgcttatctgcagctcgcccatggctacgttaaacagagtctgaattgcctgaccaaacgatctatcacctttctgtgcggcgacgccggaccattagccgtagccgcagttctttatcataaaatgaataacgaaaaacaggcggaggattgtatcacccggttgatccatttgaacaagattgatccccacgctcctaatgagatgctctatgggagaataggctatatttacgctctgctgtttgtgaataaaaacttcggagtagagaagattccccagagtcacattcagcagatttgcgagacaatcctcacctctggcgagaatctggcccgaaaacgcaacttcaccgccaaaagtccccttatgtacgaatggtaccaggaatactacgtcggagccgctcatggattggccggaatctactattacctgatgcagcctagcttgcaggtcagtcagggcaaacttcacagcttggttaaaccctcagtagactatgtttgccagctaaagtttcctagcgggaactatcctccctgcataggggataatagagacctgctggtgcactggtgccacggtgcacccggagtgatctatatgctcatccaggcctacaaggtattcagagaagaaaaatacctctgcgacgcatatcagtgcgccgatgtgatctggcaatatggactgctgaagaaagggtacggactctgtcatggcagcgcaggcaatgcctacgcatttctgacgttgtataacttgactcaggacatgaagtacctgtatagagcttgcaaattcgcggagtggtgcctcgaatacggtgaacatgggtgccggacccctgacacacctttttccctcttcgaggggatggcaggcaccatctactttctggccgatctgctcgtacccaccaaagctaggtttcccgcattcgagctctag

SEQ ID NO: 52507 - DNA, 1200 bp, Artificial Sequence
  derived and/or modified sequence
atggcccagagagccttccccaacccctacgccgactacaacaagagcctggccgagggctacttcgacgccgccggcagactgacccccgagttcagccagagactgaccaacaagatcagagagctgctgcagcagatggagagaggcctgaagagcgccgaccccagagacggcaccggctacaccggctgggccggcatcgccgtgctgtacctgcacctgtacgacgtgttcggcgaccccgcctacctgcagctggcccacggctacgtgaagcagagcctgaactgcctgaccaagagaagcatcaccttcctgtgcggcgacgccggccccctggccgtggccgccgtgctgtaccacaagatgaacaacgagaagcaggccgaggactgcatcaccagactgatccacctgaacaagatcgacccccacgcccccaacgagatgctgtacggcagaatcggctacatctacgccctgctgttcgtgaacaagaacttcggcgtggagaagatcccccagagccacatccagcagatctgcgagaccatcctgaccagcggcgagaacctggccagaaagagaaacttcaccgccaagagccccctgatgtacgagtggtaccaggagtactacgtgggcgccgcccacggcctggccggcatctactactacctgatgcagcccagcctgcaggtgagccagggcaagctgcacagcctggtgaagcccagcgtggactacgtgtgccagctgaagttccccagcggcaactaccccccctgcatcggcgacaacagagacctgctggtgcactggtgccacggcgcccccggcgtgatctacatgctgatccaggcctacaaggtgttcagagaggagaagtacctgtgcgacgcctaccagtgcgccgacgtgatctggcagtacggcctgctgaagaagggctacggcctgtgccacggcagcgccggcaacgcctacgccttcctgaccctgtacaacctgacccaggacatgaagtacctgtacagagcctgcaagttcgccgagtggtgcctggagtacggcgagcacggctgcagaacccccgacacccccttcagcctgttcgagggcatggccggcaccatctacttcctggccgacctgctggtgcccaccaaggccagattccccgccttcgagctgtag

SEQ ID NO: 52508 - DNA, 591 bp, Artificial Sequence
  derived and/or modified sequence
atggcccagagagccttccccaacccctacgccgactacaacaagagcctggccgagggctacttcgacgccgccggcagactgacccccgagttcagccagagactgaccaacaagatcagagagctgctgcagcagatggagagaggcctgaagagcgccgaccccagagacggcaccggctacaccggctgggccggcatcgccgtgctgtacctgcacctgtacgacgtgttcggcgaccccgcctacctgcagctggcccacggctacgtgaagcagagcctgaactgcctgaccaagagaagcatcaccttcctgtgcggcgacgccggccccctggccgtggccgccgtgctgtaccacaagatgaacaacgagaagcaggccgaggactgcatcaccagactgatccacctgaacaagatcgacccccacgcccccaacgagatgctgtacggcagaatcggctacatctacgccctgctgttcgtgaacaagaacttcggcgtggagaagatcccccagagccacatccagcagatctgcgagaccatcctgaccagcggcgagaacctggccagaaagtag

SEQ ID NO: 52509 - protein, 701 aa, Artificial Sequence
  derived and/or modified sequence
MATYKVRVATGTDLLSGTRDSISLTIVGTQGESHKQLLNHFGRDFATGAVGQYTVQCPQDLGELIIIRLHKERYAFFPKDPWYCNYVQICAPNGRIYHFPAYQWMDGYETLALREATGKTTADDSLPVLLEHRKEEIRAKQDFYHWRVFLPGLPSYVHIPSYRPPVRRHRNPNRPEWNGYIPGFPILINFKATKFLNLNLRYSFLKTASFFVRLGPMALAFKVRGLLDCKHSWKRLKDIRKIFPGKKSVVSEYVAEHWAEDTFFGYQYLNGVNPGLIRRCTRIPDKFPVTDDMVAPFLGEGTCLQAELEKGNIYLADYRIMEGIPTVELSGRKQHHCAPLCLLHFGPEGKMMPIAIQLSQTPGPDCPIFLPSDSEWDWLLAKTWVRYAEFYSHEAIAHLLETHLIAEAFCLALLRNLPMCHPLYKLLIPHTRYTVQINSIGRAVLLNEGGLSAKGMSLGVEGFAGVMVRALSELTYDSLYLPNDFVERGVQDLPGYYYRDDSLAVWNALEKYVTEIITYYYPSDAAVEGDPELQSWVQEIFKECLLGRESSGFPRCLRTVPELIRYVTIVIYTCSAKHAAVNTGQMEFTAWMPNFPASMRNPPIQTKGLTTLETFMDTLPDVKTTCITLLVLWTLSREPDDRRPLGHFPDIHFVEEAPRRSIEAFRQRLNQISHDIRQRNKCLPIPYYYLDPVLIENSISI

SEQ ID NO: 52510 - protein, 630 aa, Artificial Sequence
  derived and/or modified sequence
MTSPAAAQSREIDCLSPEAQKLAEARLAAKRAARAEAREIRMKELERQQKEVTSAQEKYYGLDTKWGDIEQWMEDSERYSRRSRRNTSASDEDERMSVGSRGSLRSQPDLEYGGPYAWTNGYDGELYGSQSLNRRSGRPSCLYSAARPSGSYRASVLDEGSFGGTRRGSTSGSRAPSEYSGHLNSSSRASSRASSARASPVVEERPEKDFTEKGSRNMPGLSAATLASLGGTSSRRGSGDTSISIDTEASIREIKELNELKDQIQDVEGKYMQGLKEMKDSLAEVEEKYKKAMVSNAQLDNEKTNFMYQVDTLKDMLLELEEQLAESRRQYEEKNKEFEREKHAHSILQFQFAEVKEALKQREEMLEEIRQLQQKQASSIREISDLQETIEWKDKKIGALERQKEFFDSVRSERDDLREEVVMLKEELKKHGIILNSEIATNGETSDTLNNVGYQGPTKMTKEELNALKSTGDGTLDIRLKKLVDERECLLEQIKKLKGQLEERQKIGKLDNLRSEDDVLENGTDMHVMDLQRDANRQISDLKFKLAKSEQEITALEQNVIRLESQVSRYKSAAENAEKIEDELKAEKRKLQRELRSALDKTEELEVSNGHLVKRLEKMKANRSALLSQQ

SEQ ID NO: 52511 - protein, 640 aa, Artificial Sequence
  derived and/or modified sequence
MDMGTQGSGRKRLPNRERLTAEDDALNQIAREAEARLAAKRAARAEAREIRMKELERQQKEIYQVQKKYYGLDTKWGDIEQWMEDSERYSRRSRRNTSASDEDERMSVGSRGSLRSQPDLEYGGPYAWTNGYDGELYGSQSLNRRSGRPSCLYSAARPSGSYRASVLDEGSFGGTRRGSTSGSRAPSEYSGHLNSSSRASSRASSARASPVVEERPEKDFTEKGSRNMPGLSAATLASLGGTSSRRGSGDTSISIDTEASIREIKELNELKDQIQDVEGKYMQGLKEMKDSLAEVEEKYKKAMVSNAQLDNEKTNFMYQVDTLKDMLLELEEQLAESRRQYEEKNKEFEREKHAHSILQFQFAEVKEALKQREEMLEEIRQLQQKQASSIREISDLQETIEWKDKKIGALERQKEFFDSVRSERDDLREEVVMLKEELKKHGIILNSEIATNGETSDTLNNVGYQGPTKMTKEELNALKSTGDGTLDIRLKKLVDERECLLEQIKKLKGQLEERQKIGKLDNLRSEDDVLENGTDMHVMDLQRDANRQISDLKFKLAKSEQEITALEQNVIRLESQVSRYKSAAENAEKIEDELKAEKRKLQRELRSALDKTEELEVSNGHLVKRLEKMKANRSALLSQQ

SEQ ID NO: 52512 - DNA, 1893 bp, Artificial Sequence
  derived and/or modified sequence
atgactagtcccgccgctgcccagtctcgggaaattgattgcctgtcacccgaggctcagaaactcgccgaggctcggcttgctgccaagcgagcagctagagccgaagcgagggagatacgcatgaaggagctcgagaggcagcaaaaggaagtgactagtgcccaagagaagtattatggactagacactaaatggggcgatatcgagcaatggatggaggactctgaaagatactcaagaaggtcacgccgtaacacatcagcgtctgatgaagacgagcgcatgagcgtcggatcacggggatctctgcgttcccaacccgacctggagtacggcggcccgtatgcttggacgaatggatacgacggagagctctacggctcgcaaagcctgaacaggaggtcgggcaggcctagctgtctatacagcgctgcgcggccgtcggggtcttatcgcgcctctgtccttgatgaagggtcttttggtgggaccaggcggggctccaccagtgggagtcgagctccatccgagtatagtggtcatctgaattctagctcacgcgcctcctctcgtgctagttcggcccgcgcatcccctgttgtagaagagagacctgagaaggactttactgaaaaaggatcaagaaatatgcctgggctcagcgctgcaaccctcgcgtccttgggaggcacaagctcccgcaggggctctggcgatacctccatcagcatcgacacagaagcaagcatccgggaaatcaaggaactcaacgagctcaaagatcaaatccaggatgtggaaggaaaatacatgcagggacttaaggagatgaaagatagtttggcggaagtggaggagaaatataaaaaggcaatggttagtaacgcgcagttagataatgagaagacgaacttcatgtaccaagtggataccctcaaagacatgcttttggagctagaggagcagctcgccgagtccaggcgccagtacgaggagaagaataaagagttcgagcgcgagaaacatgcacactctattctgcaatttcagtttgctgaagtaaaagaagctttgaagcaacgtgaagagatgttggaggaaataaggcagcttcagcaaaaacaggcatcaagcattcgggagatttctgatcttcaagagacgattgaatggaaggataaaaagataggcgcacttgaacggcaaaaagaatttttcgacagtgttaggtctgagcgtgacgacttgcgcgaggaggtcgtcatgcttaaagaggagctgaaaaaacacggcattatcctgaatagcgagatagccacaaatggagagacttctgataccctcaacaacgtgggctaccagggtccgaccaaaatgacaaaggaagaacttaatgccctgaaatctaccggggatggaacactggatatcaggctgaaaaagctggttgacgaaagagagtgtctgttggagcaaatcaaaaagcttaaaggacagcttgaggaaagacagaagattggaaagctggataatctacgcagcgaggatgacgttttagagaatggcaccgatatgcacgtgatggaccttcagcgggacgccaatcgccagattagcgacctgaagttcaagcttgcgaaaagcgaacaggagattaccgctttggaacagaacgtcataaggctggagtctcaagtgtcccgatacaagtctgctgccgaaaatgccgagaagatcgaagatgaactgaaagccgagaaacggaagctccaaagggagctacggagtgcactggataagaccgaagagctcgaagtgtccaacggccacttggttaagcgcctcgagaagatgaaggcgaatagatctgcactgttaagccagcagtag

SEQ ID NO: 52513 - DNA, 1923 bp, Artificial Sequence
  derived and/or modified sequence
atggatatgggaactcagggttctgggcgtaaaagactccccaaccgggagaggttgacagctgaagatgacgctctgaatcaaatcgcaagagaggccgaggcacggctcgcagccaaaagagcggcacgtgccgaggctcgagagattcggatgaaggaactcgagaggcagcaaaaggagatttatcaggtccaaaagaagtactatggactcgatacaaaatggggggatatcgagcagtggatggaggactctgaacgatactctagaagaagcagaaggaacacctcagccagtgacgaggacgaacgcatgtccgttggcagccgtgggtccttgaggtctcagcccgatctcgagtatgggggcccctatgcctggaccaacgggtacgacggagagttgtacgggtcccagtctttgaatagaaggagcggaaggccttcgtgcctttattccgcagcaaggccttccggctcctatagggctagcgttctggatgaaggatccttcgggggcaccaggcggggcagtacatctgggagtcgagcaccatccgagtactccggacatttgaacagcagcagcagagctagttccagggccagctcagcacgcgcttccccagtagtcgaggagaggcctgagaaagattttacagagaagggctcccgaaatatgcccggattgtcagcagccaccttagccagccttggcgggacctccagtcggaggggatccggagatacttccattagtatagatacggaggcgtctatacgggagatcaaggaactgaacgagctgaaggaccagatccaagatgtcgaggggaagtacatgcaagggctcaaagaaatgaaggatagcctggctgaagtggaggagaaatataagaaggccatggttagtaatgcccaactcgacaatgaaaagaccaacttcatgtaccaggtggacacccttaaagacatgctccttgagctcgaggaacagttggcggaaagtcgtcgtcagtacgaagaaaagaacaaggagttcgagcgcgagaagcacgcccactccattttgcagtttcagtttgcagaggtcaaagaagctcttaagcagagagaggagatgctcgaagaaatccgacagcttcagcagaaacaagccagtagtatcagggaaattagcgatctccaggaaactattgaatggaaggataaaaagatcggagctttagagcgacagaaagagttttttgattctgtgcggtctgaacgtgacgatctgagagaggaggttgttatgctcaaagaagaattgaagaaacatggcattatcctcaactccgagatcgcaaccaacggggaaacatctgataccctcaataacgtcgggtatcagggcccaactaaaatgacgaaggaagagctaaacgctctgaagtctactggagacggaaccctggacattcgcttgaagaagttagttgatgaaagggagtgcctcctggagcagatcaagaagcttaagggccagttggaagagcggcagaaaatcgggaaactggacaacctgaggagcgaggacgacgtgttagagaatggtacagatatgcacgttatggatctgcagcgggatgcaaacaggcagatctccgatctgaaattcaagcttgctaagagtgaacaggaaattacagccctggaacagaacgttattcggctggaaagccaggtgtcaagatacaaatcagcagcagagaacgccgagaagatcgaggacgaattgaaagcagagaaaaggaagctgcagagggaactgcgaagcgcgctcgacaagaccgaggagttggaagttagtaacggccatctggtgaagcgcttagaaaaaatgaaagccaacagaagcgctcttctgtcacaacagtag

SEQ ID NO: 52514 - DNA, 1893 bp, Artificial Sequence
  derived and/or modified sequence
atgaccagccctgctgctgcccagagccgggagattgactgcctgagccctgaggcccagaagctggccgaggcccggctggccgccaagagagctgcccgggcagaggcccgggagatccgcatgaaggagctggagcggcagcagaaggaggtgaccagcgcccaggagaagtactacggcctggacaccaagtggggagacatcgagcagtggatggaggacagcgagcgctacagcagaagaagcagaagaaacaccagcgccagtgatgaagatgagaggatgtctgtgggcagccggggcagcctgcggagccagcctgacctggagtatggaggcccctatgcctggaccaacggctatgatggagagctgtatggcagccagagcctgaacagaagaagtggccggcccagctgcctgtacagcgctgcccggcccagcggcagctaccgggcctctgtgctggatgagggcagctttggaggcacccggcggggcagcaccagcggcagccgggcccccagcgagtacagcggccacctgaacagcagcagccgggccagcagccgggccagcagcgcccgggccagccctgtggtggaggagaggcctgagaaggacttcacagagaagggcagcaggaacatgcctggcctgtctgctgccaccctggccagcctgggcggcaccagcagcagaagaggcagcggggacaccagcatcagcattgacacagaggccagcatccgggagatcaaggagctgaatgagctgaaggaccagatccaggatgtggagggcaagtacatgcagggcctgaaggagatgaaggacagcctggccgaggtggaggagaagtacaagaaggccatggtgtccaatgcccagctggacaatgagaagaccaacttcatgtaccaggtggacaccctgaaggacatgctgctggagctggaggagcagctggccgagagccggcggcagtatgaggagaagaacaaggagtttgagcgggagaagcacgcccacagcatcctgcagttccagtttgctgaggtgaaggaggccctgaagcagcgggaggagatgctggaggagatccggcagctgcagcagaagcaggccagcagcatccgggagatcagtgacctgcaggagaccatcgagtggaaggacaagaagattggagccctggagcggcagaaggagttctttgattctgtgcgctcagaaagagatgacctgcgggaggaggtggtgatgctgaaggaggagctgaagaagcacggcatcatcctgaacagcgagatcgccaccaacggggagaccagtgacaccctgaacaacgtgggctaccagggccccaccaagatgaccaaggaggagctgaatgccctgaagagcactggagatggcaccctggacatccggctgaagaagctggtggatgagcgggagtgcctgctggagcagatcaagaagctgaagggccagctggaggagcggcagaagattggcaagctggacaacctgcggagtgaagatgatgtgctggagaatggaacagacatgcacgtgatggacctgcagagagatgccaaccggcagatcagtgacctgaagttcaagctggccaagtctgagcaggagatcacagccctggagcagaatgtcatccggctggagagccaggtgagccgctacaagtctgctgctgaaaatgctgagaagattgaagatgagctgaaggccgagaagaggaagctgcagcgggagctgcggagcgccctggacaagacagaggagctggaggtgtccaatggccacctggtgaagaggctggagaagatgaaggccaacagaagtgccctgctgagccagcagtag

SEQ ID NO: 52515 - DNA, 1923 bp, Artificial Sequence
  derived and/or modified sequence
atggacatgggcacccagggcagcggcaggaagaggctgcccaaccgggagcggctgacagcagaagatgatgccctgaaccagatcgcccgggaggccgaggcccggctggccgccaagagagctgcccgggcagaggcccgggagatccgcatgaaggagctggagcggcagcagaaggagatctaccaggtgcagaagaagtactacggcctggacaccaagtggggagacatcgagcagtggatggaggacagcgagcgctacagcagaagaagcagaagaaacaccagcgccagtgatgaagatgagaggatgtctgtgggcagccggggcagcctgcggagccagcctgacctggagtatggaggcccctatgcctggaccaacggctatgatggagagctgtatggcagccagagcctgaacagaagaagtggccggcccagctgcctgtacagcgctgcccggcccagcggcagctaccgggcctctgtgctggatgagggcagctttggaggcacccggcggggcagcaccagcggcagccgggcccccagcgagtacagcggccacctgaacagcagcagccgggccagcagccgggccagcagcgcccgggccagccctgtggtggaggagaggcctgagaaggacttcacagagaagggcagcaggaacatgcctggcctgtctgctgccaccctggccagcctgggcggcaccagcagcagaagaggcagcggggacaccagcatcagcattgacacagaggccagcatccgggagatcaaggagctgaatgagctgaaggaccagatccaggatgtggagggcaagtacatgcagggcctgaaggagatgaaggacagcctggccgaggtggaggagaagtacaagaaggccatggtgtccaatgcccagctggacaatgagaagaccaacttcatgtaccaggtggacaccctgaaggacatgctgctggagctggaggagcagctggccgagagccggcggcagtatgaggagaagaacaaggagtttgagcgggagaagcacgcccacagcatcctgcagttccagtttgctgaggtgaaggaggccctgaagcagcgggaggagatgctggaggagatccggcagctgcagcagaagcaggccagcagcatccgggagatcagtgacctgcaggagaccatcgagtggaaggacaagaagattggagccctggagcggcagaaggagttctttgattctgtgcgctcagaaagagatgacctgcgggaggaggtggtgatgctgaaggaggagctgaagaagcacggcatcatcctgaacagcgagatcgccaccaacggggagaccagtgacaccctgaacaacgtgggctaccagggccccaccaagatgaccaaggaggagctgaatgccctgaagagcactggagatggcaccctggacatccggctgaagaagctggtggatgagcgggagtgcctgctggagcagatcaagaagctgaagggccagctggaggagcggcagaagattggcaagctggacaacctgcggagtgaagatgatgtgctggagaatggaacagacatgcacgtgatggacctgcagagagatgccaaccggcagatcagtgacctgaagttcaagctggccaagtctgagcaggagatcacagccctggagcagaatgtcatccggctggagagccaggtgagccgctacaagtctgctgctgaaaatgctgagaagattgaagatgagctgaaggccgagaagaggaagctgcagcgggagctgcggagcgccctggacaagacagaggagctggaggtgtccaatggccacctggtgaagaggctggagaagatgaaggccaacagaagtgccctgctgagccagcagtag

SEQ ID NO: 52516 - DNA, 4298 bp, Artificial Sequence
  derived and/or modified sequence
ccgtgggacgggcggaggcgcccgagtcccgcttccccggcgcccttccaccccgagcccgactcagcccgcggccacctgcgccccgcccctgtcggccgcgcccgagcccagcgccgcgagccgctccccggcgggctggctcctggccccggaagcgcgagcgttcacttagcggcgagtggctccgtctccgcggacagagcgcgcgccccctggcccggcccgcgaggggctcccggcgcggtccccgagcatttcccgccgggtggagcgggccgagcccggcaggatgaccagccccgcggccgctcaaagccgggagatcgactgtttgagcccggaagcgcagaagctggcggaagcccggctcgctgcaaaacgggcggcccgcgcggaggctcgcgagatccgcatgaaggagctggagcggcagcagaaggaggtgacttctgcccaagagaaatattatgggctggatacaaaatggggtgacatcgagcagtggatggaagacagtgagcgctactctcgtagatccagaagaaacacatcggcttctgatgaagacgagcgcatgtcagtgggtagtcgtggaagcctgaggtcgcagcctgacttggagtatgggggtccttacgcctggacaaatggttatgatggagaattgtatggatcacagtccctgaatagaagatctggcaggccctcctgtctgtacagcgctgcccggccttcggggagttaccgggcgtctgtgttggatgaaggcagcttcggtgggacccgacggggcagcacctccggctcccgtgctccctcggagtacagcggccacctcaactccagctcccgcgcctcctccagggccagctcggcccgggccagccctgtggtagaagagagaccagaaaaagattttactgagaaggggtctcgtaacatgccgggcctgtctgcagccacgctggcctctctgggtgggacttcctctcggagaggcagcggagacacctccatctccatcgacaccgaggcatccatcagggaaatcaaggaactcaatgagttaaaggaccagattcaggatgtagaaggcaaatacatgcagggattgaaagagatgaaggactctctagcagaagttgaagagaaatataagaaggctatggtttccaatgctcagctagacaatgaaaagacaaacttcatgtaccaggttgataccctaaaagatatgttgctggagcttgaagaacagctggctgaatctaggcggcagtacgaagagaaaaacaaagaatttgaaagggaaaaacacgcccacagtatactgcaatttcagtttgctgaagtcaaggaggccctgaagcaaagagaggaaatgctcgaggaaatccgacagctacagcagaaacaggcgagttctatcagggagatttctgatcttcaggaaacaatagagtggaaagacaaaaagataggggcattagagaggcagaaagagttctttgattccgtaaggagtgaacgggatgatcttagagaagaagtagtcatgctgaaagaggaattaaagaaacatggaataatcctaaattcagaaatagctaccaatggagagacttccgacaccctcaataatgttggataccaaggtcctaccaagatgacaaaagaagagttaaatgccctcaagtcgacaggggatgggaccctagatattaggttgaaaaagctggttgatgaacgggaatgcttattggaacagattaagaaactcaaagggcagctggaggagagacagaagattggcaaactagacaatcttcgatctgaagatgatgtcttggaaaacgggacagacatgcatgtaatggacctacaaagggatgccaacagacagatcagcgacctcaaatttaaacttgcaaaatctgagcaagagataactgcattagaacaaaatgtaataaggttagagagtcaagtatcacgttacaaatcagcggctgaaaatgcagaaaaaatagaagatgaacttaaggcagaaaaacggaaactccaaagagagctccgctctgcattggataaaacagaagagctcgaggtgagcaacggccacttagtgaagcgtctggaaaaaatgaaagcaaatcggagtgcactcttgtcccagcagtaaattccagctctgatcaggcaactggttggtgactggagagcattgtttcataggcttttctctgtcctatctgggagcgctgcttcttcccctgccttccgagagacgaagaccgtggcgagcttggcgcttaggggctcccgtgccatggctcaccccagggagccccagcagccaccaggtgcctctgtctgcagacccctggcccgggctggcgccgacgctcagaacctgcaggtacttcataagcacacaggggcctcgagggagctctgtgtctgaccgcacagcagcctctgaatgccgctggaagtgatgatcaaagtaaagattcagttgggacttgagttttttttttttttcatgtgtcttgctgaagattaaggggaaatgttacagtgttgggacttcctttcatggcagaatctacaatttgagcgacttcagtagtatctcttagtctacgcttttcatacacaaaacactgtggaaccacaagccattaccaagcaaaactctttcactggaaacaagggggcagtctagaagtaaaagtgaccttaagaagactctttacaggcaacaaatgaagcttttctaagggatttttgcatcagttcagtcataagaatacttttttccagggtaattaggcaatagcttcactgaaaatgacagcttttcattgcattatttaatccttatatttggaattgaagtcgttaacttcttttaaagaatgtactattagaaaaattaaaaatgaaatgttgagagacttcagcaatgtggttctaatttttttccactgagaaagaagatctttaatttcatattaatggttctgtatattttgggtcatctttttattttttaagaatatcaagtcaattcatttttctttccctatttaaaaaaaaaggtgttttcacagaatgagtgcacttaaaaagtgaagtgaaggaggaggtaacagtagagacgatggcaatatcatcaaggacaaaagtaaaaacgtttagctacctgctgatttttagtgactgttcatatatgttgtatttcaagtatggctggtgaagccagtcagcttttcgggacgttagcaagtggaaactgagtcagtatcatccaaaaccatatctagtcttaacacatggagaatgctggagtgagggttgtgagttcagggtatataatcaagaaaacactcccagcataatgctaggggtcaccagtgtccatcccccagaactgtatggatctaggatatacacagctgcgttgcattaagaaagagatgaaatctctattaaaatacacaagatttttgtatctccttgtgcagaggatatttgccactgcccattgggaagcagacaagttatagggggctgggggccaacactggcaagtaggaaaccacgggtcggacaggtgagcaaaatgtgctggcaggtgggcaccactgggagacccacactgcacacccgggcaccgtatgaacaggaaagaggaaggaagctggacgaagcccctcagggaccctgtgctgaccatgctgggcccaccggcaaaagggagatattcagttccttgtctcatccttaaggtttcttccacaacatctgaatacaagcatgtttaactgggaaaatgtctatgtcatgcgtgaataacaccagcagcaaacactcacacatcacgcagacacggccggcagcatgctgacgcttttaggtatttttcactcatgcaattttcacatattttcactcatttcatttgcacggaaattctatgaggtagatgctgttatcaaatccacattacagatgagggacccagggtccaggaaggtgaactggcagaagtctcccagctggtagaacagggctgcaaggcatcgattcccaggtgtctcacagccctgagaagatggcgttttccctatcagtggctctgaggaagtcaagccttcagtctctacctctcccaccaattcttttggaaacagcaaaccaatgttacacacacttcctaatccagaggaagctagaacacgatttttaaatttatttagtaaaataaaactttttttgcagatgtaacg

SEQ ID NO: 52517 - DNA, 2775 bp, Artificial Sequence
  derived and/or modified sequence
ggggccgggccggggcggcgcgagcggctggagcaacgggccccgcggcagctgcgggcgacgcggtcgatggacatgggcacccagggatcggggcgcaagcggctccccaaccgggagcggctcacggcggaggacgacgcgctcaaccagatcgcgcgggaggcggaagcccggctcgctgcaaaacgggcggcccgcgcggaggctcgcgagatccgcatgaaggagctggagcggcagcagaaggagatctatcaggtccaaaagaaatattatgggctggatacaaaatggggtgacatcgagcagtggatggaagacagtgagcgctactctcgtagatccagaagaaacacatcggcttctgatgaagacgagcgcatgtcagtgggtagtcgtggaagcctgaggtcgcagcctgacttggagtatgggggtccttacgcctggacaaatggttatgatggagaattgtatggatcacagtccctgaatagaagatctggcaggccctcctgtctgtacagcgctgcccggccttcggggagttaccgggcgtctgtgttggatgaaggcagcttcggtgggacccgacggggcagcacctccggctcccgtgctccctcggagtacagcggccacctcaactccagctcccgcgcctcctccagggccagctcggcccgggccagccctgtggtagaagagagaccagaaaaagattttactgagaaggggtctcgtaacatgccgggcctgtctgcagccacgctggcctctctgggtgggacttcctctcggagaggcagcggagacacctccatctccatcgacaccgaggcatccatcagggaaatcaaggaactcaatgagttaaaggaccagattcaggatgtagaaggcaaatacatgcagggattgaaagagatgaaggactctctagcagaagttgaagagaaatataagaaggctatggtttccaatgctcagctagacaatgaaaagacaaacttcatgtaccaggttgataccctaaaagatatgttgctggagcttgaagaacagctggctgaatctaggcggcagtacgaagagaaaaacaaagaatttgaaagggaaaaacacgcccacagtatactgcaatttcagtttgctgaagtcaaggaggccctgaagcaaagagaggaaatgctcgaggaaatccgacagctacagcagaaacaggcgagttctatcagggagatttctgatcttcaggaaacaatagagtggaaagacaaaaagataggggcattagagaggcagaaagagttctttgattccgtaaggagtgaacgggatgatcttagagaagaagtagtcatgctgaaagaggaattaaagaaacatggaataatcctaaattcagaaatagctaccaatggagagacttccgacaccctcaataatgttggataccaaggtcctaccaagatgacaaaagaagagttaaatgccctcaagtcgacaggggatgggaccctagatattaggttgaaaaagctggttgatgaacgggaatgcttattggaacagattaagaaactcaaagggcagctggaggagagacagaagattggcaaactagacaatcttcgatctgaagatgatgtcttggaaaacgggacagacatgcatgtaatggacctacaaagggatgccaacagacagatcagcgacctcaaatttaaacttgcaaaatctgagcaagagataactgcattagaacaaaatgtaataaggttagagagtcaagtatcacgttacaaatcagcggctgaaaatgcagaaaaaatagaagatgaacttaaggcagaaaaacggaaactccaaagagagctccgctctgcattggataaaacagaagagctcgaggtgagcaacggccacttagtgaagcgtctggaaaaaatgaaagcaaatcggagtgcactcttgtcccagcagtaaattccagctctgatcaggcaactggttggtgactggagagcattgtttcataggcttttctctgtcctatctgggagcgctgcttcttcccctgccttccgagagacgaagaccgtggcgagcttggcgcttaggggctcccgtgccatggctcaccccagggagccccagcagccaccaggtgcctctgtctgcagacccctggcccgggctggcgccgacgctcagaacctgcaggtacttcataagcacacaggggcctcgagggagctctgtgtctgaccgcacagcagcctctgaatgccgctggaagtgatgatcaaagtaaagattcagttgggacttgagttttttttttttttcatgtgtcttgctgaagattaaggggaaatgttacagtgttgggacttcctttcatggcagaatctacaatttgagcgacttcagtagtatctcttagtctacgcttttcatacacaaaacactgtggaaccacaagccattaccaagcaaaactctttcactggaaacaagggggcagtctagaagtaaaagtgaccttaagaagactctttacaggcaacaaatgaagcttttctaagggatttttgcatcagttcagtcataagaatacttttttccagggtaattaggcaatagcttcactgaaaatgacagcttttcattgcattatttaatccttatatttggaattgaagtcgttaacttcttttaaagaatgtactattagaaaaattaaaaatgaaatgttgagagacttca

SEQ ID NO: 52518 - DNA, 1893 bp, Artificial Sequence
  derived and/or modified sequence
atgaccagccccgccgccgcccagagccgggagatcgactgcctgtcacctgaagcccagaagctggcggaggctcggcttgcagcgaagcgcgccgcccgagcagaggctagggagatacgtatgaaggaacttgagcgacagcagaaggaggtcacctcagcccaagagaaatactatggattagatacaaagtggggagacatcgagcaatggatggaagattcagagcggtacagccgtaggtccaggcggaatacaagtgctagcgatgaggatgagagaatgagtgtaggttcacggggatccttgcgaagccaacccgatctagagtacggaggtccatatgcatggactaatggatatgacggagagttgtacggtagtcagagtcttaacagaaggagcggccgccctagttgtctctacagcgctgcaaggcccagcgggagttacagggctagtgtgctagacgaaggctctttcggcggtactaggcgggggtctacatcaggctcacgagccccatctgaatactcgggacacttgaacagtagcagcagggcctctagccgagcctcgagcgcacgggcctcccctgtcgtggaggagagacctgagaaagactttacagagaaggggtcaaggaatatgcctgggttgagtgcagcgacgctcgcctccttagggggaaccagcagtcgccgggggtctggtgacacttctatcagcatcgacaccgaggcttctatccgcgagatcaaggagctgaacgaattaaaggaccagattcaggacgtagaaggaaagtacatgcaggggctaaaggaaatgaaagacagtctcgcagaggtagaggagaagtataaaaaggcaatggtttctaacgcacaactcgataacgagaaaacaaacttcatgtaccaggtggatacactgaaagatatgctgctagagctagaagagcagctcgccgagagccgccgccaatacgaagagaagaataaagagttcgaacgtgagaagcatgcgcattctatcctccaatttcaatttgcagaagttaaagaggcccttaagcagcgcgaggagatgctcgaggagatcaggcagttacagcaaaagcaggcttcaagtattagagagataagcgatctccaggaaactattgagtggaaagataagaagatcggcgcccttgaacgccagaaggagtttttcgattctgtgcggagcgaacgcgatgatctgcgagaagaggttgtcatgctcaaagaagagttgaaaaaacacggtataattctgaatagcgagattgctacaaacggggaaacttctgatacccttaacaatgttggctatcagggccccacgaaaatgacaaaagaggagctgaatgcgctgaagagtactggcgacggcactctggacattagattaaagaagctggttgacgagcgcgagtgcctgctggagcaaatcaaaaaactcaaagggcagctggaagagcggcagaaaattggaaagctcgataacctcaggtccgaggacgatgtgctagagaacggaaccgatatgcacgtgatggatttacaacgggacgctaaccgccagatcagtgacctcaagttcaaactggctaagagtgaacaggagattaccgctttggaacagaacgttatcagactggagtcacaggtgtcccgctacaaatccgcagccgaaaacgccgagaagattgaagatgagctgaaggcagagaaaaggaagctccagcgtgagctccgttccgccttagacaaaacagaagaactggaagtctcaaacggacatctggtgaaacggctggaaaagatgaaggcaaataggtcggcgctgctatcccaacagtag

SEQ ID NO: 52519 - DNA, 1923 bp, Artificial Sequence
  derived and/or modified sequence
atggacatgggcacccagggcagcggccggaagcggctgcccaacagggagcgcttaaccgcggaggacgacgcgctgaaccaaatcgcccgggaagccgaagctagactggccgctaaaagggccgcccgcgccgaagccagggaaataaggatgaaggagttggagcggcagcagaaggagatctatcaagtacagaagaagtactacgggctcgacacgaaatggggagacatcgaacagtggatggaggattctgagcggtattccagaaggtcccgccgaaacacaagcgcctccgacgaagacgaacggatgagcgtgggatcacgcggcagcttaaggtcccagccggacctggagtacggaggcccctacgcttggacaaacggatacgacggggagctgtatggatcacaaagtctcaaccggcgctccggtcggccgagttgtctttatagtgcagcccgtcctagtggctcctaccgtgctagcgtattggatgaggggtctttcgggggcactaggcgcggttccacctccggaagtcgcgctccttctgagtactcaggccatcttaatagctcatcaagggcttcctcaagggcaagctccgcccgcgcgagtccagtggtcgaggagagacctgagaaagatttcactgagaaggggtcgagaaacatgcccggtttgtctgccgcaacacttgcgtctctgggtggcacctcttcccgtcgcggaagcggggacacatctatatccattgacacggaggcctcgattcgcgagataaaggagctcaatgagcttaaagaccagatccaggatgttgaaggaaagtacatgcaggggttaaaggaaatgaaggactctctagcagaagtggaagaaaaatataagaaagctatggttagtaacgcacaactggacaatgagaagacaaactttatgtatcaggtggataccttaaaagacatgctactcgaactcgaggagcagctggccgagtccagacgacagtatgaagagaaaaacaaagaattcgagcgggaaaagcatgctcattccattctccagttccaattcgcggaggtcaaggaggctctcaagcagagggaggagatgctggaagagattcggcaactgcagcagaaacaagctagcagcattcgggagatctctgatttacaagagactatcgagtggaaagacaagaagatcggggctctcgagcgacaaaaagaattctttgatagcgtgcggtctgagcgggacgacctaagagaggaagtggttatgctgaaagaggagctcaagaagcacggtattatcttgaattctgagatcgccacaaacggagaaacgagtgataccctgaacaatgttgggtaccaggggcccactaagatgaccaaagaagaactcaatgccctgaaatctactggagatgggacactcgacatacgtcttaaaaagttggtcgacgaaagggagtgtctccttgaacagataaagaaacttaagggccagctggaagagcgacagaagatcgggaagctggataacttaagaagcgaggacgacgttctggagaatggaacagacatgcatgtcatggatttgcagcgcgatgcaaatcggcagatctccgatttaaaattcaaacttgccaagagcgagcaagagatcaccgcactggaacaaaacgtgatccgattagaatctcaagtgagtcggtataaatcagctgcagagaatgccgagaaaattgaagacgaattgaaagcggaaaagcgcaagctgcagcgcgaattacggagcgcgctcgataagacggaagagctggaagtgtctaacggccatttggtgaagcgtttggagaagatgaaagcaaaccgaagtgctctgttatctcaacagtag

SEQ ID NO: 52520 - DNA, 1893 bp, Artificial Sequence
  derived and/or modified sequence
atgacctcccctgcagcagcacagtctcgggaaattgactgtctgagccccgaggctcagaaacttgctgaagctaggcttgcagctaagcgagccgcacgcgcagaggctagagagattagaatgaaagagctagaacggcagcagaaggaggtgaccagtgcgcaagagaagtactacggcctagacacaaaatggggcgatattgaacagtggatggaggatagcgagcgatattccaggaggagtaggcggaacaccagtgcaagcgatgaagacgagagaatgagcgtcggctcaagggggagcctgcgcagtcaacccgacttggagtatggtggcccttacgcatggaccaacggatatgacggcgagctgtacggcagccagagtctaaatcgcagaagcggcagacctagttgtctctactctgccgcacgtccctccggaagctaccgggcttccgtgctggatgagggctccttcgggggtacccgcagaggatccacatctgggtcacgtgctccttccgaatactccggccacttgaactctagctcgagggcaagttcgagagcatcaagcgccagagcctcccccgtcgtagaagaacgtcccgaaaaggactttactgaaaaaggctccaggaatatgccaggcctgagcgctgccactttggcctccctcggaggcacctcgtccagaagagggtctggcgacacctccatttctatcgacacagaagcaagcattagggaaataaaggagctgaatgaactgaaagatcaaatccaagacgtcgagggcaagtacatgcagggacttaaggaaatgaaagattctcttgctgaggtggaagagaaatataaaaaagctatggtctctaacgcccagctggacaacgagaagaccaactttatgtaccaagtggacacactgaaggatatgttgctggaactagaggagcaactcgccgagagtcgcaggcaatacgaggaaaaaaataaagagttcgagcgtgagaagcatgctcacagcattctccaattccagtttgctgaggtgaaagaggcacttaagcagagggaggaaatgctggaagagatccgtcagttgcagcagaaacaagcgagtagtattagagagatatccgatctgcaggagaccatcgaatggaaggacaaaaaaatcggtgcactggagcgccagaaagagtttttcgatagtgtgaggtccgagcgcgacgacttgagggaagaggtagttatgctgaaggaggagctcaaaaagcatgggataattctcaactcagagatcgccaccaacggagagacaagtgacaccctgaacaatgtaggataccaaggccctaccaagatgaccaaggaggagttaaacgctctgaaatccacaggggatggcacacttgacattcggctgaagaagctggtagatgagagagagtgcttactagaacagattaagaaactcaaagggcaactggaggagcgccaaaaaataggaaaacttgacaacctaaggtctgaggatgacgtcctcgagaacggtacagacatgcacgtcatggatctgcagagagacgccaaccggcagatctcagatctgaaatttaaactggctaagtccgaacaggagataactgcattggaacagaatgtcattcgcctcgagtcccaggtttcgcgatataaaagcgcggcagagaacgctgagaagattgaggacgagcttaaagcagagaagaggaagcttcagcgcgagctgaggagcgctttagataaaactgaggaactggaggtctcaaacgggcaccttgtgaagcgtctggagaaaatgaaagcaaatcgctcggctttactttcccaacagtag

SEQ ID NO: 52521 - DNA, 1923 bp, Artificial Sequence
  derived and/or modified sequence
atggatatgggcacccaggggtccgggaggaagagactccctaacagggaacggctgactgctgaagacgatgccctaaatcagattgctcgcgaggccgaagcaaggctagctgcaaagagagccgcacgtgccgaggctcgcgagatccgaatgaaagagctcgagcggcaacagaaagagatttaccaggtgcagaagaagtattatgggctagataccaaatggggggacattgagcagtggatggaggatagcgagaggtacagcaggcgctcccgacggaacacctcagccagcgacgaagacgagaggatgtcagtggggtcccggggatccctcaggtcccaacccgacctggaatacggcggaccctatgcctggactaatggctatgatggggaactttacggttcccaatctctgaacagaaggagcggccgtccctcctgcctctacagcgccgctaggcctagtgggagttatcgcgcaagtgttctggatgagggctctttcggcggtacccggagagggtctacatccggctcccgggctccgtcagaatacagtggacatttgaactcaagtagtcgggcaagctcacgagcttcttctgcccgagcttctccggtggtggaggagcgacctgagaaagacttcactgagaagggctcgaggaacatgccgggtctgtctgctgctaccctggcttcgctgggcggaactagttcccgtagggggagcggggataccagcatcagtattgacaccgaggcctctatccgcgaaatcaaggagttgaatgagctcaaagaccagatccaagatgtggaaggtaaatacatgcagggactcaaggagatgaaggatagtcttgccgaagtcgaggagaaatataagaaagccatggtctctaacgcgcagttagataatgaaaaaactaattttatgtatcaggtcgacaccttgaaagacatgcttctagagctagaggagcagctcgcagagtctagaaggcagtacgaggagaagaacaaggagttcgagcgagaaaaacatgcccacagtattctgcagtttcagtttgcagaagtcaaagaggcgcttaaacagagagaggaaatgctggaagaaattcgacagttgcagcaaaagcaggcgtcgtccattagggagatcagtgacctccaagagacaatcgagtggaaagataagaaaattggggctttggagcggcagaaggagttcttcgattcggtgagatctgagcgcgacgatctacgtgaggaagtcgtcatgctcaaagaggaactcaagaagcatggcattatcttgaactcagagattgccactaatggagaaacgtccgacactctaaacaacgtcgggtatcaaggtcccacaaaaatgaccaaagaggaactgaatgcactgaaatctaccggcgacggcaccctggacattcgactaaagaagctcgtagatgagcgagagtgccttttagagcaaatcaaaaagcttaagggtcaacttgaagagcggcaaaagatcgggaagcttgacaacctgcgctccgaggacgacgtactggaaaacggtactgacatgcatgtgatggaccttcagagggacgctaatcgacaaattagcgatcttaagttcaagttggctaaaagtgagcaggagatcacagctctcgagcaaaatgttattagactcgaaagtcaggttagcaggtataaatctgcggcagagaacgctgagaagatagaggacgagttgaaagcagaaaaaaggaagctccaacgcgaattgaggtcagcacttgacaagaccgaagagctggaagtctcaaacgggcaccttgtgaagagactggagaagatgaaggctaataggtccgcgctgcttagccagcaatag

SEQ ID NO: 52522 - DNA, 1893 bp, Artificial Sequence
  derived and/or modified sequence
atgaccagccccgccgccgcccagagcagagagatcgactgcctgagccccgaggcccagaagctggccgaggccagactggccgccaagagagccgccagagccgaggccagagagatcagaatgaaggagctggagagacagcagaaggaggtgaccagcgcccaggagaagtactacggcctggacaccaagtggggcgacatcgagcagtggatggaggacagcgagagatacagcagaagaagcagaagaaacaccagcgccagcgacgaggacgagagaatgagcgtgggcagcagaggcagcctgagaagccagcccgacctggagtacggcggcccctacgcctggaccaacggctacgacggcgagctgtacggcagccagagcctgaacagaagaagcggcagacccagctgcctgtacagcgccgccagacccagcggcagctacagagccagcgtgctggacgagggcagcttcggcggcaccagaagaggcagcaccagcggcagcagagcccccagcgagtacagcggccacctgaacagcagcagcagagccagcagcagagccagcagcgccagagccagccccgtggtggaggagagacccgagaaggacttcaccgagaagggcagcagaaacatgcccggcctgagcgccgccaccctggccagcctgggcggcaccagcagcagaagaggcagcggcgacaccagcatcagcatcgacaccgaggccagcatcagagagatcaaggagctgaacgagctgaaggaccagatccaggacgtggagggcaagtacatgcagggcctgaaggagatgaaggacagcctggccgaggtggaggagaagtacaagaaggccatggtgagcaacgcccagctggacaacgagaagaccaacttcatgtaccaggtggacaccctgaaggacatgctgctggagctggaggagcagctggccgagagcagaagacagtacgaggagaagaacaaggagttcgagagagagaagcacgcccacagcatcctgcagttccagttcgccgaggtgaaggaggccctgaagcagagagaggagatgctggaggagatcagacagctgcagcagaagcaggccagcagcatcagagagatcagcgacctgcaggagaccatcgagtggaaggacaagaagatcggcgccctggagagacagaaggagttcttcgacagcgtgagaagcgagagagacgacctgagagaggaggtggtgatgctgaaggaggagctgaagaagcacggcatcatcctgaacagcgagatcgccaccaacggcgagaccagcgacaccctgaacaacgtgggctaccagggccccaccaagatgaccaaggaggagctgaacgccctgaagagcaccggcgacggcaccctggacatcagactgaagaagctggtggacgagagagagtgcctgctggagcagatcaagaagctgaagggccagctggaggagagacagaagatcggcaagctggacaacctgagaagcgaggacgacgtgctggagaacggcaccgacatgcacgtgatggacctgcagagagacgccaacagacagatcagcgacctgaagttcaagctggccaagagcgagcaggagatcaccgccctggagcagaacgtgatcagactggagagccaggtgagcagatacaagagcgccgccgagaacgccgagaagatcgaggacgagctgaaggccgagaagagaaagctgcagagagagctgagaagcgccctggacaagaccgaggagctggaggtgagcaacggccacctggtgaagagactggagaagatgaaggccaacagaagcgccctgctgagccagcagtag

SEQ ID NO: 52523 - DNA, 1923 bp, Artificial Sequence
  derived and/or modified sequence
atggacatgggcacccagggcagcggcagaaagagactgcccaacagagagagactgaccgccgaggacgacgccctgaaccagatcgccagagaggccgaggccagactggccgccaagagagccgccagagccgaggccagagagatcagaatgaaggagctggagagacagcagaaggagatctaccaggtgcagaagaagtactacggcctggacaccaagtggggcgacatcgagcagtggatggaggacagcgagagatacagcagaagaagcagaagaaacaccagcgccagcgacgaggacgagagaatgagcgtgggcagcagaggcagcctgagaagccagcccgacctggagtacggcggcccctacgcctggaccaacggctacgacggcgagctgtacggcagccagagcctgaacagaagaagcggcagacccagctgcctgtacagcgccgccagacccagcggcagctacagagccagcgtgctggacgagggcagcttcggcggcaccagaagaggcagcaccagcggcagcagagcccccagcgagtacagcggccacctgaacagcagcagcagagccagcagcagagccagcagcgccagagccagccccgtggtggaggagagacccgagaaggacttcaccgagaagggcagcagaaacatgcccggcctgagcgccgccaccctggccagcctgggcggcaccagcagcagaagaggcagcggcgacaccagcatcagcatcgacaccgaggccagcatcagagagatcaaggagctgaacgagctgaaggaccagatccaggacgtggagggcaagtacatgcagggcctgaaggagatgaaggacagcctggccgaggtggaggagaagtacaagaaggccatggtgagcaacgcccagctggacaacgagaagaccaacttcatgtaccaggtggacaccctgaaggacatgctgctggagctggaggagcagctggccgagagcagaagacagtacgaggagaagaacaaggagttcgagagagagaagcacgcccacagcatcctgcagttccagttcgccgaggtgaaggaggccctgaagcagagagaggagatgctggaggagatcagacagctgcagcagaagcaggccagcagcatcagagagatcagcgacctgcaggagaccatcgagtggaaggacaagaagatcggcgccctggagagacagaaggagttcttcgacagcgtgagaagcgagagagacgacctgagagaggaggtggtgatgctgaaggaggagctgaagaagcacggcatcatcctgaacagcgagatcgccaccaacggcgagaccagcgacaccctgaacaacgtgggctaccagggccccaccaagatgaccaaggaggagctgaacgccctgaagagcaccggcgacggcaccctggacatcagactgaagaagctggtggacgagagagagtgcctgctggagcagatcaagaagctgaagggccagctggaggagagacagaagatcggcaagctggacaacctgagaagcgaggacgacgtgctggagaacggcaccgacatgcacgtgatggacctgcagagagacgccaacagacagatcagcgacctgaagttcaagctggccaagagcgagcaggagatcaccgccctggagcagaacgtgatcagactggagagccaggtgagcagatacaagagcgccgccgagaacgccgagaagatcgaggacgagctgaaggccgagaagagaaagctgcagagagagctgagaagcgccctggacaagaccgaggagctggaggtgagcaacggccacctggtgaagagactggagaagatgaaggccaacagaagcgccctgctgagccagcagtag

SEQ ID NO: 52524 - protein, 808 aa, Artificial Sequence
  derived and/or modified sequence
MTSPAAAQSREIDCLSPEAQKLAEARLAAKRAARAEAREIRMKELERQQKEEDSERYSRRSRRNTSASDEDERMSVGSRGSLRVEERPEKDFTEKGSRNMPGLSAATLASLGGTSSRRGSGDTSISIDTEASIREIKELNELKDQIQDVEGKYMQGLKEMKDSLAEVEEKYKKAMVSNAQLDNEKTNFMYQVDTLKDMLLELEEQLAESRRQYEEKNKEFEREKHAHSILQFQFAEVKEALKQREEMLEKHGIILNSEIATNGETSDTLNNVGYQGPTKMTKEELNALKSTGDGTLGRASEVEVKNEIVANVGKREILHNTEKEQHTEDTVKDCVDIEVFPAGENTEDQKSSEDTAPFLGTLAGATYEEQVQSQILESSSLPENTVQVESNEVMGAPDDRTRTPLEPSNCWSDLDGGNHTENVGEAAVTQVEEQAGTVASCPLGHSDDTVYHDDKCMVEVPQELETSTGHSLEKEFTNQEAAEPKEVPAHSTEVGRDHNEEEGEETGLRDEKPIKTEVPGSPAGTEGNCQEATGPSTVDTQNEPLDMKEPDEEKSDQQGEALDSSQKKTKNKKKKNKKKKSPVPVETLKDVKKELTYQNTDLSEIKEEEQVKSTDRKSAVEAQNEVTENPKQKIAAESSENVDCPENPKIKLDGKLDQEGDDVQTAAEEVLADGDTLDFEDDTVQSSGPRAGGEELDEGVAKDNAKIDGATQSSPAEPKSEDADRCTLPEHESPSQDISDACEAESTERCEMSEHPSQTVRKALDSNSLENDDLSAPGREPGHFNPESREDTRGGNEKGKSKEDCTMS

SEQ ID NO: 52525 - DNA, 2427 bp, Artificial Sequence
  derived and/or modified sequence
atgacaagtcccgctgcggcgcagtctcgggagatcgattgcctctctccggaggcccagaagttggccgaggcgcggttggccgcaaaaagggctgcacgcgccgaagctcgcgagattagaatgaaagaactggagaggcagcagaaggaagaggactccgagcgatacagccggaggtcccggcgcaataccagcgccagcgacgaggacgagcgcatgagcgtggggtccagagggtctctgcgcgtagaagagcgaccagagaaggacttcacggaaaaaggaagtaggaacatgccgggtctcagcgctgcaactctcgcctccctcgggggaacgagcagcagacggggatccggggatacaagtatttcaattgacacagaagcttctatcagggagataaaggaactgaacgaactcaaagatcagattcaagatgtcgaaggcaagtacatgcaggggctgaaggagatgaaggatagtctggccgaggtagaggagaaatataaaaaggccatggtatcaaacgctcagcttgataatgaaaaaaccaattttatgtaccaggtcgacaccttgaaggatatgttgttggagcttgaagaacagctggcagagtctcggcgacaatacgaggaaaagaataaggaattcgagagagagaagcatgcccacagtattctgcagttccagtttgccgaagtaaaggaagcactgaagcagagagaggagatgctcgagaagcacggaatcatcttaaatagcgaaatcgccacaaatggcgaaacctccgatacactgaataatgtcggctatcagggccctactaaaatgaccaaggaggagctgaacgctctgaaaagcacaggcgacggcaccctcggtagggccagcgaggttgaggtcaagaatgagattgtggctaatgtcggcaagcgcgaaatactgcacaacaccgaaaaggagcagcatactgaggacacggttaaagactgcgtcgatatcgaagtgttccctgcaggggagaatacagaggatcagaaaagttccgaagataccgccccgtttctagggaccctagctggggccacatatgaggaacaagtgcaaagtcagatactggagtcctcctcgttaccagagaatacggtacaggtggagtcaaatgaagtcatgggggcgccagatgacaggactcgcacacccctagagcctagcaattgctggtccgatctggacggtgggaatcacacagagaatgtaggagaagccgcagttacccaagttgaggagcaggcagggacagtggcctcatgcccactggggcattcagacgacacggtgtatcacgatgacaaatgtatggtggaggttccacaggagcttgagacaagtacagggcactctttagagaaagagttcaccaatcaggaagctgccgaacccaaagaggtccccgcccactccactgaggtaggccgagaccacaacgaggaagaaggggaggagacagggttgcgtgacgagaaacctatcaagacagaggtgccaggaagtcccgccggaactgagggcaactgtcaggaagccaccggacccagcactgtggacacacaaaatgagcccctggatatgaaagaacctgacgaagagaagtctgatcagcagggcgaagctttggactccagccagaagaagaccaagaacaaaaaaaagaagaataaaaagaagaaaagcccagtaccagttgaaacacttaaggatgtgaaaaaagaacttacttaccagaacacagacctgtctgaaatcaaagaggaggagcaagtaaagtcaaccgatagaaaaagcgcagttgaggctcagaatgaagtgacagaaaaccccaaacagaagattgccgccgagtcgagtgaaaatgtggattgcccagaaaatccgaagatcaagctggatggtaagctggatcaggaaggggatgacgtacagactgctgccgaagaggtgctggctgatggggacactctcgatttcgaagatgataccgtccagtcatcagggccccgagctggcggcgaagaactcgatgagggcgtggctaaagataatgccaagatagacggggctactcaaagcagccccgccgaacccaagtcagaggatgccgacagatgtactctgccggaacatgaatcgcctagccaagatattagtgatgcgtgcgaggcggaatcaacagagcggtgtgagatgtccgagcacccgagccagaccgttagaaaggcactggactccaattccctggaaaacgacgacctcagcgctccagggagggagccggggcacttcaatcctgagagccgggaggacaccagaggtgggaacgaaaagggtaaatccaaggaggattgtacaatgtcctag

SEQ ID NO: 52526 - DNA, 2427 bp, Artificial Sequence
  derived and/or modified sequence
atgaccagccctgctgctgcccagagccgggagattgactgcctgagccctgaggcccagaagctggccgaggcccggctggccgccaagagagctgcccgggcagaggcccgggagatccgcatgaaggagctggagcggcagcagaaggaggaggacagcgagcgctacagcagaagaagcagaagaaacaccagcgccagtgatgaagatgagaggatgtctgtgggcagccggggcagcctgcgggtggaggagaggcctgagaaggacttcacagagaagggcagcaggaacatgcctggcctgtctgctgccaccctggccagcctgggcggcaccagcagcagaagaggcagcggggacaccagcatcagcattgacacagaggccagcatccgggagatcaaggagctgaatgagctgaaggaccagatccaggatgtggagggcaagtacatgcagggcctgaaggagatgaaggacagcctggccgaggtggaggagaagtacaagaaggccatggtgtccaatgcccagctggacaatgagaagaccaacttcatgtaccaggtggacaccctgaaggacatgctgctggagctggaggagcagctggccgagagccggcggcagtatgaggagaagaacaaggagtttgagcgggagaagcacgcccacagcatcctgcagttccagtttgctgaggtgaaggaggccctgaagcagcgggaggagatgctggagaagcacggcatcatcctgaacagcgagatcgccaccaacggggagaccagtgacaccctgaacaacgtgggctaccagggccccaccaagatgaccaaggaggagctgaatgccctgaagagcactggagatggcaccctgggccgggccagcgaggtggaggtgaagaatgagatcgtggccaacgtgggcaagcgggagatcctgcacaacacagagaaggagcagcacacagaggacacagtgaaggactgtgtggacatcgaggtgtttcctgctggggagaacacagaggaccagaagagcagcgaggacacagcccccttcctgggcaccctggccggggccacctatgaggagcaggtgcagagccagatcctggagagcagcagcctgcctgaaaatacagtgcaggtggagagcaatgaggtgatgggcgccccagatgacaggaccaggacccccctggagcccagcaactgctggagcgacctggatggcggcaaccacacagaaaatgtgggggaggccgctgtgacccaggtggaggagcaggccggcaccgtggccagctgccccctgggccacagtgatgacacagtgtaccatgatgacaagtgcatggtggaggtgccccaggagctggagaccagcacaggccacagcctggagaaggagttcaccaaccaggaggccgctgagcccaaggaggtgcctgcccacagcacagaggtgggccgggaccacaatgaggaggagggggaggagaccggcctgagagatgagaagcccatcaagacagaggtgcccggcagccctgctggaacagagggcaactgccaggaggccaccggccccagcacagtggacacccagaatgagcccctggacatgaaggagccagatgaggagaagagtgaccagcagggcgaggccctggacagcagccagaagaagaccaagaacaagaagaagaagaacaagaagaagaagagccctgtgcctgtggagaccctgaaggatgtgaagaaggagctgacctaccagaacacagacctgtctgagatcaaggaggaggagcaggtgaagagcacagacaggaagtctgctgtggaggcccagaatgaggtgacagagaaccccaagcagaagattgctgctgagagcagtgaaaatgtggactgcccagagaaccccaagatcaagctggatggcaagctggaccaggagggagatgatgtgcagacagctgctgaggaggtgctggctgatggagacaccctggactttgaagatgacacagtgcagagcagcggccccagggctggaggagaggagctggatgaaggagtggccaaggacaatgccaagattgatggagccacccagagcagccctgctgagcccaagtcagaagatgctgaccgctgcaccctgcctgagcacgagagccccagccaggacatcagtgatgcctgtgaggccgagagcacagagcgctgtgagatgtctgagcaccccagccagacagtgaggaaggccctggacagcaacagcctggagaatgatgacctgagcgcccctggccgggagcccggccacttcaaccctgagagccgggaggacacccggggcggcaatgagaagggcaagagcaaagaagactgcaccatgtcctag

SEQ ID NO: 52527 - DNA, 3365 bp, Artificial Sequence
  derived and/or modified sequence
cggcgagtggctccgtctccgcggacagagcgcgcgccccctggcccggcccgcgaggggctcccggcgcggtccccgagcatttcccgccgggtggagcgggccgagcccggcaggatgaccagccccgcggccgctcaaagccgggagatcgactgtttgagcccggaagcgcagaagctggcggaagcccggctcgctgcaaaacgggcggcccgcgcggaggctcgcgagatccgcatgaaggagctggagcggcagcagaaggaggaagacagtgagcgctactctcgtagatccagaagaaacacatcggcttctgatgaagacgagcgcatgtcagtgggtagtcgtggaagcctgagggtagaagagagaccagaaaaagattttactgagaaggggtctcgtaacatgccgggcctgtctgcagccacgctggcctctctgggtgggacttcctctcggagaggcagcggagacacctccatctccatcgacaccgaggcatccatcagggaaatcaaggaactcaatgagttaaaggaccagattcaggatgtagaaggcaaatacatgcagggattgaaagagatgaaggactctctagcagaagttgaagagaaatataagaaggctatggtttccaatgctcagctagacaatgaaaagacaaacttcatgtaccaggttgataccctaaaagatatgttgctggagcttgaagaacagctggctgaatctaggcggcagtacgaagagaaaaacaaagaatttgaaagggaaaaacacgcccacagtatactgcaatttcagtttgctgaagtcaaggaggccctgaagcaaagagaggaaatgctcgagaaacatggaataatcctaaattcagaaatagctaccaatggagagacttccgacaccctcaataatgttggataccaaggtcctaccaagatgacaaaagaagagttaaatgccctcaagtcgacaggggatgggaccctaggaagagccagtgaagtggaggtgaaaaatgaaatcgtggcgaatgtggggaaaagagaaatcttgcacaatactgagaaagaacaacacacagaggacacagtgaaggactgtgtggacatagaggtattccctgctggtgagaataccgaggaccagaaatcctctgaagacactgccccattcctaggaaccttagcaggtgctacctatgaggaacaggttcaaagccaaattcttgagagcagttctctccctgaaaacacagtacaggttgagtcaaatgaggtcatgggtgcaccagatgacaggaccagaactccccttgagccatccaactgttggagtgacttagatggtgggaaccacacagagaatgtgggagaggcagcagtgactcaggttgaagagcaggcaggcacagtggcctcgtgtcctttagggcatagtgatgacacagtttatcatgatgacaaatgtatggtagaggtcccccaagagttagagacaagcacagggcatagtttagagaaagaattcaccaaccaggaagcagctgagcccaaggaggttccagcgcacagtacagaagtaggtagggatcacaacgaagaagagggtgaagaaacaggattaagggacgagaaaccaatcaagacagaagttcctggttctccagcaggaactgagggcaactgtcaggaagcgacaggtccaagtacagtagacactcaaaatgaacccttagatatgaaagagcccgatgaagaaaagagtgaccaacagggagaggcattggactcatcgcagaagaagacaaagaacaagaaaaagaaaaacaagaagaaaaaatccccagtacccgtagaaacccttaaagatgttaaaaaagagttaacgtatcagaacacagatttaagtgaaattaaggaagaagagcaggtaaagtctactgacagaaagtcagcagtggaagcccaaaacgaggtgactgaaaatccaaaacagaaaattgcagcagaaagcagtgaaaatgttgattgtccggagaatcctaaaattaagttggatggaaaacttgaccaagaaggtgatgatgtacaaacagcagctgaggaggtactagctgatggagacacattagattttgaggatgacaccgttcaatcatcaggcccgagggctggtggtgaagaattagatgaaggtgttgcaaaagataatgctaaaatagatggtgccactcaaagcagtcctgcagaaccaaagagcgaagacgcagatcgctgcaccctgcccgaacatgaaagtccctcacaggacattagtgatgcctgtgaagcagaaagtacagagaggtgtgagatgtcagaacatccaagtcagaccgtcaggaaagctttagacagcaatagcctagagaacgatgacttgtcggcaccaggaagagagccagggcacttcaatccagaaagcagagaagataccagaggagggaatgagaagggcaaaagcaaagaagactgtaccatgtcctaagctgaggcaggcggcaggcgcggtgcacaggaagtctcagtgtgaaggggtcttttctctccactgccaatgtaagtagaatgttctaaattcatagagaggcactgtatgacaattaccaggtgctctactgctttaagttatagactgttacttgtagatttccatgtaatcattgaggttatcacccagattagaaagacatatttgttatcagtgtacgttctaattgagagcattccagtagtatcaaacaataatgtctactgtttatagtccacttaataaaaatagaggcatttactatttgccttaggctgataggaatgtgggttttcttgaccaaatatatcagcatctaattgaaatgaccaaatagcattcttagacttctgtattatgaatataattgatatttaaattaatgtcttgttcacatatgtgtactttcatatttgattttaaaatgtacattataacctgtatggtattttatttaaaggagataaacagccaaatagcaaataggtcactgaatgataagatttgcaccttagaacaataatcattttaaggataacaagtaaatgtctgaaagcatgaggggctttatttgcctttacctcatatgagtctttgatcttgaaccgatacttttggatctcattgttgatatacctgaatttactttgtaagagattttaacttcacttcatgctgatgatgtatcaaattcattttatagaaagatttaaagtttttttctggaagtgatatatgtcaaattacatttcctactgcagtatttgagcagggacagt

SEQ ID NO: 52528 - DNA, 2427 bp, Artificial Sequence
  derived and/or modified sequence
atgaccagccccgccgccgcccagagccgggagatcgactgcctgtccccagaggcccagaagctcgccgaggcgcgtctcgctgcaaagagagccgcaagggcggaggcaagagaaataagaatgaaagagttggagcggcagcagaaagaggaggactccgaaagatattcacggcggtctcggagaaacacgtccgcatcagacgaagacgaacgcatgagtgtaggttcccgtggaagcttgcgcgtggaggagcgccccgagaaggacttcaccgagaagggcagcagaaacatgccagggcttagtgccgcgacactggcctcactgggaggcacatcatcccgccggggaagcggggacacctccattagcatcgatacagaagcttctatcagggagatcaaagagctaaacgagctcaaagaccagattcaagacgtcgagggtaagtatatgcagggtctaaaggaaatgaaagactcactggccgaggtggaggagaaatataagaaggccatggtaagcaacgcacagctcgacaacgagaaaaccaacttcatgtaccaggtggatacgctaaaggatatgctgctcgagctggaggaacagctcgccgaaagtcggagacagtacgaagagaagaataaagagttcgaacgcgagaagcatgcacattccatattacaattccagttcgccgaagtgaaggaagccctgaagcagagggaggagatgctggaaaagcatgggattattctgaattccgaaattgccaccaacggcgagaccagcgacacacttaacaacgtggggtatcaaggccctaccaagatgaccaaagaagagctgaacgctttgaagtcaacgggcgatgggaccttgggccgagccagcgaagttgaggttaagaatgaaatagtggccaatgtaggcaagcgagagatcctccacaataccgagaaggagcagcacacagaggacacagtcaaagactgtgtcgatattgaggtgttcccagcgggtgaaaacacagaggaccagaagtcttctgaggacactgctccattcctagggacactggccggcgccacatatgaagaacaagtgcagtcgcagatccttgagtcctccagtctcccagagaacactgttcaggttgaatcaaacgaggtaatgggagcacctgacgacagaactcgtacccctctagaacctagcaattgctggagcgatctcgatgggggcaaccacaccgaaaatgtcggagaggctgccgtaacccaggttgaggagcaagcaggaaccgtggcctcatgtccgctaggtcactccgatgatacagtttaccacgatgataagtgtatggtggaggtacctcaggaacttgagacttccaccggacatagtttggaaaaagaatttacaaaccaggaggcagcggagccaaaggaagtgcccgcccacagcactgaggtgggtcgagaccataacgaggaagaaggcgaagagactggacttagagacgagaagccaatcaagaccgaggtgcccggctctcccgcaggaaccgagggcaactgtcaggaagccactggcccctccaccgttgacacccaaaatgagcctctcgatatgaaggagcccgacgaagagaaaagtgatcagcagggggaagcactggacagctcacagaagaagacaaagaataagaagaagaagaataaaaagaagaagagcccagtccccgtagagacattaaaggacgtgaagaaggaactgacatatcagaatactgatttgtccgagatcaaggaggaagagcaggttaaatctaccgaccgcaaatctgcggtggaggcccagaatgaagttactgagaatcctaagcagaaaatcgctgccgaaagcagcgaaaatgtggactgtccagagaatccaaaaataaaactggatggaaagctggaccaggaaggagacgacgttcagacagccgcggaggaggtcctggccgacggcgatacattggatttcgaggatgacacagtgcagtcctctgggccgcgagctggtggtgaggagctcgacgagggggttgcaaaagataacgccaaaatcgatggcgccacacagtccagccccgctgagcctaagtcggaggacgccgatcgatgtaccctgcctgagcacgaatccccgtctcaggatatttcagatgcttgtgaagccgagtccacagaaagatgtgaaatgagtgaacacccttcacagactgtgcggaaggccctcgatagtaatagcttggagaatgacgacctgtccgcccccgggagagagcccggtcatttcaatcccgagagccgagaggacacacgtgggggcaatgaaaaaggcaagagcaaagaagattgcactatgtcctag

SEQ ID NO: 52529 - DNA, 2427 bp, Artificial Sequence
  derived and/or modified sequence
atgacctcaccagccgctgctcagtcacgagagatcgattgtctttcccccgaggctcagaagctcgctgaagcacggctcgccgctaagcgtgcagccagggctgaggcgcgagagattcgcatgaaggagctggagcgccaacaaaaagaagaggactccgagagatactctaggcgttctcgcaggaacacaagcgcatctgatgaggatgaacggatgagcgtgggctccagagggtccttacgcgtcgaggagagacctgaaaaggactttactgagaaaggatcaagaaacatgccaggcctgtctgcagctactcttgctagtcttgggggaaccagtagccgcaggggcagtggggacacctctatttcaatagacaccgaggccagcattagggaaatcaaagagctgaacgagctcaaggaccagattcaggacgtggaaggaaaatacatgcagggcttaaaagaaatgaaagattccttagcggaggtcgaagagaaatataagaaggcaatggtgagcaacgcacagctggacaacgagaagactaatttcatgtaccaggtggacacacttaaggacatgcttttggaactggaagagcagttagcagaatcgcgtaggcagtacgaagagaaaaataaggaattcgagagagaaaagcatgcccactccatcctgcagtttcagtttgccgaggtcaaggaggccctgaaacagcgtgaggagatgctcgaaaaacacggcatcatcctaaactcagaaatagccactaatggagagacatcagatactttgaataacgtgggttaccaaggccctacaaagatgactaaggaggaactaaacgcgctcaaaagcaccggcgatggaactctggggagagccagtgaggtggaggtcaagaacgagatcgtggcaaacgtagggaagagggagatactccacaacacagaaaaggagcagcacaccgaagataccgtgaaggactgtgttgatatagaggtttttcctgctggagaaaatacagaagatcagaagtcaagcgaggacactgccccttttttaggtacgctggccggagccacttacgaggagcaggtccagagccagattttggagtcctcctcactgcccgaaaacactgtccaggttgaatctaatgaagttatgggagcccctgacgataggacaaggactcctcttgagccatccaattgttggtccgacctggacggagggaatcataccgagaatgtgggcgaggctgctgtgactcaagtggaagaacaggcaggaacagttgcctcatgtcctcttggacattcggacgacaccgtgtaccatgatgataaatgcatggtagaagtccctcaagaactggagaccagtaccggacacagccttgaaaaagagtttacaaaccaagaagcggcagaacctaaggaagtgccagctcacagtaccgaggtgggtcgagaccataacgaggaggagggcgaagagactggtctcagagacgaaaaaccaataaaaacagaagtgcccggaagtccagcgggaacagaaggcaactgccaggaggcaaccggcccttccacagtggatacgcaaaatgaacctctggatatgaaagaaccagacgaggaaaaatccgatcaacagggggaagcgctggattcctcccagaagaagaccaagaacaaaaagaaaaaaaacaagaaaaagaaatctccagtccccgtggaaacactaaaggacgtgaaaaaagaattgacatatcaaaacactgatctgagtgagattaaagaagaggaacaggtcaaaagcactgacagaaagtctgcggtggaggcacagaacgaggtgaccgagaatccaaagcagaagatcgcggctgagtccagcgagaacgtagattgccccgaaaatccgaaaattaagctagacggaaagcttgaccaggagggcgatgatgtgcaaaccgcagctgaagaagttttggcagacggtgataccctcgattttgaggatgatacggttcagtcttccgggcctcgtgctggtggggaggagctggatgaaggcgtcgcaaaagacaatgctaagattgacggcgctacgcagtcatctccagctgagcctaaaagtgaggatgcagaccggtgtaccctgccagaacacgaatcccctagccaagacatttccgacgcatgtgaagcagaatctacagagcgttgtgagatgtccgagcacccctcacaaacagtcagaaaagctctggactcaaactcactggaaaacgacgatttgagcgcgccagggcgagagccaggccacttcaatcccgagtccagggaggatacacgtggcggaaatgagaaggggaaatccaaagaggactgtactatgagctag

SEQ ID NO: 52530 - DNA, 2427 bp, Artificial Sequence
  derived and/or modified sequence
atgaccagccccgccgccgcccagagcagagagatcgactgcctgagccccgaggcccagaagctggccgaggccagactggccgccaagagagccgccagagccgaggccagagagatcagaatgaaggagctggagagacagcagaaggaggaggacagcgagagatacagcagaagaagcagaagaaacaccagcgccagcgacgaggacgagagaatgagcgtgggcagcagaggcagcctgagagtggaggagagacccgagaaggacttcaccgagaagggcagcagaaacatgcccggcctgagcgccgccaccctggccagcctgggcggcaccagcagcagaagaggcagcggcgacaccagcatcagcatcgacaccgaggccagcatcagagagatcaaggagctgaacgagctgaaggaccagatccaggacgtggagggcaagtacatgcagggcctgaaggagatgaaggacagcctggccgaggtggaggagaagtacaagaaggccatggtgagcaacgcccagctggacaacgagaagaccaacttcatgtaccaggtggacaccctgaaggacatgctgctggagctggaggagcagctggccgagagcagaagacagtacgaggagaagaacaaggagttcgagagagagaagcacgcccacagcatcctgcagttccagttcgccgaggtgaaggaggccctgaagcagagagaggagatgctggagaagcacggcatcatcctgaacagcgagatcgccaccaacggcgagaccagcgacaccctgaacaacgtgggctaccagggccccaccaagatgaccaaggaggagctgaacgccctgaagagcaccggcgacggcaccctgggcagagccagcgaggtggaggtgaagaacgagatcgtggccaacgtgggcaagagagagatcctgcacaacaccgagaaggagcagcacaccgaggacaccgtgaaggactgcgtggacatcgaggtgttccccgccggcgagaacaccgaggaccagaagagcagcgaggacaccgcccccttcctgggcaccctggccggcgccacctacgaggagcaggtgcagagccagatcctggagagcagcagcctgcccgagaacaccgtgcaggtggagagcaacgaggtgatgggcgcccccgacgacagaaccagaacccccctggagcccagcaactgctggagcgacctggacggcggcaaccacaccgagaacgtgggcgaggccgccgtgacccaggtggaggagcaggccggcaccgtggccagctgccccctgggccacagcgacgacaccgtgtaccacgacgacaagtgcatggtggaggtgccccaggagctggagaccagcaccggccacagcctggagaaggagttcaccaaccaggaggccgccgagcccaaggaggtgcccgcccacagcaccgaggtgggcagagaccacaacgaggaggagggcgaggagaccggcctgagagacgagaagcccatcaagaccgaggtgcccggcagccccgccggcaccgagggcaactgccaggaggccaccggccccagcaccgtggacacccagaacgagcccctggacatgaaggagcccgacgaggagaagagcgaccagcagggcgaggccctggacagcagccagaagaagaccaagaacaagaagaagaagaacaagaagaagaagagccccgtgcccgtggagaccctgaaggacgtgaagaaggagctgacctaccagaacaccgacctgagcgagatcaaggaggaggagcaggtgaagagcaccgacagaaagagcgccgtggaggcccagaacgaggtgaccgagaaccccaagcagaagatcgccgccgagagcagcgagaacgtggactgccccgagaaccccaagatcaagctggacggcaagctggaccaggagggcgacgacgtgcagaccgccgccgaggaggtgctggccgacggcgacaccctggacttcgaggacgacaccgtgcagagcagcggccccagagccggcggcgaggagctggacgagggcgtggccaaggacaacgccaagatcgacggcgccacccagagcagccccgccgagcccaagagcgaggacgccgacagatgcaccctgcccgagcacgagagccccagccaggacatcagcgacgcctgcgaggccgagagcaccgagagatgcgagatgagcgagcaccccagccagaccgtgagaaaggccctggacagcaacagcctggagaacgacgacctgagcgcccccggcagagagcccggccacttcaaccccgagagcagagaggacaccagaggcggcaacgagaagggcaagagcaaggaggactgcaccatgagctag

SEQ ID NO: 52531 - protein, 752 aa, Artificial Sequence
  derived and/or modified sequence
MTSPAAAQSREIDCLSPEAQKLAEARLAAKRAARAEAREIRMKELERQQKEVEERPEKDFTEKGSRNMPGLSAATLASLGGTSSRRGSGDTSISIDTEASIREIKDSLAEVEEKYKKAMVSNAQLDNEKTNFMYQVDTLKDMLLELEEQLAESRRQYEEKNKEFEREKHAHSILQFQFAEVKEALKQREEMLEKHGIILNSEIATNGETSDTLNNVGYQGPTKMTKEELNALKSTGDGTLGRASEVEVKNEIVANVGKREILHNTEKEQHTEDTVKDCVDIEVFPAGENTEDQKSSEDTAPFLGTLAGATYEEQVQSQILESSSLPENTVQVESNEVMGAPDDRTRTPLEPSNCWSDLDGGNHTENVGEAAVTQVEEQAGTVASCPLGHSDDTVYHDDKCMVEVPQELETSTGHSLEKEFTNQEAAEPKEVPAHSTEVGRDHNEEEGEETGLRDEKPIKTEVPGSPAGTEGNCQEATGPSTVDTQNEPLDMKEPDEEKSDQQGEALDSSQKKTKNKKKKNKKKKSPVPVETLKDVKKELTYQNTDLSEIKEEEQVKSTDRKSAVEAQNEVTENPKQKIAAESSENVDCPENPKIKLDGKLDQEGDDVQTAAEEVLADGDTLDFEDDTVQSSGPRAGGEELDEGVAKDNAKIDGATQSSPAEPKSEDADRCTLPEHESPSQDISDACEAESTERCEMSEHPSQTVRKALDSNSLENDDLSAPGREPGHFNPESREDTRGGNEKGKSKEDCTMS

SEQ ID NO: 52532 - DNA, 2259 bp, Artificial Sequence
  derived and/or modified sequence
atgacctctccggccgctgcacagtcacgggagatcgattgtctgagccccgaagcccaaaagttagccgaggcgagattagccgcaaagcgagcagcgagggcagaagcccgggagattcggatgaaggaacttgaacgccagcagaaagaggtagaagaaaggcctgagaaggactttacagaaaagggctctaggaacatgcccggcctgtcagctgcgaccttggcttcactaggcggcacttccagccgtagaggttctggtgacacttctatatctatcgatactgaagcaagcatccgggaaatcaaggacagcctcgcagaggtagaagaaaaatacaaaaaagccatggtgtctaacgcccaattggacaatgaaaaaaccaactttatgtatcaggtagacaccctcaaggacatgcttttggagctcgaagagcaactcgccgaaagtcggaggcaatatgaggagaagaacaaagagttcgagcgtgagaagcatgctcacagtattctacagtttcaattcgcagaggtcaaagaggcactcaaacagagggaagaaatgctcgaaaagcacggcatcatcctgaattctgagattgcgacgaacggagaaacatccgatacactgaataatgtgggatatcagggcccgacaaagatgaccaaggaagagctgaacgccctgaagtctaccggtgatgggacgttagggcgcgcatctgaggtggaggtgaagaatgagatagtggctaatgtcgggaagcgcgagatcctgcacaacacagaaaaggaacagcatactgaggacactgtcaaggactgtgtcgatatcgaggtctttcccgcaggtgaaaataccgaagatcagaagtcctccgaagataccgccccttttctcggcaccctagcaggagccacctacgaggagcaggtgcagtctcagattctagaaagtagctctctgcccgaaaacaccgtgcaggtggagagcaacgaggtcatgggcgctcccgacgaccgaacacgcacccccctggagcccagtaactgttggagcgacctcgacggcggtaatcatacagagaatgtaggcgaagccgccgttacccaagtggaagagcaggccggtactgtggcgtcctgcccactgggccattccgacgacaccgtgtatcacgatgacaagtgcatggtggaggttccccaggagcttgaaacaagcaccgggcattctttggagaaagaattcaccaatcaagaggccgctgaacctaaagaagtgccagctcattctacagaagtgggaagggaccataatgaggaagaaggggaggagactggcctgagggacgaaaaacctattaaaacggaggtaccagggtcacccgcaggcactgagggaaattgtcaagaagcgactggaccgtccactgtggacacccaaaatgagccactggacatgaaagagccagacgaggaaaagagcgatcaacaaggcgaggcactggacagcagtcaaaaaaagaccaagaacaagaagaaaaagaacaagaagaagaagagcccagtccctgtggagacacttaaagacgtcaagaaagagttaacttaccagaacaccgacctatcagagattaaagaagaggagcaggtcaaaagtactgatagaaagagcgcagtggaggcccagaatgaggtgactgagaatcctaaacagaaaatagcagccgagagttccgagaacgtggattgtcctgagaatccaaaaataaagcttgacggcaagttggatcaagagggagacgatgtgcagaccgcagccgaggaagtattggcagatggagatactttggacttcgaagatgataccgtccagtcttcagggccgagggcgggtggcgaggagctcgatgaaggggttgcgaaggacaacgccaagatagatggcgcaacgcagagttcaccagctgaaccaaagtccgaagatgctgaccggtgcaccttgcccgaacacgaaagtcctagccaggacatcagcgacgcttgcgaggctgagagtaccgaacgctgtgaaatgagcgagcaccccagtcagacagttcgaaaagcgctggacagcaactctcttgaaaacgacgacctctctgcacccggccgggaacccggccattttaaccccgaaagccgcgaagacactcgggggggcaacgagaaggggaaatccaaggaagattgtaccatgagttag

SEQ ID NO: 52533 - DNA, 2259 bp, Artificial Sequence
  derived and/or modified sequence
atgaccagccctgctgctgcccagagccgggagattgactgcctgagccctgaggcccagaagctggccgaggcccggctggccgccaagagagctgcccgggcagaggcccgggagatccgcatgaaggagctggagcggcagcagaaggaggtggaggagaggcctgagaaggacttcacagagaagggcagcaggaacatgcctggcctgtctgctgccaccctggccagcctgggcggcaccagcagcagaagaggcagcggggacaccagcatcagcattgacacagaggccagcatccgggagatcaaggacagcctggccgaggtggaggagaagtacaagaaggccatggtgtccaatgcccagctggacaatgagaagaccaacttcatgtaccaggtggacaccctgaaggacatgctgctggagctggaggagcagctggccgagagccggcggcagtatgaggagaagaacaaggagtttgagcgggagaagcacgcccacagcatcctgcagttccagtttgctgaggtgaaggaggccctgaagcagcgggaggagatgctggagaagcacggcatcatcctgaacagcgagatcgccaccaacggggagaccagtgacaccctgaacaacgtgggctaccagggccccaccaagatgaccaaggaggagctgaatgccctgaagagcactggagatggcaccctgggccgggccagcgaggtggaggtgaagaatgagatcgtggccaacgtgggcaagcgggagatcctgcacaacacagagaaggagcagcacacagaggacacagtgaaggactgtgtggacatcgaggtgtttcctgctggggagaacacagaggaccagaagagcagcgaggacacagcccccttcctgggcaccctggccggggccacctatgaggagcaggtgcagagccagatcctggagagcagcagcctgcctgaaaatacagtgcaggtggagagcaatgaggtgatgggcgccccagatgacaggaccaggacccccctggagcccagcaactgctggagcgacctggatggcggcaaccacacagaaaatgtgggggaggccgctgtgacccaggtggaggagcaggccggcaccgtggccagctgccccctgggccacagtgatgacacagtgtaccatgatgacaagtgcatggtggaggtgccccaggagctggagaccagcacaggccacagcctggagaaggagttcaccaaccaggaggccgctgagcccaaggaggtgcctgcccacagcacagaggtgggccgggaccacaatgaggaggagggggaggagaccggcctgagagatgagaagcccatcaagacagaggtgcccggcagccctgctggaacagagggcaactgccaggaggccaccggccccagcacagtggacacccagaatgagcccctggacatgaaggagccagatgaggagaagagtgaccagcagggcgaggccctggacagcagccagaagaagaccaagaacaagaagaagaagaacaagaagaagaagagccctgtgcctgtggagaccctgaaggatgtgaagaaggagctgacctaccagaacacagacctgtctgagatcaaggaggaggagcaggtgaagagcacagacaggaagtctgctgtggaggcccagaatgaggtgacagagaaccccaagcagaagattgctgctgagagcagtgaaaatgtggactgcccagagaaccccaagatcaagctggatggcaagctggaccaggagggagatgatgtgcagacagctgctgaggaggtgctggctgatggagacaccctggactttgaagatgacacagtgcagagcagcggccccagggctggaggagaggagctggatgaaggagtggccaaggacaatgccaagattgatggagccacccagagcagccctgctgagcccaagtcagaagatgctgaccgctgcaccctgcctgagcacgagagccccagccaggacatcagtgatgcctgtgaggccgagagcacagagcgctgtgagatgtctgagcaccccagccagacagtgaggaaggccctggacagcaacagcctggagaatgatgacctgagcgcccctggccgggagcccggccacttcaaccctgagagccgggaggacacccggggcggcaatgagaagggcaagagcaaagaagactgcaccatgtcctag

SEQ ID NO: 52534 - DNA, 3709 bp, Artificial Sequence
  derived and/or modified sequence
gcgtggggggcggggcgggccgtgggacgggcggaggcgcccgagtcccgcttccccggcgcccttccaccccgagcccgactcagcccgcggccacctgcgccccgcccctgtcggccgcgcccgagcccagcgccgcgagccgctccccggcgggctggctcctggccccggaagcgcgagcgttcacttagcggcgagtggctccgtctccgcggacagagcgcgcgccccctggcccggcccgcgaggggctcccggcgcggtccccgagcatttcccgccgggtggagcgggccgagcccggcaggatgaccagccccgcggccgctcaaagccgggagatcgactgtttgagcccggaagcgcagaagctggcggaagcccggctcgctgcaaaacgggcggcccgcgcggaggctcgcgagatccgcatgaaggagctggagcggcagcagaaggaggtagaagagagaccagaaaaagattttactgagaaggggtctcgtaacatgccgggcctgtctgcagccacgctggcctctctgggtgggacttcctctcggagaggcagcggagacacctccatctccatcgacaccgaggcatccatcagggaaatcaaggactctctagcagaagttgaagagaaatataagaaggctatggtttccaatgctcagctagacaatgaaaagacaaacttcatgtaccaggttgataccctaaaagatatgttgctggagcttgaagaacagctggctgaatctaggcggcagtacgaagagaaaaacaaagaatttgaaagggaaaaacacgcccacagtatactgcaatttcagtttgctgaagtcaaggaggccctgaagcaaagagaggaaatgctcgagaaacatggaataatcctaaattcagaaatagctaccaatggagagacttccgacaccctcaataatgttggataccaaggtcctaccaagatgacaaaagaagagttaaatgccctcaagtcgacaggggatgggaccctaggaagagccagtgaagtggaggtgaaaaatgaaatcgtggcgaatgtggggaaaagagaaatcttgcacaatactgagaaagaacaacacacagaggacacagtgaaggactgtgtggacatagaggtattccctgctggtgagaataccgaggaccagaaatcctctgaagacactgccccattcctaggaaccttagcaggtgctacctatgaggaacaggttcaaagccaaattcttgagagcagttctctccctgaaaacacagtacaggttgagtcaaatgaggtcatgggtgcaccagatgacaggaccagaactccccttgagccatccaactgttggagtgacttagatggtgggaaccacacagagaatgtgggagaggcagcagtgactcaggttgaagagcaggcaggcacagtggcctcgtgtcctttagggcatagtgatgacacagtttatcatgatgacaaatgtatggtagaggtcccccaagagttagagacaagcacagggcatagtttagagaaagaattcaccaaccaggaagcagctgagcccaaggaggttccagcgcacagtacagaagtaggtagggatcacaacgaagaagagggtgaagaaacaggattaagggacgagaaaccaatcaagacagaagttcctggttctccagcaggaactgagggcaactgtcaggaagcgacaggtccaagtacagtagacactcaaaatgaacccttagatatgaaagagcccgatgaagaaaagagtgaccaacagggagaggcattggactcatcgcagaagaagacaaagaacaagaaaaagaaaaacaagaagaaaaaatccccagtacccgtagaaacccttaaagatgttaaaaaagagttaacgtatcagaacacagatttaagtgaaattaaggaagaagagcaggtaaagtctactgacagaaagtcagcagtggaagcccaaaacgaggtgactgaaaatccaaaacagaaaattgcagcagaaagcagtgaaaatgttgattgtccggagaatcctaaaattaagttggatggaaaacttgaccaagaaggtgatgatgtacaaacagcagctgaggaggtactagctgatggagacacattagattttgaggatgacaccgttcaatcatcaggcccgagggctggtggtgaagaattagatgaaggtgttgcaaaagataatgctaaaatagatggtgccactcaaagcagtcctgcagaaccaaagagcgaagacgcagatcgctgcaccctgcccgaacatgaaagtccctcacaggacattagtgatgcctgtgaagcagaaagtacagagaggtgtgagatgtcagaacatccaagtcagaccgtcaggaaagctttagacagcaatagcctagagaacgatgacttgtcggcaccaggaagagagccagggcacttcaatccagaaagcagagaagataccagaggagggaatgagaagggcaaaagcaaagaagactgtaccatgtcctaagctgaggcaggcggcaggcgcggtgcacaggaagtctcagtgtgaaggggtcttttctctccactgccaatgtaagtagaatgttctaaattcatagagaggcactgtatgacaattaccaggtgctctactgctttaagttatagactgttacttgtagatttccatgtaatcattgaggttatcacccagattagaaagacatatttgttatcagtgtacgttctaattgagagcattccagtagtatcaaacaataatgtctactgtttatagtccacttaataaaaatagaggcatttactatttgccttaggctgataggaatgtgggttttcttgaccaaatatatcagcatctaattgaaatgaccaaatagcattcttagacttctgtattatgaatataattgatatttaaattaatgtcttgttcacatatgtgtactttcatatttgattttaaaatgtacattataacctgtatggtattttatttaaaggagataaacagccaaatagcaaataggtcactgaatgataagatttgcaccttagaacaataatcattttaaggataacaagtaaatgtctgaaagcatgaggggctttatttgcctttacctcatatgagtctttgatcttgaaccgatacttttggatctcattgttgatatacctgaatttactttgtaagagattttaacttcacttcatgctgatgatgtatcaaattcattttatagaaagatttaaagtttttttctggaagtgatatatgtcaaattacatttcctactgcagtatttgagcagggacagtcattttttaaatgtttttggccgggcgtggtggctcatgcctgtaatctcagtacattgggaggccaaggcaggtggatcacctgaggtcaagagttcgaggccagcctggccaacatggtgaaaccctgtctctactaaaaatacaaaaaattggccgggcgtgatggtgggcgcctgtaatcccagccactccagaggctgaggcaggagaatcgcttgaacctgcgaggcagagattgcagtgagccaagatcaagccattgtactccagcctggacaacaagagcgaaactctgtctaaaaaaaaaaaaaaaaa

SEQ ID NO: 52535 - DNA, 2259 bp, Artificial Sequence
  derived and/or modified sequence
atgaccagccccgccgccgcccagagccgggagatcgactgcctgtccccagaggcacagaaattggccgaggccagactcgcggccaagagagctgccagggccgaggctcgcgagatcagaatgaaagagctggagcgacagcagaaagaggtggaggaaagaccagaaaaggattttaccgaaaaagggtccagaaacatgccgggcctcagcgcagccacgttggctagcctgggcggaacctcttcccggaggggaagcggcgataccagtatcagcattgatactgaagcttcaattagagagatcaaagactctctggccgaggtggaagagaagtataagaaggccatggtgtccaacgcgcagctcgacaatgagaagacaaattttatgtaccaggtggacaccttgaaggacatgctgctggaacttgaagagcagctggccgagtcgcgcaggcagtacgaagaaaagaacaaagaattcgaacgcgagaaacatgcccattccattttacagttccagttcgccgaggtcaaggaggcccttaaacaacgagaggaaatgcttgaaaagcatggcattattctgaacagtgagatagccactaacggagaaacctctgacactctgaacaacgtgggctaccaagggccaaccaaaatgacaaaggaagagctgaacgccctgaagtcaacgggcgacgggaccctaggcagagccagtgaagtggaggttaagaatgaaattgtggcaaatgtcggaaaaagggagattctgcacaacaccgaaaaggagcagcataccgaggacactgtgaaggactgcgtcgacattgaggtgttccctgccggtgagaataccgaagatcagaaaagctccgaagatacggctccctttctgggtacgttggccggcgcaacctacgaggaacaggtccagtcccaaattctggaaagctccagtctgcctgagaacaccgttcaggttgagtcgaatgaagttatgggcgctccagatgataggaccaggaccccattagaaccatcaaactgttggagcgatctcgacggagggaatcacaccgaaaatgtgggtgaggcagcagtgactcaagtcgaggaacaggcaggtacagtggccagttgtcctctggggcactccgatgataccgtttaccatgacgataagtgtatggtggaggtgccgcaggagctggagacctcgacgggacactctctggagaaagaattcaccaaccaggaggccgccgaaccgaaggaggtccccgcgcactctactgaagtgggcagggatcacaatgaagaagaaggcgaagagaccggcctaagggacgagaagcctattaagactgaagtcccaggcagcccggcaggtactgaaggtaattgccaggaggccaccggcccgtctaccgttgatactcagaatgagcctctggacatgaaagagcctgatgaagaaaagtccgaccaacagggtgaggcactggatagttcgcagaagaaaacaaaaaacaagaaaaaaaagaataaaaaaaaaaagagccctgtgccggtggagacactaaaagatgtcaagaaagaattgacttatcagaatactgacctgtccgagatcaaggaggaagagcaggtgaagtctaccgatcgcaagtctgccgtggaggcccaaaatgaagtcacggagaatccaaaacagaagattgcagccgagtcctcagagaacgtcgactgtccagagaaccctaaaataaaactggatggtaaactggaccaagagggggatgacgtgcagacggccgccgaggaagtactggccgatggtgatactctcgatttcgaagatgatacagttcagagctccggccctcgtgctggcggagaagaactggatgagggggtggccaaggataacgccaaaattgacggcgcaacccaaagttccccggccgaacctaaatctgaggacgcggatagatgtaccctgccagaacacgaaagcccctcgcaggacatctccgatgcctgtgaagcagagagtacagagagatgcgagatgtccgaacatcccagccagactgtcaggaaggctcttgattctaattccctcgagaatgatgatctgagcgctcctggcagagagcctggccacttcaatcctgaaagtcgcgaggataccagaggcggaaatgagaagggtaagagtaaggaggactgcacaatgagctag

SEQ ID NO: 52536 - DNA, 2259 bp, Artificial Sequence
  derived and/or modified sequence
atgacaagtcccgcagccgcacagtccagggaaatcgactgcctgagcccggaagcccagaagcttgccgaggctagactggctgcaaagcgggcagcacgtgcagaggctcgcgaaattaggatgaaggagctcgagcgccagcagaaggaagtggaggaaaggccagagaaagattttactgagaaaggttctaggaatatgcctggcctctccgcagcaactctcgccagcctaggcggaacctcctccagaaggggatccggcgacacaagtatatcaattgatacagaagctagcatccgcgagatcaaagactccctggctgaagttgaagagaaatataaaaaagcgatggtgtcaaacgctcaactggacaacgaaaagactaactttatgtaccaagtggacacattaaaggatatgctgctggagctggaagaacagctagccgaatctagaaggcagtacgaggaaaagaacaaagaattcgagcgggagaagcacgcccatagtattctgcagtttcagttcgccgaagtgaaagaggcccttaagcagagagaggaaatgctggaaaaacatggcattattttaaacagcgagattgccactaacggggaaacatcggacacgttaaataacgtgggctaccagggtccaaccaagatgacaaaggaagaactgaacgcactgaagtcaactggagatggcaccttgggacgcgcaagcgaggttgaggtgaagaacgagattgtggcgaacgtagggaaaagggagatcttacataataccgagaaggagcagcacacagaggacacagtcaaagactgcgttgatattgaggtgttcccagctggagaaaatactgaagatcagaaaagttctgaggacaccgccccttttctcggcacccttgctggcgctacttatgaggaacaagtgcaatcacagattcttgagagctctagtttgcccgaaaataccgtacaggtcgagtccaatgaggtgatgggcgctcccgacgaccgaacacgaacaccgcttgaaccttctaattgctggagcgacctcgacgggggtaaccacacagagaatgtgggcgaggctgccgttacgcaggtggaggagcaggccggaaccgtggcgtcctgtccactggggcactctgacgataccgtgtaccacgatgacaagtgtatggtagaagtaccacaggagctcgagacctctacagggcacagtctggagaaggaatttacgaatcaggaagcggctgagcccaaggaggtgccagctcacagcacagaggtcgggagagaccataacgaggaggaaggggaggagactggcctacgtgacgagaaacctattaaaaccgaagtacccggaagccctgcaggcactgaaggcaactgtcaagaagccaccggacccagtactgtcgacacccagaacgagcctctcgacatgaaagaacctgatgaggaaaagagtgaccagcagggggaagcactggactcaagccagaagaagacgaaaaacaaaaaaaagaaaaataagaaaaagaagagccccgtccctgtcgaaactctgaaggacgttaagaaggagttgacctaccaaaatacggacctgtccgagatcaaagaggaggaacaggtcaaaagtaccgacagaaagagcgccgtggaggcgcaaaacgaagtcactgagaaccccaagcagaagatagccgctgaatcatctgaaaatgtcgattgcccagagaatccgaagatcaaacttgacgggaaactcgaccaagagggggatgacgtccagactgccgctgaggaggtgttggccgacggggataccctcgacttcgaggatgacaccgtgcagtcctccggacctagggcgggtggggaggagcttgacgaaggcgtggcgaaagacaatgccaaaattgacggagccactcagagcagtcccgcagaacccaaatctgaggatgcagaccgctgtacactgcccgagcatgagagtccctcccaggatatcagcgatgcatgtgaggcggaatcaacagagcggtgtgaaatgagcgagcacccgtcacaaaccgtaagaaaggcattagattcaaattctttggagaacgacgatttatcggctcctgggagggaaccaggccattttaacccagaatccagagaggacactcgtggagggaatgagaagggcaagagtaaagaggactgcacgatgagctag

SEQ ID NO: 52537 - DNA, 2259 bp, Artificial Sequence
  derived and/or modified sequence
atgaccagccccgccgccgcccagagcagagagatcgactgcctgagccccgaggcccagaagctggccgaggccagactggccgccaagagagccgccagagccgaggccagagagatcagaatgaaggagctggagagacagcagaaggaggtggaggagagacccgagaaggacttcaccgagaagggcagcagaaacatgcccggcctgagcgccgccaccctggccagcctgggcggcaccagcagcagaagaggcagcggcgacaccagcatcagcatcgacaccgaggccagcatcagagagatcaaggacagcctggccgaggtggaggagaagtacaagaaggccatggtgagcaacgcccagctggacaacgagaagaccaacttcatgtaccaggtggacaccctgaaggacatgctgctggagctggaggagcagctggccgagagcagaagacagtacgaggagaagaacaaggagttcgagagagagaagcacgcccacagcatcctgcagttccagttcgccgaggtgaaggaggccctgaagcagagagaggagatgctggagaagcacggcatcatcctgaacagcgagatcgccaccaacggcgagaccagcgacaccctgaacaacgtgggctaccagggccccaccaagatgaccaaggaggagctgaacgccctgaagagcaccggcgacggcaccctgggcagagccagcgaggtggaggtgaagaacgagatcgtggccaacgtgggcaagagagagatcctgcacaacaccgagaaggagcagcacaccgaggacaccgtgaaggactgcgtggacatcgaggtgttccccgccggcgagaacaccgaggaccagaagagcagcgaggacaccgcccccttcctgggcaccctggccggcgccacctacgaggagcaggtgcagagccagatcctggagagcagcagcctgcccgagaacaccgtgcaggtggagagcaacgaggtgatgggcgcccccgacgacagaaccagaacccccctggagcccagcaactgctggagcgacctggacggcggcaaccacaccgagaacgtgggcgaggccgccgtgacccaggtggaggagcaggccggcaccgtggccagctgccccctgggccacagcgacgacaccgtgtaccacgacgacaagtgcatggtggaggtgccccaggagctggagaccagcaccggccacagcctggagaaggagttcaccaaccaggaggccgccgagcccaaggaggtgcccgcccacagcaccgaggtgggcagagaccacaacgaggaggagggcgaggagaccggcctgagagacgagaagcccatcaagaccgaggtgcccggcagccccgccggcaccgagggcaactgccaggaggccaccggccccagcaccgtggacacccagaacgagcccctggacatgaaggagcccgacgaggagaagagcgaccagcagggcgaggccctggacagcagccagaagaagaccaagaacaagaagaagaagaacaagaagaagaagagccccgtgcccgtggagaccctgaaggacgtgaagaaggagctgacctaccagaacaccgacctgagcgagatcaaggaggaggagcaggtgaagagcaccgacagaaagagcgccgtggaggcccagaacgaggtgaccgagaaccccaagcagaagatcgccgccgagagcagcgagaacgtggactgccccgagaaccccaagatcaagctggacggcaagctggaccaggagggcgacgacgtgcagaccgccgccgaggaggtgctggccgacggcgacaccctggacttcgaggacgacaccgtgcagagcagcggccccagagccggcggcgaggagctggacgagggcgtggccaaggacaacgccaagatcgacggcgccacccagagcagccccgccgagcccaagagcgaggacgccgacagatgcaccctgcccgagcacgagagccccagccaggacatcagcgacgcctgcgaggccgagagcaccgagagatgcgagatgagcgagcaccccagccagaccgtgagaaaggccctggacagcaacagcctggagaacgacgacctgagcgcccccggcagagagcccggccacttcaaccccgagagcagagaggacaccagaggcggcaacgagaagggcaagagcaaggaggactgcaccatgagctag

SEQ ID NO: 52538 - protein, 182 aa, Artificial Sequence
  derived and/or modified sequence
MGKGRFDEKENVSNCIQLKTSVIKGIKNQLIEQFPGIEPWLNQIMPKKDPVKIVRCHEHIEILTVNGELLFFRQREGPFYPTLRLLHKYPFILPHQQVDKGAIKFVLSGANIMCPGLTSPGAKLYPAAVDTIVAIMAEGKQHALCVGVMKMSAEDIEKVNKGIGIENIHYLNDGLWHMKTYK

SEQ ID NO: 52539 - DNA, 549 bp, Artificial Sequence
  derived and/or modified sequence
atgggcaagggcagattcgacgagaaggagaacgtgagcaactgcatccagctgaagaccagcgtgatcaagggcatcaagaaccagctgatcgagcagttccccggcatcgagccctggctgaaccagatcatgcccaagaaggaccccgtgaagatcgtgagatgccacgagcacatcgagatcctgaccgtgaacggcgagctgctgttcttcagacagagagagggccccttctaccccaccctgagactgctgcacaagtaccccttcatcctgccccaccagcaggtggacaagggcgccatcaagttcgtgctgagcggcgccaacatcatgtgccccggcctgaccagccccggcgccaagctgtaccccgccgccgtggacaccatcgtggccatcatggccgagggcaagcagcacgccctgtgcgtgggcgtgatgaagatgagcgccgaggacatcgagaaggtgaacaagggcatcggcatcgagaacatccactacctgaacgacggcctgtggcacatgaagacctacaagtag

SEQ ID NO: 52540 - DNA, 549 bp, Artificial Sequence
  derived and/or modified sequence
atgggtaaagggcgcttcgacgaaaaggagaatgttagcaactgtattcaattgaaaacttcagtgatcaagggaatcaaaaaccaactgatcgaacagtttcccggtattgagccttggctgaaccaaattatgccgaaaaaagatcctgttaaaatcgtgcgctgtcacgaacacatcgaaattttaaccgtgaacggcgagcttctgtttttccggcaacgggagggaccattttaccctacacttcgtctacttcacaaatatcctttcattctgccacaccagcaagtagataagggagctatcaagttcgtgttatcgggagccaatatcatgtgtcctggtttaaccagtccaggcgccaagctgtacccagcagctgtggacactattgtggcaatcatggcggaaggaaagcaacatgcattgtgcgtgggggttatgaaaatgagtgcggaggacatcgagaaggttaataagggcattgggatcgagaatattcactacctaaatgacgggttatggcatatgaaaacatacaaatag

SEQ ID NO: 52541 - DNA, 549 bp, Artificial Sequence
  derived and/or modified sequence
atgggcaagggccgctttgatgagaaggaaaatgtgagcaactgcatccagctgaagaccagcgtcatcaagggcatcaagaaccagctgattgagcagtttcctggcatcgagccctggctgaaccagatcatgcccaagaaggaccctgtgaagatcgtgcgctgccacgagcacatcgagatcctgactgtgaatggagagctgctcttcttccggcagcgggagggccccttctaccccaccctgcggctgctgcacaagtaccccttcatcctgccccaccagcaggtggacaagggggccatcaagtttgtgctgagcggggccaacatcatgtgccccggcctgaccagccctggggccaagctgtacccagctgctgtggacaccatcgtggccatcatggccgagggcaagcagcacgccctgtgtgtgggcgtgatgaagatgtctgctgaggacatcgagaaggtgaacaagggcattggaattgagaacatccactacctgaatgatggcctgtggcacatgaagacctacaagtag

SEQ ID NO: 52542 - DNA, 1130 bp, Artificial Sequence
  derived and/or modified sequence
taagatcctctttctctctcccccgcccctgccatcctgactccctaaggttttctatagtactatgctctcactcccaacttgaacacttctttaagctttccatccgtagtccttaattgggtttcagtccctccactcccattgttttttctccttacccctctttctcttttgccccctcccccaattctgtctccattcctagggttctaccaatcacatccgtgcactgtgatttagaggcatattctctgtagctgagaggggagccctgcgctcactgccatatgtttattagttatgaactgaataaaggaaggcttgacttcctgggtcatgggagtgaaggagtctgggtgacaggaagcaagcggcctgtcatgcctattgcctagctgccagattaaccttgccttgaaaataacgattgccccataggctattcagtgtaaggaagacaaaaattccttgggaacctactagtgggtttgccttccagatttggtagacgcaaaaagcaaagggggaacatgggcaaaggaagatttgatgaaaaagaaaatgtgtccaactgcatccagttgaaaacttcagttattaagggtattaagaatcaattgatagagcaatttccaggtattgaaccatggcttaatcaaatcatgcctaagaaagatcctgtcaaaatagtccgatgccatgaacatatagaaatccttacagtaaatggagaattactcttttttagacaaagagaagggcctttttatccaaccctaagattacttcacaaatatccttttatcctgccacaccagcaggttgataaaggagccatcaaatttgtactcagtggagcaaatatcatgtgtccaggcttaacttctcctggagctaagctttaccctgctgcagtagataccattgttgctatcatggcagaaggaaaacagcatgctctatgtgttggagtcatgaagatgtctgcagaagacattgagaaagtcaacaaaggaattggcattgaaaatatccattatttaaatgatgggctgtggcatatgaagacatataaatgagcctcagaaggaatgcacttgggctaaatatggatattgtgctgtatc

SEQ ID NO: 52543 - DNA, 549 bp, Artificial Sequence
  derived and/or modified sequence
atgggcaagggccggttcgacgagaaggagaacgtgagcaactgcatacagctcaagacttccgtgattaaggggatcaagaatcaactcattgaacagtttccaggaatcgaaccatggttaaatcagattatgcctaaaaaagaccccgtcaagatagtgcgatgtcatgaacatattgagatcttaacggttaatggcgaactgctgtttttccggcagagagaaggtcccttctaccccactttacgactgttgcataaatatccgttcatcctgccgcaccagcaagtcgacaagggcgccattaaattcgttctgtcaggggccaatatcatgtgcccagggttgacatctcctggcgctaaactctatcccgccgctgtggacacaattgtagcaattatggctgagggcaaacagcatgctctgtgcgtgggcgtgatgaaaatgtccgcagaagatatcgagaaggttaacaaagggattggcattgagaatatccattaccttaatgacggtctttggcacatgaagacatacaaatag

SEQ ID NO: 52544 - DNA, 549 bp, Artificial Sequence
  derived and/or modified sequence
atgggtaagggtaggtttgacgaaaaggaaaacgtgagtaactgtatccagttgaaaacctccgtgattaaaggcatcaagaatcaacttatagagcagtttcccggaatcgaaccctggctgaaccagatcatgcccaaaaaggatcctgtcaaaatcgtcaggtgtcacgagcacattgagatcttgacggtgaatggcgaactcctgttcttccgccagcgcgagggacctttctatcctactttgcggctgcttcataagtatcctttcattcttccacaccagcaggtcgataagggagctattaagttcgtgctgtcaggggcaaacatcatgtgtcctggacttacctcgccaggggctaaattgtatcccgctgccgttgacacaatcgtcgcaattatggccgaggggaagcaacacgctctctgcgttggtgttatgaagatgagtgcagaagatattgagaaagtcaataaggggatcgggattgagaatatacactatctcaacgacggtctttggcacatgaagacatataaatag

SEQ ID NO: 52545 - protein, 643 aa, Artificial Sequence
  derived and/or modified sequence
MAEGELKDMEQFFDDLSDSFSGTEPEVHKTSVVGLFLRHMILAYSKLSFSQVFKLYTALQQYFQNGEKKTVEDADMELTSRDEGERKMEKEELDVSVREEEVSCSGPLSQKQAEFFLSQQASLLKNDETKALTPASLQKELNNLLKFNPDFAEAHYLSYLNNLRVQDVFSSTHSLLHYFDRLILTGAESKSNGEEGYGRSLRYAALNLAALHCRFGHYQQAELALQEAIRIAQESNDHVCLQHCLSWLYVLGQKRSDSYVLLEHSVKKAVHFGLPRAFAGKTANKLMDALKDSDLLHWKHSLSELIDISIAQKTAIWRLYGRSTMALQQAQMLLSMNSLEAVNAGVQQNNTESFAVALCHLAELHAEQGCFAAASEVLKHLKERFPPNSQHAQLWMLCDQKIQFDRAMNDGKYHLADSLVTGITALNSIEGVYRKAVVLQAQNQMSEAHKLLQKLLVHCQKLKNTEMVISVLLSVAELYWRSSSPTIALPMLLQALALSKEYRLQYLASETVLNLAFAQLILGIPEQALSLLHMAIEPILADGAILDKGRAMFLVAKCQVASAASYDQPKKAEALEAAIENLNEAKNYFAKVDCKERIRDVVYFQARLYHTLGKTQERNRCAMLFRQLHQELPSHGVPLINHL

SEQ ID NO: 52546 - DNA, 660 bp, Artificial Sequence
  derived and/or modified sequence
atgttatctccctgccttagttcttactttgtgggccttttcttaagacatatgattttagcctattcgaagctttctttctctcaggttttcaaactttacaccgctctgcagcaatactttcagaacggtgaaaagaagaccgtggaagatgctgatatggaactgaccagtcgagacgaaggggagcggaaaatggaaaaggaggaactggacgtctctgttcgggaggaggaagtcagctgctccggcccactgtcccaaaaacaggctgagttttttctcagccagcaggcctctctattaaagaatgacgaaacaaaggcacttacgcctgcctctttgcagaaggagttaaataacctgcttaagttcaacccagactttgcagaggcgcactacctatcctacctgaataatctccgagtacaggacgtcttttccagcacacacagcttgctccattactttgataggctaatcctcaccggtgctgagtcaaaaagcaatggcgaagaaggctatgggaggtccttgcgatatgccgccctgaatctagcggcactccattgcagatttggacactataccagcccaccttgggagtacagccccctgttcaatcgggaactactgttgggacgccgtcagacctcatag

SEQ ID NO: 52547 - DNA, 135 bp, Artificial Sequence
  derived and/or modified sequence
atggccgagggcgagctgaaagacatggagcagttctttgacgacctgtctgatagcttctcagggaccgaacctgaggtacataagacgtccgtagtgggactctttctgcggcatatgattcttgcgtattag

SEQ ID NO: 52548 - DNA, 660 bp, Artificial Sequence
  derived and/or modified sequence
atgctgagcccctgcctgagcagctactttgtgggcctcttcctgcggcacatgatcctggcctacagcaagctgtccttcagccaggtgttcaagctgtacacagccctgcagcagtacttccagaatggagagaagaagacagtggaggatgctgacatggagctgaccagcagagatgaaggagagaggaagatggagaaggaggagctggatgtgtctgtgcgggaggaggaggtgtcctgcagcggccccctgagccagaagcaggccgagttcttcctgagccagcaggccagcctgctgaagaatgatgagaccaaggccctgaccccagccagcctgcagaaggagctgaacaacctgctgaagttcaacccagactttgctgaggcccactacctgagctacctgaacaacctgcgggtgcaggatgtgttcagcagcacccacagcctgctgcactactttgacaggctcatcctgactggagctgagagcaagagcaatggagaggagggctacggccgcagcctgcgctatgctgccctgaacctggccgccctgcactgccgcttcggccactacaccagccccccctgggagtacagccccctcttcaaccgggagctgctgctgggccggcggcagaccagctag

SEQ ID NO: 52549 - DNA, 135 bp, Artificial Sequence
  derived and/or modified sequence
atggccgagggggagctgaaggacatggagcagttctttgatgacctgagtgacagcttctctggaacagagcctgaggtgcacaagacctctgtggtgggcctcttcctgcggcacatgatcctggcctactag

SEQ ID NO: 52550 - DNA, 660 bp, Artificial Sequence
  derived and/or modified sequence
atgctgagcccctgcctgagcagctacttcgtgggcctgttcctgagacatatgatactggcttactcgaaattgagtttctcccaggttttcaagctgtacaccgcgttgcagcagtattttcaaaacggtgagaagaaaacggttgaggacgccgatatggagctgacctcaagagacgagggggagaggaagatggaaaaagaggagcttgacgtatcagtgagggaagaagaagtgtcctgctccgggccgctttcccagaaacaagctgaattctttttgtctcagcaggcctcgcttctgaaaaatgatgagacgaaagccttaaccccagccagtctgcagaaggaacttaataatctcttgaagttcaaccccgactttgctgaggcacactatctttcctaccttaacaacttgagggtgcaagatgtgttttcttccacccactcacttctccactactttgacaggttgatactgacgggggctgagtccaaatcaaatggtgaggaagggtatgggcggtcccttcgctacgcagccttgaacctggccgctctccattgccgcttcgggcattacacaagtcctccttgggagtattccccactttttaatcgagagctgctcctcggacgacgccagacttcctag

SEQ ID NO: 52551 - DNA, 135 bp, Artificial Sequence
  derived and/or modified sequence
atggccgagggcgagctgaaggacatggagcagttcttcgacgacctgtccgatagcttctcggggactgagcccgaggtccacaagacttcagtcgttggtctctttctcagacacatgatcctggcatattag

SEQ ID NO: 52552 - DNA, 660 bp, Artificial Sequence
  derived and/or modified sequence
atgctttccccttgtctctcgtcttattttgtaggtttgtttctgcgtcacatgatcttggcctacagtaagctttctttcagccaagtgtttaaactgtacactgcccttcagcagtacttccagaatggtgagaaaaagacagtggaggatgctgatatggaactgaccagtagagatgagggtgaaagaaaaatggaaaaagaagaacttgatgtatctgtaagagaagaggaggtatcttgcagtgggcctctgtcccaaaaacaagcagaattttttctttctcaacaggcttctttgctaaagaatgatgagactaaggccctcactccagcttccttgcagaaggaattaaacaatttgttgaaatttaatcctgattttgctgaagcgcattatctcagctacttaaacaacctccgtgtccaagatgttttcagttcaacacacagtctcctccattattttgatcgtctgattcttaccggagccgaaagcaaaagtaatggggaagagggctatggccggagcttgagatacgccgctctgaatcttgccgccctgcactgccgcttcggtcactatacctcgcctccctgggaatacagtcccttgttcaacagagagcttttgctgggaagacggcaaacaagctga

SEQ ID NO: 52553 - DNA, 660 bp, Artificial Sequence
  derived and/or modified sequence
atgctgtccccttgtctgagttcttactttgtgggattatttctgcggcatatgattctggcttattctaaactgagcttctcacaagtgtttaaactgtacacagcattacagcagtactttcaaaatggggagaaaaaaacagtggaagatgccgacatggagctgacttctagggatgaaggcgaaagaaagatggagaaggaggaattggatgtaagtgttcgtgaggaagaagttagctgctctgggccactgtcccagaaacaggctgaattttttctgagccagcaggccagtctgttgaaaaacgatgaaactaaagcactcactcccgcttccctgcaaaaagaactgaataatttgctgaagtttaatccagacttcgcggaagcgcactacttgagctacttaaataacttgcgggttcaggatgtcttctccagcacacactcgctgctgcattactttgaccggctgattctgacaggagcagaatcgaagtccaacggtgaagaagggtacggtaggtcactccggtacgcggcactcaacctggctgccctccactgccgattcggccactacacctcgccaccttgggaatattccccactctttaatagggagttactgctggggcgacggcagacgtcctag

SEQ ID NO: 52554 - DNA, 135 bp, Artificial Sequence
  derived and/or modified sequence
atggcggagggcgaactcaaagatatggaacaattttttgatgatctgtcagactcattctctggaactgagccagaggtacacaagaccagcgttgtgggcctgtttctgcggcatatgatccttgcctactag

SEQ ID NO: 52555 - DNA, 660 bp, Artificial Sequence
  derived and/or modified sequence
atgctgagcccctgcctgagcagctacttcgtgggcctgttcctgagacacatgatcctggcctacagcaagctgagcttcagccaggtgttcaagctgtacaccgccctgcagcagtacttccagaacggcgagaagaagaccgtggaggacgccgacatggagctgaccagcagagacgagggcgagagaaagatggagaaggaggagctggacgtgagcgtgagagaggaggaggtgagctgcagcggccccctgagccagaagcaggccgagttcttcctgagccagcaggccagcctgctgaagaacgacgagaccaaggccctgacccccgccagcctgcagaaggagctgaacaacctgctgaagttcaaccccgacttcgccgaggcccactacctgagctacctgaacaacctgagagtgcaggacgtgttcagcagcacccacagcctgctgcactacttcgacagactgatcctgaccggcgccgagagcaagagcaacggcgaggagggctacggcagaagcctgagatacgccgccctgaacctggccgccctgcactgcagattcggccactacaccagccccccctgggagtacagccccctgttcaacagagagctgctgctgggcagaagacagaccagctag

SEQ ID NO: 52556 - DNA, 135 bp, Artificial Sequence
  derived and/or modified sequence
atggccgagggcgagctgaaggacatggagcagttcttcgacgacctgagcgacagcttcagcggcaccgagcccgaggtgcacaagaccagcgtggtgggcctgttcctgagacacatgatcctggcctactag

SEQ ID NO: 52557 - protein, 222 aa, Artificial Sequence
  derived and/or modified sequence
MSPPGSAAGESAAGGGGGGGGPGVSEELTAAAAAAAADEGPAREEQRPIQPSFTKSLCRESHWKCLLLSLLMYGCLGAVAWCHVTTVTRLTFSSAYQGNSLMYHDSPCSNGYVYIPLAFLLMLYAVYLVECWHCQARHELQHRVDVSSVRERVGRMQQATPCIWWKAISYHYVRRTRQVTRYRNGDAYTTTQVPGCLGSQVVPLRSPWRNAQLDAGSDEEPA

SEQ ID NO: 52558 - protein, 566 aa, Artificial Sequence
  derived and/or modified sequence
MSPPGSAAGESAAGGGGGGGGPGVSEELTAAAAAAAADEGPAREEQRPIQPSFTKSLCRESHWKCLLLSLLMYGCLGAVAWCHVTTVTRLTFSSAYQGNSLMYHDSPCSNGYVYIPLAFLLMLYAVYLVECWHCQARHELQHRVDVSSVRERVGRMQQATPCIWWKAISYHYVRRTRQVTRYRNGDAYTTTQVYHERVNTHVAEAEFDYARCGVRDVSKTLVGLEGAPATRLRFTKCFSFASVEAENAYLCQRARFFAENEGLDDYMEAREGMHLKNVDFREFMVAFPDPARPPWYACSSAFWAAALLTLSWPLRVLAEYRTAYAHYHVEKLFGLEGPGSASSAGGGLSPSDELLPPLTHRLPRVNTVDSTELEWHIRSNQQLVPSYSEAVLMDLAGLGTRCGGAGGGYAPSCRYGGVGGPGAAGVAPYRRSCEHCQRAVSSSSIFSRSALSICASPRAGPGPGGGAGCGGSRFSLGRLYGSRRSCLWRSRSGSVNEASCPTEQTRLSSQASMGDDEDDDEEEAGPPPPYHDALYFPVLIVHRQEGCLGHSHRPLHRHGSCVETSL

SEQ ID NO: 52559 - DNA, 669 bp, Artificial Sequence
  derived and/or modified sequence
atgagcccccccggcagcgccgccggcgagagcgccgccggcggcggcggcggcggcggcggccccggcgtgagcgaggagctgaccgccgccgccgccgccgccgccgccgacgagggccccgccagagaggagcagagacccatccagcccagcttcaccaagagcctgtgcagagagagccactggaagtgcctgctgctgagcctgctgatgtacggctgcctgggcgccgtggcctggtgccacgtgaccaccgtgaccagactgaccttcagcagcgcctaccagggcaacagcctgatgtaccacgacagcccctgcagcaacggctacgtgtacatccccctggccttcctgctgatgctgtacgccgtgtacctggtggagtgctggcactgccaggccagacacgagctgcagcacagagtggacgtgagcagcgtgagagagagagtgggcagaatgcagcaggccaccccctgcatctggtggaaggccatcagctaccactacgtgagaagaaccagacaggtgaccagatacagaaacggcgacgcctacaccaccacccaggtgcccggctgcctgggcagccaggtggtgcccctgagaagcccctggagaaacgcccagctggacgccggcagcgacgaggagcccgcctag

SEQ ID NO: 52560 - DNA, 1701 bp, Artificial Sequence
  derived and/or modified sequence
atgagcccccccggcagcgccgccggcgagagcgccgccggcggcggcggcggcggcggcggccccggcgtgagcgaggagctgaccgccgccgccgccgccgccgccgccgacgagggccccgccagagaggagcagagacccatccagcccagcttcaccaagagcctgtgcagagagagccactggaagtgcctgctgctgagcctgctgatgtacggctgcctgggcgccgtggcctggtgccacgtgaccaccgtgaccagactgaccttcagcagcgcctaccagggcaacagcctgatgtaccacgacagcccctgcagcaacggctacgtgtacatccccctggccttcctgctgatgctgtacgccgtgtacctggtggagtgctggcactgccaggccagacacgagctgcagcacagagtggacgtgagcagcgtgagagagagagtgggcagaatgcagcaggccaccccctgcatctggtggaaggccatcagctaccactacgtgagaagaaccagacaggtgaccagatacagaaacggcgacgcctacaccaccacccaggtgtaccacgagagagtgaacacccacgtggccgaggccgagttcgactacgccagatgcggcgtgagagacgtgagcaagaccctggtgggcctggagggcgcccccgccaccagactgagattcaccaagtgcttcagcttcgccagcgtggaggccgagaacgcctacctgtgccagagagccagattcttcgccgagaacgagggcctggacgactacatggaggccagagagggcatgcacctgaagaacgtggacttcagagagttcatggtggccttccccgaccccgccagacccccctggtacgcctgcagcagcgccttctgggccgccgccctgctgaccctgagctggcccctgagagtgctggccgagtacagaaccgcctacgcccactaccacgtggagaagctgttcggcctggagggccccggcagcgccagcagcgccggcggcggcctgagccccagcgacgagctgctgccccccctgacccacagactgcccagagtgaacaccgtggacagcaccgagctggagtggcacatcagaagcaaccagcagctggtgcccagctacagcgaggccgtgctgatggacctggccggcctgggcaccagatgcggcggcgccggcggcggctacgcccccagctgcagatacggcggcgtgggcggccccggcgccgccggcgtggccccctacagaagaagctgcgagcactgccagagagccgtgagcagcagcagcatcttcagcagaagcgccctgagcatctgcgccagccccagagccggccccggccccggcggcggcgccggctgcggcggcagcagattcagcctgggcagactgtacggcagcagaagaagctgcctgtggagaagcagaagcggcagcgtgaacgaggccagctgccccaccgagcagaccagactgagcagccaggccagcatgggcgacgacgaggacgacgacgaggaggaggccggccccccccccccctaccacgacgccctgtacttccccgtgctgatcgtgcacagacaggagggctgcctgggccacagccacagacccctgcacagacacggcagctgcgtggagaccagcctgtag

SEQ ID NO: 52561 - DNA, 669 bp, Artificial Sequence
  derived and/or modified sequence
atgagtccgccaggcagtgcagcaggagaatccgccgctggcggggggggtggaggtggcgggccaggagtgtctgaagaactaacagcggcggcagccgcggctgccgctgacgagggtccagcaagagaagaacagcgccccatccaaccttcgtttacaaaaagcttatgtcgggagtcgcattggaaatgcttattattgtcccttctcatgtacggttgcctgggggctgtggcatggtgtcacgtcacaacggtcacccgactgacctttagctcagcttaccaggggaacagtctgatgtaccatgatagcccctgctccaacggatatgtgtacatccctcttgcattcctgctgatgttgtatgctgtgtacctggttgagtgctggcactgccaggcgcgtcatgagctccaacaccgggttgacgtgtccagtgtgcgcgagagggtgggccgcatgcagcaggctacaccatgtatctggtggaaggcaatctcctaccattacgtcaggagaactcgacaagtgacccgatataggaacggcgatgcatataccaccacacaagttcccggttgcctgggttcccaggtcgtgcccctgaggtcgccatggcgcaacgcacagctggacgccggatctgacgaggagcctgcctag

SEQ ID NO: 52562 - DNA, 1701 bp, Artificial Sequence
  derived and/or modified sequence
atgtccccgccaggatcagcagcaggggagagcgctgccggcgggggtggaggtggggggggccccggagtgtccgaggagttgactgcagctgcggccgccgcggctgccgatgaaggtccggcgcgcgaggagcagaggccgatccagccgtcatttaccaagtcactgtgccgcgaatcacattggaaatgtttgttattgagtcttttgatgtacggttgtctcggcgccgtggcttggtgccacgtcaccacagtgacccgcttgacgttttctagtgcttaccaggggaactcactaatgtatcacgatagcccctgtagtaacggctatgtgtatatccccttagcttttctgcttatgttgtatgctgtgtatctggttgagtgctggcattgtcaggcccggcatgagctccagcaccgggtggatgtatcttctgtccgagagagggtgggcaggatgcagcaggcgaccccgtgcatttggtggaaggctattagctaccattacgtccgccgaacccggcaggttaccaggtataggaacggcgatgcctacacaacaacacaggtgtatcatgaacgggtcaacacccacgtggcagaggcagagttcgattacgctcgatgtggtgtcagggacgtgtctaaaacacttgtcggactggagggagcccccgccacccgacttcggttcactaagtgtttttctttcgctagtgtggaggccgagaacgcttacctgtgtcagcgggccaggttctttgccgagaacgaggggctggatgattacatggaggcccgggagggaatgcacttaaagaacgtcgacttcagggaatttatggtggcattccctgatcccgcccgccccccctggtatgcctgcagcagtgccttttgggccgccgccttactcaccctgtcctggccactgagagtgctggccgagtaccggaccgcctacgcccattatcacgtagaaaaactgttcgggttggaaggcccgggcagcgcatcttcagcgggagggggcctgtcaccaagtgacgagctgttacctccccttacacatcgattgcccagggttaataccgtcgatagtacggagttggagtggcacatccggagcaaccaacagttggtgccttcttattcggaagctgttctgatggatctggcaggcttaggtacccgctgtgggggcgcagggggcggatatgctccgagttgccgctacggcggagtcggtggccctggcgctgctggagtggctccttacaggcgatcctgcgagcactgccaaagggctgtgtcatcatcgtccatctttagtcggtcagccctgtcaatttgtgcctcaccaagggccggacccggacctggcggaggcgcaggttgcggcggcagcaggttttctttaggaaggttatacggaagccggagatcctgtctgtggaggtctcgttcgggatcagtgaacgaagcctcatgtccaacggaacaaacgcgattgagcagtcaggctagcatgggcgacgacgaggatgatgatgaagaagaagctggccctccccctccctatcacgacgccctgtactttcctgtactgattgtgcatcgacaagagggttgccttggccattcacacagaccactgcaccggcatgggtcctgcgttgaaacctcgctttag

SEQ ID NO: 52563 - DNA, 669 bp, Artificial Sequence
  derived and/or modified sequence
atgagccccccaggcagcgctgctggggagagcgctgctgggggcggcggcggcggcggcggccctggggtgtctgaggagctgacagctgctgctgctgctgctgctgctgatgagggccctgcccgggaggagcagaggcccatccagcccagcttcaccaagagcctgtgccgggagagccactggaagtgcctgctgctgagcctgctgatgtatggctgcctgggcgctgtggcctggtgccacgtgaccaccgtgacccggctgaccttcagcagcgcctaccagggcaacagcctgatgtaccatgacagcccctgcagcaatggctacgtgtacatccccctggccttcctgctgatgctgtatgctgtgtacctggtggagtgctggcactgccaggcccggcatgagctgcagcaccgggtggatgtgtcctctgtgcgggagcgggtgggccgcatgcagcaggccaccccctgcatctggtggaaggccatctcctaccactacgtgcggaggacccggcaggtgacccgctacagaaatggagatgcctacaccaccacccaggtgcccggctgcctgggcagccaggtggtgcccctgcggagcccctggagaaatgcccagctggatgctggcagtgatgaggagcccgcctag

SEQ ID NO: 52564 - DNA, 1701 bp, Artificial Sequence
  derived and/or modified sequence
atgagccccccaggcagcgctgctggggagagcgctgctgggggcggcggcggcggcggcggccctggggtgtctgaggagctgacagctgctgctgctgctgctgctgctgatgagggccctgcccgggaggagcagaggcccatccagcccagcttcaccaagagcctgtgccgggagagccactggaagtgcctgctgctgagcctgctgatgtatggctgcctgggcgctgtggcctggtgccacgtgaccaccgtgacccggctgaccttcagcagcgcctaccagggcaacagcctgatgtaccatgacagcccctgcagcaatggctacgtgtacatccccctggccttcctgctgatgctgtatgctgtgtacctggtggagtgctggcactgccaggcccggcatgagctgcagcaccgggtggatgtgtcctctgtgcgggagcgggtgggccgcatgcagcaggccaccccctgcatctggtggaaggccatctcctaccactacgtgcggaggacccggcaggtgacccgctacagaaatggagatgcctacaccaccacccaggtgtaccacgagcgggtgaacacccacgtggccgaggccgagtttgattatgcccgctgtggggtgagagatgtgtccaagaccctggtgggcctggagggcgccccagccacccggctgcgcttcaccaagtgcttctcctttgcctctgtggaggccgagaatgcctacctgtgccagagggcccgcttctttgctgaaaatgaaggcctggatgactacatggaggcccgggagggcatgcacctgaagaatgtggacttccgggagttcatggtggccttcccagaccctgcccggcccccctggtacgcctgcagcagcgccttctgggccgccgccctgctgaccctgtcctggcccctgcgggtgctggccgagtacagaacagcctatgcccactaccacgtggagaagctgtttggcctggagggccctggcagcgccagcagcgctgggggcggcctgagccccagtgatgagctgctgccccccctgacccaccggctgccccgggtgaacacagtggacagcacagagctggagtggcacatccgcagcaaccagcagctggtgcccagctacagcgaggccgtgctgatggacctggccggcctgggcacccgctgtggcggggccggcggcggctacgcccccagctgccgctatggaggagtgggcggccctggagctgctggggtggccccctaccgccgcagctgtgagcactgccagagagctgtgagcagcagcagcatcttcagccgcagcgccctgagcatctgtgccagccccagggctggccctggccctgggggcggggccggctgcggcggcagccgcttcagcctgggccgcctgtatggcagcagaagaagctgcctgtggaggagccgcagcggctctgtgaatgaggccagctgccccacagagcagacccggctgagcagccaggcctccatgggagatgatgaagatgatgatgaggaggaggccggccccccaccaccctaccatgatgccctgtacttccctgtgctgattgtgcaccggcaggagggctgcctgggccacagccaccggcccctgcaccgccacggcagctgtgtggagaccagcctgtag

SEQ ID NO: 52565 - DNA, 669 bp, Artificial Sequence
  derived and/or modified sequence
atgagcccccccggcagcgccgccggcgagagcgccgccggcggcggtgggggcggggggggccctggggttagtgaggaactgactgcagcggcagctgctgcggccgcagatgaagggccagcccgcgaggagcaacgtcctattcagccaagtttcacaaagtcactgtgcagggagtcccactggaagtgcttgctgctctcattgctgatgtatgggtgtctgggagcagtggcctggtgccatgttacgaccgtcactagactgacattcagctccgcctatcagggtaattcactaatgtaccacgatagtccctgctcgaatggctacgtttatatccccctggcttttctcctaatgctgtacgcagtttacctggtggagtgttggcactgtcaggcacggcatgagctccaacatagagtagatgtgtcttcggtgagggagcgggtagggagaatgcagcaggcaacaccttgcatttggtggaaagctataagctaccactacgtgcgcaggaccaggcaagtcacccgttatcggaatggagatgcctacaccacaacacaggtccctggctgtctggggtcacaggttgtccccctccggagcccctggcgaaacgcccaattagacgctggctctgacgaggaaccagcatag

SEQ ID NO: 52566 - DNA, 1701 bp, Artificial Sequence
  derived and/or modified sequence
atgagcccccccggcagcgccgccggcgagagcgccgccggcggcggtggtggagggggaggacctggtgttagcgaagagctgactgccgctgcggccgcagccgctgctgacgagggaccagcacgcgaggaacaacgcccgatacagccgtcatttacaaaaagtttatgtcgggaaagccactggaagtgtctgctcttgtccctgctaatgtacggctgcctgggagctgtcgcttggtgtcacgtgacaaccgttactcggttgacgttcagctctgcctatcagggaaattcccttatgtaccacgatagcccctgttccaacggctatgtgtacattccgttggccttcctgctgatgctgtacgccgtgtacttggtggagtgctggcactgtcaggcacggcatgaactgcagcacagagttgacgtgagctctgtgcgggagagggtcggaaggatgcagcaggcaactccatgcatatggtggaaagctatctcataccattatgtacggcggacccgacaggtgacgaggtaccgcaacggagatgcatacacaaccactcaggtgtaccacgagcgcgtgaacacccatgttgccgaggctgaatttgactatgctcgctgcggggtgagggatgtgtccaaaacactggtaggactggaaggcgcgcccgccacacgactgcgtttcactaagtgctttagttttgcttccgttgaagccgagaacgcctacctctgccaaagagcgcggttcttcgcagagaacgaggggctagatgattatatggaagcccgagagggcatgcacctgaaaaatgtcgacttccgagagtttatggtcgcatttcccgatccagccagaccaccctggtatgcctgctccagcgccttttgggcagctgcactgctgaccctgtcctggcctctgagggttctcgcagaatataggacggcctatgctcactatcacgtggagaagctctttggactggaaggcccaggctccgcctcttctgcaggaggcggtttgagccccagcgacgagctactgcctccattaacccatagactgccacgtgtgaatacagtggacagcacagagctggagtggcacatcagatcaaatcagcagctcgtgcccagctattctgaagcggtgctaatggatctcgctgggctaggcaccaggtgtgggggggccggtggcggctatgcaccctcctgccggtacggcggcgtcggcggtcccggcgccgctggggtggcaccctaccgtcgtagttgtgaacactgccagagggctgtaagcagctctagcatctttagtaggagtgcactgtctatttgtgcttctcccagggctggtcctgggcccggggggggggctgggtgcggaggatctaggttcagcctggggcgattgtatggaagcaggcgctcttgcctgtggagatcccggtcggggtctgtgaacgaggcatcatgcccaacggaacagaccaggctgtctagccaagctagcatgggcgatgatgaggatgacgatgaagaagaggcaggccctccgcccccctatcatgatgcactctactttcccgtccttatcgtgcacaggcaagaaggatgccttgggcacagccatcgtcccctgcatcgtcacgggtcctgtgttgaaacgtcactgtag

SEQ ID NO: 52567 - DNA, 669 bp, Artificial Sequence
  derived and/or modified sequence
atgtcccctcctggatcggccgcaggggagtcagccgcaggaggcggtggcggtgggggtggccctggagtcagcgaggaattgaccgcagctgctgccgcagcagctgcagatgagggtccggctagagaagagcaacgtccaatacagccctcgtttaccaagagcctttgtagggaaagccactggaagtgcctcttactgtccctgctcatgtacgggtgtctgggcgctgtcgcatggtgtcacgtgaccacggtgacccgacttacatttagcagcgcatatcaaggcaatagccttatgtatcacgatagtccctgcagcaacggatatgtctatatccccctcgcctttctgctgatgctgtatgctgtttatctcgttgaatgctggcactgccaggcgagacacgaacttcagcacagagtagacgtcagcagcgtgcgggagcgcgtgggccgaatgcagcaagccactccctgcatatggtggaaggcaatcagctaccactacgtgaggcgcacccgccaggtcacccggtatcgcaacggtgatgcctataccacaactcaagtacctgggtgcctgggctcccaggtagtgcccctgcggtctccatggcggaatgcccagctggatgccggaagtgatgaagaacctgcttag

SEQ ID NO: 52568 - DNA, 1701 bp, Artificial Sequence
  derived and/or modified sequence
atgtctcctcctggtagcgccgcaggagagtccgcagccggagggggaggagggggagggggtcctggcgttagcgaggaactgaccgccgcagctgctgcggcagccgcagatgagggtcctgcacgcgaagaacagaggcctatacaaccaagctttactaaatctttatgtcgagaaagccactggaaatgtctgctgctttcattactaatgtacggctgcctcggcgcagtcgcttggtgtcatgtgacaactgtgacccgactgacattcagctccgcttatcaaggtaacagtctcatgtaccacgactcgccatgttcgaacggatacgtttatatccccctggcattccttctgatgctttacgccgtatatctggtcgaatgttggcactgccaggctcgccatgaattgcagcatcgcgtcgacgtttcctcagtcagggagagggtcggacggatgcaacaggcaacaccttgtatttggtggaaggccatttcctaccactacgtccgcaggacccgccaggtcacccgctaccgaaatggtgatgcctatactacaactcaggtgtatcacgagcgcgtgaacactcatgtcgctgaagccgagtttgactacgccagatgtggagtgcgtgatgtgtctaagactctggtgggactcgagggggcaccagccactagacttagatttaccaaatgttttagtttcgcaagtgttgaagctgagaatgcgtacctctgtcaacgcgcacgtttctttgcagagaacgaagggttagacgactacatggaagcacgtgaggggatgcatctgaaaaatgtggacttccgcgagtttatggtggccttccctgaccccgcacgcccaccatggtacgcttgctccagtgctttttgggctgctgcactcttgaccctctcttggccactgagagtgctggcagaatacaggactgcgtacgctcattaccacgtggaaaagctattcgggctggaaggcccaggcagcgcctctagcgccggaggtggcctgtcacctagtgacgaactcttacctcctctcacacataggttgcctagagtgaatactgtcgactctactgaactagagtggcatatcaggagcaatcagcagttggtcccaagctacagcgaggccgttctaatggacctggcgggtctggggaccagatgtggcggagcagggggaggatacgctccatcttgcaggtacgggggtgtgggtggtccgggagctgctggggtggcgccttaccggaggagctgtgaacactgccagcgcgctgtatcctctagcagtatcttcagcagatcagctctgagtatctgcgcgagtccgcgagccggacctgggcctggcggtggcgctggatgtggtgggagccgtttctccctgggtcgattatatggttcccggaggagttgcctttggcgctcccggagcgggtctgttaatgaagctagttgtcctacagaacaaacacgactgagcagccaagctagcatgggcgacgacgaagacgatgatgaagaagaggccggtcctcctccaccctaccacgacgccctgtactttccagtattaattgtacataggcaggaaggatgcctaggacatagccaccggccacttcacagacatggaagctgcgtcgagacctccttgtag

SEQ ID NO: 52569 - DNA, 3061 bp, Artificial Sequence
  derived and/or modified sequence
atgtccccccctggctcggccgcgggagagagcgccgccggcggcggcggcggcggtggcggccccggggtctcggaggagctcacggcggcggcggcagcggcggcggcggacgagggccccgcccgagaggagcagcgtcccatccagccctctttcaccaagtccctctgccgtgagtcccactggaagtgcctcctgctctcgctgctcatgtacggctgcctgggggcagtggcctggtgccacgtcaccacagtgacgcgcctcaccttcagcagcgcctaccagggcaacagcctcatgtaccatgacagcccctgctccaacggctatgtctacatccccctggccttcctgctcatgttgtacgccgtctacctggtggagtgttggcactgccaagcccgccatgagctgcagcaccgtgttgatgtgagcagtgtgcgggaacgtgtgggccgcatgcagcaagccacgccctgcatctggtggaaggccatcagctaccactatgtccgccgcacccgccaggtcaccagataccgcaatggagacgcctataccaccacccaggtaccaggctgcctaggaagccaggtggtgcctttaagatctccatggagaaacgcacagctcgacgcaggatccgacgaagaaccagcctaaaggggttcagagcccagacatgaatccccagcggctcatggtcagcaatatggggagtgggaaggacgaggtccagtgtgtgctcccacctcaaagctctccctctccccattcctcctactggctcaaccagacccacctctcctgttccctccctcctccacctgagacccccagcagcccctgtcctctctgtagcccttccagactcacgggggacctgacatcccagggaagatgccatcagagatgcagacactgagtgtgcggatgtggtcagccaccacgcggtacgctgtgtctgtgcgcccctcgtctgccacccctactcggcccaagtaagggggtgccctgcagccctgggaagcagaagagtcagccagtggccctgcctgacctggcccaggtgggtgctctttatcgcctctagagcatctgccctcagccctaaagccaaccacatccagaatggccttgccagtccagtcctgggctgagaagcctcacagatgagcacaagccaggccctgccctcacggggctcatatttggtgctacaagtgaacatatctgtgaccatttactgaatttctactatcagaactgggtgagtacttgaacaacatggcctcgaatccccaaaacagcccattccaggaggtattagcatgcttgctttaaagaagaagaagctgaggctcagaggaactcagtgacacaaggctacccagctctcaaggagcagatctgagatctcagccgggcctgttggactccaggtgctctccactacctgttcttgcctctcccatcttttgtgggggtgggcagggagggagagtgtaagctacatacacggaaatgctccaaagcagggagcttgattcacttaccaccaaacctctctcttccccaagcttcttcgtctaacagtcatgccattcactgtgttgctcaagtcaatagcctgggagccatctttgaattctttttcccctacccgtcatgatccatcagtggttccttttgctcctacctccatgacatctctcaaatcaatctacttgtctctacttccactgctattatccgaagcatgccctgtggtccttgcctggaccgataatagcctcccaactgattcctaagtttctgctctcatctccctccagctcatcctccacacagcaacaggagtgagccaccgtgcccagccctgagaactcttctcaccactctgagaatcaaggccccactttggactttgaggcccacaagactggattctgccttcttctctgtgagactgttcacaaaaatggccctttcctaggcatatgccactttaaaatgggactttacagctgtttcccatcaagggacagaatccatttctccatcccctgaatctctgctggctttgtgacttgctttggcccatagaatacagtggaaacaacactgttctgagcctatgtgtctgctctctgtcttggaaccttgctgagctgtgatgtggacaagcccagactagccagctaggtgatgacagacacatggtccagtcacccctactgcccccaaactgacagccagccaagccccagaggagctgcggcctctcagctcaccacagatggatgaatgagctcacacaagaccaaagaatgagccagctaagcccagcctaaacgctagctcacagactcagggggcagatacatggttgttggttaagccacagagcattagggtggttatacagcaaaagccaactgacacatgttcctactatatcccatgggattctcctttagctggctggccaccttttagtttttggcacatgtcaagccctttcttgcggggcaaggagggagggtataagctacacacatgtggaaatgctccaaagcagggagcttgattcacctagctccaaacctctctcttccccaagcttcttcatctcagtaaacagtcatgccattcactgtgttgctcaagccaatagcctgggagccatctttgatttctctttcccctccccatctaatccatcagtaccaaggcccttggtacctgctgtcccctctgcctggaaagaacttcctgtagctgactcctcctttggggctcagctcaaaggtcatcttcttggtgagccttccccaagcaccttatctaagattcctctgtacccctccttcttcctagttactttcacccatgtttactgcctgttcacaatctgtaagctattaccttgttctttaacacatttattgattgtctatctctcatgctagcatataatctccatgatctctttcctgcttactgctgtgtcttctgtaccaaacacaaaggatttaacataaagtaagcactc

SEQ ID NO: 52570 - DNA, 4895 bp, Artificial Sequence
  derived and/or modified sequence
cgggagcgggcgggaggcggagcggcgccgcgagggcctcaaggtgacacccgcccccggccccggccccccccggcccggccccccagcctgcctcccaccctcagcccccagccccttactcccggtgccctttccgggccccctcccccggcggggggtggggagcagcgagggccccgccccctcccgtcctctccccagggcccgcgcaggatgcccccggcccctggcagccccccgggaggtcctgagctcgacgcgccccctctacgccatgtccccccctggctcggccgcgggagagagcgccgccggcggcggcggcggcggtggcggccccggggtctcggaggagctcacggcggcggcggcagcggcggcggcggacgagggccccgcccgagaggagcagcgtcccatccagccctctttcaccaagtccctctgccgtgagtcccactggaagtgcctcctgctctcgctgctcatgtacggctgcctgggggcagtggcctggtgccacgtcaccacagtgacgcgcctcaccttcagcagcgcctaccagggcaacagcctcatgtaccatgacagcccctgctccaacggctatgtctacatccccctggccttcctgctcatgttgtacgccgtctacctggtggagtgttggcactgccaagcccgccatgagctgcagcaccgtgttgatgtgagcagtgtgcgggaacgtgtgggccgcatgcagcaagccacgccctgcatctggtggaaggccatcagctaccactatgtccgccgcacccgccaggtcaccagataccgcaatggagacgcctataccaccacccaggtctaccacgaacgcgtcaacacgcacgtggcggaggctgagttcgactacgcgcgctgcggcgttcgcgacgtgtccaagacgctggtggggctggagggcgcgccggccacgcggctgcgcttcaccaagtgcttcagtttcgccagcgtggaggccgagaacgcgtacctgtgccagcgcgcgcgcttcttcgcagagaacgagggcctagacgactacatggaggcacgcgagggcatgcacctcaagaacgtggacttccgtgagttcatggtggccttcccggacccggcccggccgccctggtacgcctgctcgtcggccttctgggccgcggcgctgctcacgctgtcgtggccgctgcgagtgctggccgagtaccgcacggcctacgcgcactaccacgtggagaagctatttggcctggagggcccgggctcggccagcagcgcaggcggtggcctcagccccagcgatgagctgctgcccccgctcacccaccgcctgccgcgggtcaacacagtagacagcacggagctcgagtggcacatccgctccaaccagcagctggtgcccagctactctgaggcggtgctcatggacctggcggggctcgggacgcgctgcggcggggcaggcggcggctacgcgccctcgtgccgctacggtggggtaggcggcccgggcgcggcgggcgtggctccctaccggcgcagctgcgagcactgccagcgcgccgtcagcagctcgtctatcttctcgcgcagcgccctaagcatctgcgccagcccgcgggccggcccggggcccggtgggggcgcgggctgcgggggcagccgcttctcgctgggccgtctctacggctcccggcgcagctgcctgtggcgcagccgcagcgggagcgtcaacgaggccagctgccccacggagcagacgcggctgtccagccaggccagcatgggggacgacgaggacgacgacgaggaggaggccgggccgccgccgccctaccacgacgccctctactttccggtcctcatcgtccaccggcaggaggggtgtctgggccacagccaccggccgctgcaccgccacggctcctgcgtagagacctcactgtgacctccggccccggagtggcccgcgccgtcctcccgcctgcccctcgccggactgtgctccctctgcgacgcagggcgagtcaccacggtgactgaggccgcgcggggggcagggaaagggaggtgagggccgcaagacaggcccggatggggccgagacccccgctgtccctgtacataaagagaccgatgggtgggagggggtcggctgctccccgagatccccctggcagagtcattcttccagccccaaccctgagttcctaaagggacacctccctcctgtccagcccttcaacagatcttctgttagatgacaaccgtgccgtgggccccgcgttgggccttgtctgaagggagaggccctggcatgcggatgggagatttagaggctgtggagaagggaacttggggctttccttccttcgtggcctcactcccctggggcctctctctatggagggggcaatggtttggtgaccagcaggctggattccaactagctaatgcattcagcaggtctgaggctggggccaggtgtcagccctaggcctccatccaacaccgtggaaatgttgctgccctcttcttggcgctgaccccaagattggggtttcctttctgccgctccctccactgttgtttatctaactgggcccccactccaggtccagagggactgtgctcactgcacagacatcactcaccttccgctccccagtcctgcagagctgttgccagggtgcagtggggaggggagtgaaatgtggaggactgtgtacctcagtcctctctctaaactcctcagcctcccaacaggggcctcctcacctgggttctgagtgtataccccttttagagagtgagatgccacccgggcagcactcgttaaagctggccagcacgagtgactaaggggagagagcatgacatagacctgggtggcaacggggacctctggaagcaggtgggagtaagagaggagagggcagtggagggtagaggaaaaggacctccagaggtggggtgtctgtgggggcggcctttgcctccctaaacctgtgcggaggagtggagtgtgcttgtcgctcaaacacatctctgggggactgaggacgttgtcacaagccccaactggagaaataattccaatggcagggtcagaggcaagcattctctaaatcttgcccaacccttccatccttccctatcctatgagctgaagccctgctgtgtgtcgcagggtcttcaaaggggcatcctgccaccaccccagggcgctggccccacgtcctgttcccctaaagctctgacaccgccttctctccgtgtgctccccccaccacctccaccctgatgtgcttcagtgtgcatgtctgtgaacagccctcctgccctgccaactcccctggctaaagtctccccagcagatttagcacccagggattgagctcacatttcaggctagagaggataacccttgggccacccacatctctcacccctgatgcttcttacttcgcctgagccatcagaactcctccttaccctccttcagcccctctcatcttccttcagcccagccaggcctgcaccaccaactgtgtggcctccacctatgcaacatcgcctctggctccccttcccttcttcctagcggggagtgcgaggggcccaaattgtggggataccatggcccatggcttctaaagggtttagctttactttcaggtagagatggctgagtgaggagggagaagaggctagagagagggaggcttgggcaggggaaacagctgcccaccaggttttcctggacagcagtgcccacctgcctactagcactgaacctgcctggaccctgagtctgtgctccttgggggcctggcgtttggagcacccttctttcctctgaatggacatctgtgaggtacaggtggtgagctgcagcctcaggctccatttcttagccagctggcacctggatgtcatgctttgtgtggggacagcctggccacctcagggctccaaggaaggaggaacgtggctcctcctccctcaggcctgttcctgagacagagcctggtctcacaagaggggaagggggacctctattattatttttgcctgtattgaccatttctgcctaggtcgtctcagacagcctcatctcccacacatgcacagacttagagagaaaccaattctttggtctattttcttggtagctttactgattgccagggaaaatgaaaaccagaaaattaattaatctctaaaattaaactttacactgaatgttcttgtttctctaattagaacttctgctagcagctgtggctatacacacacacacacacacacacaccctcacacctacacgtttgcactccggaactgtcagagggtgtcaggcacagacagactctaggttgcctagacaggcacacacatgcagtcactcccaagccccctttggtgctctgctcagcgcctgcttagcggaaggagtccctggagagcaggcactcctggactggggttgtagcccatgacctgccctttggggacacagttctggaggctctgggccaatgaatcagcccaaggaggatgggcaatggcgctcagcctgaatcagtcagctaggtctcttgtggccctgggggctgatgtgattcctgtaggtgtggccccagggtggacagctacagagtgatgggggactcatgtagggcacctggaaggctccatgtgtcctggggacaagggcttgtggggtgggctgggcctggctggggagaagacaggtctctgtcaattgggtgcatcacactgtggcctttttgtcgtggatttaagcgcaaagattgtacaaatcaaactggtggataataaagtcgtggatgactcactga

SEQ ID NO: 52571 - protein, 274 aa, Artificial Sequence
  derived and/or modified sequence
MSNRVVCREASHAGSWYTASGPQLNAQLEGWLSQVQSTKRPARAIIAPRRIFILGPSHHVPLSRCALSSVDIYRTPLYDLRIDQKIYGELWKTGMFERMSLQTDEDEHSIEMHLPYTAKAMESHKDEFTIIPVLVGALSESKEQEFGKLFSKYLADPSNLFVVSSDFCHWGQRFRYSYYDESQGEIYRSIEHLDKMGMSIIEQLDPVSFSNYLKKYHNTICGRHPIGVLLNAITELQKNGMNMSFSFLNYAQSSQCRNWQDSSVSYAAGALTVH

SEQ ID NO: 52572 - protein, 20 aa, Artificial Sequence
  derived and/or modified sequence
MSNRVVCREASHAGSWYTAS

SEQ ID NO: 52573 - DNA, 825 bp, Artificial Sequence
  derived and/or modified sequence
atgtccaatcgcgtggtgtgtcgggaagctagccatgcaggctcctggtataccgccagcgggccccagctcaacgcgcaattggaaggctggctgtcacaagtgcagtctaccaagagaccagcacgtgcaattatcgcccctagacgaattttcattctcggccctagccatcatgtaccgcttagtagatgcgcgctctcctccgtcgatatttaccgcacccctctttacgatctccgaatcgatcagaagatctatggcgagctgtggaaaactggcatgtttgagaggatgtcactgcagaccgacgaagatgagcactccattgagatgcatctgccttatacagcgaaggccatggagagtcataaggacgagtttaccattatccctgttctcgttggagccttgtcagagagcaaggaacaggaatttggcaagctgtttagcaaatacttggctgaccccagcaatttatttgtggtgagttccgatttttgccactggggccagcgattccgttacagttattatgacgaaagccagggcgagatctaccggagtattgagcaccttgacaagatggggatgtctattatcgaacagctcgaccccgtgtcctttagtaactatctgaagaaataccataatacaatttgcggacggcacccaattggagtgctcttgaatgcgataacagagctgcaaaagaatggaatgaacatgagctttagcttccttaattacgcacagtcctcccagtgtaggaattggcaggactcatccgtcagctatgcagctggtgctctgacagttcactag

SEQ ID NO: 52574 - DNA, 825 bp, Artificial Sequence
  derived and/or modified sequence
atgagcaacagagtggtgtgccgggaggccagccatgctggctcctggtacacagccagcggcccccagctgaatgcccagctggagggctggctgagccaggtgcagagcaccaagaggcctgcccgggccatcatcgccccccggcgcatcttcatcctgggccccagccaccacgtgcccctgagccgctgtgccctgagctctgtggacatctaccgcacccccctgtatgacctgagaattgaccagaagatctatggagagctgtggaagacaggcatgtttgagaggatgagcctgcagacagatgaagatgagcacagcattgagatgcacctgccctacacagccaaggccatggagagccacaaggatgagttcaccatcatccctgtgctggtgggcgccctgtctgagagcaaggagcaggagtttgggaagctgttcagcaagtacctggccgaccccagcaacctgtttgtggtgtccagtgacttctgccactggggccagcgcttccgctacagctactatgatgagagccagggcgagatctaccgcagcattgagcacctggacaagatgggcatgagcatcatcgagcagctggaccctgtgtccttcagcaactacctgaagaagtaccacaacaccatctgtggccgccaccccatcggcgtgctgctgaatgccatcacagagctgcagaagaatggcatgaacatgtccttctccttcctgaactatgcccagagcagccagtgcaggaactggcaggacagctctgtgtcctatgctgctggggccctgactgtgcactag

SEQ ID NO: 52575 - DNA, 1336 bp, Artificial Sequence
  derived and/or modified sequence
ccctccccgctgccgcctcctcctgggctgggcccgcggtgtctcgtcccctcgcggagccgctcctgccgccgccgccgccgcctcctcattcatcctcgtgcaccataggcggcacaggcaccaagatgtccaaccgagtggtctgccgagaagccagtcacgccgggagctggtacacagcctcaggaccgcagctgaatgcacagctagaaggttggctttcacaagtacagtctacaaaaagacctgctagagccattattgccccccggagaattttcatccttgggccttctcatcatgtgcccctctctcgatgtgcactttccagtgtggatatatataggacacctctgtatgaccttcgtattgaccaaaagatttacggagaactgtggaagacaggaatgtttgaacgcatgtctctgcagacagatgaagatgaacacagtattgaaatgcatttgccttatacagctaaagccatggaaagccataaggatgagtttaccattattcctgtactggttggagctctgagtgagtcaaaagaacaggaattcggaaaactcttcagtaaatatctagcggatcctagtaatctctttgtggtttcttctgatttctgccattggggtcaaaggttccgttacagttactatgatgaatcccagggggagatttatagatccattgaacatctagataaaatgggtatgagtattatagaacaattagaccctgtatcttttagcaattacttgaagaaataccataatactatatgtggaagacatcccattggggtgttattaaatgctatcacagagctccagaagaatggaatgaatatgagtttttcgtttttgaattatgcccagtcgagccagtgtagaaactggcaagacagttcagtgagttatgcagctggagcactcacggtccactgaagctctgaatcctcagggatgccacctgcacattctcatactctgtccggggtcccagcctagcctttaccacgatactggtcctggtttggggggattctgaaacctcaaactaatagaactttcttctctttttttctagtaggtgtagtccttccttaatttcaactcattaaaaaatgctttatagtttagggcagtggaaggaaggctggcatcaaaatattttgatcaaaaaagatgacaatgtaaaggctcagttgtggcagacagttttttgaaagtaacttgtaaagcatttaccatatcctaaatttgcactctttgcagacttgtgcacatatattccgctttcagaatagttttgcaaattgtacacaaac

SEQ ID NO: 52576 - DNA, 825 bp, Artificial Sequence
  derived and/or modified sequence
atgagcaaccgggtggtgtgccgggaggccagccacgccggcagctggtacacagccagtggaccccaactgaacgctcagctggagggctggctgtctcaggtgcagtccacgaaacgtcctgcgagggccatcatagcaccacgacgcatctttatcctcggaccttcccatcacgtcccactgagtaggtgcgctttgtcatcagttgatatttacaggacacctttatatgacttgcgcatcgatcagaagatatatggtgaactgtggaagactggaatgtttgagagaatgtctctgcaaactgacgaggacgagcactctattgagatgcacctgccttacacagcaaaagctatggagtcgcacaaagatgagttcacgatcatacccgtgctagtgggggccctgtctgagtccaaggaacaggaattcgggaagttgttctcaaagtatcttgcagatccgtcaaacctgttcgtggtgagctctgacttctgccactggggccagaggttccggtattcgtattatgacgagagccagggtgagatatatcgatcaattgagcacttagataaaatggggatgagcatcatcgaacagctcgatccggtgtcattcagcaattatctaaaaaagtatcataataccatttgcgggcgtcaccctattggagtcctacttaatgctattaccgagctgcaaaaaaacggtatgaacatgtcatttagcttcctgaactatgcacagagttcccagtgccgcaactggcaggattcctctgttagctacgcggcaggggctcttaccgtccactag

SEQ ID NO: 52577 - DNA, 825 bp, Artificial Sequence
  derived and/or modified sequence
atgtccaacagggtggtctgcagagaggcttcacatgcgggatcctggtacactgcaagcggtccccaactgaatgcacagttggaaggatggctgagtcaagtccagagtactaaaagacccgctagggcaatcattgcacccaggcgaattttcatcctggggcctagtcatcatgtccccctgagcagatgtgctctgtcttctgtggacatttaccggacccccctctatgatcttcggatcgaccagaaaatctatggggagctttggaagactgggatgttcgagcggatgagtctgcagaccgacgaggatgagcacagtattgagatgcaccttccatacaccgctaaggctatggaaagtcacaaggatgagtttacaattattcccgtgctggtcggtgctctgtcagaaagtaaggagcaggagtttgggaaactgttctcaaaatacctagctgatcctagcaaccttttcgtcgtgagttccgatttctgccattggggccagcggttcaggtacagctattacgatgaaagccaaggagagatctatcggtccatcgaacaccttgataaaatgggcatgagtattattgaacagctggacccagtcagcttctcgaactatctgaagaagtaccacaacacaatatgcggacgccatcccatcggggttctgctcaatgcgattaccgagcttcagaaaaatggcatgaacatgtcattttccttcctgaattatgcacagagctcccaatgtagaaattggcaggatagctccgtctcttatgccgcaggcgcactaaccgtgcactag

SEQ ID NO: 52578 - DNA, 825 bp, Artificial Sequence
  derived and/or modified sequence
atgagcaacagagtggtgtgcagagaggccagccacgccggcagctggtacaccgccagcggcccccagctgaacgcccagctggagggctggctgagccaggtgcagagcaccaagagacccgccagagccatcatcgcccccagaagaatcttcatcctgggccccagccaccacgtgcccctgagcagatgcgccctgagcagcgtggacatctacagaacccccctgtacgacctgagaatcgaccagaagatctacggcgagctgtggaagaccggcatgttcgagagaatgagcctgcagaccgacgaggacgagcacagcatcgagatgcacctgccctacaccgccaaggccatggagagccacaaggacgagttcaccatcatccccgtgctggtgggcgccctgagcgagagcaaggagcaggagttcggcaagctgttcagcaagtacctggccgaccccagcaacctgttcgtggtgagcagcgacttctgccactggggccagagattcagatacagctactacgacgagagccagggcgagatctacagaagcatcgagcacctggacaagatgggcatgagcatcatcgagcagctggaccccgtgagcttcagcaactacctgaagaagtaccacaacaccatctgcggcagacaccccatcggcgtgctgctgaacgccatcaccgagctgcagaagaacggcatgaacatgagcttcagcttcctgaactacgcccagagcagccagtgcagaaactggcaggacagcagcgtgagctacgccgccggcgccctgaccgtgcactag

SEQ ID NO: 52579 - protein, 1079 aa, Artificial Sequence
  derived and/or modified sequence
MDPGSRWRNLPSGPSLKHLTDPSYGIPREQQKAALQELTRAHVESFNYAVHEGLGLAVQADINWAVNGISKGIIKQFLGYVPIMVKSKLCNLRNLPPQALIEHHEEAEEMGGYFIINGIEKVIRMLIMPRRNFPIAMIRPKWKTRGPGYTQYGVSMHCVREEHSAVNMNLHYLENGTVMLNFIYRKELFFLPLGFALKALVSFSDYQIFQELIKGKEDDSFLRNSVSQMLRIVMEEGCSTQKQVLNYLGECFRVKLNVPDWYPNEQAAEFLFNQCICIHLKSNTEKFYMLCLMTRKLFALAKGECMEDNPDSLVNQEVLTPGQLFLMFLKEKLEGWLVSIKIAFDKKAQKTSVSMNTDNLMRIFTMGIDLTKPFEYLFATGNLRSKTGLGLLQDSGLCVVADKLNFIRYLSHFRCVHRGADFAKMRTTTVRRLLPESWGFLCPVHTPDGEPCGLMNHLTAVCEVVTQFVYTASIPALLCNLGVTPIDGAPHRSYSECYPVLLDGVMVGWVDKDLAPGIADSLRHFKVLREKRIPPWMEVVLIPMTGKPSLYPGLFLFTTPCRLVRPVQNLALGKEELIGTMEQIFMNVAIFEDEVFAGVTTHQELFPHSLLSVIANFIPFSDHNQSPRNMYQCQMGKQTMGFPLLTYQDRSDNKLYRLQTPQSPLVRPSMYDYYDMDNYPIGTNAIVAVISYTGYDMEDAMIVNKASWERGFAHGSVYKSEFIDLSEKIKQGDSSLVFGIKPGDPRVLQKLDDDGLPFIGAKLQYGDPYYSYLNLNTGESFVMYYKSKENCVVDNIKVCSNDTGSGKFKCVCITMRVPRNPTIGDKFASRHGQKGILSRLWPAEDMPFTESGMVPDILFNPHGFPSRMTIGMLIESMAGKSAALHGLCHDATPFIFSEENSALEYFGEMLKAAGYNFYGTERLYSGISGLELEADIFIGVVYYQRLRHMVSDKFQVRTTGARDRVTNQPIGGRNVQGGIRFGEMERDALLAHGTSFLLHDRLFNCSDRSVAHVCVKCGSLLSPLLEKPPPSWSAMRNRKYNCTLCSRSDTIDTVSVPYVFRYFVAELAAMNIKVKLDVV

SEQ ID NO: 52580 - DNA, 3240 bp, Artificial Sequence
  derived and/or modified sequence
atggaccccggctctcggtggaggaacctgccttctgggccgagtctgaagcatttaacagaccccagctacggtatccccagggagcaacaaaaagctgcgctgcaggaactcacccgggcccacgtcgagtcgtttaactacgcagtccatgagggccttggactcgccgtccaagcggacatcaattgggcggtgaacggcatatccaagggcattatcaaacagttcctggggtatgtacctatcatggtcaagagcaaattatgcaatctaagaaacctcccacctcaggcgctgatagagcatcacgaggaggctgaggagatggggggttattttatcatcaatgggatcgaaaaggttatcagaatgctcattatgcctcggcggaactttccgattgctatgataagacctaagtggaagacccggggaccaggttacacccagtatggtgtctccatgcactgcgttagagaggagcattccgcagtgaacatgaatctccactacctggaaaacgggacggtgatgctgaactttatataccgaaaggaacttttcttcctgccactcggtttcgccctgaaggcactcgtgtccttttccgactaccagattttccaggaacttatcaaagggaaggaagacgatagctttttgaggaatagcgtgtcccagatgctgcgaattgtgatggaggaggggtgctctacacagaagcaggtgctcaattacctcggggaatgctttcgggtcaagctgaatgtgccagattggtatcccaatgagcaagccgccgaatttctgttcaatcaatgtatttgtattcaccttaagtctaatacagaaaagttttatatgttgtgcttaatgacacgcaagctttttgctctcgcaaagggagagtgcatggaggataaccccgattccttggtgaaccaagaagtgctgacacccggacagttgtttttgatgtttttgaaagagaaactggaaggctggctggtctccatcaaaatcgctttcgacaaaaaggcccaaaaaacatcggtttccatgaatactgacaatcttatgagaatatttacgatgggaattgaccttacaaaaccttttgaatatctgtttgccactgggaacctccgatctaaaacaggtctagggctgcttcaggattccggcttatgtgtagtagccgacaagctcaactttattcgctatctctcccacttccgatgcgtgcacaggggggcagactttgccaagatgagaaccacaacggttcgcaggctgttgcctgagagttggggcttcctgtgccccgtacatacaccagacggtgagccctgcggcttgatgaatcatttgaccgcagtgtgcgaggtggttacccaatttgtttacacggcatcaatccctgccctgctttgtaatctcggggtaacccccatcgacggtgcaccccaccgatcctatagtgagtgttaccccgtgctgctggatggcgttatggtgggttgggtcgataaagatctggctcctggtatcgctgactcgcttagacactttaaagttctgagggaaaaacgcattccgccctggatggaggtggtgctgatccctatgaccggcaagccgtccctgtacccgggtctttttctgttcacaactccgtgtagattagttaggcccgtccaaaatctagctttaggcaaggaagaacttatcggcaccatggaacagatcttcatgaacgtggccatcttcgaggatgaagtattcgccggggtgacgacgcaccaggagctatttccacactctctcttgtcagtgatcgccaattttatcccattttccgatcataaccaatcccctcgtaatatgtaccagtgtcagatgggtaagcagacgatgggctttccattgctcacgtaccaagacaggtctgataataagctctataggctgcagacacctcagtccccactggtccgcccatcgatgtacgactactatgacatggacaattacccgattggtaccaacgctattgtagctgtgatttcttataccgggtatgatatggaagatgccatgattgtgaacaaggcctcgtgggagaggggtttcgctcatgggtcagtgtacaaaagcgaattcatagacctgagcgaaaagatcaagcagggagactcgagcctggtgttcggaataaagccaggcgatcctcgggtgctccagaaattggacgatgatggcctccctttcattggagcgaagcttcagtacggcgatccgtactactcataccttaatctcaataccggtgagagtttcgtcatgtattacaaatccaaggaaaattgcgtagtggacaacatcaaggtttgcagcaacgacactgggtctggaaagtttaagtgcgtgtgtatcaccatgagagtgccgcgaaaccccaccataggtgataagtttgcttctcggcacggacagaaagggattttgtcgcgactttggcctgccgaggacatgccattcacagagtctgggatggtccctgacattctgttcaatcctcacggattccctagcagaatgactatcggcatgctgatcgaaagcatggcaggcaagtcagccgcgctccatggcttatgccatgatgccacacctttcattttttctgaagagaattccgcgctcgagtattttggtgagatgctcaaagcagcaggatataacttttatggtacagaacgtctgtacagcggcatttctggactggaactggaggccgatatattcattggagtcgtgtactatcagcggcttcgtcacatggtcagcgacaagttccaagtgcgtacaactggggcaagagaccgcgtgactaaccaaccaatcggtggcagaaacgtacagggaggtataaggtttggcgagatggagcgggacgccctccttgcacacggtacttctttcctgctgcatgacaggctcttcaactgttcagaccgctccgttgctcacgtatgtgtcaaatgcggctctttgctgtctccactgctagagaagccacccccatcctggtccgccatgaggaaccgcaagtacaattgtactttatgctcgcgatccgatactatagacaccgtgagcgtgccatatgtgttccgatactttgtggctgaattggccgccatgaacatcaaagtgaaactggacgtagtctag

SEQ ID NO: 52581 - DNA, 3240 bp, Artificial Sequence
  derived and/or modified sequence
atggaccccggcagccgctggaggaacctgcccagcggccccagcctgaagcacctgacagaccccagctatggcatcccccgggagcagcagaaggccgccctgcaggagctgacccgggcccacgtggagagcttcaactatgctgtgcatgagggcctgggcctggccgtgcaggccgacatcaactgggccgtgaatggcatcagcaagggcatcatcaagcagttcctgggctacgtgcccatcatggtgaagagcaagctgtgcaacctgaggaacctgcccccccaggccctgattgagcaccacgaggaggccgaggagatgggcggctacttcatcatcaatggaattgagaaggtgatccgcatgctgatcatgcccaggaggaacttccccatcgccatgatccggcccaagtggaagacccggggccctggctacacccagtatggagtgtccatgcactgtgtgcgggaggagcacagcgctgtgaacatgaacctgcactacctggagaatggaacagtgatgctgaacttcatctacaggaaggagctgttcttcctgcccctgggctttgccctgaaggccctggtgtccttcagtgactaccagatcttccaggagctgatcaagggcaaggaggatgacagcttcctgagaaattctgtgtcccagatgctgcgcatcgtgatggaggagggctgcagcacccagaagcaggtgctgaactacctgggggagtgcttccgggtgaagctgaatgtgcctgactggtacccaaatgagcaggccgctgagttcctgttcaaccagtgcatctgcatccacctgaagagcaacacagagaagttctacatgctgtgcctgatgaccaggaagctgtttgccctggccaagggggagtgcatggaggacaacccagacagcctggtgaaccaggaggtgctgaccccaggccagctgttcctgatgttcctgaaggagaagctggagggctggctggtgtccatcaagatcgcctttgacaagaaggcccagaagacctctgtgtccatgaacacagacaacctgatgaggatcttcaccatgggcatcgacctgaccaagccctttgagtacctgtttgccaccggcaacctgcggagcaagacaggcctgggcctgctgcaggacagcggcctgtgtgtggtggccgacaagctgaacttcatccgctacctgagccacttccgctgtgtgcacagaggagctgactttgccaagatgaggaccaccaccgtgcggcggctgctgcctgagagctggggcttcctgtgccctgtgcacaccccagatggagagccctgtggcctgatgaaccacctgacagctgtgtgtgaggtggtgacccagtttgtgtacacagccagcatcccagccctgctgtgcaacctgggcgtgacccccattgatggagccccccacaggagctacagcgagtgctaccctgtgctgctggatggagtgatggtgggctgggtggacaaggacctggcccctggcattgctgacagcctgcggcacttcaaggtgctgcgggagaagaggatccccccctggatggaggtggtgctgatccccatgaccgggaagcccagcctgtacccaggcctcttcctgttcaccaccccctgccgcctggtgcggcctgtgcagaacctggccctgggcaaggaggagctgattggcaccatggagcagatcttcatgaatgtggccatctttgaagatgaggtgtttgctggggtgaccacccaccaggagctgttcccccacagcctgctgagcgtcatcgccaacttcatccccttcagtgaccacaaccagagccccaggaacatgtaccagtgccagatgggcaagcagaccatgggcttccccctgctgacctaccaggacagaagtgacaacaagctgtaccgcctgcagaccccccagagccccctggtgcggcccagcatgtatgactactatgacatggacaactaccccatcggcaccaatgccatcgtggccgtcatctcctacacaggctatgacatggaggatgccatgattgtgaacaaggcctcctgggagcggggctttgcccacggctctgtgtacaagtctgagttcatcgacctgtctgagaagatcaagcagggcgacagcagcctggtgtttggcatcaagccaggggacccccgggtgctgcagaagctggatgatgatggcctgcccttcatcggggccaagctgcagtatggagacccctactacagctacctgaacctgaacacaggagagagctttgtgatgtactacaagagcaaagaaaactgtgtggtggacaacatcaaggtgtgcagcaatgacaccggcagcggcaagttcaagtgtgtgtgcatcaccatgagggtgcccaggaaccccaccatcggggacaagtttgccagcagacatggccagaagggcatcctgagccggctgtggccagctgaggacatgcccttcacagaaagtggcatggtgcctgacatcctcttcaacccccacggcttccccagcaggatgaccatcggcatgctgattgagagcatggccggcaagtctgctgccctgcacggcctgtgccatgatgccacccccttcatcttctctgaagaaaattctgccctggagtactttggagagatgctgaaggctgctggctacaacttctacggcacagagcggctgtacagcggcatcagcggcctggagctggaggccgacatcttcatcggcgtggtgtactaccagaggctgcggcacatggtgtctgacaagttccaggtgaggaccactggagcccgggacagagtgaccaaccagcccatcggcggcagaaatgtgcagggcggcatccgctttggagagatggagagagatgccctgctggcccacggcaccagcttcctgctgcatgacaggctcttcaactgcagcgacagatctgtggcccacgtgtgtgtgaagtgtggcagcctgctgagccccctgctggagaagcccccacccagctggagcgccatgaggaacaggaagtacaactgcaccctgtgcagcagaagtgacaccatcgacacagtgtctgtgccctacgtgttccgctactttgtggccgagctggccgccatgaacatcaaggtgaagctggatgtggtgtag

SEQ ID NO: 52582 - DNA, 3836 bp, Artificial Sequence
  derived and/or modified sequence
gagactggcgtccggtgtgcaggtggccacatggatcctggcagccggtggcggaacctgcccagcgggcctagcctaaagcacttgactgacccctcttatggaatcccgcgggaacagcaaaaggcagcgttgcaggagctgacgcgggcgcacgtggagtccttcaactacgctgtgcacgagggtctcggcctcgcggtgcaggctgatatcaactgggcagtgaatggaatctcaaaaggaatcattaagcagtttcttggctatgttcccatcatggtgaaatccaagctttgcaacttacgtaaccttcccccacaagccctcattgagcaccatgaggaggcagaggaaatggggggctattttataatcaatggcattgaaaaagtcatccgaatgttgattatgcctcggagaaattttcccattgcaatgataagaccaaaatggaaaaccagagggcctggttatactcagtatggagtttcaatgcactgtgtgagggaagaacattccgctgtcaatatgaacctccactacttggaaaatggcactgttatgttgaactttatttaccgaaaagaactgttctttcttcctttgggatttgcacttaaggcacttgtcagcttttctgattatcagatctttcaggagctcatcaaaggaaaagaggatgattctttccttaggaactctgtttctcagatgttaaggattgtaatggaagagggttgttcgacacaaaaacaggtccttaactacctaggtgaatgcttcagagtaaaactcaatgttcctgactggtacccaaatgagcaagctgcggagttcctgtttaaccagtgcatctgtatccacttgaaatccaatactgaaaagttttatatgctttgtctcatgacgcgaaagctctttgctttagccaaaggagagtgcatggaggacaatcctgatagtttggtgaaccaggaagtcctcacaccgggtcagctcttccttatgttcctgaaggaaaaactggaaggttggttagtgtctattaaaatagcttttgataagaaggctcagaagaccagtgtttccatgaacactgacaatttgatgaggatttttacaatgggcatagaccttacaaaaccatttgaatacctttttgctactgggaatctgcgttctaaaacaggtcttggcctcctacaagattctggactttgtgttgtggctgacaagctgaacttcatacgctacctctcccatttccgctgcgtgcacagaggggctgattttgccaagatgaggaccaccacagtacgcaggctgctgccagagtcctggggcttcctttgtcccgtgcataccccagacggggagccctgtggcctgatgaaccacctaactgccgtatgtgaggttgtcacacagtttgtgtatacggcatctattccagctttactgtgcaacttgggggtcactcccattgatggagctccccaccgatcatacagtgagtgctaccctgtcctgctggacggtgtcatggttggctgggtggataaggatcttgctccaggcatcgcagattctcttcgtcattttaaggtgttgagagagaaaagaattcctccctggatggaagtggtccttatacccatgacaggaaaaccaagtctgtacccaggattgttcctttttaccactccttgtagactggtacggcctgtgcagaacttagcattgggcaaagaagagctaattggaactatggaacagatcttcatgaatgtcgctatctttgaggatgaagtttttgctggagttaccacacaccaggaactctttccacacagcctgctgagtgtgattgccaacttcatccctttctctgatcacaaccagagtccacggaacatgtaccaatgccagatgggtaagcaaactatgggctttccacttctcacttatcaagaccgatcggataacaaactgtatcgtcttcagactcctcagagtcccttggtgagaccctccatgtatgattattatgacatggataactatccaattgggaccaatgccatcgttgctgtgatttcttacactggctatgatatggaagatgccatgattgtgaataaggcctcttgggaacgaggctttgcccatggaagtgtctacaagtctgagttcatagacctctctgaaaaaattaaacaaggagatagtagcctggtgtttggcatcaaacctggtgacccacgcgttctgcagaagttagatgacgatggattgccgtttataggagcaaaactgcagtacggagatccgtattacagctacctcaacctcaacaccggggaaagttttgtgatgtactataagagtaaagaaaattgtgttgtggataacatcaaagtgtgcagtaatgacactgggagtggaaaattcaagtgtgtttgcatcactatgagagtgcctcggaacccaactatcggagataaatttgccagtcgccatgggcagaagggcattttaagcagattgtggccggctgaggacatgccttttactgagagtgggatggtcccagacattctgttcaatccccatggttttccatcccgcatgaccattgggatgttaattgagagtatggccgggaagtctgcagctttgcatggtctctgccatgatgctacacccttcatcttctcagaggagaactcggccttagaatactttggtgagatgttaaaggctgctggctacaatttctatggcaccgagaggttatatagtggcatcagtgggctagaactggaagcagacatcttcataggagtggtttattatcagcgcttacgccatatggtctcagacaaatttcaagtaaggacaactggagcccgagacagagtcaccaaccagcctattgggggaagaaatgtccagggtggaatccgttttggggagatggaacgggatgcgcttttagctcatggtacatcttttctccttcatgaccgcctcttcaactgctcagatcggtcggtagcccatgtgtgtgtgaagtgtggcagtttactctctccactgttggagaagccacccccttcttggtctgccatgcgcaacagaaaatacaactgtactctgtgtagtcgcagtgacactatcgatactgtttctgtgccttatgtttttcggtattttgtagctgaactggcagctatgaacatcaaagtgaaactggatgttgtttaacttgatgttgaccttttggattaagaggactatcagattaaagcaaaatgtaattttaattcaatgaagatatcattaccaggttactcttgagatttttcaacggtgttagaactctcaaccaagacctgaaaaccaagtatgcaaggtttctgaatctctctggtagattaactattgacaatgattttctgttatctttgttcaaaaagttcatgtcttctcaaaatatgaaatattgataaatggaagagcatacggtgacaagtctcctttccaaccccaggttccctacaccctgctctcagcaggcagtgagtgtcacacacctgttaatccatcttgagcaggacagtactatacaaatagaatgcaagctgtaatgtaattttatattttcttatagccacgttgaagtaaaaacaaacaggtacagtgttttttaccagctttatagaagtacagttgttacatatttaatgaatacaatttgatgggtctgactatatgcacacacctttgataccatcaccacaatcagggtaataaacatacctgtcatctcc

SEQ ID NO: 52583 - DNA, 3240 bp, Artificial Sequence
  derived and/or modified sequence
atggaccccggcagccggtggcggaacctgcccagcggccccagcctcaaacatctaactgatccctcatacggcattccccgtgagcaacagaaggctgctttgcaggagctcacgcgcgcacatgtcgagtcatttaactacgctgttcacgaaggattgggattagcagtgcaagctgatattaattgggcagttaatggcataagcaaggggatcattaaacagtttcttgggtatgtgcctatcatggtgaagtccaaactatgcaacctccgcaatctgcctccgcaggcgttgatcgagcaccacgaggaggctgaggagatgggcggctattttatcataaatggaatcgaaaaggtcattaggatgctaatcatgcccagaagaaattttcctattgccatgatccgtcccaagtggaaaactagaggcccaggatacactcaatatggggtctcgatgcattgtgtgagagaagagcactccgcagtgaacatgaatctgcattacctcgaaaatggaacagtgatgctgaattttatttatcgcaaggagttattctttttacccctgggcttcgcactgaaggctctggtatcattttctgattatcagatcttccaggagctcatcaagggcaaggaagacgattccttcctccggaactcagtgtctcagatgcttaggatagttatggaagaaggttgttccactcagaaacaagtgttaaattacttgggcgaatgctttagggtcaaactcaacgtgcccgactggtatcccaacgaacaggccgccgaattcctcttcaatcagtgcatctgtatacacctgaaaagcaacaccgagaagttttatatgctgtgcctgatgactaggaagctcttcgcacttgctaagggcgagtgcatggaagataaccccgattccctggttaaccaggaagtactgacaccaggacaactattcctgatgtttttgaaggaaaaactggaaggttggctggtgtctatcaaaattgcatttgacaaaaaggctcagaagacctccgtatcaatgaacaccgacaatctgatgcgcatattcacaatgggtatagatttgacaaaaccattcgaatatttattcgccactggtaatttaagatctaaaactggccttgggttgcttcaggatagcggcctatgcgtcgtggccgataagctaaacttcatcaggtatctgagccactttcgctgcgtccatagaggggcagacttcgccaaaatgaggaccacgaccgtacgccgtcttctgcccgagtcctggggattcctgtgccctgtgcacactccagatggcgaaccctgcggactgatgaaccatttgaccgctgtgtgcgaggtggtgacccagttcgtgtacaccgcctctatccccgccttactgtgcaacctgggggttacccccattgatggtgccccacacagatcctattccgaatgctaccccgtcttgttagatggggtgatggttggctgggtcgacaaggatttggctccaggtatagccgacagtcttcggcactttaaggtactgcgtgaaaagagaatcccgccgtggatggaggttgtcctgattcctatgacaggcaagcctagcctgtacccagggctgtttctcttcacaaccccgtgtcggttagtgcggccagttcaaaatttggctttgggcaaggaggagttgatcggaactatggagcagatattcatgaacgttgccatttttgaggatgaagtgttcgctggcgttacgacccatcaggaattatttcctcattctctgctgtctgtcatagctaactttatccccttctctgaccacaaccagtcacccaggaacatgtaccagtgccaaatgggaaaacagaccatgggattcccactccttacctatcaagaccgtagtgacaataaactgtacagactgcagacaccacagtcccccctggtccgtccatccatgtatgactattatgacatggataactaccccatcggaacgaatgctatcgtggccgtgattagttacacagggtacgatatggaagatgcaatgatcgtgaataaggccagctgggagcgcggcttcgctcacggctcagtttataagagcgaattcattgacctgtccgagaaaattaaacagggggatagctctctggtctttgggatcaaacctggggacccgcgcgttctccagaagctggatgacgacggattgcctttcatcggcgccaagctgcagtatggtgatccttactactcttacctgaatctaaacaccggggagagttttgtgatgtattataagtccaaggaaaattgtgtggtcgataacattaaagtttgctctaacgatactggttctggcaaattcaaatgtgtctgtataaccatgagagtgcctcggaaccctaccatcggagacaagtttgcttctcggcacggccagaaaggaatcttgtctcggctgtggccagcagaggatatgcccttcaccgaatcgggtatggtgccagacattctgttcaacccccacggatttccaagccgcatgacaattggcatgctaattgagagcatggcgggaaagtctgccgcactgcacggactctgccacgacgctacaccatttatcttctccgaggaaaatagtgcgcttgaatattttggtgagatgttaaaggccgctggatataatttttacggcactgaacgcctctacagtggcataagtggattagagctggaagccgacatcttcatcggcgtagtgtattatcaacggctacggcatatggtgtctgataaatttcaagtgagaactactggcgccagagatagagtcacaaaccagcctataggcggccggaacgtccaaggtggcatccggttcggcgaaatggagcgcgacgccttacttgcccacggtacaagtttcttgctacatgaccgcctgttcaattgctctgacagatctgtggcacatgtttgcgtcaaatgtgggtctctcttatctcctctgctggagaaaccccctcccagctggagcgcaatgcgcaacagaaaatacaactgcacgctgtgtagtcgtagtgacactattgatacagtttcagtcccttacgtgtttaggtatttcgtagccgagctcgccgccatgaacattaaagttaagctggacgtggtttag

SEQ ID NO: 52584 - DNA, 3240 bp, Artificial Sequence
  derived and/or modified sequence
atggaccctggctcacgatggcgcaacctcccaagcggaccttccttgaaacacctgacagacccttcatacggcattcccagggaacagcagaaggccgcattgcaggagctgacacgggctcacgtcgagtcattcaactatgcagttcacgagggacttgggttggccgtccaggccgacatcaattgggctgtgaatggaataagcaaaggcatcatcaagcagttccttggttacgtgccaattatggtgaaaagtaagctgtgcaacctcaggaacctccctccacaggcactcattgagcatcacgaagaagcagaggaaatgggtgggtatttcataattaacgggattgagaaggtgatacgcatgcttattatgccaagaaggaacttcccgatcgccatgataaggcccaagtggaaaacccggggtcctgggtacactcagtatggcgtgtcaatgcattgtgtgagggaagaacactctgcagtcaacatgaacctccactacttggaaaatggcaccgttatgcttaattttatctataggaaggaactgttttttctacccttgggatttgcactcaaggccctggtcagtttttctgattaccagatatttcaggagctcattaaaggtaaggaagatgactcctttcttaggaattccgtcagtcaaatgttgaggattgtaatggaggaagggtgttctacacagaaacaggtgctaaactatctgggcgagtgttttcgggttaagttaaatgtcccagactggtatcccaatgagcaggctgctgagttcctcttcaatcaatgcatttgcattcacttaaaatccaatactgaaaaattctacatgttatgcctaatgactagaaaactgttcgccctggctaagggcgagtgtatggaggataaccctgattccttggtaaaccaggaggtgctgacccctggacaattgttcttaatgttcctcaaggagaagctggaggggtggcttgtctctattaaaatcgccttcgataagaaggcccagaagacttcagtcagtatgaataccgataacctgatgcgcattttcacgatgggtatcgatcttacaaaaccctttgagtacttatttgcgacaggaaacctcaggagcaaaacagggctaggacttcttcaggattctgggctgtgcgttgtagccgacaaactcaattttatccgctatctgtcccacttccgctgcgttcatcggggagccgatttcgccaaaatgaggactactactgttaggaggcttctgccagaatcatggggattcctgtgtcccgtacacaccccagacggggaaccctgcggactcatgaaccatctgaccgctgtgtgtgaggtcgtgacccagttcgtgtacacagcgagcattcccgcactactctgtaatctgggagtcacacctatcgacggtgctcctcaccgtagctacagcgaatgttaccctgtgctactggacggggtcatggtcggctgggtggacaaggatctggcgccagggatagccgacagcctgagacatttcaaggtgcttcgagaaaaacgcatccctccctggatggaggtggtgcttatccccatgactggtaaacccagtctgtaccccggactatttctgtttacaacaccatgccgactcgtccgtccagttcaaaatctggccctgggcaaagaggaactcatcggaacaatggagcagattttcatgaacgtggctatatttgaagatgaggtgttcgctggcgtgaccacccatcaggagctgtttccgcactcactgctgtcagtgatagccaatttcattcctttttcggaccacaatcaaagtcctaggaacatgtatcagtgtcaaatggggaaacaaacaatggggtttcctctcctgacttaccaggatagatcagacaacaagctgtaccggcttcagaccccccagtcacctctggtgagaccatccatgtacgattattatgacatggataactaccccatcggaaccaacgctatcgtggccgtgattagctatactggatatgacatggaggatgccatgattgtgaataaggcttcctgggaacggggatttgctcatgggtcggtatacaagagcgaattcattgacctaagtgagaaaatcaagcagggcgactcgagtctcgtattcgggattaaacctggcgaccctagggtactacagaagctggatgatgacggattacctttcataggagccaaacttcagtatggcgatccttactatagctacttgaatctgaacacaggagaaagttttgtcatgtattacaagtctaaggaaaattgcgttgtggacaatattaaggtatgttccaacgatactggctccgggaaatttaagtgcgtgtgcataacaatgcgcgtgcctcgcaaccctacgatcggcgataaattcgcatctcgccacgggcagaagggcatcctttcacgcctgtggccagcagaggacatgcccttcaccgagtccggtatggtgcccgacattttgtttaacccccacggatttccatctaggatgacgattggtatgttgatagaatctatggctgggaaaagcgccgctctgcacgggctatgccatgatgctaccccttttattttctccgaagaaaattctgcgttggagtatttcggtgagatgttaaaagctgctggatataatttttacggaaccgagagactctactccggcatctcaggattggaactggaagccgacattttcatcggcgtggtatactatcaaagactgcgtcatatggtcagcgataagttccaggtgcggacgacgggcgctagggatagggtcactaatcagccaatcggaggtcgaaatgtgcagggtggcattaggtttggtgaaatggagcgagacgcactgttggcgcacggaacttccttcctgctgcatgatcgcttgtttaactgttcagaccggagcgtggcccacgtgtgtgtcaagtgtggcagcctactgagcccattgctggaaaagccacctccttcctggtccgcaatgagaaatcgcaaatataactgtaccctgtgtagcagatcagacaccatagacaccgtcagcgtgccatatgtgttcagatattttgtcgcagaactggcagctatgaacatcaaagtcaagctggacgtcgtgtag

SEQ ID NO: 52585 - DNA, 3240 bp, Artificial Sequence
  derived and/or modified sequence
atggaccccggcagcagatggagaaacctgcccagcggccccagcctgaagcacctgaccgaccccagctacggcatccccagagagcagcagaaggccgccctgcaggagctgaccagagcccacgtggagagcttcaactacgccgtgcacgagggcctgggcctggccgtgcaggccgacatcaactgggccgtgaacggcatcagcaagggcatcatcaagcagttcctgggctacgtgcccatcatggtgaagagcaagctgtgcaacctgagaaacctgcccccccaggccctgatcgagcaccacgaggaggccgaggagatgggcggctacttcatcatcaacggcatcgagaaggtgatcagaatgctgatcatgcccagaagaaacttccccatcgccatgatcagacccaagtggaagaccagaggccccggctacacccagtacggcgtgagcatgcactgcgtgagagaggagcacagcgccgtgaacatgaacctgcactacctggagaacggcaccgtgatgctgaacttcatctacagaaaggagctgttcttcctgcccctgggcttcgccctgaaggccctggtgagcttcagcgactaccagatcttccaggagctgatcaagggcaaggaggacgacagcttcctgagaaacagcgtgagccagatgctgagaatcgtgatggaggagggctgcagcacccagaagcaggtgctgaactacctgggcgagtgcttcagagtgaagctgaacgtgcccgactggtaccccaacgagcaggccgccgagttcctgttcaaccagtgcatctgcatccacctgaagagcaacaccgagaagttctacatgctgtgcctgatgaccagaaagctgttcgccctggccaagggcgagtgcatggaggacaaccccgacagcctggtgaaccaggaggtgctgacccccggccagctgttcctgatgttcctgaaggagaagctggagggctggctggtgagcatcaagatcgccttcgacaagaaggcccagaagaccagcgtgagcatgaacaccgacaacctgatgagaatcttcaccatgggcatcgacctgaccaagcccttcgagtacctgttcgccaccggcaacctgagaagcaagaccggcctgggcctgctgcaggacagcggcctgtgcgtggtggccgacaagctgaacttcatcagatacctgagccacttcagatgcgtgcacagaggcgccgacttcgccaagatgagaaccaccaccgtgagaagactgctgcccgagagctggggcttcctgtgccccgtgcacacccccgacggcgagccctgcggcctgatgaaccacctgaccgccgtgtgcgaggtggtgacccagttcgtgtacaccgccagcatccccgccctgctgtgcaacctgggcgtgacccccatcgacggcgccccccacagaagctacagcgagtgctaccccgtgctgctggacggcgtgatggtgggctgggtggacaaggacctggcccccggcatcgccgacagcctgagacacttcaaggtgctgagagagaagagaatccccccctggatggaggtggtgctgatccccatgaccggcaagcccagcctgtaccccggcctgttcctgttcaccaccccctgcagactggtgagacccgtgcagaacctggccctgggcaaggaggagctgatcggcaccatggagcagatcttcatgaacgtggccatcttcgaggacgaggtgttcgccggcgtgaccacccaccaggagctgttcccccacagcctgctgagcgtgatcgccaacttcatccccttcagcgaccacaaccagagccccagaaacatgtaccagtgccagatgggcaagcagaccatgggcttccccctgctgacctaccaggacagaagcgacaacaagctgtacagactgcagaccccccagagccccctggtgagacccagcatgtacgactactacgacatggacaactaccccatcggcaccaacgccatcgtggccgtgatcagctacaccggctacgacatggaggacgccatgatcgtgaacaaggccagctgggagagaggcttcgcccacggcagcgtgtacaagagcgagttcatcgacctgagcgagaagatcaagcagggcgacagcagcctggtgttcggcatcaagcccggcgaccccagagtgctgcagaagctggacgacgacggcctgcccttcatcggcgccaagctgcagtacggcgacccctactacagctacctgaacctgaacaccggcgagagcttcgtgatgtactacaagagcaaggagaactgcgtggtggacaacatcaaggtgtgcagcaacgacaccggcagcggcaagttcaagtgcgtgtgcatcaccatgagagtgcccagaaaccccaccatcggcgacaagttcgccagcagacacggccagaagggcatcctgagcagactgtggcccgccgaggacatgcccttcaccgagagcggcatggtgcccgacatcctgttcaacccccacggcttccccagcagaatgaccatcggcatgctgatcgagagcatggccggcaagagcgccgccctgcacggcctgtgccacgacgccacccccttcatcttcagcgaggagaacagcgccctggagtacttcggcgagatgctgaaggccgccggctacaacttctacggcaccgagagactgtacagcggcatcagcggcctggagctggaggccgacatcttcatcggcgtggtgtactaccagagactgagacacatggtgagcgacaagttccaggtgagaaccaccggcgccagagacagagtgaccaaccagcccatcggcggcagaaacgtgcagggcggcatcagattcggcgagatggagagagacgccctgctggcccacggcaccagcttcctgctgcacgacagactgttcaactgcagcgacagaagcgtggcccacgtgtgcgtgaagtgcggcagcctgctgagccccctgctggagaagcccccccccagctggagcgccatgagaaacagaaagtacaactgcaccctgtgcagcagaagcgacaccatcgacaccgtgagcgtgccctacgtgttcagatacttcgtggccgagctggccgccatgaacatcaaggtgaagctggacgtggtgtag

SEQ ID NO: 52586 - protein, 331 aa, Artificial Sequence
  derived and/or modified sequence
MEPEFLYDLLQLPKGVEPPAEEELSKGGKKKYLPPTSRKDPKFEELQKVLMEWINATLLPEHIVVRSLEEDMFDGLILHHLFQRLAALKLEAEDIALTATSQKHKLTVVLEAVNRSLQLEEWQAKWSVESIFNKDLLSTLHLLVALAKRFQPDLSLPTNVQVEVITIESTKSGLKSEKLVEQLTEYSTDKDEPPKDVFDELFKLAPEKVNAVKEAIVNFVNQKLDRLGLSVQNLDTQFADGVILLLLIGQLEGFFLHLKEFYLTPNSPAEMLHNVTLALELLKDEGLLSCPVSPEDIVNKDAKSTLRVLYGLFCKHTQKAHRDRTPHGAPN

SEQ ID NO: 52587 - protein, 30 aa, Artificial Sequence
  derived and/or modified sequence
MEPEFLYDLLQLPKGVEPPAEEELSKGVCP

SEQ ID NO: 52588 - DNA, 996 bp, Artificial Sequence
  derived and/or modified sequence
atggagccggagtttttgtatgacctcctacaattgcctaaaggggttgaaccccccgccgaggaggagctgtccaagggcggtaagaagaaatatcttcccccaacgagtcggaaggatcctaaatttgaagaacttcagaaggtgctgatggagtggatcaatgcaactctcctaccggaacacattgtggtacgatctcttgaagaggacatgtttgacgggctcatcctgcatcacctattccaacgccttgccgctttaaaattggaggccgaggatattgccctgacagctacttcccagaaacataaactgaccgtcgttctggaggccgttaatcgctcccttcagttggaggagtggcaggccaagtggtcggtggaatctatttttaataaagacctgctgtctaccctccatctattggtcgcgcttgctaagcgcttccagcccgacctgtcactgccgacaaatgtccaagtggaggtaataactattgagagtaccaagagcggtcttaagtcagagaagctcgtggaacagttaaccgaatatagtacagacaaggatgagccacccaaggacgtgtttgacgagctgttcaaattggcccctgagaaagtcaacgctgtcaaggaagccattgtaaacttcgtgaaccaaaaactggatcgcttggggctatcagtgcaaaacttagatacacagttcgcagatggcgtgatcctgctcttgctgatcggtcagctggagggcttctttttgcacctcaaagagttttacttgacaccaaactcccctgccgagatgctacataatgtgactctggcactagagctccttaaagacgagggtctactcagttgccccgtgtctcccgaagacatcgttaacaaggatgcaaaatctaccctgcgggttctgtatgggctgttttgcaagcacactcagaaagcacatagggacaggaccccacacggtgctcctaactag

SEQ ID NO: 52589 - DNA, 996 bp, Artificial Sequence
  derived and/or modified sequence
atggagccagagttcctctacgatctcctgcaattgccaaagggagttgagcccccggcagaggaagagctttctaagggcggcaagaaaaagtatctccctcctacatctcgcaaggatcccaaatttgaagagctccaaaaagtgctgatggagtggatcaatgccaccctgctccctgaacacattgtcgtgcgaagcctggaagaagatatgtttgacggattgattctccaccacctgttccagaggctggctgcgctcaagctcgaagccgaagatatcgccctgaccgccacaagtcagaagcacaaactgactgtggtactagaagccgtgaatcggagcctgcagctggaagagtggcaagccaaatggagcgtcgagtcgatattcaacaaggatctgctgtccaccctgcacttacttgtggctctggcaaaacggtttcaaccagatttatccctgcccaccaacgtgcaggtggaggtgatcaccatcgagagtaccaaatctgggctgaaatccgaaaagctggtggagcaattaaccgagtactccaccgataaagacgagcctcctaaggacgtgtttgatgagctatttaagctggcccccgaaaaggtgaacgccgtgaaggaagccatcgtgaacttcgtaaatcagaaactagatagactcggcctgagtgttcagaatctagacactcagtttgctgacggtgtcatactgctgctgcttatcgggcagctggaagggttctttctgcacctcaaggaattttacctgactcctaacagccccgctgagatgttacacaacgtgactctagccctcgaattactgaaggacgaagggcttctcagttgtccagtttctcccgaggacatcgtgaacaaggatgcaaagtccaccttacgagttctctatgggttgttctgcaaacatacacagaaggcgcatcgggatagaacaccacacggcgccccaaattag

SEQ ID NO: 52590 - DNA, 996 bp, Artificial Sequence
  derived and/or modified sequence
atggagcccgagttcctttatgatctcttgcagctgcccaaaggggtcgaaccgccagccgaggaggaactgtctaagggcgggaaaaagaaatacctgccccccacgagtaggaaggatcctaagttcgaggaactacagaaggtccttatggagtggatcaacgctacactgctgccagaacacatcgtggtccgttcccttgaggaagacatgtttgatggtcttatacttcaccacctctttcagaggctggctgcgttaaaactcgaggcagaggacattgcactgaccgcaacatcccaaaagcataaattaacggtcgtgcttgaggccgtgaaccggtctctccagttagaagaatggcaggctaagtggtcggtggagtccatctttaacaaggatttactgtcaacattgcacctgttggtggccttagcaaaacgtttccagcccgatctaagtctgcctaccaatgtgcaagttgaggtaattaccattgagtcaactaaatctggactgaaatccgaaaaacttgtggagcaactgactgaatattctaccgataaggacgagcctccaaaagacgtattcgatgagctgttcaaactagccccggaaaaagtaaacgccgtgaaagaggctatcgtgaacttcgtcaaccagaaactggaccgacttggactgagtgtgcaaaacctagatacgcagtttgctgatggtgtcatcttgctcctgctcatcggccagttagagggcttctttctccatctgaaagagttctacttgacccccaattcaccggcagagatgttacacaacgtgactctggccctcgaattgctgaaggatgagggcttgttgagttgccccgtcagcccagaggatatcgtaaacaaagacgccaagtctaccctccgagtcctttatggtctgttttgtaaacacacccagaaagcgcaccgagacaggacgccgcatggagctcctaattag

SEQ ID NO: 52591 - DNA, 996 bp, Artificial Sequence
  derived and/or modified sequence
atggagcctgagttcctgtatgacctgctgcagctgcccaagggcgtggagcccccagctgaggaggagctgagcaagggcggcaagaagaagtacctgccccccaccagcaggaaggaccccaagtttgaggagctgcagaaggtgctgatggagtggatcaatgccaccctgctgcctgagcacatcgtggtgcgcagcctggaggaggacatgtttgatggcctcatcctgcaccacctgttccagaggctggccgccctgaagctggaggctgaagatattgccctgacagccaccagccagaagcacaagctgactgtggtgctggaggccgtgaacagaagcctgcagctggaggagtggcaggccaagtggagcgtggagagcatcttcaacaaggacctgctgagcaccctgcacctgctggtggccctggccaagcgcttccagcctgacctgagcctgcccaccaacgtgcaggtggaggtgatcaccatcgagagcaccaagagcggcctgaagtctgagaagctggtggagcagctgacagagtacagcacagacaaggatgagccccccaaggatgtgtttgatgagctgttcaagctggcccctgagaaggtgaatgctgtgaaggaggccatcgtgaactttgtgaaccagaagctggaccggctgggcctgtctgtgcagaacctggacacccagtttgctgatggagtcatcctgctgctgctgattggccagctggagggcttcttcctgcacctgaaggagttctacctgacccccaacagccctgctgagatgctgcacaacgtgaccctggccctggagctgctgaaggatgagggcctgctgagctgccctgtgtccccagaagatattgtgaacaaggatgccaagagcaccctgcgggtgctgtatggcctcttctgcaagcacacccagaaggcccaccgggacaggacccctcatggagcccccaactag

SEQ ID NO: 52592 - DNA, 996 bp, Artificial Sequence
  derived and/or modified sequence
atggagcccgagttcctgtacgacctgctgcagctgcccaagggcgttgagccccctgcagaggaagaactcagtaaagggggaaaaaaaaagtacctaccaccaacctctcggaaagaccccaaattcgaggagctgcagaaggtgctgatggaatggatcaatgcgacactactgcctgagcacatcgtcgtgcggtcgttagaggaagacatgtttgacggacttatacttcaccacctgtttcagcggctggcggccctgaagctggaagcagaagatatcgcgctgactgccaccagccagaagcataaattgaccgtggtcctagaagccgtgaatcgtagtctgcaactggaagaatggcaagctaaatggagcgtggaatctatctttaataaagacctcctaagtactctgcacctcctcgtagcactcgcgaagaggtttcagccagatctctcacttcctactaacgttcaagtagaggtgatcacaatcgaatccactaagagcggcttaaaaagcgaaaagctggtggagcagcttaccgagtactctaccgataaggacgaaccgccaaaggacgtgttcgatgaactttttaaactggcgcctgaaaaggtgaacgccgtcaaagaggccattgtgaacttcgtaaaccagaagcttgataggctggggctctctgtacaaaaccttgatacccagttcgccgacggcgtgatcctgctcctccttattgggcagctggagggcttctttctgcatctcaaggagttctacctaactcctaactcccccgccgagatgctgcacaacgtcaccctggctcttgaactgctgaaagatgaggggctactctcttgccccgtctcacccgaggatatcgtgaacaaggacgcaaagagtactctcagggtgttatacgggctgttttgcaagcacacccagaaggctcatagggaccgcactccccacggcgcccccaactag

SEQ ID NO: 52593 - DNA, 996 bp, Artificial Sequence
  derived and/or modified sequence
atggagcccgagttcctgtacgacctgctgcagctgcccaagggcgtggagccgcccgcagaggaggaactgagtaaagggggaaagaaaaagtatcttccccctaccagtaggaaagaccccaagtttgaggagctgcaaaaagtgctgatggaatggatcaatgccaccctgctgccggaacacatcgttgtgaggagcctggaggaggacatgttcgacgggctgatactccatcatctgtttcaacgcctagccgcactcaagctggaagccgaggatatcgccctcacagccacctctcagaagcacaaactgactgtcgtcctggaagctgtgaatagaagccttcagcttgaggagtggcaggccaagtggagtgttgaatctatctttaacaaggatcttctgagcaccctgcacctcctggtggcgctggccaagaggttccagcctgacctctcgttacctacaaatgtgcaagtggaagtgatcaccattgagtcaacaaaatcaggccttaagtctgagaagctggtggagcaattgacagaatattcaaccgacaaggacgaacctcccaaggacgtgttcgacgagctatttaaactcgcccccgagaaggtgaacgccgtgaaggaggcaatcgtcaatttcgtcaaccagaaacttgacagacttgggctcagtgtccagaacctcgatacccagtttgccgatggcgtgattttgctgctgctgattggacaactagagggtttcttcctgcacttgaaagagttttatcttacccccaacagcccagccgagatgctgcataatgtaactttggctctcgagctcttgaaggatgagggactgttgagctgtcccgtttctcccgaggatatcgtcaacaaggacgcaaaatccactctccgggtgctgtatggtttgttttgtaagcacacgcagaaagcccacagggaccggaccccacacggggcccctaactag

SEQ ID NO: 52594 - DNA, 996 bp, Artificial Sequence
  derived and/or modified sequence
atggagcccgagttcctgtacgacctgctgcagctgcccaagggcgttgaacccccagccgaagaggagctttcgaaaggcggaaaaaagaaatacctgccaccaaccagcagaaaggaccctaaatttgaggaattgcagaaggtgctgatggagtggataaatgccacactgttgcccgagcatattgtggtaagatcactagaggaggatatgttcgatggcttaattctgcaccacctgtttcaacgacttgccgccctaaaacttgaagccgaagacatcgcattaacagctactagccagaaacataagttgactgtggttctggaagccgtgaaccggtccctgcagttagaggaatggcaggctaaatggtcagtagagagtatcttcaataaggacttgctgagcacactgcacctgctagttgccttggccaaacggtttcaacccgacctgagcttgcctactaacgtgcaggttgaggtgataactattgagtcaacaaagagcggccttaaatcagaaaaacttgtggagcagctgaccgagtactccactgataaagacgagcctcccaaagatgtgtttgacgaactttttaagctcgccccggaaaaggtcaatgccgtaaaggaggcaatagtgaacttcgtgaaccagaagttagaccgcttggggctcagcgttcagaacctggacactcagtttgccgacggcgtcatattactgctcctaattggacagctcgagggattcttcctgcatttgaaagagttttatctgacccccaatagtcccgctgaaatgctgcataatgtcacacttgccttggagctgctcaaggatgaaggcttactgtcatgccccgtgtctccggaagacattgtgaacaaagacgccaaatccacgctccgagttctgtatgggttattttgtaaacatacccaaaaagcccaccgggacaggaccccgcacggggcgcccaattag

SEQ ID NO: 52595 - DNA, 996 bp, Artificial Sequence
  derived and/or modified sequence
atggaaccagaatttctgtatgacttgcttcaacttcctaaaggggtagaaccacctgctgaggaggagttgtccaagggaggtaagaaaaagtatctgcctccaaccagcaggaaggaccctaaatttgaagagttacaaaaagttttgatggagtggattaatgcaaccctattgcctgagcatattgttgtgcgatccctcgaggaagatatgttcgatggactcattctgcaccacctcttccagagattagccgcactgaagttagaggcagaagacattgcacttactgcaacatcccaaaaacataagctaactgtggtgctcgaggcagttaatagatctttgcagctggaagagtggcaggcaaagtggtcagtcgagtccatctttaacaaagatctccttagcactcttcacctactcgtggctcttgcaaagcggttccagccggacctatccctcccaacaaatgtgcaagtggaagtgattaccattgagtccaccaaaagcggtctcaaaagcgaaaaattggtggaacagctaactgagtactccaccgacaaagacgagcctcccaaggacgtgttcgacgagttattcaagctagcacctgaaaaagtaaacgctgtcaaggaggctatcgtcaacttcgtgaatcagaagctcgatagactcggccttagtgtgcaaaatcttgacactcagtttgcggacggggtaatcctccttctcctgatcggccaattagaggggtttttcctgcatctgaaagagttctaccttacacctaactcgccagctgaaatgttacacaacgtgaccctggcgctcgagcttctgaaggacgagggattgctgtcatgtcctgtttcccccgaggacattgtgaacaaagacgctaagagcaccctcagggtgctatacggtctattctgcaaacatacccagaaggcacaccgcgaccgcaccccacatggcgcaccgaattag

SEQ ID NO: 52596 - DNA, 996 bp, Artificial Sequence
  derived and/or modified sequence
atggagccagagttcctatacgacttgctgcagctgcctaaaggggtggagcccccagccgaagaagaactgtcaaaagggggtaagaagaaatacctgcccccaacatcacgcaaggacccgaaattcgaagagctccagaaagtactgatggagtggattaatgctaccttgctcccggagcacattgttgttcgctctttagaagaggacatgtttgatgggctgattctgcaccacttgtttcagcgcctagccgctctgaagctggaggcagaggacattgccctgactgcaaccagtcagaagcataagctgaccgtggtgctggaagcagtgaatagatcactgcaactcgaagaatggcaggcgaagtggtccgtggaatcaattttcaacaaggacctgctgagtacactgcaccttcttgtagcccttgccaaaagatttcagcccgacctctctctaccaacaaatgttcaggtcgaagtgatcaccattgaaagcaccaaaagcggactgaagtcagaaaagttagtggagcaattgacagagtattctactgataaagacgagcctcccaaagacgtctttgatgaactgtttaaactggcccctgaaaaggtaaatgcagtgaaggaggcgatcgtcaacttcgttaaccagaaactggacagactgggactgtctgtgcagaaccttgatacgcagtttgccgatggggtgattctgcttctgcttattggacaattggagggattcttcttgcacctcaaggagttttatttgactcccaatagcccagccgaaatgttgcacaacgtcaccctcgcactggagcttttaaaggacgaagggctgctaagctgtcccgtgtcaccagaggatattgttaacaaggacgccaagagcaccctcagggtgctgtatggactgttttgcaaacacacccagaaagctcatcgcgatcggactccacacggcgctccaaactag

SEQ ID NO: 52597 - DNA, 996 bp, Artificial Sequence
  derived and/or modified sequence
atggaacccgagttcctgtacgacttgctgcagctgccaaagggcgtggaacctcctgctgaagaagagctctcgaaagggggtaagaagaaatacctgcctcctacgtctcgtaaagatcccaaattcgaggaactgcagaaggtgctgatggagtggattaacgcgacactgctccctgagcacatagtggttcggtcccttgaggaagacatgttcgacgggctgattcttcaccatctttttcagcgactggcagctctcaagttggaggccgaagacattgcactaacagccacgtcccagaaacacaagctgacggtcgtgttggaagccgtcaataggagcctccaactggaggagtggcaggccaagtggtctgtggaatcgatcttcaacaaggatttgttgtcgactcttcatttgctggtcgcccttgccaagcggttccagcccgatctctctctcccaaccaatgtgcaggtggaagtcataacgatcgagagcaccaagtccggcctcaaaagtgagaagcttgttgaacagctaacagagtactcaaccgataaggatgagcccccaaaagatgttttcgacgagctatttaagttagccccagagaaagttaatgccgtgaaggaggctattgtcaattttgtgaaccaaaagttggatcgtttaggactgagcgtccagaatctcgatacacagtttgccgatggcgtgattctgttactcctgattgggcagctggagggtttttttctgcacttgaaggaattctacctgacaccgaattcgcctgcagaaatgctccacaatgttaccctggctctggagctgctgaaagacgaagggctacttagctgccctgtgtcccccgaagatattgtcaacaaagacgctaaatctacactccgggtactgtatggcctgttttgtaagcacacccaaaaggcgcacagggatcggactcctcatggtgcaccaaactag

SEQ ID NO: 52598 - DNA, 996 bp, Artificial Sequence
  derived and/or modified sequence
atggagcccgagttcctgtacgacctgctgcagctgcccaagggcgtggagccccccgccgaggaggagctgagcaagggcggcaagaagaagtacctgccccccaccagcagaaaggaccccaagttcgaggagctgcagaaggtgctgatggagtggatcaacgccaccctgctgcccgagcacatcgtggtgagaagcctggaggaggacatgttcgacggcctgatcctgcaccacctgttccagagactggccgccctgaagctggaggccgaggacatcgccctgaccgccaccagccagaagcacaagctgaccgtggtgctggaggccgtgaacagaagcctgcagctggaggagtggcaggccaagtggagcgtggagagcatcttcaacaaggacctgctgagcaccctgcacctgctggtggccctggccaagagattccagcccgacctgagcctgcccaccaacgtgcaggtggaggtgatcaccatcgagagcaccaagagcggcctgaagagcgagaagctggtggagcagctgaccgagtacagcaccgacaaggacgagccccccaaggacgtgttcgacgagctgttcaagctggcccccgagaaggtgaacgccgtgaaggaggccatcgtgaacttcgtgaaccagaagctggacagactgggcctgagcgtgcagaacctggacacccagttcgccgacggcgtgatcctgctgctgctgatcggccagctggagggcttcttcctgcacctgaaggagttctacctgacccccaacagccccgccgagatgctgcacaacgtgaccctggccctggagctgctgaaggacgagggcctgctgagctgccccgtgagccccgaggacatcgtgaacaaggacgccaagagcaccctgagagtgctgtacggcctgttctgcaagcacacccagaaggcccacagagacagaaccccccacggcgcccccaactag

SEQ ID NO: 52599 - protein, 537 aa, Artificial Sequence
  derived and/or modified sequence
MDPGDAAILESSLRILYRLFESVLPPLPAALQSRMNVIDHVRDMAAAGLHSNVRLLSSLLLTMSNNNPELFSPPQKYQLLVYHADSLFHDKEYRNAVSKYTMALQQKKALSKTSKVRPSTGNSASTPQSQCLPSEIEVKYKMAECYTMLKQDKDAIAILDGIPSRQRTPKINMMLANLYKKAGQERPSVTSYKEVLRQCPLALDAILGLLSLSVKGAEVASMTMNVIQTVPNLDWLSVWIKAYAFVHTGDNSRAISTICSLEKKSLLRDNVDLLGSLADLYFRAGDNKNSVLKFEQAQMLDPYLIKGMDVYGYLLAREGRLEDVENLGCRLFNISDQHAEPWVVSGCHSFYSKRYSRALYLGAKAIQLNSNSVQALLLKGAALRNMGRVQEAIIHFREAIRLAPCRLDCYEGLIECYLASNSIREAMVMANNVYKTLGANAQTLTLLATVCLEDPVTQEKAKTLLDKALTQRPDYIKAVVKKAELLSREQKYEDGIALLRNALANQSDCVLHRILGDFLVAVNEYQEAMDQYSIALR

SEQ ID NO: 52600 - DNA, 1614 bp, Artificial Sequence
  derived and/or modified sequence
atggaccccggcgacgccgccatcctggagagcagcctgagaatcctgtacagactgttcgagagcgtgctgccccccctgcccgccgccctgcagagcagaatgaacgtgatcgaccacgtgagagacatggccgccgccggcctgcacagcaacgtgagactgctgagcagcctgctgctgaccatgagcaacaacaaccccgagctgttcagccccccccagaagtaccagctgctggtgtaccacgccgacagcctgttccacgacaaggagtacagaaacgccgtgagcaagtacaccatggccctgcagcagaagaaggccctgagcaagaccagcaaggtgagacccagcaccggcaacagcgccagcaccccccagagccagtgcctgcccagcgagatcgaggtgaagtacaagatggccgagtgctacaccatgctgaagcaggacaaggacgccatcgccatcctggacggcatccccagcagacagagaacccccaagatcaacatgatgctggccaacctgtacaagaaggccggccaggagagacccagcgtgaccagctacaaggaggtgctgagacagtgccccctggccctggacgccatcctgggcctgctgagcctgagcgtgaagggcgccgaggtggccagcatgaccatgaacgtgatccagaccgtgcccaacctggactggctgagcgtgtggatcaaggcctacgccttcgtgcacaccggcgacaacagcagagccatcagcaccatctgcagcctggagaagaagagcctgctgagagacaacgtggacctgctgggcagcctggccgacctgtacttcagagccggcgacaacaagaacagcgtgctgaagttcgagcaggcccagatgctggacccctacctgatcaagggcatggacgtgtacggctacctgctggccagagagggcagactggaggacgtggagaacctgggctgcagactgttcaacatcagcgaccagcacgccgagccctgggtggtgagcggctgccacagcttctacagcaagagatacagcagagccctgtacctgggcgccaaggccatccagctgaacagcaacagcgtgcaggccctgctgctgaagggcgccgccctgagaaacatgggcagagtgcaggaggccatcatccacttcagagaggccatcagactggccccctgcagactggactgctacgagggcctgatcgagtgctacctggccagcaacagcatcagagaggccatggtgatggccaacaacgtgtacaagaccctgggcgccaacgcccagaccctgaccctgctggccaccgtgtgcctggaggaccccgtgacccaggagaaggccaagaccctgctggacaaggccctgacccagagacccgactacatcaaggccgtggtgaagaaggccgagctgctgagcagagagcagaagtacgaggacggcatcgccctgctgagaaacgccctggccaaccagagcgactgcgtgctgcacagaatcctgggcgacttcctggtggccgtgaacgagtaccaggaggccatggaccagtacagcatcgccctgagatag

SEQ ID NO: 52601 - DNA, 1614 bp, Artificial Sequence
  derived and/or modified sequence
atggaccccggggacgcggctattctagaatcctccctccgcatcctgtacagactatttgagtctgtgttaccccctctgcctgctgccctgcagtccaggatgaacgtcatcgatcacgtccgggacatggcagcggccggcctgcatagcaacgttagacttttgtcttcccttctgcttactatgagcaacaacaatccggagcttttctctcccccacagaaataccagctgctggtttatcatgcagactcacttttccacgataaggaatacagaaatgccgtatcaaaatacactatggccctgcagcagaagaaggctctgagtaagacgtccaaagtgagaccatccactggcaacagtgcttccactccccagagtcaatgcttgccatcagagatagaagtcaagtacaagatggccgaatgttacaccatgcttaagcaggataaagacgcgattgctattctggacggtatcccctctcgacagaggaccccaaagattaacatgatgctggctaatctctataagaaggcaggacaggagcgaccttcagtcacttcttataaggaggtgcttcggcagtgccccctggcccttgatgcaattttgggcctcctcagtctgtctgtcaaaggagccgaagttgcttccatgacaatgaacgtaatacagacagtgcccaaccttgattggttgtcagtttggatcaaggcttatgcatttgtgcatactggggataactctagggctatatccacgatctgcagtcttgagaaaaagtccttgcttcgagacaacgttgaccttctgggctcactcgctgatctatatttcagggcaggcgataataagaactcggtcctgaagtttgagcaggctcaaatgttggatccatatctcattaaaggcatggatgtctacgggtaccttctggcccgggagggcaggctcgaagacgtggagaatctgggctgccgacttttcaatatttctgatcagcacgccgaaccttgggtagtgtcaggatgccatagcttttacagcaaacgatacagcagggcgctgtatctcggcgctaaggcaatccagcttaatagcaactccgtacaagccctgttactgaaaggagcagccctgcgaaatatgggtagggtccaagaagccattattcatttccgggaagccattcgtcttgccccctgccgcctcgattgttacgaagggctcatagagtgttacctggccagtaacagcatccgtgaggctatggtcatggccaataatgtatacaaaacgcttggggccaatgcacagacccttacactgctcgctaccgtatgcctcgaggaccccgtcacacaggagaaggccaagactttgttggacaaggctcttacccagaggccagactacatcaaggccgtggtgaaaaaggcggaactgcttagtcgcgagcaaaaatatgaggacggaattgctctcctccgcaatgccttggcaaaccaatcggattgcgttctgcataggattctgggggacttcttggtcgctgtgaacgagtaccaagaggccatggaccagtacagtatagcattacgctag

SEQ ID NO: 52602 - DNA, 1614 bp, Artificial Sequence
  derived and/or modified sequence
atggaccctggagatgctgccatcctggagagcagcctgcgcatcctgtaccgcctgtttgagagcgtgctgccccccctgcctgctgccctgcagagcaggatgaatgtcatcgaccacgtgcgggacatggctgctgctggcctgcacagcaatgtgcggctgctgagcagcctgctgctgaccatgagcaacaacaaccctgagctgttcagccccccccagaagtaccagctgctggtgtaccacgccgacagcctcttccatgacaaggagtacagaaatgctgtgtccaagtacaccatggccctgcagcagaagaaggccctgagcaagaccagcaaggtgcggcccagcacaggcaacagcgccagcaccccccagagccagtgcctgcccagcgagattgaggtgaagtacaagatggccgagtgctacaccatgctgaagcaggacaaggatgccatcgccatcctggatggcatccccagccggcagaggacccccaagatcaacatgatgctggccaacctgtacaagaaggccggccaggagcggcccagcgtgaccagctacaaggaggtgctgcggcagtgccccctggccctggatgccatcctgggcctgctgagcctgtctgtgaagggagctgaggtggcctccatgaccatgaatgtcatccagacagtgcccaacctggactggctgtctgtgtggatcaaggcctatgcctttgtgcacactggagacaacagccgggccatcagcaccatctgcagcctggagaagaagagcctgctgcgggacaacgtggacctgctgggcagcctggccgacctgtacttccgggccggggacaacaagaacagcgtgctgaagtttgagcaggcccagatgctggacccctacctgatcaagggcatggatgtgtatggctacctgctggcccgggagggccgcctggaggatgtggagaacctgggctgccgcctcttcaacatcagtgaccagcacgccgagccctgggtggtgtctggctgccacagcttctacagcaagcgctacagccgggccctgtacctgggcgccaaggccatccagctgaacagcaacagcgtgcaggccctgctgctgaagggagctgccctgaggaacatgggccgggtgcaggaggccatcatccacttccgggaggccatccggctggccccctgccgcctggactgctatgagggcctgattgagtgctacctggccagcaacagcatccgggaggccatggtgatggccaacaacgtgtacaagaccctgggcgccaatgcccagaccctgaccctgctggccaccgtgtgcctggaggaccctgtgacccaggagaaggccaagaccctgctggacaaggccctgacccagaggccagactacatcaaggctgtggtgaagaaggccgagctgctgagccgggagcagaagtatgaagatggcatcgccctgctgagaaatgccctggccaaccagagcgactgtgtgctgcaccgcatcctgggggacttcctggtggccgtgaatgagtaccaggaggccatggaccagtacagcatcgccctgaggtag

SEQ ID NO: 52603 - DNA, 1614 bp, Artificial Sequence
  derived and/or modified sequence
atggaccccggcgacgccgccatcctggagagcagcctgcggatcctttaccgactctttgaatccgtattgcctcctctccccgctgccctgcagagcaggatgaacgtgatcgaccatgtcagggacatggccgcagccggccttcatagcaacgtccggctgctatcaagtctgctgctcaccatgtctaataacaatcccgagctgttttctccccctcagaagtaccagctactggtgtatcacgccgattccctgttccacgataaggagtaccggaacgccgtttctaaatataccatggcgttacaacagaagaaggctctcagcaaaacctcaaaagtacgtccaagcacaggcaatagcgccagtacgccacagtcccagtgcctgccatccgagatcgaggttaagtacaagatggcagaatgctacacgatgctgaagcaggataaggacgctatagcaatcctggacggcataccatctcgtcagagaacccccaaaatcaatatgatgcttgcaaatctgtacaagaaggccggccaggagaggccttccgttactagctacaaagaggtcctgcgccagtgccctctggcgttagacgcaatcttggggctgctctcactgagcgtcaaaggcgcggaggtggccagcatgacaatgaacgtgattcagactgtcccaaatctggattggctgtctgtgtggattaaggcatacgcttttgtgcatacaggggacaacagcagggccatttccacgatttgtagtttggaaaagaagtcactgctgcgcgacaacgtagacctcttgggttctttggctgatctttattttcgagctggggataataaaaattcagtgctgaagttcgaacaggcccagatgctagacccatatctgatcaaagggatggatgtgtatgggtacctactagcgcgggaagggcggttagaggacgttgagaatttaggttgccgactttttaatatctctgatcagcacgccgagccctgggtagttagcggctgccattcattttattcaaagcggtacagtagagctctttacttaggcgctaaggcaattcagttgaactctaatagcgttcaggctttattactcaaaggagccgctttgagaaatatggggcgggtacaagaggctatcattcattttcgggaggctattcgattggccccctgtcggcttgactgctatgaaggtctcatagagtgctatctagcttcaaatagtattagggaagctatggttatggccaataatgtgtacaaaactttaggagctaacgcccagaccctgaccctgctcgcgacagtgtgcctcgaagatccagtgacccaggagaaggctaaaacactactggataaggctctgacacaacggccggactacattaaagccgtcgtgaaaaaggcggagctattaagtagggagcaaaagtatgaagatggaatcgcactgctgcgtaacgctctggccaaccagagtgattgtgtgctgcatagaatcctcggggactttcttgtggctgtcaacgaataccaggaggctatggatcagtatagcatcgccctgaggtag

SEQ ID NO: 52604 - DNA, 1614 bp, Artificial Sequence
  derived and/or modified sequence
atggaccctggagacgccgcaattctggagagctctctgcgcatcctttaccggttattcgagtccgttctcccccctctccccgcagcgctgcagagtcgtatgaatgtaatcgaccatgttcgcgacatggctgcggcaggcctgcattcgaacgtgcgcctattgtctagtctgctcctaactatgagcaataataaccccgagctgttctcgccccctcagaaataccagctgctcgtatatcatgctgacagtctgtttcatgacaaggaataccgaaatgcagtttccaagtacaccatggccttgcagcaaaagaaagccctgtcgaaaaccagcaaggtgaggccatccactggcaattctgcctctaccccacagagtcagtgtttgccgtctgagatagaagttaagtataagatggctgaatgttacactatgctgaagcaggataaagacgcgatcgctattttggacggaattcccagccgccaacgaacacctaagattaatatgatgttagccaatctctataaaaaggctggtcaggagagaccctccgtgaccagctacaaagaagtgctccgccagtgtcccttggctctggacgccattctgggcctgctgagcctgtcagtgaagggcgcagaggttgcatccatgacgatgaacgtgattcaaacggtgcctaacctagactggctctccgtatggattaaagcgtatgccttcgttcacacaggcgacaatagccgagcaatcagtaccatctgtagtttagaaaagaaatctctgctacgcgacaacgttgatctactggggagtctggccgatctgtattttagggccggagataacaagaatagtgtgctgaagttcgagcaggcacagatgctcgacccttacctgatcaaggggatggatgtgtacggatacctgctggctagggagggtcgccttgaggatgtggagaacctaggatgccgtctcttcaacatttccgatcagcatgcggagccttgggtggtcagcggttgccactcgttttacagcaaacgctactctagagccctgtatctgggggctaaggccattcagctgaattctaacagcgttcaggccctgctgctgaagggcgctgccctgcgtaacatgggcagggtacaggaggctataattcacttcagggaagccatccgcttagctccatgtaggctcgactgttatgagggactcatcgagtgttacctcgcttccaatagcatcagggaagcaatggtgatggctaataatgtgtacaagactcttggggcaaatgcacagacactcaccttgctcgccaccgtgtgtttagaggatcctgtcacgcaggagaaggccaagaccctactagacaaggccctgacgcaacggccagattatataaaggcagtagttaagaaagctgagttactgagcagagagcagaagtacgaggacggcatcgcactgctccgcaacgcactcgccaatcagtcagattgtgtgctgcatcgaatattgggcgattttctggtggctgtgaacgagtatcaggaggccatggaccagtattcaattgctctgcgatag

SEQ ID NO: 52605 - DNA, 2200 bp, Artificial Sequence
  derived and/or modified sequence
gatggaccccggcgacgccgccattttggagtcttccctaaggatcctctaccggcttttcgagtcagtgctgccgccgctgcccgcggctttgcagagcaggatgaatgtgatagaccacgtgcgggacatggcggccgcggggctgcactccaacgtgcggctcctcagcagcttgttacttacaatgagtaataacaaccctgagttattctccccacctcagaagtaccagcttttggtgtatcatgcagattctctctttcatgataaggaatatcggaatgctgtgagtaagtataccatggctttacagcagaagaaagcgctaagtaaaacttcaaaagtgagaccttcaactggaaattctgcatctactccacaaagtcagtgtcttccatctgaaattgaagtgaaatacaaaatggctgaatgttatacaatgctaaaacaagataaagatgccattgctatacttgatgggatcccttcaagacaaagaactcccaaaataaacatgatgctggcaaacctgtacaagaaggctggtcaggagcgcccttcagtcaccagctataaggaggtgctgaggcagtgcccattagcccttgatgccattctaggcttgttgtccctttctgtaaaaggggcagaggtggcatccatgacaatgaatgtgatccaaaccgtgcctaacttggactggctctctgtgtggatcaaagcgtatgcttttgtgcacactggtgacaactcaagagcaatcagtaccatctgttcactagagaaaaaatccttattgcgagataacgtggacctattgggaagcttggcagatctgtacttcagagctggagacaataaaaactctgtcctcaagtttgaacaggcacagatgttggatccttatctgataaaaggaatggatgtatatggctacctactggcacgagaagggcggctagaggatgttgagaaccttggatgccgccttttcaatatctctgatcagcatgcagaaccgtgggtggtttctggctgtcacagcttctatagcaaacgctactcccgggccctctatttaggagccaaggccattcagctgaacagtaatagtgttcaagctctgctacttaagggagcagcacttaggaacatgggcagagtccaagaagcaataatccactttcgggaggccatacggctcgcaccttgtcgcttagattgttatgaaggtcttatcgaatgttacttagcctccaacagtattcgagaagcaatggtaatggctaacaacgtttacaaaactctgggagcaaatgcacagacccttacccttttagccaccgtttgtcttgaagacccagtgacacaggagaaagccaaaacattattagataaagccctgacccaaaggccagattacattaaggctgtggtgaaaaaagcagaactacttagcagagaacagaaatatgaagatggaattgctttgctgaggaacgcactggctaatcagagtgactgtgtcctgcatcggatcctaggagatttccttgtagctgtcaatgagtatcaggaggcaatggaccagtatagtatagcactaaggtaggcactagcctcccttgggggaaggccactgaggagggtagaggaggcagtgagctgtgtcacaggagttatggaaacacacacacactttgtgtccatggttgaaagcagaataataatagtaatggtagaagagttatttgtgaattcatgacttctaaaaattttttcttaaaatatattaacaacattagagaactgtttcactcataaccatcccacaccactataacatctgtgttcatttgtatagctcatcttctgtccttgcccacacacacatatttttatagggctgtacctagtatatattttatattcttctttttcaaatcaaagtattgtaagtactttcccatgtttctatctactgtagtcattaagaacttgaggtctgaagttttgaatactaccttcaccacctgtgatcttgggcaagttactaacacatttccttgtctatatctagctaccttattagatattaaatgatcgaatgagggttaaatgattatttcatgtaaagctcttagccctgtgcctggtacatagtaaatgctaaataaatagtggtattcttactgtt

SEQ ID NO: 52606 - protein, 1982 aa, Artificial Sequence
  derived and/or modified sequence
MAADDDNGDGTSLFDVFSASPLKNNDEGSLDIYAGLDSAVSDSASKSCVPSRNCLDLYEEILTEEGTAKEATYNDLQVEYGKCQLQMKELMKKFKEIQTQNFSLINENQSLKKNISALIKTARVEINRKDEEISNLHQRLSEFPHFRNNHKTARTFDTVKTKDLKSRSPHLDDCSKTDHRAKSDVSKDVHHSTSLPNLEKEGKPHSDKRSTSHLPTSVEKHCTNGVWSRSHYQVGEGSSNEDSRRGRKDIRHSQFNRGTERVRKDLSTGCGDGEPRILEASQRLQGHPEKYGKGEPKTESKSSKFKSNSDSDYKGERINSSWEKETPGERSHSRVDSQSDKKLERQSERSQNINRKEVKSQDKEERKVDQKPKSVVKDQDHWRRSERASLPHSKNEITFSHNSSKYHLEERRGWEDCKRDKSVNSHSFQDGRCPSSLSNSRTHKNIDSKEVDAMHQWENTPLKAERHRTEDKRKREQESKEENRHIRNEKRVPTEHLQKTNKETKKTTTDLKKQNEPKTDKGEVLDNGVSEGADNKELAMKAESGPNETKNKDLKLSFMKKLNLTLSPAKKQPVSQDNQHKITDIPKSSGVCDSESSMQVKTVAYVPSISEHILGEAAVSEHTMGETKSTLLEPKVALLAVTEPRIGISETNKEDENSLLVRSVDNTMHCEEPICGTETSFPSPMEIQQTESLFPSTGMKQTINNGRAAAPVVMDVLQTDVSQNFGLELDTKRNDNSDYCGISEGMEMKVALSTTVSETTESILQPSIEEADILPIMLSEDNNPKFEPSVIVTPLVESKSCHLEPCLPKETLDSSLQQTELMDHRMATGETNSVYHDDDNSVLSIDLNHLRPIPEAISPLNSPVRPVAKVLRNESPPQVPVYNNSHKDVFLPNSAHSTSKSQSDLNKENQKPIYKSDKCTEADTCKNSPLDELEEGEIRSDSETSKPQESFEKNSKRRVSADVRKSKTIPRRGKSTVCLDKDSRKTHVRIHQTNNKWNKRPDKSSRSSKTEKKDKVMSTSSLEKIVPIIAVPSSEQEIMHMLRMIRKHVRKNYMKFKAKFSLIQFHRIIESAILSFTSLIKHLNLHKISKSVTTLQKNLCDIIESKLKQVKKNGIVDRLFEQQLPDMKKKLWKFVDDQLDYLFAKLKKILVCDSKSFGRDSDEGKLEKTSKQNAQYSNSQKRSVDNSNRELLKEKLSKSEDPVHYKSLVGCKKSEENYQDQNNSSINTVKHDIKKNFNICFDNIKNSQSEERSLEVHCPSTPKSEKNEGSSIEDAQTSQHATLKPERSFEILTEQQASSLTFNLVSDAQMGEIFKSLLQGSDLLDSSVNCTEKSEWELKTPEKQLLETLKCESIPACTTEELVSGVASPCPKMISDDNWSLLSSEKGPSLSSGLSLPVHPDVLDESCMFEVSTNLPLSKDNVCSVEKSKPCVSSILLEDLAVSLTVPSPLKSDGHLSFLKPDMSSSSTPEEVISAHFSEDALLEEEDASEQDIHLALESDNSSSKSSCSSSWTSRSVAPGFQYHPNLPMHAVIMEKSNDHFIVKIRRATPSTSSGLKQSMMPDELLTSLPRHGKEADEGPEKEYISCQNTVFKSVEELENSNKNVDGSKSTHEEQSSMIQTQVPDIYEFLKDASDKMGHSDEVADECFKLHQVWETKVPESIEELPSMEEISHSVGEHLPNTYVDLTKDPVTETKNLGEFIEVTVLHIDQLGCSGGNLNQSAQILDNSLQADTVGAFIDLTQDASSEAKSEGNHPALAVEDLGCGVIQVDEDNCKEEKAQVANRPLKCIVEETYIDLTTESPSSCEVKKDELKSEPGSNCDNSELPGTLHNSHKKRRNISDLNHPHKKQRKETDLTNKEKTKKPTQDSCENTEAHQKKASKKKAPPVTKDPSSLKATPGIKDSSAALATSTSLSAKNVIKKKGEIIILWTRNDDREILLECQKRGPSFKTFAYLAAKLDKNPNQVSERFQQLMKLFEKSKCR

SEQ ID NO: 52607 - DNA, 90 bp, Artificial Sequence
  derived and/or modified sequence
aaacaaaacacagaaatgcaaagacaaaacataaaacgcagccataaaggacatattttagataactggggaaatttgtatgggctgtgt

SEQ ID NO: 52608 - DNA, 6719 bp, Artificial Sequence
  derived and/or modified sequence
gttgtcgtaggggcccggtccgtgagggactgctaaggaagaggctgcatggcgcggtagtcccccgagtggaggtcggctgcccctgggaaaccagagagtcggagggagtccatctggagcggccaagtaggtcggggaagggccgcgcctgacgtctggccgcaggtggtgactctcaaaaggaaataggatcatggcagcagatgatgacaatggtgatggaacaagtttatttgatgtcttttctgcttctcctcttaagaacaatgatgaaggctcactggacatatacgctgggttggacagtgctgtttctgacagcgcttccaaatcctgtgtaccatcaagaaattgtttggacttatatgaagagatcctgactgaagaaggaactgcaaaggaggcaacatataatgatttgcaagtagaatatggaaaatgtcaactacaaatgaaagagctgatgaaaaaatttaaagaaatacagacacagaatttcagcttaataaacgaaaaccagtctcttaagaagaatatttcagcacttatcaaaactgccagagtggaaataaaccgcaaggatgaagaaataagtaatcttcaccaaagattgtctgagtttccacattttcgaaataatcataaaactgcaaggacatttgatacagttaaaacaaaagatcttaaatctagatctccacatttggatgattgttcaaagactgatcacagagctaaaagtgatgtttctaaagatgtacatcatagcacttcactgccaaatctggaaaaggaaggaaaaccacattctgataaaaggagtacttcacatttacctacatctgttgagaaacactgcactaatggtgtttggtcacgttctcattatcaggttggcgagggtagctcaaatgaggatagtagaagaggaagaaaagatattagacatagccagtttaacagaggaactgaaagagtacgaaaagacttaagtactggctgtggtgatggtgaaccaaggatattggaggctagtcaaaggctacaaggacatcctgagaaatatggtaaaggtgaaccaaagactgaaagcaaaagttcgaagtttaaaagtaactcagattctgactataaaggtgaacgcattaactcttcttgggagaaagagacccctggagaaaggtcacacagtcgagtagactctcaaagtgacaaaaaactagaaagacaaagtgaaagatcacaaaatataaataggaaagaagttaaatcacaagacaaagaagaaagaaaagttgatcaaaaacctaaatcagtagtaaaggaccaagatcactggagaagatctgaacgagcatcacttcctcattccaagaatgaaataacattttctcataattcaagtaaataccatctagaagagagaagaggatgggaagattgtaaaagagacaagagtgtaaacagtcatagttttcaagatggaagatgtccatcttctctttcaaacagtagaactcacaaaaacattgactctaaggaagttgatgccatgcatcagtgggaaaatacacctttaaaagcagaaagacatagaactgaagataagaggaaaagagaacaagaaagcaaagaagaaaataggcatattagaaatgaaaaaagagtacctacagaacatttgcagaagactaataaggaaactaagaaaaccactactgatttaaagaaacagaatgaaccaaagactgataagggagaagtccttgataatggtgtttctgaaggagcagataataaagagcttgcaatgaaagctgagagtggtccaaatgaaacaaaaaacaaggacctaaaattgagttttatgaaaaaattgaacttaactctttctcctgctaaaaagcaacctgtttcccaggataatcagcataaaataactgatattcccaagtccagtggtgtatgtgattcagagtcttcaatgcaagttaaaacagtggcatatgttccctccataagtgaacatatcttgggggaagcagctgtcagtgaacataccatgggggaaaccaagtcaacgttattggaaccaaaggttgctcttctagcagtgactgaacccaggatcggtatctcagaaaccaacaaggaagacgaaaatagtttgttagttaggtctgttgacaatactatgcattgtgaagagcccatttgtggtacagagacttccttcccatctcctatggaaatacaacagacagaatccttgtttccatcaacaggaatgaaacaaaccattaataatggaagggcagcagctcctgtggtaatggatgtattacaaacagatgtgtctcaaaactttggcttggaattggataccaaaagaaatgataattcagattattgtggtatttctgaaggtatggagatgaaggtggcactttcaacaacagtgagtgaaaccactgaaagcattttgcagccttcaattgaggaagctgatattttgccaataatgctttcagaagataataacccaaaatttgagccttctgttatagttacaccactggttgagagtaagtcgtgtcatctggagccttgcttacctaaagagactctagattcttcacttcagcagactgagttaatggaccacagaatggcaactggtgaaacaaactcagtatatcatgatgatgataactcggttttgagcattgaccttaatcacctgagacctattccagaagccatcagtcctctgaatagtccagtgagacctgtagcaaaagttcttagaaatgaaagcccacctcaagttccagtgtataataacagtcataaagatgtgtttttaccaaattcagctcattctacctctaagagtcagtctgatctcaataaggaaaatcaaaagccaatttacaaatctgacaaatgtacagaagcagacacatgtaagaattcaccattagatgaattagaagaaggagaaattagaagtgatagtgaaacatctaaaccacaagaaagttttgaaaaaaattccaaacgtagagtgtcagctgatgtgcggaagtcaaagactatcccacgacgtgggaaaagtactgtgtgtttagataaagacagtaggaaaacacatgtaagaatccatcagaccaataacaaatggaataaaagacctgataaatctagcagatcttcaaaaacagagaagaaagataaagtgatgagcacttccagcttggaaaaaatagttccaattattgctgtaccctcttctgaacaagagatcatgcacatgttacgaatgataagaaaacatgtaagaaaaaattatatgaaattcaaggcaaaattttcattaatacaatttcacagaattattgagtcagcaattttgagttttacatctttaattaaacatctcaacttacacaaaatctctaagtcagtgactaccttacagaagaatctctgtgatattatagagtctaaacttaagcaagttaaaaagaatggcatagttgatcgtttatttgaacagcaactaccagatatgaaaaaaaaattgtggaagtttgtagatgaccaacttgattatttgtttgcaaagcttaagaaaatcttagtatgtgattccaaaagctttggaagagatagtgatgaaggcaaacttgaaaaaacaagtaaacagaatgcacagtattcaaatagtcagaaaaggagtgtggacaactccaacagagaattgctgaaagaaaaattatcaaaatcagaagaccctgttcattataagtctttagtgggatgtaaaaaatctgaggaaaattatcaagaccaaaataactccagtattaacactgtaaagcatgacattaaaaaaaattttaacatctgctttgataatataaagaactctcaatccgaagagcgctccttggaagtacactgtccaagcaccccaaagtcagaaaaaaacgaaggaagcagcatagaggatgcacagacatcccagcatgcaactttgaagccagaacgaagtttcgagattcttaccgaacagcaagcatcgagccttacttttaatttagtgagtgatgcacaaatgggtgaaatatttaaaagtttgttgcaaggttctgatcttttagacagcagtgttaactgtactgaaaaaagtgagtgggagttaaagactccagagaagcagctgctagagactcttaagtgcgagtctataccagcttgtacaacagaagagctagtttcaggggtggcttctccatgtcctaaaatgattagtgatgataattggtcattattatcatctgaaaaaggtccatctctgtcttcagggctttcattgccggttcatcctgatgtgttggatgaaagttgtatgtttgaagtgtctactaacctacctttaagtaaagataatgtgtgtagtgtagaaaagagcaagccctgcgtttcttccatacttcttgaagatctagcagtctctttaacagtaccatcgcctctgaagtcagatggtcatctcagttttttaaagcctgatatgtcgtccagttcaactcctgaagaagtcattagtgctcattttagtgaagatgccttacttgaggaagaggatgcatctgagcaagatattcatttagctctggagtctgataattcaagcagtaaatcaagttgttcttcttcctggacaagccgatctgttgctccaggctttcagtaccaccctaatctacctatgcatgccgtcataatggaaaagtccaatgatcatttcattgtgaaaatacgacgtgcaacaccatctacctcttctggccttaaacagagtatgatgcctgatgaattattgacatctttgcccagacatggaaaggaagctgatgaaggaccagagaaagaatatatttcatgtcagaacacagtttttaaatctgtggaggaattggaaaactccaacaaaaatgttgatggcagcaagtcaactcatgaagaacagagctctatgatacaaacacaggttcctgatatatatgaatttcttaaagatgcttcagataagatgggtcatagtgatgaagtggctgatgaatgtttcaaattgcatcaagtatgggaaacaaaagtgcctgaaagcattgaagaattgccttcaatggaagaaatctcacactctgttggggaacatcttccaaacacatacgtagatctaacgaaagatccagtcactgaaaccaaaaacttgggggaattcatagaagtaacagttttacatattgatcagttgggatgttctggaggcaatttaaatcagagtgctcaaatattagacaattctttgcaggctgatactgtaggtgcttttattgatttgacacaagatgcttcaagtgaggctaaaagtgaaggtaatcatcctgcattagctgtggaagacttgggatgtggggtgatacaggtagatgaagataattgtaaggaagaaaaggcacaagtggcaaacaggcctttaaaatgcattgttgaggaaacctatatcgacttgaccacagaatctcccagttcatgtgaagtaaaaaaagatgagttaaaatcagagccaggatcaaattgtgataactcggagttgcctgggactttgcataattctcacaaaaagagaagaaacatttctgatctaaatcatcctcataaaaaacaaagaaaggaaacagacttaactaataaggaaaagaccaagaaacctacccaagattcttgtgagaatactgaagctcaccaaaagaaagccagtaagaagaaggcccctcctgtgactaaagatccctcatcattaaaggcaaccccagggattaaggattcatcagcagcacttgccacttctacaagtctttctgcaaaaaatgttattaaaaagaagggagaaattatcattttatggacaagaaatgatgaccgggaaattttattggagtgtcagaaaagagggccatcatttaaaacatttgcatatttagccgccaagttggataaaaatccaaatcagataagttgctgaattcctgggactcttaactgatattgcatactacacagaagcttcaaattcctcatgttttaaatgagcactagagggaggtttatcacctttttggttaccagatgataatctatatttgttattactcagtgactctctaatttcacatcagcatgttcagcttgtgctagtcatcattctgatttgcttatctgtttttggtcaaaatatttatttttaaacatgttagaacttaccaaaatgaaagcaacagtgatgtattgaaatcttagttttgatattttaaagaaatgactttctagattaaaaaaatagttttgtagcattttaaacttagtgactatttagttcaattgttcatccattttttatttgcttttataattgcctccttgttttggtatattgtaaaataatttaaataatgtatttataaatatgtataattatgatgtaaaataccgtgtgtatatgtatgtatgtgtgtttctgtatatgcacacacataaacggctttgcctagccaaggattttttttatctgtataaaactttttgtataaagtttgctttcaataacagtaatgtataataaaaccatgtaaagttttgttgta

SEQ ID NO: 52609 - DNA, 1280 bp, Artificial Sequence
  derived and/or modified sequence
aaaggaaccgggttgtcttgggccgggcagggcgggtaagttgtcgtaggggcccggtccgtgagggactgctaaggaagaggctgcatggcgcggtagtcccccgagtggaggtcggctgcccctgggaaaccagagagtcggagggagtccatctggagcggccaagtggtgactctcaaaaggaaataggatcatggcagcagatgatgacaatggtgatggaacaagtttatttgatgtcttttctgcttctcctcttaagaacaatgatgaaggctcactggacatatacgctgggttggacagtgctgtttctgacagcgcttccaaatcctgtgtaccatcaagaaattgtttggacttatatgaagagatcctgactgaagaaggaactgcaaaggaggcaacatataatgatttgcaagtagaatatggaaaatgtcaactacaaatgaaagagctgatgaaaaaatttaaagaaatacagacacagaatttcagcttaataaacgaaaaccagtctcttaagaagaatatttcagcacttatcaaaactgccagagtggaaataaaccgcaaggatgaagaaataagtaatcttcaccaaagattgtctgagtttccacattttcgaaataatcataaaactgcaaggacatttgatacagttaaaacaaaagatcttaaatctagatctccacatttggatgattgttcaaagactgatcacagagctaaaagtgatgtttctaaagatgtacatcatagcacttcactgccaaatctggaaaaggaaggaaaaccacattctgataaaaggagtacttcacatttacctacatctgttgagaaacactgcactaatggtgtttggtcacgttctcattatcaggttggcgagggtagctcaaatgaggatagtagaagaggaagaaaagatattagacatagccagtttaacagaggaactgaaagagtacgaaaagacttaagtactggctgtggtgatggtgaaccaaggatattggaggctagtcaaaggctacaaggacatcctgagaaatatggtaaaggtgaaccaaagactgaaagcaaaagttcgaagtttaaaagtaactcagattctgactataaaggtgaacgcattaactcttcttgggagaaagagacccctggagaaaggtcacacagtcgagtagactctcaaagtgacaaaaaactagaaagacaaagtgaaagatcacaaaatataaataggaaagaagttaaatcacaag

SEQ ID NO: 52610 - DNA, 3385 bp, Artificial Sequence
  derived and/or modified sequence
gcgggtaagttgtcgtaggggcccggtccgtgagggactgctaaggaagaggctgcatggcgcggtagtcccccgagtggaggtcggctgcccctgggaaaccagagagtcggagggagtccatctggagcggccaagtaggtcggggaagggccgcgcctgacgtctggccgcaggtagccacgttccctccgcccccggtgcagcttcagggcttgcaccctgcgtccctctgtggtccttcgagagggtctgggcggggactatgggtgggcgcgcccaggaattgtcccttcggcctctcgtcctgcccctcccccccaccatccagtctctccttggaatatactcttaaaatctttcggatggagttctttggagaaatgggtttcctggagtgtcaggtgatcattgatgttgattgtttctgaaatgtttatttaggcatcaaaccaacatgcctaaataagtttttcatttctacagcgcctagattcattcctagcacatagtaggccctaactcagatgtgaatgtaggattcgtaggagctgagcatttgtgcttcaggcatcaagttgtctttgactcttcgactcttccttggtctttttccattctccacacctccagcagcaaacctttcgcctctcctcaaggcctttcccccccatctccctcagcgcctctttgactggagggggacagaggctttcatggcagggattctcccatctcccttcctatccccgctatgccctccaattatcttttcctggcgttccgttttacaagagatggccttctttccaaaaacatttatattgtattgaatattcttgattttggccatcttgctttacagacagacctggggtctaatttcagctctgccacttaccaggtggttgccttgtgcaaatttcttgatcgtctgtgttttcctcatctgtaaaatggggaaaagaataatatggacctcatagaactctggggaggatttaaactaagtgaataatgtatttagatcatttaggttagtgcctggaacatagtaaatgtgccgtatatgatagcttttgttagtatttgccccttacctcttcttctggggtcttgctgtattagcctttcccatgagtgtaaaaatacactgtcttctctggctttttcctgtttttctctacaaatgcttgtgtttttctctaaattttattttttgtcttttagcgtctacattaaggacacattctcagtttcgtaatgatttttctttttcttttttcctttttttttgagactatagcccaggctggagtgcaatggcaagatctcggcttactacaggtttgacctcctgtgctcaagcaatcctcccacctcagccttccaagtagctggaactacaggtggtgactctcaaaaggaaataggatcatggcagcagatgatgacaatggtgatggaacaagtttatttgatgtcttttctgcttctcctcttaagaacaatgatgaaggctcactggacatatacgctgggttggacagtgctgtttctgacagcgcttccaaatcctgtgtaccatcaagaaattgtttggacttatatgaagagatcctgactgaagaaggaactgcaaaggaggcaacatataatgatttgcaagtagaatatggaaaatgtcaactacaaatgaaagagctgatgaaaaaatttaaagaaatacagacacagaatttcagcttaataaacgaaaaccagtctcttaagaagaatatttcagcacttatcaaaactgccagagtggaaataaaccgcaaggatgaagaaataagtaatcttcaccaaaggtattactgagcggtgtagctgttataaattacgtgggtattgatatgtggaatatttttaacttttagaggaaagatgaaaataatgtatttttattttttattttttaatttttttttttttttagagacagggtctcattttgtcactcaggctggtcttgaactcctgacctcaggtgagccacccaccttggcctcccaaagtgctgggatttcaggcgtgagccactgtgcccagacttttttttttttttggcagagtcttgctctgttgcccaggctggagtgcagtggtgtgatctcagctcattgcaacctttgcctgctgggttcaagcgatcctcccacctcagtctcccgagtagctgggattacaggcatgcaccacctgtaaaaaaaaatttaaaaaaaaaaaaagatttttttgtatttttagtagacggggtttcaccattttggccaggctggtctcaaactcctgatctcaagtgatctgcccgcctggccctccaaagtactgggattacaggtatgagccactgcacccagcttcaagggtgttccttttgtggttagtgcttttcgtgtttacatttccccaatgatctcaaaggtatctaccaacagttggtcggttgagtcagtatctatattagtttcctaggcttagtgtaacaaaactaccagaaatgggtggcctaaacaaccaaaatttgtctcacagtcctggaggctagaagtccaaaatgaaagtgtcagcaaagttagtttcttttgagagctctgaaggaaggatctgattcaggcctctgtactcttagatggttgtctacttcctatgtctctttatatcctctttctaaatgtatctctgtgtccaaatttccccctttttataagaacaccagtaatattgcatgcccaccttgaggacatcactttaacttgattatttctgtaaagaccctttaaataaggtcatattctgaagaacaatgggttagaacttcaaattatgaatttggtcaggagaggggacacaatccataacagggttcatatgaggcttacatattgttttaggttgtgtgtttttctaatcctctcttataacaatctgcctatatttctgagttttttaagttttgggtttttctacacatttgctactgattagaaaaagatatatgaaatttcagagaaattatggaatttctggaagatgaagttattaccagaagccaatataggccaggcacagtggctcacgcctgtaaccccagtactttgggaggcgaaggcaggagaattgcttgagtccaggagtttgagaccagcctgcgcagcatagtgagatcccatctctacgaaaaattaaaaattagctgggcatggtggcttgtacctgtagtcccagctacttggaaggttgaagtgagaggattgcttgagcctaggacatcaaggctgcagtgagccatgatcattccgctgtactcagcctgggtgaaagagggagaccctgtctc

SEQ ID NO: 52611 - DNA, 2003 bp, Artificial Sequence
  derived and/or modified sequence
gcgggtaagttgtcgtaggggcccggtccgtgagggactgctaaggaagaggctgcatggcgcggtagtcccccgagtggaggtcggctgcccctgggaaaccagagagtcggagggagtccatctggagcggccaagtaggtcggggaagggccgcgcctgacgtctggccgcaggtagccacgttccctccgcccccggtgcagcttcagggcttgcaccctgcgtccctctgtggtccttcgagagggtctgggcggggactatgggtgggcgcgcccaggaattgtcccttcggcctctcgtcctgcccctcccccccaccatccagtctctccttggaatatactcttaaaatctttcggatggagttctttggagaaatgggtttcctggagtgtcaggtgatcattgatgttgattgtttctgaaatgtttatttaggcatcaaaccaacatgcctaaataagtttttcatttctacagcgcctagattcattcctagcacatagtaggccctaactcagatgtgaatgtaggattcgtaggagctgagcatttgtgcttcaggcatcaagttgtctttgactcttcgactcttccttggtctttttccattctccacacctccagcagcaaacctttcgcctctcctcaaggcctttcccccccatctccctcagcgcctctttgactggagggggacagaggctttcatggcagggattctcccatctcccttcctatccccgctatgccctccaattatcttttcctggcgttccgttttacaagagatggccttctttccaaaaacatttatattgtattgaatattcttgattttggccatcttgctttacagacagacctggggtctaatttcagctctgccacttaccaggtggttgccttgtgcaaatttcttgatcgtctgtgttttcctcatctgtaaaatggggaaaagaataatatggacctcatagaactctggggaggatttaaactaagtgaataatgtatttagatcatttaggttagtgcctggaacatagtaaatgtgccgtatatgatagcttttgttagtatttgccccttacctcttcttctggggtcttgctgtattagcctttcccatgagtgtaaaaatacactgtcttctctggctttttcctgtttttctctacaaatgcttgtgtttttctctaaattttattttttgtcttttagcgtctacattaaggacacattctcagtttcgtaatgatttttctttttcttttttcctttttttttgagactatagcccaggctggagtgcaatggcaagatctcggcttactacaggtttgacctcctgtgctcaagcaatcctcccacctcagccttccaagtagctggaactacaggtggtgactctcaaaaggaaataggatcatggcagcagatgatgacaatggtgatggaacaagtttatttgatgtcttttctgcttctcctcttaagaacaatgatgaaggctcactggacatatacgctgggttggacagtgctgtttctgacagcgcttccaaatcctgtgtaccatcaagaaattgtttggacttatatgaagagatcctgactgaagaaggaactgcaaaggaggcaacatataatgatttgcaagtagaatatggaaaatgtcaactacaaatgaaagagctgatgaaaaaatttaaagaaatacagacacagaatttcagcttaataaacgaaaaccagtctcttaagaagaatatttcagcacttatcaaaactgccagagtggaaataaaccgcaaggatgaagaaataagtaatcttcaccaaaggtattactgagcggtgtagctgttataaattacgtgggtattgatatgtggaatatttttaacttttagaggaaagatgaaaataatgtatttttattttttattttttaatttttttttttttttagagacagggtctcattttgtcac

SEQ ID NO: 52612 - DNA, 1300 bp, Artificial Sequence
  derived and/or modified sequence
tgtcgtaggggcccggtccgtgagggactgctaaggaagaggctgcatggcgcggtagtcccccgagtggaggtcggctgcccctgggaaaccagagagtcggagggagtccatctggagcggccaagtggtgactctcaaaaggaaataggatcatggcagcagatgatgacaatggtgatggaacaagtttatttgatgtcttttctgcttctcctcttaagaacaatgatgaaggctcactggacatatacgctgggttggacagtgctgtttctgacagcgcttccaaatcctgtgtaccatcaagaaattgtttggacttatatgaagagatcctgactgaagaaggaactgcaaaggaggcaacatataatgatttgcaagtagaatatggaaaatgtcaactacaaatgaaagagctgatgaaaaaatttaaagaaatacagacacagaatttcagcttaataaacgaaaaccagtctcttaagaagaatatttcagcacttatcaaaactgccagagtggaaataaaccgcaaggatgaagaaataagtaatcttcaccaaagaaatgatgaccgggaaattttattggagtgtcagaaaagagggccatcatttaaaacatttgcatatttagccgccaagttggataaaaatccaaatcagataagttgctgaattcctgggactcttaactgatattgcatactacacagaagcttcaaattcctcatgttttaaatgagcactagagggaggtttatcacctttttggttaccagatgataatctatatttgttattactcagtgactctctaatttcacatcagcatgttcagcttgtgctagtcatcattctgatttgcttatctgtttttggtcaaaatatttatttttaaacatgttagaacttaccaaaatgaaagcaacagtgatgtattgaaatcttagttttgatattttaaagaaatgactttctagattaaaaaaatagttttgtagcattttaaacttagtgactatttagttcaattgttcatccattttttatttgcttttataattgcctccttgttttggtatattgtaaaataatttaaataatgtatttataaatatgtataattatgatgtaaaataccgtgtgtatatgtatgtatgtgtgtttctgtatatgcacacacataaacggctttgcctagccaaggattttttttatctgtataaaactttttgtataaagtttgctttcaataacagtaatgtataataaaaccatgtaaagttttgttg

SEQ ID NO: 52613 - DNA, 7344 bp, Artificial Sequence
  derived and/or modified sequence
gcgggtaagttgtcgtaggggcccggtccgtgagggactgctaaggaagaggctgcatggcgcggtagtcccccgagtggaggtcggctgcccctgggaaaccagagagtcggagggagtccatctggagcggccaagtaggtcggggaagggccgcgcctgacgtctggccgcaggtagccacgttccctccgcccccggtgcagcttcagggcttgcaccctgcgtccctctgtggtccttcgagagggtctgggcggggactatgggtgggcgcgcccaggaattgtcccttcggcctctcgtcctgcccctcccccccaccatccagtctctccttggaatatactcttaaaatctttcggatggagttctttggagaaatgggtttcctggagtgtcaggtgatcattgatgttgattgtttctgaaatgtttatttaggcatcaaaccaacatgcctaaataagtttttcatttctacagcgcctagattcattcctagcacatagtaggccctaactcagatgtgaatgtaggattcgtaggagctgagcatttgtgcttcaggcatcaagttgtctttgactcttcgactcttccttggtctttttccattctccacacctccagcagcaaacctttcgcctctcctcaaggcctttcccccccatctccctcagcgcctctttgactggagggggacagaggctttcatggcagggattctcccatctcccttcctatccccgctatgccctccaattatcttttcctggcgttccgttttacaagagatggccttctttccaaaaacatttatattgtattgaatattcttgattttggccatcttgctttacagacagacctggggtctaatttcagctctgccacttaccaggtggttgccttgtgcaaatttcttgatcgtctgtgttttcctcatctgtaaaatggggaaaagaataatatggacctcatagaactctggggaggatttaaactaagtgaataatgtatttagatcatttaggttagtgcctggaacatagtaaatgtgccgtatatgatagcttttgttagtatttgccccttacctcttcttctggggtcttgctgtattagcctttcccatgagtgtaaaaatacactgtcttctctggctttttcctgtttttctctacaaatgcttgtgtttttctctaaattttattttttgtcttttagcgtctacattaaggacacattctcagtttcgtaatgatttttctttttcttttttcctttttttttgagactatagcccaggctggagtgcaatggcaagatctcggcttactacaggtttgacctcctgtgctcaagcaatcctcccacctcagccttccaagtagctggaactacaggtggtgactctcaaaaggaaataggatcatggcagcagatgatgacaatggtgatggaacaagtttatttgatgtcttttctgcttctcctcttaagaacaatgatgaaggctcactggacatatacgctgggttggacagtgctgtttctgacagcgcttccaaatcctgtgtaccatcaagaaattgtttggacttatatgaagagatcctgactgaagaaggaactgcaaaggaggcaacatataatgatttgcaagtagaatatggaaaatgtcaactacaaatgaaagagctgatgaaaaaatttaaagaaatacagacacagaatttcagcttaataaacgaaaaccagtctcttaagaagaatatttcagcacttatcaaaactgccagagtggaaataaaccgcaaggatgaagaaataagtaatcttcaccaaagattgtctgagtttccacattttcgaaataatcataaaactgcaaggacatttgatacagttaaaacaaaagatcttaaatctagatctccacatttggatgattgttcaaagactgatcacagagctaaaagtgatgtttctaaagatgtacatcatagcacttcactgccaaatctggaaaaggaaggaaaaccacattctgataaaaggagtacttcacatttacctacatctgttgagaaacactgcactaatggtgtttggtcacgttctcattatcaggttggcgagggtagctcaaatgaggatagtagaagaggaagaaaagatattagacatagccagtttaacagaggaactgaaagagtacgaaaagacttaagtactggctgtggtgatggtgaaccaaggatattggaggctagtcaaaggctacaaggacatcctgagaaatatggtaaaggtgaaccaaagactgaaagcaaaagttcgaagtttaaaagtaactcagattctgactataaaggtgaacgcattaactcttcttgggagaaagagacccctggagaaaggtcacacagtcgagtagactctcaaagtgacaaaaaactagaaagacaaagtgaaagatcacaaaatataaataggaaagaagttaaatcacaagacaaagaagaaagaaaagttgatcaaaaacctaaatcagtagtaaaggaccaagatcactggagaagatctgaacgagcatcacttcctcattccaagaatgaaataacattttctcataattcaagtaaataccatctagaagagagaagaggatgggaagattgtaaaagagacaagagtgtaaacagtcatagttttcaagatggaagatgtccatcttctctttcaaacagtagaactcacaaaaacattgactctaaggaagttgatgccatgcatcagtgggaaaatacacctttaaaagcagaaagacatagaactgaagataagaggaaaagagaacaagaaagcaaagaagaaaataggcatattagaaatgaaaaaagagtacctacagaacatttgcagaagactaataaggaaactaagaaaaccactactgatttaaagaaacagaatgaaccaaagactgataagggagaagtccttgataatggtgtttctgaaggagcagataataaagagcttgcaatgaaagctgagagtggtccaaatgaaacaaaaaacaaggacctaaaattgagttttatgaaaaaattgaacttaactctttctcctgctaaaaagcaacctgtttcccaggataatcagcataaaataactgatattcccaagtccagtggtgtatgtgattcagagtcttcaatgcaagttaaaacagtggcatatgttccctccataagtgaacatatcttgggggaagcagctgtcagtgaacataccatgggggaaaccaagtcaacgttattggaaccaaaggttgctcttctagcagtgactgaacccaggatcggtatctcagaaaccaacaaggaagacgaaaatagtttgttagttaggtctgttgacaatactatgcattgtgaagagcccatttgtggtacagagacttccttcccatctcctatggaaatacaacagacagaatccttgtttccatcaacaggaatgaaacaaaccattaataatggaagggcagcagctcctgtggtaatggatgtattacaaacagatgtgtctcaaaactttggcttggaattggataccaaaagaaatgataattcagattattgtggtatttctgaaggtatggagatgaaggtggcactttcaacaacagtgagtgaaaccactgaaagcattttgcagccttcaattgaggaagctgatattttgccaataatgctttcagaagataataacccaaaatttgagccttctgttatagttacaccactggttgagagtaagtcgtgtcatctggagccttgcttacctaaagagactctagattcttcacttcagcagactgagttaatggaccacagaatggcaactggtgaaacaaactcagtatatcatgatgatgataactcggttttgagcattgaccttaatcacctgagacctattccagaagccatcagtcctctgaatagtccagtgagacctgtagcaaaagttcttagaaatgaaagcccacctcaagttccagtgtataataacagtcataaagatgtgtttttaccaaattcagctcattctacctctaagagtcagtctgatctcaataaggaaaatcaaaagccaatttacaaatctgacaaatgtacagaagcagacacatgtaagaattcaccattagatgaattagaagaaggagaaattagaagtgatagtgaaacatctaaaccacaagaaagttttgaaaaaaattccaaacgtagagtgtcagctgatgtgcggaagtcaaagactatcccacgacgtgggaaaagtactgtgtgtttagataaagacagtaggaaaacacatgtaagaatccatcagaccaataacaaatggaataaaagacctgataaatctagcagatcttcaaaaacagagaagaaagataaagtgatgagcacttccagcttggaaaaaatagttccaattattgctgtaccctcttctgaacaagagatcatgcacatgttacgaatgataagaaaacatgtaagaaaaaattatatgaaattcaaggcaaaattttcattaatacaatttcacagaattattgagtcagcaattttgagttttacatctttaattaaacatctcaacttacacaaaatctctaagtcagtgactaccttacagaagaatctctgtgatattatagagtctaaacttaagcaagttaaaaagaatggcatagttgatcgtttatttgaacagcaactaccagatatgaaaaaaaaattgtggaagtttgtagatgaccaacttgattatttgtttgcaaagcttaagaaaatcttagtatgtgattccaaaagctttggaagagatagtgatgaaggcaaacttgaaaaaacaagtaaacagaatgcacagtattcaaatagtcagaaaaggagtgtggacaactccaacagagaattgctgaaagaaaaattatcaaaatcagaagaccctgttcattataagtctttagtgggatgtaaaaaatctgaggaaaattatcaagaccaaaataactccagtattaacactgtaaagcatgacattaaaaaaaattttaacatctgctttgataatataaagaactctcaatccgaagagcgctccttggaagtacactgtccaagcaccccaaagtcagaaaaaaacgaaggaagcagcatagaggatgcacagacatcccagcatgcaactttgaagccagaacgaagtttcgagattcttaccgaacagcaagcatcgagccttacttttaatttagtgagtgatgcacaaatgggtgaaatatttaaaagtttgttgcaaggttctgatcttttagacagcagtgttaactgtactgaaaaaagtgagtgggagttaaagactccagagaagcagctgctagagactcttaagtgcgagtctataccagcttgtacaacagaagagctagtttcaggggtggcttctccatgtcctaaaatgattagtgatgataattggtcattattatcatctgaaaaaggtccatctctgtcttcagggctttcattgccggttcatcctgatgtgttggatgaaagttgtatgtttgaagtgtctactaacctacctttaagtaaagataatgtgtgtagtgtagaaaagagcaagccctgcgtttcttccatacttcttgaagatctagcagtctctttaacagtaccatcgcctctgaagtcagatggtcatctcagttttttaaagcctgatatgtcgtccagttcaactcctgaagaagtcattagtgctcattttagtgaagatgccttacttgaggaagaggatgcatctgagcaagatattcatttagctctggagtctgataattcaagcagtaaatcaagttgttcttcttcctggacaagccgatctgttgctccaggctttcagtaccaccctaatctacctatgcatgccgtcataatggaaaagtccaatgatcatttcattgtgaaaatacgacgtgcaacaccatctacctcttctggccttaaacagagtatgatgcctgatgaattattgacatctttgcccagacatggaaaggaagctgatgaaggaccagagaaagaatatatttcatgtcagaacacagtttttaaatctgtggaggaattggaaaactccaacaaaaatgttgatggcagcaagtcaactcatgaagaacagagctctatgatacaaacacaggttcctgatatatatgaatttcttaaagatgcttcagataagatgggtcatagtgatgaagtggctgatgaatgtttcaaattgcatcaagtatgggaaacaaaagtgcctgaaagcattgaagaattgccttcaatggaagaaatctcacactctgttggggaacatcttccaaacacatacgtagatctaacgaaagatccagtcactgaaaccaaaaacttgggggaattcatagaagtaacagttttacatattgatcagttgggatgttctggaggcaatttaaatcagagtgctcaaatattagacaattctttgcaggctgatactgtaggtgcttttattgatttgacacaagatgcttcaagtgaggctaaaagtgaaggtaatcatcctgcattagctgtggaagacttgggatgtggggtgatacaggtagatgaagataattgtaaggaagaaaaggcacaagtggcaaacaggcctttaaaatgcattgttgaggaaacctatatcgacttgaccacagaatctcccagttcatgtgaagtaaaaaaagatgagttaaaatcagagccaggatcaaattgtgataactcggagttgcctgggactttgcataattctcacaaaaagagaagaaacatttctgatctaaatcatcctcataaaaaacaaagaaaggaaacagacttaactaataaggaaaagaccaagaaacctacccaagattcttgtgagaatactgaagctcaccaaaagaaagccagtaagaagaaggcccctcctgtgactaaagatccctcatcattaaaggcaaccccagggattaaggattcatcagcagcacttgccacttctacaagtctttctgcaaaaaatgttattaaaaagaagggagaaattatcattttatggacaagaaatgatgaccgggaaattttattggagtgtcagaaaagagggccatcatttaaaacatttgcatatttagccgccaagttggataaaaatccaaatcaggtaactacccaattt

SEQ ID NO: 52614 - DNA, 1153 bp, Artificial Sequence
  derived and/or modified sequence
gggcagaaaggaaccgggttgtcttgggccgggcagggcgggtggtgactctcaaaaggaaataggatcatggcagcagatgatgacaatggtgatggaacaagtttatttgatgtcttttctgcttctcctcttaagaacaatgatgaaggctcactggacatatacgctgggttggacagtgctgtttctgacagcgcttccaaatcctgtgtaccatcaagaaattgtttggacttatatgaagagatcctgactgaagaaggaactgcaaaggaggcaacatataatgatttgcaagtagaatatggaaaatgtcaactacaaatgaaagagctgatgaaaaaatttaaagaaatacagacacagaatttcagcttaataaacgaaaaccagtctcttaagaagaatatttcagcacttatcaaaactgccagagtggaaataaaccgcaaggatgaagaaataagtaatcttcaccaaagattgtctgagtttccacattttcgaaataatcataaaactgcaaggacatttgatacagttaaaacaaaagatcttaaatctagatctccacatttggatgattgttcaaagactgatcacagagctaaaagtgatgtttctaaagatgtacatcatagcacttcactgccaaatctggaaaaggaaggaaaaccacattctgataaaaggagtacttcacatttacctacatctgttgagaaacactgcactaatggtgtttggtcacgttctcattatcaggttggcgagggtagctcaaatgaggatagtagaagaggaagaaaagatattagacatagccagtttaacagaggaactgaaagagtacgaaaagacttaagtactggctgtggtgatggtgaaccaaggatattggaggctagtcaaaggctacaaggacatcctgagaaatatggtaaaggtgaaccaaagactgaaagcaaaagttcgaagtttaaaagtaactcagattctgactataaaggtgaacgcattaactcttcttgggagaaagagacccctggagaaaggtcacacagtcgagtagactctcaaagtgacaaaaaactagaaagacaaagtgaaagatcacaaaatataaataggaaagaagttaaatcacaag

SEQ ID NO: 52615 - protein, 1076 aa, Artificial Sequence
  derived and/or modified sequence
MSSAEIIGSTNLIILLEDEVFADFFNTFLSLPVFGQTPFYTVENSQWSLWPEIPCNLIAKYKGLLTWLEKCRLPFFCKTNLCFHYILCQEFISFIKSPEGGEELVDFWILAENILSIDEMDLEVRDYYLSLLLMLRATHLQEGSRVVTLCNMNIKSLLNLSIWHPNQSTTRREILSHMQKVALFKLQSYWLPNFYTHTKMTMAKEEACHGLMQEYETRLYSVCYTHIGGLPLNMSIKKCHHFQKRYSSRKAKRKMWQLVDPDSWSLEMDLKPDAIGMPLQETCPQEKVVIQMPSLKMASSKETRISSLEKDMHYAKISSMENKAKSHLHMEAPFETKVSTHLRTVIPIVNHSSKMTIQKAIKQSFSLGYIHLALCADACAGNPFRDHLKKLNLKVEIQLLDLWQDLQHFLSVLLNNKKNGNAIFRHLLGDRICELYLNEQIGPCLPLKSQTIQGLKELLPSGDVIPWIPKAQKEICKMLSPWYDEFLDEEDYWFLLFTTQNRFISSRQHKREFIGKEENILLYKRIQQSLELSQALADMKEMDYRQWRKIATEDLKQGGSLQVELTSPVFLTDITKMSFEELCYKNPKMAIQKISDDYKIYCEKAPKIDFKMEIIKETKTVSRSNRKMSLLKRTLVRKPSMRPRNLTEVLLNTQHLEFFREFLKERKAKIPLQFLTAVQKISIETNEKICKSLIENVIKTFFQGQLSPEEMLQCDAPIIKEIASMRHVTTSTLLTLQGHVMKSIEEKWFKDYQDLFPPHHQEVEVQSEVQISSRKPSKIVSTYLQESQKKGWMRMISFIRSFCKYRRFMLNPSKRQEFEDYLHQEMQNSKENFTTAHNTSGRSAPPSTNVRSADQENGEITLVKRRIFGHRIITVNFAINDLYFFSEMEKFNDLVSSAHMLQVNRAYNENDVILMRSKMNIIQKLFLNSDIPPKLRVNVPEFQKDAILAAITEGYLDRSVFHGAIMSVFPVVMYFWKRFCFWKATRSYLQYRGKKFKDRKSPPKSTDKYPFSSGGDNAILRFTLLRGIEWLQPQREAISSVQNSSSSKLTQPRLVVSAMQLHPVQGQKLSYIKKEK

SEQ ID NO: 52616 - DNA, 3231 bp, Artificial Sequence
  derived and/or modified sequence
atgagcagcgccgagatcatcggcagcaccaacctgatcatcctgctggaggacgaggtgttcgccgacttcttcaacaccttcctgagcctgcccgtgttcggccagacccccttctacaccgtggagaacagccagtggagcctgtggcccgagatcccctgcaacctgatcgccaagtacaagggcctgctgacctggctggagaagtgcagactgcccttcttctgcaagaccaacctgtgcttccactacatcctgtgccaggagttcatcagcttcatcaagagccccgagggcggcgaggagctggtggacttctggatcctggccgagaacatcctgagcatcgacgagatggacctggaggtgagagactactacctgagcctgctgctgatgctgagagccacccacctgcaggagggcagcagagtggtgaccctgtgcaacatgaacatcaagagcctgctgaacctgagcatctggcaccccaaccagagcaccaccagaagagagatcctgagccacatgcagaaggtggccctgttcaagctgcagagctactggctgcccaacttctacacccacaccaagatgaccatggccaaggaggaggcctgccacggcctgatgcaggagtacgagaccagactgtacagcgtgtgctacacccacatcggcggcctgcccctgaacatgagcatcaagaagtgccaccacttccagaagagatacagcagcagaaaggccaagagaaagatgtggcagctggtggaccccgacagctggagcctggagatggacctgaagcccgacgccatcggcatgcccctgcaggagacctgcccccaggagaaggtggtgatccagatgcccagcctgaagatggccagcagcaaggagaccagaatcagcagcctggagaaggacatgcactacgccaagatcagcagcatggagaacaaggccaagagccacctgcacatggaggcccccttcgagaccaaggtgagcacccacctgagaaccgtgatccccatcgtgaaccacagcagcaagatgaccatccagaaggccatcaagcagagcttcagcctgggctacatccacctggccctgtgcgccgacgcctgcgccggcaaccccttcagagaccacctgaagaagctgaacctgaaggtggagatccagctgctggacctgtggcaggacctgcagcacttcctgagcgtgctgctgaacaacaagaagaacggcaacgccatcttcagacacctgctgggcgacagaatctgcgagctgtacctgaacgagcagatcggcccctgcctgcccctgaagagccagaccatccagggcctgaaggagctgctgcccagcggcgacgtgatcccctggatccccaaggcccagaaggagatctgcaagatgctgagcccctggtacgacgagttcctggacgaggaggactactggttcctgctgttcaccacccagaacagattcatcagcagcagacagcacaagagagagttcatcggcaaggaggagaacatcctgctgtacaagagaatccagcagagcctggagctgagccaggccctggccgacatgaaggagatggactacagacagtggagaaagatcgccaccgaggacctgaagcagggcggcagcctgcaggtggagctgaccagccccgtgttcctgaccgacatcaccaagatgagcttcgaggagctgtgctacaagaaccccaagatggccatccagaagatcagcgacgactacaagatctactgcgagaaggcccccaagatcgacttcaagatggagatcatcaaggagaccaagaccgtgagcagaagcaacagaaagatgagcctgctgaagagaaccctggtgagaaagcccagcatgagacccagaaacctgaccgaggtgctgctgaacacccagcacctggagttcttcagagagttcctgaaggagagaaaggccaagatccccctgcagttcctgaccgccgtgcagaagatcagcatcgagaccaacgagaagatctgcaagagcctgatcgagaacgtgatcaagaccttcttccagggccagctgagccccgaggagatgctgcagtgcgacgcccccatcatcaaggagatcgccagcatgagacacgtgaccaccagcaccctgctgaccctgcagggccacgtgatgaagagcatcgaggagaagtggttcaaggactaccaggacctgttccccccccaccaccaggaggtggaggtgcagagcgaggtgcagatcagcagcagaaagcccagcaagatcgtgagcacctacctgcaggagagccagaagaagggctggatgagaatgatcagcttcatcagaagcttctgcaagtacagaagattcatgctgaaccccagcaagagacaggagttcgaggactacctgcaccaggagatgcagaacagcaaggagaacttcaccaccgcccacaacaccagcggcagaagcgccccccccagcaccaacgtgagaagcgccgaccaggagaacggcgagatcaccctggtgaagagaagaatcttcggccacagaatcatcaccgtgaacttcgccatcaacgacctgtacttcttcagcgagatggagaagttcaacgacctggtgagcagcgcccacatgctgcaggtgaacagagcctacaacgagaacgacgtgatcctgatgagaagcaagatgaacatcatccagaagctgttcctgaacagcgacatcccccccaagctgagagtgaacgtgcccgagttccagaaggacgccatcctggccgccatcaccgagggctacctggacagaagcgtgttccacggcgccatcatgagcgtgttccccgtggtgatgtacttctggaagagattctgcttctggaaggccaccagaagctacctgcagtacagaggcaagaagttcaaggacagaaagagcccccccaagagcaccgacaagtaccccttcagcagcggcggcgacaacgccatcctgagattcaccctgctgagaggcatcgagtggctgcagccccagagagaggccatcagcagcgtgcagaacagcagcagcagcaagctgacccagcccagactggtggtgagcgccatgcagctgcaccccgtgcagggccagaagctgagctacatcaagaaggagaagtag

SEQ ID NO: 52617 - DNA, 3231 bp, Artificial Sequence
  derived and/or modified sequence
atgtcttccgctgagatcatcgggagcactaacctgatcattctgttggaagatgaggtcttcgccgattttttcaacaccttcttgtctctcccagtctttgggcaaaccccgttttatacagtggagaactcccagtggagcctgtggcctgagataccatgcaatctcatcgctaaatataaaggcctgttgacctggttggaaaagtgtaggctgccctttttttgcaaaacaaatctgtgcttccactacatactttgccaggagtttatcagcttcatcaaatctccagagggtggcgaggagctcgtagatttctggatccttgctgaaaatattttatcaatagacgagatggacttggaggtgcgggattactacttgagccttctccttatgttgagagccacgcacctgcaggaaggaagccgggtcgttaccctctgcaacatgaatataaagagtcttttgaacctgagcatctggcaccctaaccagtctaccacacgtcgagagattctgtcacacatgcagaaagtggctctctttaaattgcagagttactggctcccaaacttctatactcacactaagatgacgatggcaaaggaggaggcatgtcatggattaatgcaagagtacgaaacccgcctgtatagcgtatgttatactcacatcggcggccttcccctcaacatgtccatcaagaaatgtcaccatttccagaagcgctactcctctcggaaggctaagagaaaaatgtggcaactcgtagaccctgactcatggtcactggagatggacctcaaacctgacgctatcgggatgcctcttcaggagacgtgtccacaagagaaggtggtgattcagatgcctagcttaaagatggccagctcaaaagagacccgtatatctagcttagagaaggacatgcactatgccaaaatctcttccatggaaaacaaagccaagtctcatctccacatggaggctccgtttgagactaaggtgagtacacacctgagaacggtgattcccattgtgaaccactcttcaaaaatgacaatccaaaaggccataaagcagagcttcagtctgggctatatacatctcgcactatgtgccgacgcttgtgcaggcaacccctttcgggaccacttaaaaaaactcaatctcaaagtggaaatccaactgctggatctctggcaggatctccagcacttcctttccgtcctactgaataacaagaaaaacgggaatgcgattttcagacacctgctgggtgataggatctgcgaactgtacctcaacgaacagatcggtccttgcctgccgctgaaatcacagaccatacagggactgaaggaactcttaccctctggcgacgtaataccctggataccaaaggcgcaaaaagagatctgcaaaatgttgagcccgtggtacgatgaatttcttgacgaagaggactattggttcttgctgttcacaacgcagaaccggttcatctccagccggcagcacaaaagggaattcatcggtaaagaggaaaacatcttgctgtataaaagaatccaacagtcgctcgagttaagtcaggccctggcagatatgaaagagatggactatcgtcagtggcgcaaaatcgccacagaagatctgaaacagggcggatctctgcaggtggaattgacctcaccagttttcctcacagacatcactaagatgtccttcgaggagctgtgctacaagaatcctaagatggctattcagaaaatcagtgatgactacaaaatatactgcgaaaaggcccccaaaattgatttcaagatggagatcataaaggagacaaagacagtatccagaagtaaccgaaaaatgagtctacttaaaaggacactggtaaggaagccgagtatgcggcctaggaacctcactgaggttctgttgaacacccagcatctcgagttctttagagaatttctgaaggaacggaaagccaaaatcccactccagtttctgaccgccgtgcagaagatctcaatagagaccaatgagaagatttgtaaatccctaattgagaatgtgatcaagacatttttccagggccagctgtcccccgaagaaatgctgcagtgtgacgcaccaatcatcaaggagatagccagtatgaggcatgtgacaaccagtacactgctgacactgcaaggacacgtgatgaagagcatcgaggaaaagtggttcaaggactaccaggatctgttccctccccaccaccaggaagtcgaggtccaatcagaggtgcaaattagcagccgcaagccgagcaaaattgtatcaacctatttgcaagagtcccagaaaaaaggttggatgcgaatgatctcctttattagatcattttgtaaatataggaggttcatgttgaacccctctaagcgccaggaatttgaggattaccttcatcaggaaatgcaaaactcgaaggaaaatttcactacagcgcacaatacctcaggacgtagtgcacccccaagcacaaatgtgaggtctgctgatcaggagaacggtgaaattaccctggtgaagagacggatttttggtcacaggatcattacagtgaattttgccatcaatgatctgtatttcttctctgaaatggagaaatttaatgacctggtgagcagtgcacacatgttacaggtaaatcgggcctataacgagaacgacgtgattttgatgaggtcaaagatgaatatcatccaaaaactgttcctgaattcagatattccgcccaaactccgagttaatgtcccggagttccagaaggatgcaatcttggcggctatcaccgagggatacttggatcggtcagtgtttcacggagctatcatgagcgtgtttcctgtagttatgtacttttggaagcggttctgtttctggaaggccacacgctcttacctacagtatagaggtaagaaatttaaagacagaaagtctccacctaagtccaccgacaagtatcctttctcttctggcggggacaatgctatcttgagattcaccttattacgtgggatcgagtggctccaaccccagcgggaagctatctcctcggtgcagaacagcagctccagcaagctgactcagcctcgactggtagtgtccgccatgcagctgcatccagtccaaggtcagaagcttagctacatcaaaaaggagaagtag

SEQ ID NO: 52618 - DNA, 3231 bp, Artificial Sequence
  derived and/or modified sequence
atgagcagcgctgagatcatcggcagcaccaacctgatcatcctgctggaggatgaggtgtttgctgacttcttcaacaccttcctgagcctgcctgtgtttggccagacccccttctacacagtggagaacagccagtggagcctgtggccagagatcccctgcaacctgattgccaagtacaagggcctgctgacctggctggagaagtgccgcctgcccttcttctgcaagaccaacctgtgcttccactacatcctgtgccaggagttcatctccttcatcaagagccctgagggcggggaggagctggtggacttctggatcctggccgagaacatcctgagcattgatgagatggacctggaggtgcgggactactacctgagcctgctgctgatgctgcgggccacccacctgcaggagggcagccgggtggtgaccctgtgcaacatgaacatcaagagcctgctgaacctgagcatctggcaccccaaccagagcaccacccggcgggagatcctgagccacatgcagaaggtggccctcttcaagctgcagagctactggctgcccaacttctacacccacaccaagatgaccatggccaaggaggaggcctgccacggcctgatgcaggagtatgagacccggctgtacagcgtgtgctacacccacatcggcggcctgcccctgaacatgagcatcaagaagtgccaccacttccagaagcgctacagcagcaggaaggccaagaggaagatgtggcagctggtggaccctgacagctggagcctggagatggacctgaagccagatgccatcggcatgcccctgcaggagacctgcccccaggagaaggtggtgatccagatgcccagcctgaagatggccagcagcaaggagacccgcatcagcagcctggagaaggacatgcactacgccaagatcagctccatggagaacaaggccaagagccacctgcacatggaggccccctttgagaccaaggtgtccacccacctgaggacagtcatccccatcgtgaaccacagcagcaagatgaccatccagaaggccatcaagcagagcttcagcctgggctacatccacctggccctgtgtgctgatgcctgtgccggcaaccccttccgggaccacctgaagaagctgaacctgaaggtggagatccagctgctggacctgtggcaggacctgcagcacttcctgtctgtgctgctgaacaacaagaagaatggaaatgccatcttccgccacctgctgggggaccgcatctgtgagctgtacctgaatgagcagatcggcccctgcctgcccctgaagagccagaccatccagggcctgaaggagctgctgcccagcggagatgtgatcccctggatccccaaggcccagaaggagatctgcaagatgctgagcccctggtatgatgagttcctggatgaggaggactactggttcctgctcttcaccacccagaaccgcttcatcagcagccggcagcacaagcgggagttcatcggcaaggaggagaacatcctgctgtacaagaggatccagcagagcctggagctgagccaggccctggccgacatgaaggagatggactaccggcagtggaggaagatcgccacagaggacctgaagcagggcggcagcctgcaggtggagctgaccagccctgtgttcctgacagacatcaccaagatgagctttgaggagctgtgctacaagaaccccaagatggccatccagaagatcagtgatgactacaagatctactgtgagaaggcccccaagattgacttcaagatggagatcatcaaggagaccaagacagtgagccgcagcaacaggaagatgagcctgctgaagaggaccctggtgaggaagcccagcatgaggcccaggaacctgacagaggtgctgctgaacacccagcacctggagttcttccgggagttcctgaaggagaggaaggccaagatccccctgcagttcctgacagctgtgcagaagatcagcattgagaccaatgagaagatctgcaagagcctgattgaaaatgtcatcaagaccttcttccagggccagctgagccctgaggagatgctgcagtgtgatgcccccatcatcaaggagatcgcctccatgagacatgtgaccaccagcaccctgctgaccctgcagggccacgtgatgaagagcattgaggagaagtggttcaaggactaccaggacctcttccccccccaccaccaggaggtggaggtgcagagcgaggtgcagatcagcagcaggaagcccagcaagatcgtgtccacctacctgcaggagagccagaagaagggctggatgaggatgatctccttcatccgctccttctgcaagtaccgccgcttcatgctgaaccccagcaagaggcaggagtttgaggactacctgcaccaggagatgcagaacagcaaagaaaacttcaccacagcccacaacaccagcggccgcagcgccccacccagcaccaacgtgcgctctgctgaccaggagaatggagagatcaccctggtgaagaggcgcatcttcggccaccgcatcatcaccgtgaactttgccatcaatgacctgtacttcttcagcgagatggagaagttcaatgacctggtgtcctctgcccacatgctgcaggtgaacagagcctacaatgaaaatgatgtgatcctgatgaggagcaagatgaacatcatccagaagctgttcctgaacagcgacatcccccccaagctgcgggtgaatgtgcctgagttccagaaggatgccatcctggccgccatcacagagggctacctggacagatctgtgttccacggggccatcatgtctgtgtttcctgtggtgatgtacttctggaagcgcttctgcttctggaaggccaccaggagctacctgcagtaccggggcaagaagttcaaggacaggaagagcccccccaagagcacagacaagtaccccttcagcagtggaggagacaatgccatcctgcgcttcaccctgctgcggggcatcgagtggctgcagccccagcgggaggccatcagctctgtgcagaacagcagcagcagcaagctgacccagccccggctggtggtgtctgccatgcagctgcaccctgtgcagggccagaagctgagctacatcaagaaggagaagtag

SEQ ID NO: 52619 - DNA, 3231 bp, Artificial Sequence
  derived and/or modified sequence
atgagcagcgccgagatcatcggcagcaccaacctgatcatcctgcttgaggacgaagtctttgcagacttttttaacacttttctgagcctcccagtgttcggacagaccccattttataccgtggaaaacagccagtggagcctttggccggaaatcccgtgcaatttgattgcaaaatataagggcttactaacttggctggagaagtgccgccttccgtttttctgcaaaacgaacctgtgtttccactatatcttatgccaagagtttatttcttttatcaagtcccctgagggaggagaggagctggtggacttttggatcctagcagagaatatcctgagcattgatgaaatggatcttgaggtccgcgattactatctgtctctgctgcttatgctccgcgctacgcacctgcaggagggaagtcgcgtcgtgactttgtgcaatatgaacataaaatccctcctgaacctgtcgatctggcaccccaatcagtccactactcgccgggagatcctgtcgcacatgcagaaggtcgctcttttcaaactgcagtcgtactggctgcctaacttttacacacatacaaagatgacaatggctaaggaagaggcgtgccacggattgatgcaggaatacgagacccggctctatagtgtttgttatacccatatcgggggcctcccgctgaatatgtcaattaagaaatgccaccacttccagaagcggtactcatcccgtaaagccaagaggaaaatgtggcagttagtggacccagactcttggtccctcgaaatggatctcaaaccagacgcgatcggcatgcctttgcaggagacatgtccccaagaaaaagtggtcattcagatgcccagcttaaaaatggcatctagtaaagagacccggatcagcagtttagaaaaagacatgcactacgctaagatttccagtatggaaaacaaggcaaaatcccacttgcacatggaagcacccttcgagaccaaggtttctacacatctgcgcaccgtcatccctatcgtgaaccactccagtaagatgactattcagaaagccatcaagcaatctttcagcttagggtatattcacctggccctttgcgccgatgcctgtgcaggcaacccctttagggaccatcttaaaaaactgaatctaaaggttgagatccagttactcgatctgtggcaggacctgcagcattttttaagcgtcctgctcaataacaagaagaacggcaatgctatctttcggcatctcctgggcgacagaatttgcgaactgtacctcaacgaacagatcggaccttgtctgccccttaagtcccagaccatccagggtttaaaagagctgctcccctctggagacgttattccctggattcccaaggctcaaaaagagatttgcaaaatgctctccccctggtatgatgagtttttggacgaagaagactattggttcctcttgtttacaacacagaaccgattcattagctcacgacagcacaagcgggagtttattggaaaggaagaaaacatcttgctgtataagcggatccagcagagcctcgaactcagccaggcactggccgacatgaaagagatggattatcgacagtggcggaaaattgccacggaggatcttaagcagggtgggagtcttcaggtggagctgacgtcccccgtgttcctgaccgatattaccaagatgagctttgaggagctgtgctataagaatccaaaaatggctattcaaaagatctccgacgactataaaatctactgtgaaaaagccccaaagatagattttaagatggagattattaaggagacaaagacggtgtctagatctaaccggaagatgtcactgttgaagagaacactcgtccgcaaaccctcgatgcgaccacgaaatttgaccgaagtcctgctgaatacacagcacttggagttcttccgggagttcttaaaggaacgcaaagctaaaatcccgctgcagttcctcaccgcagtgcagaagatttcaatcgaaacaaacgaaaagatttgcaaatcgctcatcgagaacgttatcaaaacctttttccaaggtcaactcagccctgaggaaatgctccagtgtgatgctcccataatcaaagaaattgccagcatgcgccacgtcacaacgtctacattactcaccctgcagggacacgtaatgaagagcattgaagaaaagtggtttaaggattatcaggatctgttccctccacaccatcaggaggtagaagtgcagtcggaagtccagatctcaagcagaaaaccaagtaaaatagtgtcgacgtacttgcaggagagtcagaagaagggctggatgaggatgatctcattcatccgcagcttctgcaaatacaggcgattcatgttaaatccatcaaaacgccaggaattcgaggactacttgcaccaagagatgcagaatagtaaagaaaactttaccactgctcacaacacttctgggcgctcagctcccccatcgaccaacgtcagatccgctgatcaggaaaacggcgaaattacgctcgttaagcggcgcatcttcggacatcggataattacagtcaatttcgcaattaatgatctctacttcttcagcgaaatggagaagttcaacgatctggtgtcctccgcacacatgctgcaggttaatcgggcgtacaacgaaaatgatgtgatcctaatgcgtagtaagatgaatattattcagaagctcttcttgaactccgacatcccacccaaactacgtgtcaatgttcctgagtttcagaaggacgcaatactcgcagccatcactgaaggctacctggaccggagcgtgttccacggagccatcatgtctgtttttcctgtagtgatgtatttttggaaacgcttctgtttctggaaagccactaggagctacctgcagtatcggggaaaaaagttcaaggaccgaaagtcccccccaaagagcacagacaaataccctttttcatccggaggagacaatgccattctaaggtttaccctgctccgaggaatcgaatggctgcagccacagcgtgaggctatctcaagcgtccaaaattcctccagtagtaagctgacacagcctagactggttgtctcagccatgcaactccatccagtgcaaggtcagaagttgtcctacatcaaaaaagagaagtag

SEQ ID NO: 52620 - DNA, 3231 bp, Artificial Sequence
  derived and/or modified sequence
atgtcttcggctgaaataattggtagcaccaatcttatcatcttgctggaggatgaagttttcgcagacttttttaacacctttttgagtttaccagtgtttggccagactcccttttatacagtggagaattcccaatggagcctgtggccagaaatcccatgcaacctgattgccaaatacaaggggttgttgacctggctcgaaaagtgcaggctcccctttttttgcaagacgaatctttgcttccactatatcttatgtcaagagttcataagtttcattaagtcgccggaggggggagaggaactggttgatttctggatcctcgctgaaaacatcctgagcatcgacgagatggacctggaggtgagagactattatctgtcactcctcctgatgctaagggcgacgcaccttcaggaaggctcgagagttgttacactgtgcaacatgaatatcaagtctctgctgaatctgagcatttggcaccccaatcagtcgactacacgcagagaaatattgtcccacatgcagaaagtggcacttttcaagctgcagtcgtactggcttccaaatttttacactcataccaagatgactatggctaaggaggaggcgtgtcacggcctgatgcaggagtacgaaactaggctctacagcgtctgttacacacacatcggtgggttacctctgaacatgtccataaagaagtgccatcattttcagaaaaggtactcctcccggaaggccaagcggaaaatgtggcagctcgtcgatccagactcatggtctttagaaatggacctaaaacccgacgccatcggtatgcctctccaggagacgtgtcctcaggagaaagtagtcatccagatgccttccctgaagatggcttcgagcaaggaaaccaggatctcctcactcgaaaaggacatgcattacgctaagatttctagtatggaaaacaaggctaaatcccacctgcatatggaagctcccttcgagaccaaagtaagcacacacctgcggactgtcattccaatcgtcaaccattcttcaaaaatgaccatccaaaaggctattaagcaatccttctcactgggttatatccacctggctctgtgcgcagacgcgtgcgcgggaaaccccttcagagatcacttgaagaaactgaaccttaaggtggagatacagctcctggacttgtggcaagatctgcaacacttcctgtcggtcctgttgaacaacaagaagaacggaaacgcgattttccgccatctgctcggcgaccgcatctgtgagctgtacctcaacgaacagatcggcccatgtcttccgctcaagtcccaaacaattcagggtctgaaagagctccttccttccggagacgttattccctggatcccaaaggcacagaaggaaatttgtaaaatgctcagtccttggtatgacgaattcctggacgaggaggactattggttcctgctgtttacaacccaaaataggtttatctcctccagacagcataagcgagaattcatcggaaaagaggaaaacatccttctctacaagagaattcaacagtcacttgagcttagccaagccctggctgatatgaaggagatggattacaggcaatggcgtaagatagcaactgaagatctgaagcaagggggaagcctgcaggtagaactcacatccccagtgttcctgaccgacatcactaaaatgagttttgaggagttatgctacaaaaaccctaaaatggcaatacagaagatttccgatgactacaaaatctactgtgagaaagcccctaagattgattttaaaatggagatcataaaagagacaaagacggtatcgagatccaatcgcaagatgagtctattgaagcggacccttgtgcgcaagccaagtatgagaccacggaatctgaccgaggtgctcctgaacacacaacatttggaattcttcagagagtttttgaaagagagaaaagccaagatcccccttcagtttctgaccgctgttcagaaaatttctatcgagaccaacgagaagatctgcaaatcactgattgagaacgtgatcaagaccttctttcagggacagctaagtcctgaggagatgcttcagtgcgatgcacccatcatcaaggaaatagcgtccatgagacatgttacaacctctactctgctgaccctgcagggacatgtcatgaagtctattgaggaaaaatggttcaaagattatcaggacctgtttccgccacaccatcaagaggtggaagtgcagtctgaagtccaaatctcatctcgcaaaccatcaaagatagtgtcaacttatttgcaagagagtcagaaaaaaggttggatgagaatgattagttttattcggtctttttgcaaatatcggagattcatgttaaatccaagcaagaggcaagaattcgaggattacctgcatcaggaaatgcagaactccaaggagaacttcacgaccgcccacaacacgtctggcagatcagcccctccatctaccaacgtccgttctgccgaccaggagaatggggagatcaccctcgtgaaacggagaatcttcggacatagaattattactgtgaattttgctatcaacgatctgtatttcttcagtgaaatggaaaaattcaatgacttggtgtcttccgcacacatgctgcaggtgaatcgggcttataacgaaaatgacgtgatccttatgaggtccaagatgaacattatccagaaactgttcttgaatagcgacatccccccaaaactgcgggtgaatgtgcccgaattccagaaggacgccatccttgcagccattaccgaggggtacctcgatcggtccgtgttccacggggcaatcatgtctgtatttccagtggtcatgtacttttggaaacgtttttgtttttggaaggccaccagatcctatcttcagtaccgtggcaaaaaattcaaggacaggaaatcgccacccaagagtactgataaataccccttctcaagcggcggagacaacgccatactccgttttactttgctgcgcggaatagagtggctgcagccacagagagaggctatctctagtgttcaaaacagctcgagcagcaaacttacccaacctcgactcgtggtgtcggccatgcagttgcacccagtccaggggcagaagctgtcctatattaagaaggaaaaatag

SEQ ID NO: 52621 - DNA, 3696 bp, Artificial Sequence
  derived and/or modified sequence
gtcaggaagagcatggcaacatgagcagtgctgagataattggttctacaaatcttataattctgctagaggatgaagtctttgccgattttttcaacacatttctttccctcccggtttttggtcagacaccattttatactgttgaaaattcacagtggagcttgtggccagaaataccttgtaacttgattgccaaatacaaagggttattgacctggttggaaaaatgccgattacctttcttctgtaaaacaaacttgtgtttccattacattctctgtcaggagttcatcagtttcattaagtccccagaaggaggtgaagaattggtggatttctggatccttgctgagaacatcctgagcatagatgagatggacctggaagtgagagactactacctgtccctcctcctcatgctgagggccactcatctgcaggagggctccagggtggtaaccctctgtaacatgaacatcaagtccctcctgaacctctccatctggcatcccaaccaatcaaccactaggagggagatcctgagccacatgcagaaagtggctctgttcaaactccagagctattggcttcccaacttttacacccacaccaagatgaccatggccaaggaggaagcatgccatggtctgatgcaagagtacgagactcgcttatacagcgtttgctacacccacataggagggctccctctgaacatgagcatcaagaagtgccaccactttcagaaacggtactcaagcaggaaagccaagaggaagatgtggcaattggtagatcctgactcttggtctctggaaatggatctcaagccagatgctattggtatgcccctacaggagacatgtcctcaagagaaggtggttatacaaatgccttccctgaaaatggcttcttcaaaggaaacaagaatcagttccctggaaaaggatatgcattatgcaaaaatatccagcatggagaataaagccaagagccacctccacatggaagccccctttgagacaaaggtctctacccacctgaggactgtcatccccattgtcaatcactcctccaagatgacaattcagaaggccatcaagcaaagcttctccttaggatacatccacttggccttgtgtgctgatgcctgtgcagggaaccctttccgggaccacctgaagaagctgaatttgaaagtggagatccaacttcttgacctctggcaggacttgcagcatttcctcagtgtccttctgaataacaaaaagaatgggaatgcaatctttcgtcacttgctgggtgacagaatctgcgagctctacctgaatgagcagattggtccgtgcttaccactcaaatcccaaaccattcagggcctgaaggaactattgccctctggggatgtgatcccctggattcccaaagcccagaaggagatttgcaagatgctcagtccctggtatgatgagtttctagatgaagaggactactggtttctcctttttacgacacagaacaggttcatcagctccagacagcataaaagagaatttataggcaaagaagagaacattcttctttataagaggattcagcagtctctagagttaagccaggctttggctgacatgaaggaaatggactataggcagtggcgaaagatagctactgaggacctgaagcaaggaggctctctccaggtagagctgacatctccagtgtttctaacagacataactaaaatgtcctttgaggagctttgctacaagaacccaaagatggccatacagaagatcagtgatgactacaaaatatactgtgagaaagcacctaaaatagattttaaaatggaaattatcaaggaaacaaagacagtttcacgctcaaataggaaaatgtccttgctcaaaagaactcttgtaaggaagccatcaatgagacccagaaacttgacagaagtcctcttaaatacacagcacttggagttcttcagggagttcctcaaggaacggaaggctaaaatcccattgcaatttctcacagctgtacagaagatcagtatagagaccaatgaaaagatttgcaagtctctcatagaaaatgtaatcaagactttcttccaaggccaactctctcctgaagaaatgctgcagtgtgatgcccctattatcaaagaaatcgcttccatgcgtcatgtcaccacaagcacactgttaacgctccagggacatgttatgaaatctatagaagaaaagtggtttaaagattatcaagacctgttcccacctcaccatcaggaggtggaagtgcaaagtgaagtacaaatttcgtctaggaagccctcaaagatagtgtcaacttacctacaggaatcccagaagaaaggctggatgagaatgatcagctttatcaggagtttttgcaagtaccgcagatttatgttgaatcctagtaagcgccaggaatttgaagactatcttcaccaggaaatgcaaaatagcaaggaaaatttcaccacagcacacaacacatcgggacgttcagctccaccctccacaaatgtccggagtgcagaccaagagaatggagaaataacccttgtaaagcgtcgtatatttggccacaggattatcactgtcaactttgcgatcaatgatctatatttcttttctgaaatggagaaatttaatgatctggtcagttcagcccacatgctgcaggtcaaccgggcatataatgagaatgatgtgatcctaatgcggtccaaaatgaacattatccaaaaactcttcctgaattctgacatccctccaaagctgagggtgaatgtccctgagttccagaaggatgccatccttgctgccatcacagagggctacctagatcggagcgtcttccatggggctatcatgtctgtcttccccgttgttatgtacttctggaaaaggttttgtttctggaaggcaacccgctcttacttacagtatagggggaagaagttcaaggacagaaaaagccctcctaaatctacggacaagtatcctttctcgagtggaggagacaatgccatcttaaggttcaccttgctcagaggtattgagtggttgcagcctcaacgggaagcaataagttcagttcaaaattcttcatcaagcaaacttactcagccaagactcgtggtatctgccatgcagctgcatcccgtccagggacaaaaattatcctacatcaaaaaagagaagtaatcaagcgagacccccagcagagataaatcatctcttagaggcctcctaacactgacagaaacttttctggtcaaaaatgaaaggtcctggtaccatcttccccagaaacgatcaagaagggcaatgggttgacagcccagatatggcaggaccagactgcaatgggaatctcatacagcccattcagactaaagggtgatggaaagaagcagaggaaagcagaaacagcaagagtgactgagacctgctgtcatctatatagaagcctttctgatacatgtcagagagtgacatgaagtctcccctctttatacacacgtatgaaaatacatctatccctcattttgagagcctccaactgatccaagtgtcatccggaggaggaggtggcccgtatgtgcaggacctcagggtgccagccctcacccatacacctccagggctg
